United States Patent Application Publication US 2018/0126003 A1 - sequence listing, part 27

SEQ ID NO: 44526 - DNA, 6009 bp, Artificial Sequence
  derived and/or modified sequence
atggagcaggacaggaccaaccacgtggagggcaaccggctgagccccttcctgatccccagcccccccatctgccagacagagcccctggccaccaagctgcagaatggcagccccctgcctgagcgggcccaccctgaggtgaatggagacaccaagtggcacagcttcaagagctactacggcatcccctgcatgaagggcagccagaacagccgggtgtccccagacttcacccaggagagccggggctacagcaagtgcctgcagaatggaggcatcaagaggacagtgtctgagcccagcctgagcggcctgctgcagatcaagaagctgaagcaggaccagaaggccaatggagagaggaggaactttggagtgtcccaggagagaaatcctggagagagcagccagcccaacgtgtctgacctgagtgacaagaaggagagcgtgtcctctgtggcccaggagaatgctgtgaaggacttcaccagcttcagcacccacaactgcagcggcccagaaaatcctgagctgcagatcctgaatgagcaggagggcaagagcgccaactaccatgacaagaacatcgtgctgctgaagaacaaggctgtgctgatgcccaatggagccaccgtgtctgccagctctgtggagcacacccacggggagctgctggagaagaccctgagccagtactacccagactgtgtgtccattgctgtgcagaagaccaccagccacatcaatgccatcaacagccaggccaccaatgagctgagctgtgagatcacccaccccagccacaccagcggccagatcaacagcgcccagaccagcaacagcgagctgccccccaagccagctgctgtggtgtctgaggcctgtgatgctgatgatgctgacaatgccagcaagctggccgccatgctgaacacctgcagcttccagaagccagagcagctgcagcagcagaagtctgtgtttgagatctgccccagccctgctgagaacaacatccagggcaccaccaagctggccagcggggaggagttctgcagcggcagcagcagcaacctgcaggcccctgggggcagcagcgagcgctacctgaagcagaatgagatgaatggagcctacttcaagcagagctctgtgttcaccaaggacagcttcagcgccaccaccaccccacctccacccagccagctgctgctgagccccccaccacccctgccccaggtgccccagctgcccagcgagggcaagagcaccctgaatggaggagtgctggaggagcaccaccactaccccaaccagagcaacaccaccctgctgcgggaggtgaagattgagggcaagccagaggccccacccagccagagccccaaccccagcacccacgtgtgcagccccagccccatgctgtctgagcggccccagaacaactgtgtgaacagaaatgacatccagacagctggcaccatgacagtgcccctgtgcagcgagaagacccggcccatgtctgagcacctgaagcacaacccccccatcttcggcagcagcggggagctgcaggacaactgccagcagctgatgaggaacaaggagcaggagatcctgaagggccgggacaaggagcagacccgggacctggtgccccccacccagcactacctgaagccaggctggattgagctgaaggccccccgcttccaccaggccgagagccacctgaagagaaatgaggccagcctgcccagcatcctgcagtaccagcccaacctgagcaaccagatgaccagcaagcagtacacaggcaacagcaacatgcctgggggcctgccccggcaggcctacacccagaagaccacccagctggagcacaagagccagatgtaccaggtggagatgaaccagggccagagccagggcaccgtggaccagcacctgcagttccagaagcccagccaccaggtgcacttcagcaagacagaccacctgcccaaggcccacgtgcagagcctgtgtggcacccgcttccacttccagcagagagctgacagccagacagagaagctgatgagccctgtgctgaagcagcacctgaaccagcaggccagcgagacagagcccttcagcaacagccacctgctgcagcacaagccccacaagcaggccgcccagacccagcccagccagagcagccacctgccccagaaccagcagcagcagcagaagctgcagatcaagaacaaggaggagatcctgcagaccttcccccacccccagagcaacaatgaccagcagcgggagggcagcttcttcggccagaccaaggtggaggagtgcttccacggggagaaccagtacagcaagagcagcgagtttgagacccacaacgtgcagatgggcctggaggaggtgcagaacatcaacagaagaaacagcccctacagccagaccatgaagagcagcgcctgcaagatccaggtgtcctgcagcaacaacacccacctggtgtctgagaacaaggagcagaccacccaccctgagctgtttgctggcaacaagacccagaacctgcaccacatgcagtacttccccaacaacgtcatccccaagcaggacctgctgcaccgctgcttccaggagcaggagcagaagagccagcaggcctctgtgctgcagggctacaagaacagaaaccaggacatgagcggccagcaggccgcccagctggcccagcagcgctacctgatccacaaccacgccaacgtgtttcctgtgcctgaccagggcggcagccacacccagaccccaccccagaaggacacccagaagcacgccgccctgcgctggcacctgctgcagaagcaggagcagcagcagacccagcagccccagacagagagctgccacagccagatgcaccggcccatcaaggtggagcccggctgcaagccccacgcctgcatgcacacagcccccccagagaacaagacctggaagaaggtgaccaagcaggagaaccccccagccagctgtgacaacgtgcagcagaagagcatcatcgagaccatggagcagcacctgaagcagttccacgccaagagcctgtttgaccacaaggccctgaccctgaagagccagaagcaggtgaaggtggagatgagcggccctgtgacagtgctgacccggcagaccacagctgctgagctggacagccacaccccagccctggagcagcagaccaccagcagcgagaagacccccaccaagaggacagctgcctctgtgctgaacaacttcatcgagagccccagcaagctgctggacacccccatcaagaacctgctggacacccctgtgaagacccagtatgacttccccagctgccgctgtgtggagcagatcatcgagaaggatgagggccccttctacacccacctgggcgccggccccaacgtggccgccatccgggagatcatggaggagcgcttcggccagaagggcaaggccatcagaattgaaagagtcatctacacaggcaaggagggcaagagcagccagggctgccccatcgccaagtgggtggtgagaagaagcagcagcgaggagaagctgctgtgcctggtgcgggagagagctggccacacctgtgaggccgccgtcatcgtcatcctgatcctggtgtgggagggcatccccctgagcctggccgacaagctgtacagcgagctgacagagaccctgaggaaatatggcaccctgaccaacagaagatgtgccctgaatgaggagaggacctgtgcctgccagggcctggaccctgagacctgtggggccagcttctcctttggctgctcctggagcatgtactacaacggctgcaagtttgcccggagcaagatccccaggaagttcaagctgctgggagatgaccccaaggaggaggagaagctggagagccacctgcagaacctgagcaccctgatggcccccacctacaagaagctggccccagatgcctacaacaaccagattgaatatgagcaccgggccccagaatgtcggctgggcctgaaggagggccggcccttctctggagtgacagcctgcctggacttctgtgcccacgcccaccgggacctgcacaacatgcagaatggcagcaccctggtgtgcaccctgacccgggaggacaaccgggagtttggaggcaagccagaagatgagcagctgcacgtgctgcccctgtacaaggtgtctgatgtggatgaatttggatctgtggaggcccaggaggagaagaagaggtctggggccatccaggtgctgagcagcttccggaggaaggtgaggatgctggccgagcctgtgaagacctgccggcagaggaagctggaggccaagaaggctgctgctgagaagctgagcagcctggagaacagcagcaacaagaatgagaaggagaagagcgcccccagcaggaccaagcagacagaaaatgccagccaggccaagcagctggccgagctgctgcggctgagcggccctgtgatgcagcagagccagcagccccagcccctgcagaagcagcccccccagccccagcagcagcagaggccccagcagcagcagccccaccacccccagacagagagcgtgaacagctacagcgccagcggcagcaccaacccctacatgagaagacccaaccctgtgagcccctaccccaacagcagccacaccagtgacatctacggcagcaccagccccatgaacttctacagcaccagcagccaggccgccggcagctacctgaacagcagcaaccccatgaacccctacccaggcctgctgaaccagaacacccagtaccccagctaccagtgcaatggaaacctgtctgtggacaactgcagcccctacctgggcagctacagcccccagagccagcccatggacctgtaccgctaccccagccaggaccccctgagcaagctgagcctgccccccatccacaccctgtaccagcccaggtttggaaacagccagagcttcaccagcaagtacctgggctacggcaaccagaacatgcagggagatggcttcagcagctgcaccatccggcccaacgtgcaccacgtgggcaagctgcccccctaccccacccatgagatggatggccacttcatgggcgccaccagccggctgccccccaacctgagcaaccccaacatggactacaagaatggagagcaccacagccccagccacatcatccacaactacagcgctgcccctggcatgttcaacagcagcctgcacgccctgcacctgcagaacaaggaaaatgacatgctgagccacacagccaacggcctgagcaagatgctgcctgccctgaaccacgacagaacagcctgtgtgcagggcggcctgcacaagctgagtgatgccaacggccaggagaagcagcccctggccctggtgcagggcgtggccagcggggctgaagataatgatgaggtgtggagcgacagcgagcagagcttcctggaccctgacattggaggagtggccgtggcccccacccacggcagcatcctgattgaatgtgccaagcgggagctgcacgccaccacccccctgaagaaccccaacagaaaccaccccacccgcatcagcctggtgttctaccagcacaagtccatgaatgagcccaagcacggcctggccctgtgggaggccaagatggccgagaaggcccgggagaaggaggaggagtgtgagaagtatggccctgactatgtgccccagaagagccacggcaagaaggtgaagcgggagcctgctgagccccatgagaccagcgagcccacctacctgcgcttcatcaagagcctggccgagaggaccatgtctgtgaccacagacagcacagtgaccaccagcccctatgccttcaccagggtgacaggcccctacaaccgctacatctag

SEQ ID NO: 44527 - DNA, 1914 bp, Artificial Sequence
  derived and/or modified sequence
atggagcaggacaggaccaaccacgtggagggcaaccggctgagccccttcctgatccccagcccccccatctgccagacagagcccctggccaccaagctgcagaatggcagccccctgcctgagcgggcccaccctgaggtgaatggagacaccaagtggcacagcttcaagagctactacggcatcccctgcatgaagggcagccagaacagccgggtgtccccagacttcacccaggagagccggggctacagcaagtgcctgcagaatggaggcatcaagaggacagtgtctgagcccagcctgagcggcctgctgcagatcaagaagctgaagcaggaccagaaggccaatggagagaggaggaactttggagtgtcccaggagagaaatcctggagagagcagccagcccaacgtgtctgacctgagtgacaagaaggagagcgtgtcctctgtggcccaggagaatgctgtgaaggacttcaccagcttcagcacccacaactgcagcggcccagaaaatcctgagctgcagatcctgaatgagcaggagggcaagagcgccaactaccatgacaagaacatcgtgctgctgaagaacaaggctgtgctgatgcccaatggagccaccgtgtctgccagctctgtggagcacacccacggggagctgctggagaagaccctgagccagtactacccagactgtgtgtccattgctgtgcagaagaccaccagccacatcaatgccatcaacagccaggccaccaatgagctgagctgtgagatcacccaccccagccacaccagcggccagatcaacagcgcccagaccagcaacagcgagctgccccccaagccagctgctgtggtgtctgaggcctgtgatgctgatgatgctgacaatgccagcaagctggccgccatgctgaacacctgcagcttccagaagccagagcagctgcagcagcagaagtctgtgtttgagatctgccccagccctgctgagaacaacatccagggcaccaccaagctggccagcggggaggagttctgcagcggcagcagcagcaacctgcaggcccctgggggcagcagcgagcgctacctgaagcagaatgagatgaatggagcctacttcaagcagagctctgtgttcaccaaggacagcttcagcgccaccaccaccccacctccacccagccagctgctgctgagccccccaccacccctgccccaggtgccccagctgcccagcgagggcaagagcaccctgaatggaggagtgctggaggagcaccaccactaccccaaccagagcaacaccaccctgctgcgggaggtgaagattgagggcaagccagaggccccacccagccagagccccaaccccagcacccacgtgtgcagccccagccccatgctgtctgagcggccccagaacaactgtgtgaacagaaatgacatccagacagctggcaccatgacagtgcccctgtgcagcgagaagacccggcccatgtctgagcacctgaagcacaacccccccatcttcggcagcagcggggagctgcaggacaactgccagcagctgatgaggaacaaggagcaggagatcctgaagggccgggacaaggagcagacccgggacctggtgccccccacccagcactacctgaagccaggctggattgagctgaaggccccccgcttccaccaggccgagagccacctgaagagaaatgaggccagcctgcccagcatcctgcagtaccagcccaacctgagcaaccagatgaccagcaagcagtacacaggcaacagcaacatgcctgggggcctgccccggcaggcctacacccagaagaccacccagctgagcaccagccacaagtgcaccaagctgaagtag

SEQ ID NO: 44528 - DNA, 6072 bp, Artificial Sequence
  derived and/or modified sequence
atgatccaggaggagcagatccagctggagggcagcctggtggatggccctgaggccagcctgatggagcaggacaggaccaaccacgtggagggcaaccggctgagccccttcctgatccccagcccccccatctgccagacagagcccctggccaccaagctgcagaatggcagccccctgcctgagcgggcccaccctgaggtgaatggagacaccaagtggcacagcttcaagagctactacggcatcccctgcatgaagggcagccagaacagccgggtgtccccagacttcacccaggagagccggggctacagcaagtgcctgcagaatggaggcatcaagaggacagtgtctgagcccagcctgagcggcctgctgcagatcaagaagctgaagcaggaccagaaggccaacggggagaggaggaactttggagtgtcccaggagaggaaccctggagagagcagccagcccaacgtgtctgacctgagtgacaagaaggagagcgtgtcctctgtggcccaggagaatgctgtgaaggacttcaccagcttcagcacccacaactgcagcggccctgagaaccctgagctgcagatcctgaatgagcaggagggcaagagcgccaactaccatgacaagaacatcgtgctgctgaagaacaaggctgtgctgatgcccaacggggccaccgtgtctgccagctctgtggagcacacccatggagagctgctggagaagaccctgagccagtactacccagactgtgtgtccattgctgtgcagaagaccaccagccacatcaatgccatcaacagccaggccaccaatgagctgagctgtgagatcacccaccccagccacaccagcggccagatcaacagcgcccagaccagcaacagcgagctgccccccaagccagctgctgtggtgtctgaggcctgtgatgctgatgatgctgacaatgccagcaagctggccgccatgctgaacacctgcagcttccagaagccagagcagctgcagcagcagaagtctgtgtttgagatctgccccagccctgctgagaacaacatccagggcaccaccaagctggccagcggggaggagttctgcagcggcagcagcagcaacctgcaggcccctgggggcagcagcgagcgctacctgaagcagaatgagatgaatggagcctacttcaagcagagcagcgtcttcaccaaggacagcttcagcgccaccaccaccccacctccacccagccagctgctgctgagccccccaccacccctgccccaggtgccccagctgcccagcgagggcaagagcaccctgaatggaggagtgctggaggagcaccaccactaccccaaccagagcaacaccaccctgctgcgggaggtgaagattgagggcaagccagaggccccacccagccagagccccaaccccagcacccacgtgtgcagccccagccccatgctgtctgagcggccccagaacaactgtgtgaacagaaatgacatccagacagctggcaccatgacagtgcccctgtgcagcgagaagacccggcccatgtctgagcacctgaagcacaacccccccatcttcggcagcagtggagagctgcaggacaactgccagcagctgatgaggaacaaggagcaggagatcctgaagggccgggacaaggagcagacccgggacctggtgccccccacccagcactacctgaagccaggctggattgagctgaaggccccccgcttccaccaggccgagagccacctgaagagaaatgaggccagcctgcccagcatcctgcagtaccagcccaacctgagcaaccagatgaccagcaagcagtacacaggcaacagcaacatgcctgggggcctgccccggcaggcctacacccagaagaccacccagctggagcacaagagccagatgtaccaggtggagatgaaccagggccagagccagggcaccgtggaccagcacctgcagttccagaagcccagccaccaggtgcacttcagcaagacagaccacctgcccaaggcccacgtgcagagcctgtgtggcacccgcttccacttccagcagagagctgacagccagacagagaagctgatgagccctgtgctgaagcagcacctgaaccagcaggccagcgagacagagcccttcagcaacagccacctgctgcagcacaagccccacaagcaggccgcccagacccagcccagccagagcagccacctgccccagaaccagcagcagcagcagaagctgcagatcaagaacaaggaggagatcctgcagaccttcccccacccccagagcaacaatgaccagcagcgggagggcagcttcttcggccagaccaaggtggaggagtgcttccatggagagaaccagtacagcaagagcagcgagtttgagacccacaacgtgcagatgggcctggaggaggtgcagaacatcaacagaagaaacagcccctacagccagaccatgaagagcagcgcctgcaagatccaggtgtcctgcagcaacaacacccacctggtgtctgagaacaaggagcagaccacccaccctgagctgtttgctggcaacaagacccagaacctgcaccacatgcagtacttccccaacaacgtcatccccaagcaggacctgctgcaccgctgcttccaggagcaggagcagaagagccagcaggcctctgtgctgcagggctacaagaacagaaaccaggacatgagcggccagcaggccgcccagctggcccagcagcgctacctgatccacaaccacgccaacgtgtttcctgtgcctgaccagggcggcagccacacccagaccccaccccagaaggacacccagaagcatgctgccctgcgctggcacctgctgcagaagcaggagcagcagcagacccagcagccccagacagagagctgccacagccagatgcaccggcccatcaaggtggagcccggctgcaagccccacgcctgcatgcacacagcccctcctgagaacaagacctggaagaaggtgaccaagcaggagaaccccccagccagctgtgacaacgtgcagcagaagagcatcatcgagaccatggagcagcacctgaagcagttccacgccaagagcctgtttgaccacaaggccctgaccctgaagagccagaagcaggtgaaggtggagatgagcggccctgtgacagtgctgacccggcagaccacagctgctgagctggacagccacaccccagccctggagcagcagaccaccagcagcgagaagacccccaccaagaggacagctgcctctgtgctgaacaacttcatcgagagccccagcaagctgctggacacccccatcaagaacctgctggacacccctgtgaagacccagtatgacttccccagctgccgctgtgtggagcagatcatcgagaaggatgagggccccttctacacccacctgggcgccggccccaacgtggccgccatccgggagatcatggaggagagatttggccagaagggcaaggccatccgcatcgagagggtcatctacaccgggaaggagggcaagagcagccagggctgccccatcgccaagtgggtggtgcggcgcagcagcagcgaggagaagctgctgtgcctggtgcgggagcgggccggccacacctgtgaggccgctgtgattgtcatcctgatcctggtgtgggagggcatccccctgagcctggccgacaagctgtacagcgagctgacagagaccctgaggaaatatggcaccctgaccaacagaagatgtgccctgaatgaggagaggacctgtgcctgccagggcctggaccctgagacctgtggggccagcttctcctttggctgctcctggagcatgtactacaacggctgcaagtttgcccggagcaagatccccaggaagttcaagctgctgggagatgaccccaaggaggaggagaagctggagagccacctgcagaacctgagcaccctgatggcccccacctacaagaagctggccccagatgcctacaacaaccagatcgagtatgagcaccgggcccctgagtgccgcctgggcctgaaggagggccggcccttcagcggcgtgacagcctgcctggacttctgtgcccacgcccaccgggacctgcacaacatgcagaatggcagcaccctggtgtgcaccctgacccgggaggacaaccgggagtttggaggcaagccagaagatgagcagctgcacgtgctgcccctgtacaaggtgtctgatgtggatgaatttggatctgtggaggcccaggaggagaagaagaggtctggggccatccaggtgctgagcagcttccggaggaaggtgaggatgctggccgagcctgtgaagacctgccggcagaggaagctggaggccaagaaggctgctgctgagaagctgagcagcctggagaacagcagcaacaagaatgagaaggagaagagcgcccccagcaggaccaagcagacagaaaatgccagccaggccaagcagctggccgagctgctgcggctgagcggccctgtgatgcagcagagccagcagccccagcccctgcagaagcagcccccccagccccagcagcagcagaggccccagcagcagcagccccaccacccccagacagaatctgtgaacagctacagcgccagcggcagcaccaacccctacatgaggcggcccaaccctgtgagcccctaccccaacagcagccacaccagtgacatctacggcagcaccagccccatgaacttctacagcaccagcagccaggccgccggcagctacctgaacagcagcaaccccatgaacccctacccaggcctgctgaaccagaacacccagtaccccagctaccagtgcaatggaaacctgtctgtggacaactgcagcccctacctgggcagctacagcccccagagccagcccatggacctgtaccgctaccccagccaggaccccctgagcaagctgagcctgccccccatccacaccctgtaccagccccgcttcggcaacagccagagcttcaccagcaagtacctgggctacggcaaccagaacatgcagggagatggcttcagcagctgcaccatccggcccaacgtgcaccacgtgggcaagctgcccccctaccccacccatgagatggatggccacttcatgggcgccaccagccggctgccccccaacctgagcaaccccaacatggactacaagaatggagagcaccacagccccagccacatcatccacaactacagcgctgcccctggcatgttcaacagcagcctgcacgccctgcacctgcagaacaaggaaaatgacatgctgagccacacagccaacggcctgagcaagatgctgcctgccctgaaccacgacagaacagcctgtgtgcagggcggcctgcacaagctgagtgatgccaacggccaggagaagcagcccctggccctggtgcagggcgtggccagcggggctgaggacaatgatgaggtgtggagcgacagcgagcagagcttcctggaccctgacatcggcggcgtggccgtggcccccacccacggcagcatcctgattgaatgtgccaagcgggagctgcacgccaccacccccctgaagaaccccaacagaaaccaccccacccgcatcagcctggtgttctaccagcacaagtccatgaatgagcccaagcacggcctggccctgtgggaggccaagatggccgagaaggcccgggagaaggaggaggagtgtgagaagtatggccctgactatgtgccccagaagagccacggcaagaaggtgaagcgggagcctgctgagccccatgagaccagcgagcccacctacctgcgcttcatcaagagcctggccgagaggaccatgtctgtgaccacagacagcacagtgaccaccagcccctatgccttcaccagggtgacaggcccctacaaccgctacatctag

SEQ ID NO: 44529 - DNA, 6009 bp, Artificial Sequence
  derived and/or modified sequence
atggagcaggaccggaccaaccacgtggagggcaaccggctgagccccttcctgatcccctccccacctatctgccagacagagcctctggctaccaaactgcagaacgggagtcctcttccagagcgtgcccatcccgaagttaacggggacacgaagtggcacagctttaagtcctactatggcatcccatgtatgaagggctcgcagaattctagggtctcacccgactttacccaggaatcaaggggctatagtaagtgcctgcaaaacggagggataaaacgcacggtatccgaaccttccttgagcgggttgctgcagattaagaagcttaagcaagatcaaaaagctaatggggagcgacggaactttggagtgtctcaggagagaaaccccggcgaaagcagtcaacccaacgtgagcgatctgtctgacaaaaaagaatcagtctcctcggttgcacaggaaaacgctgtcaaggattttactagtttcagcacccacaactgttctggacccgaaaacccggaactgcagattcttaacgaacaggagggtaaaagtgccaactatcatgataagaacattgttttactcaagaataaagctgtgctgatgccaaatggggccaccgtgtcagcgagttccgtcgagcatacacatggcgagctcctggagaaaactctcagtcagtactaccccgactgcgtcagcatcgccgtgcagaagaccaccagtcacataaatgctattaatagccaagccactaatgagctcagctgcgagataacccatcccagtcatacctctggacagattaactcagcccagacatccaacagcgagttgccgcccaagcctgctgccgtagtctccgaggcatgtgacgcggatgatgctgacaatgcatcgaaactagctgccatgctgaacacatgcagcttccagaaacctgagcagctgcagcagcagaaatcagtatttgagatttgcccttctcccgctgagaacaatattcagggcactaccaagctcgcctcaggcgaggagttttgcagcggatcttcctccaatctgcaagctcccggcggaagttctgaaagatacctgaagcagaacgaaatgaacggtgcttactttaaacaaagttccgtgttcaccaaggatagtttcagtgccaccaccaccccaccccctccatcacagctgttgctcagccccccccccccattgccacaggtacctcagttacctagcgagggtaaaagtaccctaaacggaggggtgctggaagaacatcaccactaccccaaccaaagcaacaccactctactgagagaggtgaaaattgagggtaagcccgaggcgccccctagccagtctcctaatcccagtactcatgtgtgctccccaagcccaatgctgtctgagagaccccagaacaactgtgtaaatcgcaacgacatacaaacggctggcactatgacagtgccactgtgttctgaaaagaccaggcccatgagcgagcacctgaagcacaaccccccaatttttgggtcttccggcgagcttcaggataattgccagcagctgatgagaaacaaagagcaggaaatcttaaagggccgagataaagagcaaacaagagacctggtacccccaacccagcattacttaaaacccgggtggatcgagttaaaggcccctagattccaccaggcagagagccacttgaaacggaatgaggcatccttaccttcaatcctacagtatcagcctaatctcagtaatcagatgacctccaagcaatacaccgggaactccaacatgccgggtggcctcccacgacaagcctatacacagaagactacccagctggagcacaagagtcagatgtaccaggtggagatgaatcaagggcagtcacagggaaccgtggaccagcacttacaatttcagaaaccaagccatcaggtacatttctcgaaaaccgaccatctgcccaaagcacacgtgcaaagcctgtgtggcacaaggtttcacttccagcaacgcgctgactcccagactgagaagttgatgtccccagtgctgaaacagcatcttaatcagcaggcaagcgagacagagccgttttctaactctcatctattgcagcataagcctcacaagcaagctgcccaaacgcaaccttcacaaagcagtcatttgcctcagaaccaacagcagcagcagaaattgcagattaagaataaggaggagattctgcaaacattcccacatccgcaatcaaacaacgaccagcagcgggagggaagcttttttggacaaaccaaagtggaagaatgcttccacggggagaatcagtatagtaagagttcagagttcgagacccacaacgtgcagatggggctcgaagaagttcagaatatcaaccgcagaaattcaccttatagccaaaccatgaaaagctcagcctgtaaaatacaggtgagttgcagcaacaatacacaccttgtgtctgaaaataaagaacagacgacacaccccgaactctttgcaggtaacaagacacaaaacctgcaccacatgcagtatttccccaacaatgtgatccccaaacaggatctgctgcaccggtgtttccaagaacaagagcagaagagccagcaggcctccgtcctccaaggatacaaaaatagaaatcaagacatgagcgggcagcaggctgctcagttggctcaacagcgctacctcatacacaaccacgctaacgtgtttcctgtgcccgaccagggagggtcccatacccaaaccccaccgcaaaaagacacgcagaagcacgctgccctgcgttggcatctcctgcagaagcaggaacagcaacagacccagcaaccgcagaccgagtcctgccattctcagatgcatagaccaataaaagtggaaccgggctgcaaaccgcacgcttgcatgcatacagccccgcccgaaaataaaacttggaagaaggttacaaagcaggaaaacccacccgcaagttgtgataatgttcagcagaaaagtatcatcgaaaccatggagcagcacctgaagcagtttcacgctaaatcactctttgaccataaagctctcactctgaaaagccagaagcaggtgaaggttgagatgagtggccccgtgacggtcctgacaagacagactacagcagctgagctggacagccacacgcccgccctcgaacaacagacaaccagtagtgagaagacgcctacgaagcgcactgccgccagcgtcctgaacaattttatcgagagcccaagcaaactgctggacacaccgatcaaaaacctactcgatactcctgtcaaaacacagtatgactttccatcctgcagatgtgtagagcagattatcgagaaagacgagggacccttttatactcacttaggtgccgggcctaacgtggcagctattagagaaattatggaggagaggtttggccagaaggggaaagctataaggatcgagagagtgatttacacggggaaggaaggtaagtccagtcagggttgcccaattgccaaatgggtcgtccgtagatcatcctctgaggagaagctgctttgtctggtgagggaacgggccggacacacttgcgaagctgcagtgattgttatcctgatccttgtgtgggagggcatccccctgtctttagcggataagctgtactccgagctgacagaaacattaagaaagtacggcaccctaaccaatcgaaggtgtgcccttaatgaggagaggacctgtgcttgtcagggcctggacccagagacctgtggcgcaagctttagtttcgggtgttcttggagtatgtactataacggttgcaagtttgcaagatccaaaattccccggaaatttaaactcttgggggatgatcccaaggaagaagagaagcttgaaagccacctgcaaaacctctcaaccctcatggcacctacatataagaagctggccccagacgcatacaataatcagatcgaatacgagcatcgagctcccgaatgtagactcgggttgaaggaaggcagacctttttcgggggtaacagcctgtctggacttctgcgcccacgcgcacagggatctccacaacatgcagaacggcagcaccctggtgtgcaccctgacgcgcgaggataaccgcgaattcggcggcaagcccgaggatgaacagctgcacgttctgccactgtacaaggtgtccgacgtggatgagtttgggagcgtggaagcccaggaagagaagaagcgcagtggagcaattcaggtcttgagctctttcaggagaaaggtcaggatgttggctgagcccgtcaaaacatgcaggcagcggaagctcgaggcgaagaaagctgccgctgagaagctgtctagcctggagaattcgtcgaacaagaacgagaaagagaagagtgccccttctagaacaaagcagactgagaatgcatctcaagcaaaacagcttgctgagttacttcgtctctctggcccggtgatgcagcagtcccagcagccccaaccactccagaagcaaccaccccagcctcaacagcagcagcgtccccagcagcagcaaccacaccacccccagactgaatccgtgaattcctatagtgctagtggatccaccaatccgtacatgcgaagacctaatcctgtctccccatatcctaactcctcccacaccagcgacatctacgggagtacctcccctatgaatttctactcgaccagcagccaggcagcaggatcctacttgaactcctccaaccccatgaacccatatcctgggttgctgaaccagaacactcagtatccctcctaccaatgtaacgggaatttgagcgtagacaattgtagtccttatcttgggtcctattcgccacagtcccaaccaatggatttgtataggtaccccagccaagacccactgtcgaaactcagtttgccacctatccatactttgtaccagccccgcttcggcaacagtcagtcatttacgtctaagtatttggggtacggaaatcagaacatgcagggggatggcttcagctcttgtacgattcgtccgaacgtacatcatgtcggaaaactgcctccttaccctacccacgagatggatggccatttcatgggtgccaccagtcgcctcccaccaaatctgtccaacccgaatatggattataagaacggtgagcatcattcgccatcccatatcatccataattacagcgctgctcccggcatgtttaacagttcactgcacgccctacatctccagaacaaagaaaacgacatgctgtctcacaccgctaatggcctcagtaagatgttaccggcactcaatcacgatagaactgcatgtgtgcagggaggcctgcacaaactctccgacgccaatggccaagagaaacagccccttgctttagtacagggagtggcatcaggtgccgaagacaacgatgaagtgtggtccgattccgagcagagttttctcgaccccgatattggcggagtggccgtagccccaacccacggcagtatccttattgagtgtgctaagagagaattgcatgccacaacccccctgaagaatcctaatcgcaatcaccctacacgaatttctttagttttttatcagcataaatccatgaacgagcctaagcacggcctcgccctgtgggaggccaagatggccgaaaaggcccgtgagaaagaggaggaatgcgaaaaatacggccccgattacgttccacagaaaagccatggcaaaaaggtaaaaagggagcctgccgagccacacgaaacaagcgagcccacctacctccgattcatcaagtccctggccgagaggacgatgtcagtgaccaccgatagcaccgtgacaacaagcccttatgcattcacccgagttaccggtccctataacaggtacatctag

SEQ ID NO: 44530 - DNA, 1914 bp, Artificial Sequence
  derived and/or modified sequence
atggagcaggaccggaccaaccacgtggagggcaaccggctgagcccattcttaattccctcaccaccgatttgtcagacagagccgctagccaccaagctgcagaacgggtcccccctgcctgaaagagcacatcccgaggtcaatggagacacaaagtggcattcattcaaatcatactatgggatcccctgcatgaagggttcacaaaattctcgcgtgtctccagacttcacccaggaaagcaggggctactcaaaatgccttcagaacgggggaatcaaaaggaccgtttcagagccgagcctaagcggcctgttacagatcaagaagctaaaacaagatcagaaagcaaacggcgagcggaggaactttggggtgagtcaggagcgcaaccccggtgagtcctcacagccaaacgtatcagatctttccgacaagaaggagagtgttagtagtgttgcccaggaaaatgccgtaaaggactttacgagcttctccactcacaactgctcaggacccgaaaatcccgaactccagatattaaacgaacaagagggaaagtccgccaactatcatgataaaaacatcgttttgcttaaaaacaaagccgtcttgatgcccaatggagcgaccgtgtctgcctccagtgtggaacatacgcatggcgagttacttgagaagacccttagtcaatactatccggactgtgtatccatcgccgttcagaaaactacaagccacataaacgcgatcaatagccaggccaccaatgaactctcttgcgaaatcactcaccctagccatactagcggccagattaactctgcccaaacgtcaaactcagaactcccccccaagcccgccgcagtcgtgtccgaagcatgtgacgcagatgatgctgacaatgcgtccaaactcgcggcaatgttgaatacgtgttccttccaaaagcccgagcagctccagcagcaaaaaagtgtgtttgagatctgtccatcaccagcggaaaataacattcaaggaacaacaaaattagcatcaggtgaggaattctgttccgggtcttcttctaatctacaggccccaggcggctcttccgagaggtatctgaaacagaacgagatgaatggcgcctacttcaagcagtcctctgtgttcacgaaggactccttttcagccaccacaacacccccccctcccagtcagttgctgctgagcccacccccaccgctgccacaggtcccccaactgccctctgaaggaaagtcgactctcaatgggggcgtgctcgaggagcatcatcactaccctaatcagagtaacactaccctcctgcgggaagtcaagatcgagggaaaacctgaagcgccgccatctcaatctcccaacccttctacccacgtctgtagcccgtcacccatgttgtcagagcggccacagaataattgcgtcaacaggaatgatatccagaccgccggaactatgactgtgcccttgtgtagcgaaaagactcgcccgatgtctgagcatctcaagcacaatccacccatctttggctcaagtggagagttacaggataactgccagcagctcatgaggaacaaggaacaggagattcttaagggtcgcgacaaagagcagacccgcgacttggtacctcccacgcaacattacctgaagcctggttggatagagctgaaggctccacgctttcatcaggcagaatcgcacttgaagcggaacgaagctagcctcccatcaatcctacagtaccagcccaacctgagtaatcagatgacctctaagcagtacaccggcaatagcaacatgcctggtgggctccccagacaagcttacactcaaaagacaactcagctgtccactagccacaagtgtaccaagctcaagtag

SEQ ID NO: 44531 - DNA, 6009 bp, Artificial Sequence
  derived and/or modified sequence
atggagcaggaccggaccaaccacgtggagggcaaccggctgagcccgttcctcattccgtcccccccaatttgtcaaacagaacctctcgctacaaagttacagaatggctctcccctgccagagcgggcacaccccgaagtcaacggcgatacaaaatggcactctttcaagtcttattacggcataccgtgtatgaagggttcccagaatagccgcgtgtcacctgatttcacccaagaaagcaggggctattcaaagtgcctccaaaacggcggcatcaagcgcactgtgtccgagcccagcctgtccggactcctccagattaagaagctgaagcaggaccagaaggcaaatggagagcggaggaattttggagtctcacaggagagaaatccaggcgaaagcagtcagcccaacgtgtccgacctgtctgacaagaaagagagcgttagctctgttgcccaagagaatgccgtgaaagactttaccagcttcagcactcataactgcagtggtcccgagaaccccgagctgcaaatcctaaatgaacaagaaggaaagtccgcgaactaccatgacaaaaatatcgttctattgaagaacaaagccgtcctaatgccaaacggggccacagtaagtgcctcaagcgtggaacacactcacggcgagcttttagaaaaaaccctttcacaatactacccagattgcgtgtctatcgccgtccagaagaccacatctcatataaacgctattaattcccaagcaacaaatgagttgtcatgcgaaattacacacccaagccatacgagcggccagatcaatagcgcacagaccagtaactcggagctgccacccaaacctgcagccgttgtttcggaagcttgcgacgcagatgatgccgacaacgcctcgaagctggcagcaatgctgaatacttgtagcttccagaaaccagagcagctgcagcagcagaaatcggttttcgagatttgtccatctccagccgaaaacaacattcagggaacaacaaagctcgcaagtggagaggagttttgcagtggaagctcatccaatcttcaggctcctgggggctcttccgaaagatacctgaagcaaaatgagatgaatggggcatattttaagcagagcagcgtgtttacgaaggatagcttttctgcgaccacgacacccccacctccttcccaactattactgagtccccccccacccttgccccaggtgccacaactgccatctgaaggtaaaagcacactgaacggcggcgtgctggaggagcaccaccattatccgaaccaatcaaatactaccctgctgcgcgaagtgaagatcgagggaaaacccgaggctcccccatctcagtcgcccaatccgtcaacacatgtctgttccccatcacccatgctctccgaaagacctcagaacaattgcgtaaacagaaacgatatccagaccgctggaaccatgacagtacccctgtgttccgaaaaaacccgccccatgtctgagcacttgaagcacaatccccctatttttggcagttccggagagctccaggataactgccagcagctcatgagaaacaaagaacaggagattttaaaggggcgagacaaggagcagacgagagatcttgtgccacctacccagcactacctcaaacccggctggatcgagcttaaggcccctaggttccaccaagccgagtctcacctaaaacgaaatgaggcctcgttgccctcaatcctccaataccagcccaacctttctaatcagatgacatccaagcagtacacaggaaatagcaatatgcccggcggcttgcctcgccaggcgtacactcagaagacgacccagctcgaacacaaatctcaaatgtaccaggtggagatgaaccaggggcagagccaggggaccgtagaccagcatctgcagttccagaagccaagccaccaggtgcatttctccaagacggatcatctgcccaaggcccacgtccagtcactctgcggcactagatttcactttcagcaaagggccgatagccagaccgagaagctgatgtcccctgtgctgaagcaacatctaaatcaacaagcatcagagaccgaaccattctctaactcgcatctcctgcaacacaaaccacacaagcaggcggctcaaacccagccctcccagtctagccacttaccgcagaaccagcagcagcagcagaagctgcagattaaaaacaaggaagagatcctccaaacattcccacatccccagtctaataacgaccagcagagagagggctccttcttcggacaaaccaaagttgaagagtgtttccacggcgagaatcagtactctaagagtagcgagttcgaaacgcacaatgttcagatggggcttgaggaagttcagaacataaaccgaaggaacagcccctatagccagacaatgaaatccagtgcctgtaagatacaggtctcttgtagtaataacacacacctggtctccgaaaataaggagcagactactcatcctgagctcttcgcaggtaacaaaactcagaaccttcaccatatgcagtatttcccaaacaacgtcatacccaagcaggacctgctgcatagatgtttccaggagcaggaacagaaaagtcaacaagcgtccgtgctccaaggctacaaaaacaggaaccaggatatgagtggccaacaggccgcgcaattagctcagcagcgttatttgatacacaatcacgcaaacgtgtttccagtaccggatcagggaggcagccatacacagacccccccacaaaaagatactcagaagcacgcagctctgcggtggcatctcctccagaagcaggagcaacagcagacacagcagccacagaccgagagctgccactctcagatgcatcgccccatcaaggtggagcctggctgcaagccacatgcatgtatgcacaccgccccacctgagaacaagacatggaaaaaagtcacgaagcaggaaaacccccccgcctcctgtgacaacgtgcagcagaaatccataattgagaccatggaacagcatcttaagcagtttcacgcgaagtctcttttcgaccataaagcactcactctcaagtcccagaagcaggtcaaggtggagatgtcaggcccagttaccgtgctgaccagacaaacaaccgctgctgaactggatagccacactcctgccctcgagcaacagacaactagctccgaaaaaactcctacaaagcgcacagccgcctcagtactgaacaattttattgagtcacctagtaagctgctggacacccctataaagaacttgctcgacacccctgtgaagacacagtacgattttccttcctgtcgctgcgtcgagcagattattgaaaaagatgaggggccattttacactcacttaggtgcaggcccgaatgtcgcggccataagggaaataatggaagaacggttcggacagaagggtaaggccattcggattgaacgtgtcatatacactgggaaagaaggtaagtcctcccaggggtgcccaattgcaaagtgggttgttagaaggtcatcctcagaagagaaacttctgtgcctggtgagggaaagagctggccatacctgcgaggcggctgttatagtaattctgattttagtctgggaaggaatccctctatctctggccgacaagctctatagcgaattgaccgaaacactccgcaaatacggtacactgactaacaggagatgcgcgttgaacgaagagaggacttgtgcatgccagggtctcgaccccgagacttgtggcgcgtcgttcagctttggttgtagctggagcatgtactacaatggatgcaagtttgcccgatctaagatcccgaggaaatttaaactgctgggggacgaccccaaggaagaggagaagcttgagtcccacctgcagaacctatccactctgatggctcctacttataaaaagctcgctcctgacgcatacaacaatcagatagagtacgaacacagagctcccgaatgccggctgggacttaaagaggggaggccattcagcggagtgactgcttgcctggacttctgcgcccacgctcaccgtgatttgcataacatgcaaaatggttctaccttagtctgcactctgactcgggaggacaatcgggaatttggggggaaacccgaggatgagcaactgcatgtactccctctctataaggtcagcgatgtcgacgaatttggcagcgtagaggctcaggaggagaagaaaaggtctggtgcgatccaggtgttgtctagttttagacggaaggtacggatgctggccgagcctgtcaaaacttgtagacagcgcaaactggaggctaaaaaggcggccgctgagaagttgtcaagcctcgagaattccagcaacaagaacgaaaaagaaaaaagcgccccttctaggaccaagcagaccgaaaacgctagtcaggccaagcagttggcggaactactgcgactgtcgggacccgtgatgcagcagtcccagcagccccagcccctccagaagcagcctccgcagccccaacagcagcagcgtccacagcaacagcaaccacaccatccacagacagaatctgtcaactcctattcagcctccgggtccaccaatccatacatgaggcgtccaaaccctgtgagcccctatcctaattcttcccataccagcgacatttatgggtctacctccccgatgaatttctactctacgtcatcccaggccgccggctcatacttaaactcaagcaatcccatgaatccataccctggtctgctgaaccagaacacacagtaccctagttaccagtgtaatggtaacctgtctgtcgataactgtagtccatatctcggttcctacagccctcagtcgcagcctatggatctgtacaggtatccgtctcaggatcccctgtcaaaattgagtctgcctccaatccataccctgtaccagcccaggtttgggaatagccaatccttcacttccaaatatctggggtatggtaaccagaacatgcaaggtgacgggttttcatcctgtaccatccggcctaatgtgcatcatgtgggcaagctgcctccatacccaacccatgagatggatggccatttcatgggcgcaacttcccggctaccgccaaatcttagtaatccaaatatggattataagaatggagagcaccactctccatcccacataatccataattactccgctgcccccgggatgtttaactccagtctgcatgccctccatctgcagaacaaagaaaatgatatgctcagtcatactgcaaacggcctgtccaagatgttgccagcattgaaccacgataggaccgcatgcgtgcagggcggtcttcataaactaagcgatgcaaacgggcaggaaaagcagccactggccttggttcagggcgtggcaagtggcgccgaggacaacgatgaggtttggtcagattctgaacagtctttccttgacccagacatcggcggtgtggccgttgctccaacccatggttctatccttatcgaatgtgccaagagggaactgcatgctaccaccccattaaaaaacccgaataggaaccacccaactcggatatcacttgtcttctatcagcacaaaagcatgaacgagcccaagcacggcctcgccctctgggaagccaagatggccgagaaagctagggagaaggaggaggagtgtgaaaaatacgggcctgattatgtgccacagaagtcgcatggcaaaaaggtcaagcgcgaaccagccgaaccgcatgagacatctgaacccacatatctgcgctttataaagagcctggcagaacgaaccatgtctgttactaccgactctaccgtcacgacaagcccctatgcattcacaagggttaccggaccatacaatcgctacatctag

SEQ ID NO: 44532 - DNA, 6072 bp, Artificial Sequence
  derived and/or modified sequence
atgatccaggaggagcagatccagctggagggcagcctggtggacggaccagaggccagcctgatggagcaggacagaaccaaccacgttgaggggaacagactcagtccatttctgataccatcacctcccatttgccaaacggagcctctggcaactaagctgcagaacggctcacctcttcccgagcgagctcatccagaagtcaacggagacaccaagtggcactcattcaagtcttattacggcatcccttgcatgaaagggtcacagaattcgcgcgtgtcccctgattttactcaagagtctagagggtactccaagtgcctgcagaacggaggcatcaagagaactgtgtctgaacccagcctgagcgggctactccagattaaaaaactcaaacaggatcagaaggcgaatggagagagacggaacttcggggtcagccaggaaaggaatcccggcgagagctcccagccgaatgtgtccgacttatcggacaaaaaggagagtgttagctccgtagctcaagagaatgccgtcaaggactttacatctttttcaacccataactgctcgggaccagaaaacccagagctgcaaatattgaatgaacaagagggcaagtccgcgaactatcatgacaaaaacatcgtgctcctgaaaaacaaagctgttctaatgcccaacggagcaacagtgtcagcaagctctgttgagcacactcatggcgaactcctcgagaaaactctctcgcaatactacccagattgcgtctctatagccgtccagaaaactacaagccacattaatgcaatcaactcacaggctactaatgagctctcttgtgagatcacacaccctagccacacctccgggcaaataaacagcgcccagacgtcaaatagcgaactgccacccaagccagccgccgttgtatccgaggcctgtgacgcagatgatgctgacaatgccagcaagttggccgcaatgctaaatacttgcagcttccagaagcccgagcagctgcagcagcagaagagcgtgttcgagatttgtcctagtcccgccgagaataatattcagggcacaaccaaactggctagtggggaggaattctgctctgggtcaagctccaacctccaagcaccaggtggttcatcagagcgctaccttaagcagaacgaaatgaatggagcctactttaagcagtctagcgtattcaccaaggattccttttccgctacaacaactccaccacctccatcacagctgttactctcaccgcctcccccactcccccaggtgcctcagcttccgtccgaaggcaaaagtactcttaacgggggtgtccttgaggagcatcaccattaccccaaccaatcaaacaccacactcctacgggaagtgaagatcgagggcaagcctgaggctcctccttcccagagccctaacccctcaacccacgtttgtagtccctccccaatgttaagtgaacggccgcagaataactgcgtcaatcgcaacgatattcagactgccgggactatgactgttcccctctgtagtgagaaaacacggccgatgagtgagcatctcaaacataaccctcccatcttcggatcttccggagagctgcaagacaactgccagcagcttatgcggaacaaggagcaagaaattcttaagggacgggataaagaacaaaccagagacctggtgccccctacacagcactatctgaaacctggctggatcgaactgaaagctcctcgctttcatcaggctgaaagtcacttgaagaggaatgaggcctctctgcccagtatcctgcagtaccagcccaatctgtctaaccagatgacctcgaaacagtacacaggcaattctaacatgccgggcggactgcccagacaagcttatacacagaagacgacacagctggaacacaagtctcagatgtatcaggtggagatgaatcagggtcaatcacagggaacagtggaccagcacttgcagttccaaaagcccagtcaccaagtccatttttccaagacagatcatttaccaaaggctcatgtgcagtcgctttgcggcacgaggtttcacttccagcagcgtgccgactctcagactgagaagcttatgtcacctgttctgaagcagcaccttaaccaacaggcatctgagactgagccatttagtaactcccacttgcttcagcataaaccacataagcaagccgcacagacacaaccatctcagtcctcccacctgccacagaaccaacagcagcaacagaaattacaaataaaaaacaaagaagagatcttgcagacctttccccacccccaaagcaataacgatcagcagcgggagggcagctttttcggacagacaaaagtcgaagaatgcttccatggtgaaaatcagtattctaagagctcagagttcgagacccacaatgtgcaaatgggcctcgaagaagtccaaaatattaaccgccgcaactctccttacagtcagaccatgaagtcctctgcgtgcaaaatccaagttagctgttcgaacaatacacacctggtgtccgagaacaaggaacagacaactcatccagagctgttcgcgggcaacaagacacagaacctacaccacatgcagtacttccccaacaatgttatcccaaaacaagatcttctccatcgctgcttccaggaacaggagcagaagtcgcagcaagctagcgtcctccaggggtacaagaatcgaaaccaggatatgtccgggcagcaggctgcccaactggctcagcaacggtaccttattcacaaccatgccaacgtgttcccagtgccagatcagggaggcagtcacactcagactcctcctcagaaggatactcaaaaacacgctgctctgcggtggcatctgctgcagaaacaggaacagcagcaaacacaacaaccccagacagagtcctgtcatagccagatgcatagacctatcaaggtggagccaggctgcaagccgcatgcttgcatgcacactgcaccccccgagaataaaacctggaagaaggtcactaaacaggaaaatcctccagcctcttgcgacaacgtacagcagaaaagtatcatcgaaacaatggagcagcacctcaaacagttccatgccaaatcgctgttcgatcacaaagctctgactctcaaatcacagaaacaagtgaaagtggagatgagcggacccgtgacagtcctgactcgtcagacgaccgctgctgagctggattcccatacacccgcgctggaacagcagaccacaagctcggagaagacaccaacaaaaagaactgctgctagtgtcctgaataactttatcgagtcaccaagcaaactattggacacccccataaagaacttattggacactccagtcaagacgcagtatgatttcccgagctgccgctgcgtggagcagattatcgagaaagatgaaggcccgttctatacccatttgggcgcgggtcccaatgtcgcggcaatcagagagataatggaggagcgcttcggtcagaagggcaaggccatacggattgagcgtgttatttacaccggcaaggaaggcaaatcgagtcagggatgccccatagccaagtgggtggttcgccggagctcatccgaggagaagctgctgtgcctcgtgcgagagagagccgggcacacctgcgaggctgccgttatcgtgattttaattttagtatgggagggaattcccctaagcctcgcagacaagttgtattccgagctgactgagactcttaggaaatacgggactctaaccaacaggaggtgcgctttgaatgaggagcgtacctgtgcctgtcaggggctggacccagaaacgtgtggtgcctcattttcattcggctgtagctggtccatgtactacaatggttgcaagttcgcgcggtccaaaattccccggaaattcaagctgctgggagatgatcccaaagaggaagagaagcttgaatctcacttgcagaacctgtccaccttgatggccccgacctacaaaaagctggcacctgacgcttataataaccaaattgagtatgagcacagggccccagagtgccggttgggccttaaggagggccgcccattcagcggcgttacggcctgtctggacttctgcgcccatgcccacagggatttgcacaatatgcagaacgggtctacgctcgtgtgcacgctgacaagagaagataaccgcgaattcggtggaaagcccgaagatgagcagctgcacgtattaccactatataaggtgtccgatgtagatgagttcgggtccgtggaagcacaagaggagaagaaaagaagtggcgccattcaggtcctctcttccttcagacgaaaagtcaggatgctagcagagccagttaagacatgtaggcagcggaaactggaggcgaagaaggcagccgcggaaaagttaagttctttagagaatagctccaacaagaacgagaaagagaagtctgccccgtcccgcacaaagcagacagagaatgcctcccaggccaagcagctggctgaacttctgcggctgtcgggccctgtaatgcagcaatcgcagcagcctcagcccttgcaaaagcagccccctcagcctcagcagcagcagcgcccacagcagcagcaaccgcatcatccccaaaccgaaagcgtgaactcctattccgcctccggatccacaaatccatatatgcggcgacctaacccagtgtctccttatcctaattcgtcacatactagcgacatttatgggtctacatctcctatgaacttttattcaacatcctctcaagcagcaggcagctatctcaattccagtaacccaatgaacccataccccggtctgctcaaccaaaacacccagtatccgagctatcagtgcaacggaaacctttccgtcgacaactgctctccctatctgggcagttatagccctcaatcccagcccatggacctgtatcgctatccttcccaggaccctctgtcaaagctgtcattgcctcccattcataccctgtaccagccaaggtttggaaatagccaatcatttacctcaaagtaccttgggtatggaaaccagaacatgcaaggggacggttttagctcgtgcaccatccggcctaacgtgcaccacgtcggtaaattgccaccgtatccaacccacgaaatggatggccacttcatgggcgcgaccagcaggttgccgccaaatctgagcaacccaaacatggattataagaacggcgagcatcacagccctagccatatcatccacaattacagtgctgcacctggtatgtttaactcctctttacacgcgctgcatttgcagaataaagagaacgacatgctgtcacataccgcgaatggactgagcaagatgctccctgccctaaaccacgacaggactgcttgtgtgcaggggggtttacataagctcagcgatgccaatggtcaggaaaagcagccgctggccttggtgcagggggttgcaagcggagcagaggacaacgatgaggtgtggtcggattcagaacaaagctttctggaccccgacataggcggcgtggctgttgctcctacccacggttccatcctcatcgagtgtgccaagcgcgagctacacgcgaccacgcctttaaaaaacccaaatcgcaaccaccccacaaggataagcttggtcttctaccaacataaatcaatgaacgagcctaagcatggactagctctgtgggaagcaaagatggctgagaaagcgcgggaaaaagaggaagaatgcgaaaagtatggccccgactacgtgccacagaagtctcacgggaaaaaggtcaaacgggagccagcggagcctcacgagacttcagagcccacttacctgagattcattaaatcactcgcagaaagaacaatgtccgttaccacggactccacagtgacaacatctccttatgctttcacacgtgttaccggcccatataatcggtacatttag

SEQ ID NO: 44533 - DNA, 6008 bp, Artificial Sequence
  derived and/or modified sequence
atggaacaggaccggacaaatcacgtggaagggaacaggctgagcccatttctgattccttcacctcctatctgtcagacagagccactcgctaccaagttgcagaacggaagcccgctccctgagagagcacaccccgaggtcaacggggatactaaatggcacagctttaaatcgtactacggcatcccctgtatgaagggcagccagaatagcagggtaagcccagattttacccaggagagccgcggttactccaaatgtctgcagaatggtggaatcaagcggaccgtcagcgagccctccctgtcaggattgctccagatcaaaaaacttaagcaggaccagaaggctaacggcgagagaaggaactttggcgttagccaggaaaggaaccctggtgagtctagtcagcctaatgtgagcgatctgtccgataaaaaagagtccgtgtctagtgttgcccaggagaacgcagtgaaagatttcacatcatttagcactcataattgttcgggcccagaaaatccagaactgcagattctgaacgagcaggagggaaaaagcgcaaactaccatgataaaaatatcgtactgctaaagaataaggcagtcctcatgccaaacggagccaccgtcagcgccagctccgtggaacacacccacggcgagctcctggagaagaccctttcccaatattatccagactgtgtgtcgatcgcagtgcagaagaccacaagccacataaatgcaatcaattcccaggcgacgaacgaactgagctgtgaaatcacacacccaagccacacaagcggccagatcaacagtgcccagacatcgaatagcgaactgcccccaaaaccagccgctgttgtgagcgaagcttgcgatgctgacgatgcagacaatgcttccaagcttgcagcaatgttgaatacatgtagtttccagaagcccgagcaactccagcagcagaaaagcgtgttcgagatctgcccctctcccgctgaaaataacattcaggggactacgaagctcgcctctggcgaggaattttgttctggcagcagctcaaatcttcaggcccctggaggttcttcagaacgctacctgaaacagaacgagatgaatggggcatatttcaaacagagctctgtgttcaccaaggattctttctctgcgaccactacccctccccctcccagccagctgctgttgtctccacctccgccactcccgcaggtcccacagctgcctagcgaaggcaagagtactctgaacgggggagttctcgaggaacaccatcactaccccaatcagtctaatacaacccttcttagggaggttaagatcgagggcaagcctgaagccccaccatcccagtctccgaatcccagtacccatgtgtgtagccctagccccatgctgtcagaacgacctcaaaacaattgcgtcaacaggaatgacatccagaccgccggtacgatgaccgtccctctgtgttccgagaagactaggcccatgtcagagcacctcaagcacaaccctcctatctttggctcaagtggcgagctgcaggacaactgccagcagctcatgcgtaacaaagagcaggaaatccttaaagggcgagataaagaacagactcgggatttagttcctcccacacagcactatcttaagcccggttggatcgagcttaaggctccaaggttccaccaggccgaatcccacctcaaacggaatgaagctagccttccatctatcttacagtaccagcctaacttgagcaaccaaatgaccagcaagcaatacaccggcaactccaacatgcccggtggcctccccaggcaagcctacactcagaagaccacccagcttgagcacaaatctcagatgtatcaggtcgagatgaaccagggacagagtcaaggcaccgttgatcagcacctgcagtttcaaaaaccctcacatcaggttcacttttcaaaaacggatcatttgcctaaagcacatgttcagagtctatgtggtactcgttttcactttcagcagcgagctgattctcagacggagaagttgatgagtccagtcttgaagcagcatctcaatcagcaagctagcgagactgaacctttctcaaacagccacctactccagcataaaccccataaacaggccgcacagacgcagccaagccagtccagtcatctgcctcagaatcagcagcagcagcaaaaacttcagatcaaaaataaggaggagatactacagactttcccacaccctcagagcaacaacgatcagcaaagggaaggatccttttttgggcagactaaggtcgaggagtgcttccacggcgaaaaccagtattctaagagctctgaatttgaaacacataacgtgcagatgggtttggaagaagtgcagaacatcaaccgaaggaattctccgtactctcagaccatgaagtcatcagcgtgcaaaattcaggtgtcctgttcaaataacactcatctcgtttctgaaaataaggaacagaccacgcaccccgagctgttcgctgggaataagactcagaacttacaccacatgcagtactttccaaataacgtgatcccaaagcaagatctgctccacaggtgctttcaggagcaagagcaaaaatctcagcaggcttcagttttacaaggctacaaaaaccgcaaccaagacatgtcgggtcagcaagctgcccaactagcccagcaacggtacctcatccacaatcacgccaacgtgtttcctgttcccgatcaggggggatcccatacccaaaccccgccacaaaaggacactcagaagcatgccgcactgcgctggcacttgttacaaaaacaagagcagcagcagacccaacagccccagaccgagagctgccattcccaaatgcaccgccctataaaggtggaaccgggatgtaaaccccacgcttgtatgcacacagcaccaccagaaaataaaacgtggaagaaagtgactaagcaggagaacccgcctgccagttgcgacaatgtgcagcaaaagagcatcattgaaactatggagcagcacttaaaacagttccatgccaagagcctgttcgatcataaggcccttaccctaaaaagccagaagcaggttaaggtggaaatgagtggcccagtcaccgtactgactagacagactacagccgcagagctggactctcacacccccgctttagaacagcaaacgacgagttcagaaaaaacgccaacaaagagaaccgctgcatcagtgctgaacaacttcattgagtccccctcaaagctccttgatacaccaatcaaaaatttgctggataccccagtgaagacacagtacgattttccctcctgtcggtgtgtggaacaaataatagaaaaagacgaaggcccattctacacacacctgggagctggcccaaacgttgccgctatccgagaaatcatggaggagcgtttcggacagaaaggcaaggccattcgcatcgaaagggtgatttacaccgggaaagaaggaaaatctagtcagggctgccctattgcgaagtgggttgtccggaggtcttcctcagaggagaaactcctctgtttggtgcgcgagcgcgcaggacatacgtgtgaagccgcagtgatcgtcatactgatcctggtctgggagggaatccctttaagccttgccgataaactttactctgagctcacggaaacgctcaggaaatacggaacccttacgaatcgacgatgcgccctgaacgaggaacgcacttgcgcatgccaggggctcgaccctgagacctgcggcgcatccttctccttcggatgctcatggtcaatgtattacaatggatgcaagttcgctagaagcaagatccccagaaagttcaaactcctcggggatgaccccaaggaggaggagaagttggaaagccacctccagaacctgtctaccctaatggccccaacttataagaagttggcacctgacgcatataacaatcaaattgagtacgaacacagagcccctgaatgccgcctagggttaaaggagggtcgacccttctctggagtaaccgcctgtttggatttttgtgctcacgctcatagggacctgcacaatatgcaaaatggttcaaccctagtttgcactctgaccagagaggacaaccgggaatttggtgggaaacccgaggacgagcagctccacgtgctgcccctttacaaggtctcagatgtagacgagttcggctctgtcgaggctcaagaggaaaagaaacggagtggcgctatccaggtgctgtcttcatttagacgtaaagttagaatgttggcagaacccgtcaaaacatgcaggcagagaaagttagaggccaagaaggcagcggcagaaaagctgtcctcattggagaacagtagcaataaaaacgaaaaggaaaagtcggcaccttcccgcaccaagcagacagagaatgcttcgcaagccaagcagttggctgaacttttgaggctctccggaccagtgatgcagcagtctcagcagccacagcctctgcagaaacagcctccacaacctcagcagcagcagagaccacagcagcagcagccacatcatcctcagacggagagcgtgaactcgtactcggccagcggaagtactaacccctacatgaggagacctaaccccgtgtccccatatcccaatagttcccatacttctgacatatacggcagcacttcccccatgaatttctatagtacgagttcccaagccgctggcagctatttaaatagcagcaatccaatgaatccataccctggtctcctaaaccagaatacccagtaccccagttatcagtgcaatggcaatctaagcgtggataactgctccccatatctgggatcatatagtcctcagtcccaacctatggacctgtataggtatccatcccaggatcccctctctaagctgtcgctgccccctatccacacattataccaaccacgattcggtaatagtcagtccttcaccagtaaatatttaggttatggaaaccagaatatgcagggtgacggttttagcagctgcaccattaggcccaacgttcatcatgtgggtaagttgccgccttatcctacccatgaaatggatggtcacttcatgggcgcaacctccaggttgccccctaacctgtccaatcctaacatggactacaagaacggggagcaccactctccatctcatatcattcacaattactctgcggcacccggaatgttcaattcctcgctgcatgcccttcatcttcagaacaaagagaatgatatgctgagtcacaccgcaaacggactttctaagatgcttcccgctctgaaccatgacagaaccgcttgtgtgcaggggggactgcataagctgtctgacgccaacggccaggaaaagcaacctctggccctcgtgcagggtgttgctagcggcgcagaagataacgatgaggtgtggtctgattccgagcagagcttcctcgaccccgacatcggtggagttgcggtcgcccctactcacggctccatcctcattgaatgcgcgaagcgggaacttcacgccaccaccccattgaagaaccccaacagaaatcaccctaccaggatctcacttgttttctatcagcacaagagtatgaatgagccgaagcacgggctggcactatgggaggccaaaatggctgaaaaggccagagagaaggaggaagagtgcgaaaagtacgggccagactatgtcccacagaagtcccacggcaagaaggtgaagcgcgaacctgctgaacctcacgagacaagcgagccgacctaccttaggtttattaaatccctggccgaacgaaccatgagcgtgacaaccgatagtaccgtgaccaccagcccgtatgctttcacgagggtcaccgggccatacaatcgttacatcta

SEQ ID NO: 44534 - DNA, 1914 bp, Artificial Sequence
  derived and/or modified sequence
atggagcaggatagaactaatcacgtggagggcaataggctcagcccattcctcatacctagtcctccgatttgtcagactgaacctttagcaaccaagcttcagaacggcagtcccctgcccgagagggctcatccagaagtgaacggcgacactaagtggcactctttcaagagctattacggcatcccatgtatgaaaggttcacagaactcacgcgtctctcctgactttacccaggaaagcagaggatattccaagtgcctgcagaacggagggatcaaaaggactgtgtctgagccgtccctgagtggtctgctgcagataaagaaacttaaacaggatcaaaaggccaacggcgagaggagaaacttcggagtctctcaagagaggaaccctggggaaagcagccagcctaacgtaagtgatcttagcgacaagaaggagtccgtaagcagcgtggcacaggagaatgccgtcaaagatttcacaagcttttctacccacaattgcagcggacccgagaaccctgaactgcagatattaaacgagcaggaaggtaagagtgctaattaccacgataagaacatcgtgcttcttaagaacaaggcagtgctcatgccaaacggcgctacagtgagcgcctcttccgtcgagcacacacatggcgagctgctggagaaaactctgagccagtactacccagactgcgtcagcattgccgtccagaagaccacaagtcatatcaacgccatcaatagccaggctacgaatgagctgtcatgcgagattactcatccttcacacactagcgggcaaataaatagcgcccaaacgtccaactcagagttgccccctaagcctgcagccgtcgtgagcgaggcatgtgatgccgatgatgccgacaacgcctccaagctggcggcaatgttgaacacttgctcgtttcaaaagcccgagcagctgcaacagcaaaaatcagtcttcgaaatctgcccctccccagctgaaaataacatccaggggacgactaaactcgcttccggcgaggagttctgctccgggtcttcaagcaatctgcaagcacccggtggatcttccgaacgctatctcaagcagaacgagatgaacggcgcatacttcaaacaatcctctgtctttacaaaggactcctttagcgccacgacaaccccacccccaccaagccaactactcttgtcaccccctcccccacttcctcaagtcccccagttgccaagcgagggcaagtcgaccctgaacggcggagttctagaggaacaccaccactatcctaatcaatcgaacacaactctactgagggaggtgaaaatcgaagggaagcctgaagcccctccctcccagagtccaaatcccagtactcatgtgtgctcccctagtcctatgctttcagagcggccacagaacaactgcgtcaatcggaacgatatccagacagccggaaccatgaccgttcccctgtgtagcgaaaaaacccgtcccatgagcgagcatctaaaacacaacccccctatattcggcagttccggtgagttgcaagacaattgccagcaactaatgcgaaataaagagcaggagatcctgaaaggtcgggacaaggaacaaaccagggaccttgtccctccaacccagcattacctcaaacctggctggatagaactgaaggcgccacgattccaccaagcagagtcacacctgaagcgaaatgaggcaagcctgcccagcatactgcaataccagcctaatttaagcaaccagatgacatccaaacaatatactggaaactccaacatgcctggtgggctccccagacaagcttacactcaaaagacaacacagctcagcacgtctcacaagtgcacaaagttaaaatag

SEQ ID NO: 44535 - DNA, 6008 bp, Artificial Sequence
  derived and/or modified sequence
atggagcaggatagaactaatcacgttgaagggaatcggctctccccctttctgatcccaagtccacccatctgccagaccgagccccttgccaccaagttgcagaatgggagcccactgccagaaagggcccaccctgaggtgaatggtgacacaaaatggcatagctttaagtcttactacgggattccctgcatgaaaggatcccaaaatagtcgagtttccccggacttcacgcaagagagcaggggctactctaaatgcttgcagaacgggggaattaaacggactgtgtccgaaccttctctctcaggactcctgcagataaagaaactgaagcaggatcagaaagctaacggggaacgtcgaaattttggtgtatcacaagagagaaatcccggagaatcatcacaacctaacgtgtcagacctgtccgataagaaagaatcagtgtcatcagtcgcacaggagaacgccgtgaaagacttcactagctttagcacccacaactgttccggaccagaaaatcccgaattgcagatcctaaatgagcaagaggggaagagcgccaattaccatgacaaaaacatcgtgctcctgaaaaataaggcagtactaatgcctaatggggcaaccgtgtccgcttcctccgtagaacacacacatggtgaattgctggaaaaaacattatctcaatattacccagactgtgttagcattgccgtgcagaagaccactagccatattaacgccataaactcccaagcaaccaatgaacttagctgcgagatcactcacccttctcatacgtccggtcagatcaactctgctcaaacttccaatagtgaactgccccctaagccggcagctgtggtttcagaagcttgtgatgcggacgacgccgacaacgcctcaaaacttgccgctatgctaaatacttgctctttccagaagcccgaacagctccagcagcagaaatcagtcttcgagatctgcccaagtcccgcagaaaataatatccagggtaccaccaaacttgcctctggcgaggaattctgtagcggtagcagttccaacctacaggctcctggtgggtcctctgagcggtatctaaaacagaatgagatgaatggcgcatatttcaagcagtcatcagtgtttacaaaagacagttttagcgccaccaccacgcccccaccaccatcccagttactgctcagccccccaccccctctcccccaggtgccacaactgccgtcagagggtaagtccactcttaacggcggagttctggaggaacaccatcactaccccaatcaatcaaacacaacacttctgagagaagttaagatagaagggaagccagaggcccctccttctcagtccccgaatcctagcacacacgtgtgtagcccatctccgatgttgagcgaacgaccccagaacaattgtgtgaatcggaacgatatccaaaccgcgggaactatgaccgtccctctctgctccgagaagacccggccaatgtccgagcatctaaagcacaatccgcctatcttcggatccagtggagagttgcaggataactgccaacaactgatgcggaacaaagagcaggagattttgaagggacgcgacaaagaacaaacgcgggatttagtgccacccacgcagcactatctcaaacctggttggatagagctgaaggcccctaggtttcaccaggcagaaagccacctgaagcgaaacgaagcttcacttccatcaatcctgcagtaccagcccaacctgagcaaccagatgacaagtaaacagtatactggaaacagcaacatgcctggaggtcttccccgacaggcatatacccaaaagactacccaactggaacataaaagtcagatgtatcaagttgagatgaatcagggccaatcgcaagggaccgtcgaccagcaccttcagttccagaaaccatcgcaccaagttcacttcagcaagactgaccacctgcccaaagctcacgtgcagtccctgtgcgggactcgctttcacttccaacagcgagctgattcccagacagaaaagctcatgtcccctgtgctgaaacagcacctgaatcaacaggcctcagaaaccgagccctttagtaactcacaccttctccagcacaagccccataaacaggccgcacagactcagcctagtcagtcatcacacctcccgcagaatcagcagcagcagcagaagcttcaaataaaaaacaaggaggaaatattgcagaccttcccgcatccccagtcaaataatgaccagcagcgggagggctctttcttcgggcagaccaaggtggaggagtgttttcatggagagaatcagtacagcaagagttctgaattcgaaacacacaacgtgcagatggggttggaggaagttcagaatataaaccgacgaaattccccttattcccagacaatgaagtctagtgcttgtaagatccaggtatcatgtagcaacaatacacatcttgtttctgagaataaggaacagacaacacatcctgagctgtttgcgggtaacaaaacccagaacctgcaccatatgcaatactttccaaacaacgtgattccaaagcaagacctcctccacagatgtttccaagagcaggagcagaaatcacagcaagcatccgtgttacaggggtataagaaccgcaaccaggacatgtctggccaacaggcggcacagctggcccagcagcgatatctgatacataaccacgcaaacgtcttccccgtccccgaccagggaggatcacacacccagaccccccctcaaaaagatacacaaaagcatgcggctttgcgctggcatctgctccagaagcaggaacagcagcaaacgcagcagccccagactgaatcttgccactctcaaatgcacaggccaattaaagttgagccgggttgtaagccacacgcctgtatgcatacggcaccccctgagaacaagacctggaaaaaggtgacgaagcaggaaaatcccccagcctcttgcgacaacgtgcaacaaaaatctatcatcgaaacgatggaacagcaccttaagcagtttcacgcaaagtcccttttcgatcacaaggcccttacccttaagagccagaagcaagtgaaggtggaaatgagtgggccagttaccgtgctaaccaggcagacgaccgctgccgagctcgactcccacacaccagctctcgaacagcagaccacttcaagtgagaaaacacctaccaaaagaacggctgcctcagttttgaacaatttcattgaatcacccagcaaactgctggataccccaattaaaaacctgctggatactcctgtcaagacccagtatgacttcccctcctgtcggtgcgtggaacaaattatcgagaaggacgagggacctttctatactcacttgggtgccggtcccaatgtggcagctattcgcgagattatggaggaaaggtttggtcagaagggcaaagctatccgcattgagagagtgatttatactggaaaggaagggaaatcctcccaaggatgccctattgctaagtgggtcgtgcgacgctctagctcggaagaaaaattgctgtgcctcgtgagagaaagggccggacatacctgtgaggccgcagtgatcgtcatccttatcttggtgtgggaggggatcccactgagcttagctgacaagctgtatagcgagttgaccgagaccctaaggaaatatggaacattaaccaatagacggtgtgcactgaacgaggagcgcacttgtgcttgccagggccttgatccagagacatgtggcgcttccttcagtttcggatgctcttggagcatgtactacaatggatgtaagtttgcgaggagcaagatcccgagaaagtttaagctcttgggcgacgacccaaaggaggaagagaaattggaatctcatctgcagaacctgtccaccttgatggcccctacttataagaagctggcccctgatgcctacaataaccagatcgagtacgaacaccgagccccagagtgcagattgggcttgaaagaaggcagaccgttctccggagtgacagcatgtctggacttctgcgctcatgctcaccgagacttacataacatgcagaacggatcaaccctggtgtgtaccctaacaagagaagataacagggagtttggcggaaagcccgaggacgagcagctccacgtgctgcccctgtacaaagtaagcgacgttgatgaattcggatctgtggaggcacaggaagagaagaagcgatctggcgctatccaggtcctcagtagcttccgcaggaaagtgcgaatgctggctgaaccggttaagacctgcagacagcggaaactggaagctaaaaaagctgccgctgagaaactgtccagtcttgaaaatagttcaaataagaacgagaaagagaaatctgctccgagccggaccaagcagacggagaatgcttcccaggcaaaacagctggccgaactattgagactttcaggtcccgtgatgcagcagtctcagcagccacagcctctgcagaagcagccaccccagccacagcagcaacaaaggccacagcaacaacagcctcaccacccccaaaccgaatctgttaactcatattccgcttctgggagcactaacccatacatgcgtagacctaacccagtgagtccttatccaaattcatcccacacaagcgatatttacggatccactagcccaatgaacttctatagcacctctagccaagccgcaggcagctatctgaattcctctaaccccatgaatccgtatcctgggttattaaaccagaatacccaataccccagctaccagtgcaacgggaatttgtccgtggataattgttccccttatcttgggagttactcacctcaaagtcagcccatggatctttacagatacccatcacaggatcctttatcaaaactgtcattgccgccaatccatacactgtatcaacctagatttggcaattcccagagcttcacctccaaatatcttggctacgggaatcagaacatgcaaggcgatggcttttcctcttgtactattcgacctaacgtgcaccatgtgggaaaacttcctccctacccaacacacgaaatggacgggcatttcatgggagccactagtaggctacccccaaacctgagtaatcccaacatggactataagaacggagagcaccactccccaagccatattattcacaattactctgcggctcccggtatgtttaatagcagtctgcatgccctccacttgcagaataaggaaaacgacatgctgtcccacactgccaatggattgtcaaaaatgctgcccgcactgaatcatgaccgcactgcctgtgttcaagggggactccataagctttccgacgcaaacggccaggaaaaacaaccactcgctcttgtacagggtgtggcttcaggagcagaggacaacgacgaagtgtggtcagactccgaacagtctttcctcgaccccgatatcggaggagtcgctgtcgcaccaactcatggatccattctcattgagtgcgcaaagcgggagctccacgccactactccactcaaaaatcccaatcgcaaccaccctacgagaatcagtctagtcttctaccagcacaagtctatgaacgaacccaaacacggactggcgctatgggaggcaaaaatggccgagaaggcccgtgaaaaagaagaggaatgtgaaaaatacggtcctgactacgtccctcagaagtcgcacgggaagaaggtaaaacgggaacccgcagagccacacgaaacctccgagccaacatacctgaggttcataaaatcactggctgagcgaacaatgtctgtgacaacagattctactgtgacgacgagtccctacgcattcacacgggttacaggcccatataacagatacatcta

SEQ ID NO: 44536 - DNA, 6071 bp, Artificial Sequence
  derived and/or modified sequence
atgatccaggaggagcagatccagctggaaggaagtctggtggacggacctgaagcctcactgatggagcaagatcggaccaatcatgttgaagggaacagactctctcccttcttgattccatcaccgcctatttgtcagactgagcccctggctaccaagctgcagaacggcagcccattgccagaacgggctcaccccgaagtgaacggagacacaaaatggcacagtttcaagagttactatgggataccctgtatgaaaggctcacagaacagcagagtgagcccagatttcacccaggagtcaagaggctacagcaaatgcctgcaaaacggtggaatcaagagaactgtcagcgaaccgagcctctcgggcttactccagatcaaaaagctgaagcaagaccaaaaggccaatggcgagcggaggaactttggggtgtcccaggaacgcaatcctggagagagctcccagcctaacgtgagcgacctcagtgataagaaggagtctgtgtccagcgtagcccaggaaaacgccgttaaagacttcacttctttctctacccacaattgtagcggacccgagaatccagagcttcaaattctgaatgagcaggaagggaaaagcgccaactatcatgacaaaaacattgtcctgctcaaaaataaagctgtgctgatgcctaatggtgcgactgtaagcgccagttcggtggaacacactcatggggaattgttggaaaagactctgtcacagtactaccctgattgcgtgagcattgctgtccagaaaactacctcacacattaatgcaataaattcccaggccacaaatgagctctcgtgcgagataacccacccctcacatacgagcggtcagataaactctgcgcaaacttccaattcagaattacctcctaagcccgctgctgtggtaagtgaagcatgcgatgccgatgatgccgataacgcaagcaagcttgctgccatgctgaacacatgctccttccagaagcccgagcaactgcagcaacagaagtccgtgtttgagatatgtcccagccctgctgagaataacatccaaggcaccaccaaactggcatcaggcgaggagttctgttctggatcatcgagcaatttacaggctccgggaggctcatcagaacgctacctcaaacagaacgaaatgaacggtgcctattttaaacagtctagcgtcttcactaaagactcgttcagcgctacaactacgccacccccacctagtcagctccttctttctccaccaccccctttgcctcaggtcccacaactgcctagtgagggcaaatccaccctgaatggcggagtgctggaggagcatcaccactatccaaaccagagtaacactactctgctacgggaagtcaaaatcgaaggcaaaccagaggctccaccaagccagtcccccaatccttccactcacgtgtgttcaccttctcctatgctgtctgaacggcctcagaacaattgcgtgaaccgaaatgatattcagactgccggaaccatgacagtcccactgtgcagcgaaaagacccgtccgatgagtgagcatctgaaacataacccgccaatcttcgggagctccggcgagctgcaggacaattgtcagcagctcatgaggaacaaggaacaggaaatcctgaaaggtcgtgataaggagcagacaagggacctggtgcctcctacccaacattacctgaaaccaggctggatcgagctgaaggccccaagatttcaccaagctgagtcacaccttaagcgcaatgaagcgagtctgcctagcattctgcagtatcagccaaatctttcaaatcagatgacatccaaacagtacaccgggaatagcaatatgcctggagggttgcccaggcaggcatatactcagaaaactacacagctcgagcataaatctcagatgtaccaagtcgagatgaaccagggacagagccaaggaacggtggatcagcatctccagttccagaaaccctcccaccaggtgcatttttccaaaacggaccatctgcctaaggcgcatgtgcagtccctgtgcggtactcgctttcattttcagcaacgagccgacagtcagacagaaaagctaatgtctccagtacttaaacagcacctgaaccagcaggccagcgaaacggaaccattttctaatagccaccttctgcaacataaaccccacaagcaggctgcccagactcagccatcgcaaagtagccacctgccacagaaccagcagcaacaacaaaagctgcagattaaaaacaaagaagaaattctgcaaaccttcccacatcctcaaagcaacaatgatcagcagcgggaaggatcatttttcggccaaactaaggtcgaggaatgtttccacggtgagaaccagtactccaagtctagcgaattcgagacccacaacgttcagatgggcttggaggaagtgcagaacatcaatcggaggaactccccctactctcagacaatgaaatctagcgcttgtaaaatccaggtgtcgtgtagtaacaatacgcatctcgtgagtgagaacaaagagcagactactcatcccgagctctttgctggaaacaagacccagaacctacaccacatgcagtattttccgaataacgtcattcccaagcaggacctgctccataggtgttttcaggaacaagaacaaaaatctcagcaggcaagcgtgcttcaaggctataaaaacagaaatcaggatatgagcggtcagcaggcggcacaactggcacaacaacgctacctgatccacaaccacgcaaatgtcttcccggtgcctgaccagggcggttcccacacccagaccccccctcagaaagacacccagaagcatgcagccttacgctggcatctactccagaagcaggagcagcagcagacccaacagcctcagacagagagctgccatagtcagatgcaccgcccaataaaagttgagcctggttgtaagccacatgcctgcatgcatacggccccacccgagaacaagacctggaagaaagtgaccaagcaggaaaatcctcccgcttcttgcgataatgtgcaacaaaaaagcatcattgagacaatggagcagcatctcaagcagttccacgccaaatccctcttcgaccataaagccctgacacttaaaagccagaaacaggttaaagtcgaaatgagcggtcccgtcacagtcctcaccagacagaccaccgctgctgaattggattcccacacccccgctctggagcagcagaccacatcctcggagaagacccccaccaaaaggactgcagcaagtgtccttaataatttcatcgaatcaccatctaagctactggacaccccaatcaaaaatctgctggacactcctgtgaaaacacaatacgattttccatcctgcagatgtgtcgaacagatcatcgaaaaggacgaagggcctttttacacacatcttggagccggacctaacgtcgcagcaattcgcgagattatggaagaacgattcggtcagaaggggaaagccatacgcattgagagagtgatctatacgggcaaagaggggaagagttcacagggatgtccgattgccaaatgggtggtccggaggtcttcaagtgaggagaagctcctatgtctcgtgcgtgaacgcgcaggacatacttgcgaggccgcagttatcgtcatcttgattctggtctgggagggcatccctctcagccttgccgataaactctatagcgaactcactgagacactgcgcaaatatggcaccctgactaatcgcagatgcgccttgaatgaagaacgcacctgcgcctgccagggcctcgacccagagacttgcggcgcatcattcagctttggttgctcctggagcatgtattacaatgggtgtaaatttgctcgttctaagataccacgaaaattcaaacttttaggagatgatcccaaggaagaagagaagctggagtcgcatctccagaacctcagcacccttatggctccaacctacaagaagctcgcccctgacgcttacaacaaccagattgagtatgaacatcgcgctcccgaatgcagacttggattgaaggaggggagacctttttcgggcgtcacggcctgcttggacttctgtgcccatgcacaccgcgacttgcataatatgcagaacgggtcaactcttgtttgcaccttgaccagggaggacaaccgcgagttcggtggtaagccagaggacgagcagctgcacgtgctgcccctctataaggtctcagacgtggacgaattcggaagcgtagaagcccaggaagagaagaagagaagcggcgcaatacaggtgctttcatcttttcggcgtaaagtgcggatgctcgccgagcctgtaaaaacatgtcgccaacgcaagctggaggctaagaaagcagctgcagaaaagctgtcctcattagagaattcaagcaataagaatgaaaaggagaaatcggcacccagccggacaaagcagaccgaaaatgccagccaggcaaagcagttggccgaactactacgtctttccggacctgtcatgcaacagagtcagcagcctcagccgctgcaaaaacagcctccgcaacctcaacagcagcaacgtccacaacagcagcagccgcatcatccccaaaccgaaagtgtcaattcctattctgcatctggaagtaccaatccttacatgcgcaggcctaatccagtgtctccttatcctaatagctctcacacgagtgacatttatggctctacctcaccaatgaacttttacagtacttcttcccaagccgcaggctcatatctcaacagctctaaccctatgaatccctatcccggactgctgaatcagaatactcagtatcccagctaccaatgtaatggcaatctctccgttgataattgttccccgtacctggggtcctacagtccccagtcccagccaatggatctgtatcgctacccatcccaggatccactgtctaagctgtccctcccaccaatccatactctgtaccagccaaggtttggtaatagccagtcctttacttccaaataccttggctacggcaaccagaacatgcaaggtgacgggttttcatcatgcacaataagacccaacgttcatcacgtcggtaaattgccgccatacccaacccacgaaatggatgggcacttcatgggcgcaacaagcagactccctcctaatctttcaaatccgaacatggattataaaaatggtgaacaccattcccccagccacatcatccacaattattcggcggctcccggaatgttcaattcctccttacatgcccttcacctgcagaataaagaaaatgatatgctgagtcacaccgcaaatgggttgagcaagatgctgcccgcactaaatcacgaccggactgcttgtgtacaaggcggattgcataagcttagcgatgctaatggacaggagaagcaacctttggccctggtgcagggtgtggcgtccggcgctgaggataacgacgaggtgtggtccgactctgagcagagctttcttgaccctgatattggaggggttgcggtggcgcctacccacgggagtatcctcatagaatgcgctaaacgggaactccatgccaccacccccctcaagaatcctaataggaatcaccctacacgcatttccctggtgttctaccagcacaaatccatgaatgagcccaagcacggtttggcactgtgggaagcaaagatggctgagaaagcgcgtgagaaggaggaggagtgcgagaagtatggccctgattacgtgcctcagaaatcccacggtaagaaggtaaaacgagagcccgctgaaccccatgaaactagtgaaccgacttatcttaggttcattaaatcccttgcggaaagaacaatgtccgtgaccacggactcaaccgtgacaacctcaccatacgcgtttacaagggtgactgggccatataataggtacattta

SEQ ID NO: 44537 - DNA, 9679 bp, Artificial Sequence
  derived and/or modified sequence
gcggccgccccgagacgccggccccgctgagtgatgagaacagacgtcaaactgccttatgaatattgatgcggaggctaggctgctttcgtagagaagcagaaggaagcaagatggctgccctttaggatttgttagaaaggagacccgactgcaactgctggattgctgcaaggctgagggacgagaacgaggctggcaaacattcagcagcacaccctctcaagattgtttacttgcctttgctcctgttgagttacaacgcttggaagcaggagatgggctcagcagcagccaataggacatgatccaggaagagcagtaagggactgagctgctgaattcaactagagggcagccttgtggatggccccgaagcaagcctgatggaacaggatagaaccaaccatgttgagggcaacagactaagtccattcctgataccatcacctcccatttgccagacagaacctctggctacaaagctccagaatggaagcccactgcctgagagagctcatccagaagtaaatggagacaccaagtggcactctttcaaaagttattatggaataccctgtatgaagggaagccagaatagtcgtgtgagtcctgactttacacaagaaagtagagggtattccaagtgtttgcaaaatggaggaataaaacgcacagttagtgaaccttctctctctgggctccttcagatcaagaaattgaaacaagaccaaaaggctaatggagaaagacgtaacttcggggtaagccaagaaagaaatccaggtgaaagcagtcaaccaaatgtctccgatttgagtgataagaaagaatctgtgagttctgtagcccaagaaaatgcagttaaagatttcaccagtttttcaacacataactgcagtgggcctgaaaatccagagcttcagattctgaatgagcaggaggggaaaagtgctaattaccatgacaagaacattgtattacttaaaaacaaggcagtgctaatgcctaatggtgctacagtttctgcctcttccgtggaacacacacatggtgaactcctggaaaaaacactgtctcaatattatccagattgtgtttccattgcggtgcagaaaaccacatctcacataaatgccattaacagtcaggctactaatgagttgtcctgtgagatcactcacccatcgcatacctcagggcagatcaattccgcacagacctctaactctgagctgcctccaaagccagctgcagtggtgagtgaggcctgtgatgctgatgatgctgataatgccagtaaactagctgcaatgctaaatacctgttcctttcagaaaccagaacaactacaacaacaaaaatcagtttttgagatatgcccatctcctgcagaaaataacatccagggaaccacaaagctagcgtctggtgaagaattctgttcaggttccagcagcaatttgcaagctcctggtggcagctctgaacggtatttaaaacaaaatgaaatgaatggtgcttacttcaagcaaagctcagtgttcactaaggattccttttctgccactaccacaccaccaccaccatcacaattgcttctttctccccctcctcctcttccacaggttcctcagcttccttcagaaggaaaaagcactctgaatggtggagttttagaagaacaccaccactaccccaaccaaagtaacacaacacttttaagggaagtgaaaatagagggtaaacctgaggcaccaccttcccagagtcctaatccatctacacatgtatgcagcccttctccgatgctttctgaaaggcctcagaataattgtgtgaacaggaatgacatacagactgcagggacaatgactgttccattgtgttctgagaaaacaagaccaatgtcagaacacctcaagcataacccaccaatttttggtagcagtggagagctacaggacaactgccagcagttgatgagaaacaaagagcaagagattctgaagggtcgagacaaggagcaaacacgagatcttgtgcccccaacacagcactatctgaaaccaggatggattgaattgaaggcccctcgttttcaccaagcggaatcccatctaaaacgtaatgaggcatcactgccatcaattcttcagtatcaacccaatctctccaatcaaatgacctccaaacaatacactggaaattccaacatgcctggggggctcccaaggcaagcttacacccagaaaacaacacagctggagcacaagtcacaaatgtaccaagttgaaatgaatcaagggcagtcccaaggtacagtggaccaacatctccagttccaaaaaccctcacaccaggtgcacttctccaaaacagaccatttaccaaaagctcatgtgcagtcactgtgtggcactagatttcattttcaacaaagagcagattcccaaactgaaaaacttatgtccccagtgttgaaacagcacttgaatcaacaggcttcagagactgagccattttcaaactcacaccttttgcaacataagcctcataaacaggcagcacaaacacaaccatcccagagttcacatctccctcaaaaccagcaacagcagcaaaaattacaaataaagaataaagaggaaatactccagacttttcctcacccccaaagcaacaatgatcagcaaagagaaggatcattctttggccagactaaagtggaagaatgttttcatggtgaaaatcagtattcaaaatcaagcgagttcgagactcataatgtccaaatgggactggaggaagtacagaatataaatcgtagaaattccccttatagtcagaccatgaaatcaagtgcatgcaaaatacaggtttcttgttcaaacaatacacacctagtttcagagaataaagaacagactacacatcctgaactttttgcaggaaacaagacccaaaacttgcatcacatgcaatattttccaaataatgtgatcccaaagcaagatcttcttcacaggtgctttcaagaacaggagcagaagtcacaacaagcttcagttctacagggatataaaaatagaaaccaagatatgtctggtcaacaagctgcgcaacttgctcagcaaaggtacttgatacataaccatgcaaatgtttttcctgtgcctgaccagggaggaagtcacactcagacccctccccagaaggacactcaaaagcatgctgctctaaggtggcatctcttacagaagcaagaacagcagcaaacacagcaaccccaaactgagtcttgccatagtcagatgcacaggccaattaaggtggaacctggatgcaagccacatgcctgtatgcacacagcaccaccagaaaacaaaacatggaaaaaggtaactaagcaagagaatccacctgcaagctgtgataatgtgcagcaaaagagcatcattgagaccatggagcagcatctgaagcagtttcacgccaagtcgttatttgaccataaggctcttactctcaaatcacagaagcaagtaaaagttgaaatgtcagggccagtcacagttttgactagacaaaccactgctgcagaacttgatagccacaccccagctttagagcagcaaacaacttcttcagaaaagacaccaaccaaaagaacagctgcttctgttctcaataattttatagagtcaccttccaaattactagatactcctataaaaaatttattggatacacctgtcaagactcaatatgatttcccatcttgcagatgtgtagagcaaattattgaaaaagatgaaggtcctttttatacccatctaggagcaggtcctaatgtggcagctattagagaaatcatggaagaaaggtttggacagaagggtaaagctattaggattgaaagagtcatctatactggtaaagaaggcaaaagttctcagggatgtcctattgctaagtgggtggttcgcagaagcagcagtgaagagaagctactgtgtttggtgcgggagcgagctggccacacctgtgaggctgcagtgattgtgattctcatcctggtgtgggaaggaatcccgctgtctctggctgacaaactctactcggagcttaccgagacgctgaggaaatacggcacgctcaccaatcgccggtgtgccttgaatgaagagagaacttgcgcctgtcaggggctggatccagaaacctgtggtgcctccttctcttttggttgttcatggagcatgtactacaatggatgtaagtttgccagaagcaagatcccaaggaagtttaagctgcttggggatgacccaaaagaggaagagaaactggagtctcatttgcaaaacctgtccactcttatggcaccaacatataagaaacttgcacctgatgcatataataatcagattgaatatgaacacagagcaccagagtgccgtctgggtctgaaggaaggccgtccattctcaggggtcactgcatgtttggacttctgtgctcatgcccacagagacttgcacaacatgcagaatggcagcacattggtatgcactctcactagagaagacaatcgagaatttggaggaaaacctgaggatgagcagcttcacgttctgcctttatacaaagtctctgacgtggatgagtttgggagtgtggaagctcaggaggagaaaaaacggagtggtgccattcaggtactgagttcttttcggcgaaaagtcaggatgttagcagagccagtcaagacttgccgacaaaggaaactagaagccaagaaagctgcagctgaaaagctttcctccctggagaacagctcaaataaaaatgaaaaggaaaagtcagccccatcacgtacaaaacaaactgaaaacgcaagccaggctaaacagttggcagaacttttgcgactttcaggaccagtcatgcagcagtcccagcagccccagcctctacagaagcagccaccacagccccagcagcagcagagaccccagcagcagcagccacatcaccctcagacagagtctgtcaactcttattctgcttctggatccaccaatccatacatgagacggcccaatccagttagtccttatccaaactcttcacacacttcagatatctatggaagcaccagccctatgaacttctattccacctcatctcaagctgcaggttcatatttgaattcttctaatcccatgaacccttaccctgggcttttgaatcagaatacccaatatccatcatatcaatgcaatggaaacctatcagtggacaactgctccccatatctgggttcctattctccccagtctcagccgatggatctgtataggtatccaagccaagaccctctgtctaagctcagtctaccacccatccatacactttaccagccaaggtttggaaatagccagagttttacatctaaatacttaggttatggaaaccaaaatatgcagggagatggtttcagcagttgtaccattagaccaaatgtacatcatgtagggaaattgcctccttatcccactcatgagatggatggccacttcatgggagccacctctagattaccacccaatctgagcaatccaaacatggactataaaaatggtgaacatcattcaccttctcacataatccataactacagtgcagctccgggcatgttcaacagctctcttcatgccctgcatctccaaaacaaggagaatgacatgctttcccacacagctaatgggttatcaaagatgcttccagctcttaaccatgatagaactgcttgtgtccaaggaggcttacacaaattaagtgatgctaatggtcaggaaaagcagccattggcactagtccagggtgtggcttctggtgcagaggacaacgatgaggtctggtcagacagcgagcagagctttctggatcctgacattgggggagtggccgtggctccaactcatgggtcaattctcattgagtgtgcaaagcgtgagctgcatgccacaacccctttaaagaatcccaataggaatcaccccaccaggatctccctcgtcttttaccagcataagagcatgaatgagccaaaacatggcttggctctttgggaagccaaaatggctgaaaaagcccgtgagaaagaggaagagtgtgaaaagtatggcccagactatgtgcctcagaaatcccatggcaaaaaagtgaaacgggagcctgctgagccacatgaaacttcagagcccacttacctgcgtttcatcaagtctcttgccgaaaggaccatgtccgtgaccacagactccacagtaactacatctccatatgccttcactcgggtcacagggccttacaacagatatatatgatatcacccccttttgttggttacctcacttgaaaagaccacaaccaacctgtcagtagtatagttctcatgacgtgggcagtggggaaaggtcacagtattcatgacaaatgtggtgggaaaaacctcagctcaccagcaacaaaagaggttatcttaccatagcacttaattttcactggctcccaagtggtcacagatggcatctaggaaaagaccaaagcattctatgcaaaaagaaggtggggaagaaagtgttccgcaatttacatttttaaacactggttctattattggacgagatgatatgtaaatgtgatcccccccccccgcttacaactctacacatctgtgaccacttttaataatatcaagtttgcatagtcatggaacacaaatcaaacaagtactgtagtattacagtgacaggaatcttaaaataccatctggtgctgaatatatgatgtactgaaatactggaattatggctttttgaaatgcagtttttactgtaatcttaacttttatttatcaaaatagctacaggaaacatgaatagcaggaaaacactgaatttgtttggatgttctaagaaatggtgctaagaaaatggtgtctttaatagctaaaaatttaatgcctttatatcatcaagatgctatcagtgtactccagtgcccttgaataataggggtaccttttcattcaagtttttatcataattacctattcttacacaagcttagtttttaaaatgtggacattttaaaggcctctggattttgctcatccagtgaagtccttgtaggacaataaacgtatatatgtacatatatacacaaacatgtatatgtgcacacacatgtatatgtataaatattttaaatggtgttttagaagcactttgtctacctaagctttgacaacttgaacaatgctaaggtactgagatgtttaaaaaacaagtttactttcattttagaatgcaaagttgatttttttaaggaaacaaagaaagcttttaaaatatttttgcttttagccatgcatctgctgatgagcaattgtgtccatttttaacacagccagttaaatccaccatggggcttactggattcaagggaatacgttagtccacaaaacatgttttctggtgctcatctcacatgctatactgtaaaacagttttatacaaaattgtatgacaagttcattgctcaaaaatgtacagttttaagaattttctattaactgcaggtaataattagctgcatgctgcagactcaacaaagctagttcactgaagcctatgctattttatggatcataggctcttcagagaactgaatggcagtctgcctttgtgttgataattatgtacattgtgacgttgtcatttcttagcttaagtgtcctctttaacaagaggattgagcagactgatgcctgcataagatgaataaacagggttagttccatgtgaatctgtcagttaaaaagaaacaaaaacaggcagctggtttgctgtggtggttttaaatcattaatttgtataaagaagtgaaagagttgtatagtaaattaaattgtaaacaaaacttttttaatgcaatgctttagtattttagtactgtaaaaaaattaaatatatacatatatatatatatatatatatatatatatatgagtttgaagcagaattcacatcatgatggtgctactcagcctgctacaaatatatcataatgtgagctaagaattcattaaatgtttgagtgatgttcctacttgtcatatacctcaacactagtttggcaataggatattgaactgagagtgaaagcattgtgtaccatcatttttttccaagtccttttttttattgttaaaaaaaaaagcataccttttttcaatacttgatttcttagcaagtataacttgaacttcaacctttttgttctaaaaattcagggatatttcagctcatgctctccctatgccaacatgtcacctgtgtttatgtaaaattgttgtaggttaataaatatattctttgtcagggatttaacccttttattttgaatcccttctattttacttgtacatgtgctgatgtaactaaaactaattttgtaaatctgttggctctttttattgtaaagaaaagcattttaaaagtttgaggaatcttttgactgtttcaagcaggaaaaaaaaattacatgaaaatagaatgcactgagttgataaagggaaaaattgtaaggcaggagtttggcaagtggctgttggccagagacttacttgtaactctctaaatgaagtttttttgatcctgtaatcactgaaggtacatactccatgtggacttcccttaaacaggcaaacacctacaggtatggtgtgcaacagattgtacaattacattttggcctaaatacatttttgcttactagtatttaaaataaattcttaatcagaggaggcctttgggttttattggtcaaatctttgtaagctggcttttgtctttttaaaaaatttcttgaatttgtggttgtgtccaatttgcaaacatttccaaaaatgtttgctttgcttacaaaccacatgattttaatgttttttgtataccataatatctagccccaaacatttgattactacatgtgcattggtgattttgatcatccattcttaatatttgatttctgtgtcacctactgtcatttgttaaactgctggccaacaagaacaggaagtatagtttggggggttggggagagtttacataaggaagagaagaaattgagtggcatattgtaaatatcagatctataattgtaaatataaaacctgcctcagttagaatgaatggaaagcagatctacaatttgctaatataggaatatcaggttgactatatagccatacttgaaaatgcttctgagtggtgtcaactttacttgaatgaatttttcatcttgattgacgcacagtgatgtacagttcacttctgaagctagtggttaacttgtgtaggaaacttttgcagtttgacactaagataacttctgtgtgcatttttctatgcttttttaaaaactagtttcatttcattttcatgagatgtttggtttataagatctgaggatggttataaatactgtaagtattgtaatgttatgaatgcaggttatttgaaagctgtttattattatatcattcctgataatgctatgtgagtgtttttaataaaatttatatttatttaatgcactctaa

SEQ ID NO: 44538 - DNA, 4935 bp, Artificial Sequence
  derived and/or modified sequence
gaaaggagacccgactgcaactgctggattgctgcaaggctgagggacgagaacgagaattcaactagagggcagccttgtggatggccccgaagcaagcctgatggaacaggatagaaccaaccatgttgagggcaacagactaagtccattcctgataccatcacctcccatttgccagacagaacctctggctacaaagctccagaatggaagcccactgcctgagagagctcatccagaagtaaatggagacaccaagtggcactctttcaaaagttattatggaataccctgtatgaagggaagccagaatagtcgtgtgagtcctgactttacacaagaaagtagagggtattccaagtgtttgcaaaatggaggaataaaacgcacagttagtgaaccttctctctctgggctccttcagatcaagaaattgaaacaagaccaaaaggctaatggagaaagacgtaacttcggggtaagccaagaaagaaatccaggtgaaagcagtcaaccaaatgtctccgatttgagtgataagaaagaatctgtgagttctgtagcccaagaaaatgcagttaaagatttcaccagtttttcaacacataactgcagtgggcctgaaaatccagagcttcagattctgaatgagcaggaggggaaaagtgctaattaccatgacaagaacattgtattacttaaaaacaaggcagtgctaatgcctaatggtgctacagtttctgcctcttccgtggaacacacacatggtgaactcctggaaaaaacactgtctcaatattatccagattgtgtttccattgcggtgcagaaaaccacatctcacataaatgccattaacagtcaggctactaatgagttgtcctgtgagatcactcacccatcgcatacctcagggcagatcaattccgcacagacctctaactctgagctgcctccaaagccagctgcagtggtgagtgaggcctgtgatgctgatgatgctgataatgccagtaaactagctgcaatgctaaatacctgttcctttcagaaaccagaacaactacaacaacaaaaatcagtttttgagatatgcccatctcctgcagaaaataacatccagggaaccacaaagctagcgtctggtgaagaattctgttcaggttccagcagcaatttgcaagctcctggtggcagctctgaacggtatttaaaacaaaatgaaatgaatggtgcttacttcaagcaaagctcagtgttcactaaggattccttttctgccactaccacaccaccaccaccatcacaattgcttctttctccccctcctcctcttccacaggttcctcagcttccttcagaaggaaaaagcactctgaatggtggagttttagaagaacaccaccactaccccaaccaaagtaacacaacacttttaagggaagtgaaaatagagggtaaacctgaggcaccaccttcccagagtcctaatccatctacacatgtatgcagcccttctccgatgctttctgaaaggcctcagaataattgtgtgaacaggaatgacatacagactgcagggacaatgactgttccattgtgttctgagaaaacaagaccaatgtcagaacacctcaagcataacccaccaatttttggtagcagtggagagctacaggacaactgccagcagttgatgagaaacaaagagcaagagattctgaagggtcgagacaaggagcaaacacgagatcttgtgcccccaacacagcactatctgaaaccaggatggattgaattgaaggcccctcgttttcaccaagcggaatcccatctaaaacgtaatgaggcatcactgccatcaattcttcagtatcaacccaatctctccaatcaaatgacctccaaacaatacactggaaattccaacatgcctggggggctcccaaggcaagcttacacccagaaaacaacacagctgagcacaagtcacaaatgtaccaagttgaaatgaatcaagggcagtcccaaggtacagtggaccaacatctccagttccaaaaaccctcacaccaggtgcacttctccaaaacagaccatttaccaaaagctcatgtgcagtcactgtgtggcactagatttcattttcaacaaagagcagattcccaaactgaaaaacttatgtccccagtgttgaaacagcacttgaatcaacaggcttcagagactgagccattttcaaactcacaccttttgcaacataagcctcataaacaggcagcacaaacacaaccatcccagagttcacatctccctcaaaaccagcaacagcagcaaaaattacaaataaagaataaagaggaaatactccagacttttcctcacccccaaagcaacaatgatcagcaaagagaaggatcattctttggccagactaaagtggaagaatgttttcatggtgaaaatcagtattcaaaatcaagcgagttcgagactcataatgtccaaatgggactggaggaagtacagaatataaatcgtagaaattccccttatagtcagaccatgaaatcaagtgcatgcaaaatacaggtttcttgttcaaacaatacacacctagtttcagagaataaagaacagactacacatcctgaactttttgcaggaaacaagacccaaaacttgcatcacatgcaatattttccaaataatgtgatcccaaagcaagatcttcttcacaggtgctttcaagaacaggagcagaagtcacaacaagcttcagttctacagggatataaaaatagaaaccaagatatgtctggtcaacaagctgcgcaacttgctcagcaaaggtacttgatacataaccatgcaaatgtttttcctgtgcctgaccagggaggaagtcacactcagacccctccccagaaggacactcaaaagcatgctgctctaaggtggcatctcttacagaagcaagaacagcagcaaacacagcaaccccaaactgagtcttgccatagtcagatgcacaggccaattaaggtggaacctggatgcaagccacatgcctgtatgcacacagcaccaccagaaaacaaaacatggaaaaaggtaactaagcaagagaatccacctgcaagctgtgataatgtgcagcaaaagagcatcattgagaccatggagcagcatctgaagcagtttcacgccaagtcgttatttgaccataaggctcttactctcaaatcacagaagcaagtaaaagttgaaatgtcagggccagtcacagttttgactagacaaaccactgctgcagaacttgatagccacaccccagctttagagcagcaaacaacttcttcagaaaagacaccaaccaaaagaacagctgcttctgttctcaataattttatagagtcaccttccaaattactagatactcctataaaaaatttattggatacacctgtcaagactcaatatgatttcccatcttgcagatgtgtagagcaaattattgaaaaagatgaaggtcctttttatacccatctaggagcaggtcctaatgtggcagctattagagaaatcatggaagaaaggtaattaacgcaaaggcacagggcagattaacgtttatccttttgtatatgtcagaatttttccagccttcacacacaaagcagtaaacaattgtaaattgagtaattattagtaggcttagctattctagggttgccaacactacacactgtgctattcaccagagagtcacaatatttgacaggactaatagtctgctagctggcacaggctgcccactttgcgatggatgccagaaaacccaggcatgaacaggaatcggccagccaggctgccagccacaaggtactggcacaggctccaacgagaggtcccactctggctttcccacctgataataaagtgtcaaagcagaaagactggtaaagtgtggtataagaaaagaaccactgaattaaattcacctagtgttgcaaatgagtacttatctctaagttttcttttaccataaaaagagagcaagtgtgatatgttgaatagaaagagaaacatactatttacagctgcctttttttttttttttcgctatcaatcacaggtatacaagtacttgcctttactcctgcatgtagaagactcttatgagcgagataatgcagagaaggcctttcatataaatttatacagctctgagctgttcttcttctagggtgccttttcattaagaggtaggcagtattattattaaagtacttaggatacattggggcagctaggacatattcagtatcattcttgctccatttccaaattattcatttctaaattagcatgtagaagttcactaaataatcatctagtggcctggcagaaatagtgaatttccctaagtgccttttttttgttgtttttttgttttgttttttaaacaagcagtaggtggtgctttggtcataagggaagatatagtctatttctaggactattccatattttccatgtggctggatactaactatttgccagcctccttttctaaattgtgagacattcttggaggaacagttctaactaaaatctattatgactccccaagttttaaaatagctaaatttagtaagggaaaaaatagtttatgttttagaagactgaacttagcaaactaacctgaattttgtgctttgtgaaattttatatcgaaatgagctttcccattttcacccacatgtaatttacaaaatagttcattacaattatctgtacattttgatattgaggaaaaacaaggcttaaaaaccattatccagtttgcttggcgtagacctgtttaaaaaataataaaccgttcatttctcaggatgtggtcatagaataaagttatgctcaaatgtt

SEQ ID NO: 44539 - DNA, 10166 bp, Artificial Sequence
  derived and/or modified sequence
ccgtgccatcccaacctcccacctcgcccccaaccttcgcgcttgctctgcttcttctcccaggggtggagacccgccgaggtccccggggttcccgagggctgcacccttccccgcgctcgccagccctggcccctactccgcgctggtccgggcgcaccactccccccgcgccactgcacggcgtgagggcagcccaggtctccactgcgcgccccgctgtacggccccaggtgccgccggcctttgtgctggacgcccggtgcggggggctaattccctgggagccggggctgagggccccagggcggcggcgcaggccggggcggagcgggaggaggccggggcggagcaggaggaggcccgggcggaggaggagagccggcggtagcggcagtggcagcggcgagagcttgggcggccgccgccgcctcctcgcgagcgccgcgcgcccgggtcccgctcgcatgcaagtcacgtccgccccctcggcgcggccgccccgagacgccggccccgctgagtgatgagaacagacgtcaaactgccttatgaatattgatgcggaggctaggctgctttcgtagagaagcagaaggaagcaagatggctgccctttaggatttgttagaaaggagacccgactgcaactgctggattgctgcaaggctgagggacgagaacgaggctggcaaacattcagcagcacaccctctcaagattgtttacttgcctttgctcctgttgagttacaacgcttggaagcaggagatgggctcagcagcagccaataggacatgatccaggaagagcaaattcaactagagggcagccttgtggatggccccgaagcaagcctgatggaacaggatagaaccaaccatgttgagggcaacagactaagtccattcctgataccatcacctcccatttgccagacagaacctctggctacaaagctccagaatggaagcccactgcctgagagagctcatccagaagtaaatggagacaccaagtggcactctttcaaaagttattatggaataccctgtatgaagggaagccagaatagtcgtgtgagtcctgactttacacaagaaagtagagggtattccaagtgtttgcaaaatggaggaataaaacgcacagttagtgaaccttctctctctgggctccttcagatcaagaaattgaaacaagaccaaaaggctaatggagaaagacgtaacttcggggtaagccaagaaagaaatccaggtgaaagcagtcaaccaaatgtctccgatttgagtgataagaaagaatctgtgagttctgtagcccaagaaaatgcagttaaagatttcaccagtttttcaacacataactgcagtgggcctgaaaatccagagcttcagattctgaatgagcaggaggggaaaagtgctaattaccatgacaagaacattgtattacttaaaaacaaggcagtgctaatgcctaatggtgctacagtttctgcctcttccgtggaacacacacatggtgaactcctggaaaaaacactgtctcaatattatccagattgtgtttccattgcggtgcagaaaaccacatctcacataaatgccattaacagtcaggctactaatgagttgtcctgtgagatcactcacccatcgcatacctcagggcagatcaattccgcacagacctctaactctgagctgcctccaaagccagctgcagtggtgagtgaggcctgtgatgctgatgatgctgataatgccagtaaactagctgcaatgctaaatacctgttcctttcagaaaccagaacaactacaacaacaaaaatcagtttttgagatatgcccatctcctgcagaaaataacatccagggaaccacaaagctagcgtctggtgaagaattctgttcaggttccagcagcaatttgcaagctcctggtggcagctctgaacggtatttaaaacaaaatgaaatgaatggtgcttacttcaagcaaagctcagtgttcactaaggattccttttctgccactaccacaccaccaccaccatcacaattgcttctttctccccctcctcctcttccacaggttcctcagcttccttcagaaggaaaaagcactctgaatggtggagttttagaagaacaccaccactaccccaaccaaagtaacacaacacttttaagggaagtgaaaatagagggtaaacctgaggcaccaccttcccagagtcctaatccatctacacatgtatgcagcccttctccgatgctttctgaaaggcctcagaataattgtgtgaacaggaatgacatacagactgcagggacaatgactgttccattgtgttctgagaaaacaagaccaatgtcagaacacctcaagcataacccaccaatttttggtagcagtggagagctacaggacaactgccagcagttgatgagaaacaaagagcaagagattctgaagggtcgagacaaggagcaaacacgagatcttgtgcccccaacacagcactatctgaaaccaggatggattgaattgaaggcccctcgttttcaccaagcggaatcccatctaaaacgtaatgaggcatcactgccatcaattcttcagtatcaacccaatctctccaatcaaatgacctccaaacaatacactggaaattccaacatgcctggggggctcccaaggcaagcttacacccagaaaacaacacagctggagcacaagtcacaaatgtaccaagttgaaatgaatcaagggcagtcccaaggtacagtggaccaacatctccagttccaaaaaccctcacaccaggtgcacttctccaaaacagaccatttaccaaaagctcatgtgcagtcactgtgtggcactagatttcattttcaacaaagagcagattcccaaactgaaaaacttatgtccccagtgttgaaacagcacttgaatcaacaggcttcagagactgagccattttcaaactcacaccttttgcaacataagcctcataaacaggcagcacaaacacaaccatcccagagttcacatctccctcaaaaccagcaacagcagcaaaaattacaaataaagaataaagaggaaatactccagacttttcctcacccccaaagcaacaatgatcagcaaagagaaggatcattctttggccagactaaagtggaagaatgttttcatggtgaaaatcagtattcaaaatcaagcgagttcgagactcataatgtccaaatgggactggaggaagtacagaatataaatcgtagaaattccccttatagtcagaccatgaaatcaagtgcatgcaaaatacaggtttcttgttcaaacaatacacacctagtttcagagaataaagaacagactacacatcctgaactttttgcaggaaacaagacccaaaacttgcatcacatgcaatattttccaaataatgtgatcccaaagcaagatcttcttcacaggtgctttcaagaacaggagcagaagtcacaacaagcttcagttctacagggatataaaaatagaaaccaagatatgtctggtcaacaagctgcgcaacttgctcagcaaaggtacttgatacataaccatgcaaatgtttttcctgtgcctgaccagggaggaagtcacactcagacccctccccagaaggacactcaaaagcatgctgctctaaggtggcatctcttacagaagcaagaacagcagcaaacacagcaaccccaaactgagtcttgccatagtcagatgcacaggccaattaaggtggaacctggatgcaagccacatgcctgtatgcacacagcaccaccagaaaacaaaacatggaaaaaggtaactaagcaagagaatccacctgcaagctgtgataatgtgcagcaaaagagcatcattgagaccatggagcagcatctgaagcagtttcacgccaagtcgttatttgaccataaggctcttactctcaaatcacagaagcaagtaaaagttgaaatgtcagggccagtcacagttttgactagacaaaccactgctgcagaacttgatagccacaccccagctttagagcagcaaacaacttcttcagaaaagacaccaaccaaaagaacagctgcttctgttctcaataattttatagagtcaccttccaaattactagatactcctataaaaaatttattggatacacctgtcaagactcaatatgatttcccatcttgcagatgtgtagagcaaattattgaaaaagatgaaggtcctttttatacccatctaggagcaggtcctaatgtggcagctattagagaaatcatggaagaaaggtttggacagaagggtaaagctattaggattgaaagagtcatctatactggtaaagaaggcaaaagttctcagggatgtcctattgctaagtgggtggttcgcagaagcagcagtgaagagaagctactgtgtttggtgcgggagcgagctggccacacctgtgaggctgcagtgattgtgattctcatcctggtgtgggaaggaatcccgctgtctctggctgacaaactctactcggagcttaccgagacgctgaggaaatacggcacgctcaccaatcgccggtgtgccttgaatgaagagagaacttgcgcctgtcaggggctggatccagaaacctgtggtgcctccttctcttttggttgttcatggagcatgtactacaatggatgtaagtttgccagaagcaagatcccaaggaagtttaagctgcttggggatgacccaaaagaggaagagaaactggagtctcatttgcaaaacctgtccactcttatggcaccaacatataagaaacttgcacctgatgcatataataatcagattgaatatgaacacagagcaccagagtgccgtctgggtctgaaggaaggccgtccattctcaggggtcactgcatgtttggacttctgtgctcatgcccacagagacttgcacaacatgcagaatggcagcacattggtatgcactctcactagagaagacaatcgagaatttggaggaaaacctgaggatgagcagcttcacgttctgcctttatacaaagtctctgacgtggatgagtttgggagtgtggaagctcaggaggagaaaaaacggagtggtgccattcaggtactgagttcttttcggcgaaaagtcaggatgttagcagagccagtcaagacttgccgacaaaggaaactagaagccaagaaagctgcagctgaaaagctttcctccctggagaacagctcaaataaaaatgaaaaggaaaagtcagccccatcacgtacaaaacaaactgaaaacgcaagccaggctaaacagttggcagaacttttgcgactttcaggaccagtcatgcagcagtcccagcagccccagcctctacagaagcagccaccacagccccagcagcagcagagaccccagcagcagcagccacatcaccctcagacagagtctgtcaactcttattctgcttctggatccaccaatccatacatgagacggcccaatccagttagtccttatccaaactcttcacacacttcagatatctatggaagcaccagccctatgaacttctattccacctcatctcaagctgcaggttcatatttgaattcttctaatcccatgaacccttaccctgggcttttgaatcagaatacccaatatccatcatatcaatgcaatggaaacctatcagtggacaactgctccccatatctgggttcctattctccccagtctcagccgatggatctgtataggtatccaagccaagaccctctgtctaagctcagtctaccacccatccatacactttaccagccaaggtttggaaatagccagagttttacatctaaatacttaggttatggaaaccaaaatatgcagggagatggtttcagcagttgtaccattagaccaaatgtacatcatgtagggaaattgcctccttatcccactcatgagatggatggccacttcatgggagccacctctagattaccacccaatctgagcaatccaaacatggactataaaaatggtgaacatcattcaccttctcacataatccataactacagtgcagctccgggcatgttcaacagctctcttcatgccctgcatctccaaaacaaggagaatgacatgctttcccacacagctaatgggttatcaaagatgcttccagctcttaaccatgatagaactgcttgtgtccaaggaggcttacacaaattaagtgatgctaatggtcaggaaaagcagccattggcactagtccagggtgtggcttctggtgcagaggacaacgatgaggtctggtcagacagcgagcagagctttctggatcctgacattgggggagtggccgtggctccaactcatgggtcaattctcattgagtgtgcaaagcgtgagctgcatgccacaacccctttaaagaatcccaataggaatcaccccaccaggatctccctcgtcttttaccagcataagagcatgaatgagccaaaacatggcttggctctttgggaagccaaaatggctgaaaaagcccgtgagaaagaggaagagtgtgaaaagtatggcccagactatgtgcctcagaaatcccatggcaaaaaagtgaaacgggagcctgctgagccacatgaaacttcagagcccacttacctgcgtttcatcaagtctcttgccgaaaggaccatgtccgtgaccacagactccacagtaactacatctccatatgccttcactcgggtcacagggccttacaacagatatatatgatatcacccccttttgttggttacctcacttgaaaagaccacaaccaacctgtcagtagtatagttctcatgacgtgggcagtggggaaaggtcacagtattcatgacaaatgtggtgggaaaaacctcagctcaccagcaacaaaagaggttatcttaccatagcacttaattttcactggctcccaagtggtcacagatggcatctaggaaaagaccaaagcattctatgcaaaaagaaggtggggaagaaagtgttccgcaatttacatttttaaacactggttctattattggacgagatgatatgtaaatgtgatcccccccccccgcttacaactctacacatctgtgaccacttttaataatatcaagtttgcatagtcatggaacacaaatcaaacaagtactgtagtattacagtgacaggaatcttaaaataccatctggtgctgaatatatgatgtactgaaatactggaattatggctttttgaaatgcagtttttactgtaatcttaacttttatttatcaaaatagctacaggaaacatgaatagcaggaaaacactgaatttgtttggatgttctaagaaatggtgctaagaaaatggtgtctttaatagctaaaaatttaatgcctttatatcatcaagatgctatcagtgtactccagtgcccttgaataataggggtaccttttcattcaagtttttatcataattacctattcttacacaagcttagtttttaaaatgtggacattttaaaggcctctggattttgctcatccagtgaagtccttgtaggacaataaacgtatatatgtacatatatacacaaacatgtatatgtgcacacacatgtatatgtataaatattttaaatggtgttttagaagcactttgtctacctaagctttgacaacttgaacaatgctaaggtactgagatgtttaaaaaacaagtttactttcattttagaatgcaaagttgatttttttaaggaaacaaagaaagcttttaaaatatttttgcttttagccatgcatctgctgatgagcaattgtgtccatttttaacacagccagttaaatccaccatggggcttactggattcaagggaatacgttagtccacaaaacatgttttctggtgctcatctcacatgctatactgtaaaacagttttatacaaaattgtatgacaagttcattgctcaaaaatgtacagttttaagaattttctattaactgcaggtaataattagctgcatgctgcagactcaacaaagctagttcactgaagcctatgctattttatggatcataggctcttcagagaactgaatggcagtctgcctttgtgttgataattatgtacattgtgacgttgtcatttcttagcttaagtgtcctctttaacaagaggattgagcagactgatgcctgcataagatgaataaacagggttagttccatgtgaatctgtcagttaaaaagaaacaaaaacaggcagctggtttgctgtggtggttttaaatcattaatttgtataaagaagtgaaagagttgtatagtaaattaaattgtaaacaaaacttttttaatgcaatgctttagtattttagtactgtaaaaaaattaaatatatacatatatatatatatatatatatatatatatatgagtttgaagcagaattcacatcatgatggtgctactcagcctgctacaaatatatcataatgtgagctaagaattcattaaatgtttgagtgatgttcctacttgtcatatacctcaacactagtttggcaataggatattgaactgagagtgaaagcattgtgtaccatcatttttttccaagtccttttttttattgttaaaaaaaaaagcataccttttttcaatacttgatttcttagcaagtataacttgaacttcaacctttttgttctaaaaattcagggatatttcagctcatgctctccctatgccaacatgtcacctgtgtttatgtaaaattgttgtaggttaataaatatattctttgtcagggatttaacccttttattttgaatcccttctattttacttgtacatgtgctgatgtaactaaaactaattttgtaaatctgttggctctttttattgtaaagaaaagcattttaaaagtttgaggaatcttttgactgtttcaagcaggaaaaaaaaattacatgaaaatagaatgcactgagttgataaagggaaaaattgtaaggcaggagtttggcaagtggctgttggccagagacttacttgtaactctctaaatgaagtttttttgatcctgtaatcactgaaggtacatactccatgtggacttcccttaaacaggcaaacacctacaggtatggtgtgcaacagattgtacaattacattttggcctaaatacatttttgcttactagtatttaaaataaattcttaatcagaggaggcctttgggttttattggtcaaatctttgtaagctggcttttgtctttttaaaaaatttcttgaatttgtggttgtgtccaatttgcaaacatttccaaaaatgtttgctttgcttacaaaccacatgattttaatgttttttgtataccataatatctagccccaaacatttgattactacatgtgcattggtgattttgatcatccattcttaatatttgatttctgtgtcacctactgtcatttgttaaactgctggccaacaagaacaggaagtatagtttggggggttggggagagtttacataaggaagagaagaaattgagtggcatattgtaaatatcagatctataattgtaaatataaaacctgcctcagttagaatgaatggaaagcagatctacaatttgctaatataggaatatcaggttgactatatagccatacttgaaaatgcttctgagtggtgtcaactttacttgaatgaatttttcatcttgattgacgcacagtgatgtacagttcacttctgaagctagtggttaacttgtgtaggaaacttttgcagtttgacactaagataacttctgtgtgcatttttctatgcttttttaaaaactagtttcatttcattttcatgagatgtttggtttataagatctgaggatggttataaatactgtaagtattgtaatgttatgaatgcaggttatttgaaagctgtttattattatatcattcctgataatgctatgtgagtgtttttaataaaatttatatttatttaatgcactctaagtgttgtcttcct

SEQ ID NO: 44540 - protein, 631 aa, Artificial Sequence
  derived and/or modified sequence
MNSSDEEKQLQLITSLKEQAIGEYEDLRAENQKTKEKCDKIRQERDEAVKKLEEFQKISHMVIEEVNFMQNHLEIEKTCRESAEALATKLNKENKTLKRISMLYMAKLGPDVITEEINIDDEDSTTDTDGAAETCVSVQCQKQIKELRDQIVSVQEEKKILAIELENLKSKLVEVIEEVNKVKQEKTVLNSEVLEQRKVLEKCNRVSMLAVEEYEEMQVNLELEKDLRKKAESFAQEMFIEQNKLKRQSHLLLQSSIPDQQLLKALDENAKLTQQLEEERIQHQQKVKELEEQLENETLHKEIHNLKQQLELLEEDKKELELKYQNSEEKARNLKHSVDELQKRVNQSENSVPPPPPPPPPLPPPPPNPIRSLMSMIRKRSHPSGSGAKKEKATQPETTEEVTDLKRQAVEEMMDRIKKGVHLRPVNQTARPKTKPESSKGCESAVDELKGILGTLNKSTSSRSLKSLDPENSETELERILRRRKVTAEADSSSPTGILATSESKSMPVLGSVSSVTKTALNKKTLEAEFNSPSPPTPEPGEGPRKLEGCTSSKVTFQPPSSIGCRKKYIDGEKQAEPVVVLDPVSTHEPQTKDQVAEKDPTQHKEDEGEIQPENKEDSIENVRETDSSNC

SEQ ID NO: 44541 - protein, 649 aa, Artificial Sequence
  derived and/or modified sequence
MNSSDEEKQLQLITSLKEQAIGEYEDLRAENQKTKEKCDKIRQERDEAVKKLEEFQKISHMVIEEVNFMQNHLEIEKTCRESAEALATKLNKENKTLKRISMLYMAKLGPDVITEEINIDDEDSTTDTDGAAETCVSVQCQKQIKELRDQIVSVQEEKKILAIELENLKSKLVEVIEEVNKVKQEKTVLNSEVLEQRKVLEKCNRVSMLAVEEYEEMQVNLELEKDLRKKAESFAQEMFIEQNKLKRQSHLLLQSSIPDQQLLKALDENAKLTQQLEEERIQHQQKVKELEEQLENETLHKEIHNLKQQLELLEEDKKELELKYQNSEEKARNLKHSVDELQKRVNQSENSVPPPPPPPPPLPPPPPNPIRSLMSMIRKRSHPSGSGAKKEKATQPETTEEVTDLKRQAVEEMMDRIKKGVHLRPVNQTARPKTKPESSKGCESAVDELKGILGTLNKSTSSRSLKSLDPENSETELERILRRRKVTAEADSSSPTGILATSESKSMPVLGSVSSVTKTALNKKTLEAEFNSPSPPTPEPGEGPRKLEGCTSSKVTFQPPSSIGCRKKYIDGEKQAEPVVVLDPVSTHEPQTKDQVAEKDPTQHKEDEGEIQPENKEDSIENFFPFHFGFEGVLPLAGVTLSTKARDPK

SEQ ID NO: 44542 - DNA, 1896 bp, Artificial Sequence
  derived and/or modified sequence
atgaacagcagcgacgaggagaagcagctgcagctgatcaccagcctgaaggagcaggccatcggcgagtacgaggacctgagagccgagaaccagaagaccaaggagaagtgcgacaagatcagacaggagagagacgaggccgtgaagaagctggaggagttccagaagatcagccacatggtgatcgaggaggtgaacttcatgcagaaccacctggagatcgagaagacctgcagagagagcgccgaggccctggccaccaagctgaacaaggagaacaagaccctgaagagaatcagcatgctgtacatggccaagctgggccccgacgtgatcaccgaggagatcaacatcgacgacgaggacagcaccaccgacaccgacggcgccgccgagacctgcgtgagcgtgcagtgccagaagcagatcaaggagctgagagaccagatcgtgagcgtgcaggaggagaagaagatcctggccatcgagctggagaacctgaagagcaagctggtggaggtgatcgaggaggtgaacaaggtgaagcaggagaagaccgtgctgaacagcgaggtgctggagcagagaaaggtgctggagaagtgcaacagagtgagcatgctggccgtggaggagtacgaggagatgcaggtgaacctggagctggagaaggacctgagaaagaaggccgagagcttcgcccaggagatgttcatcgagcagaacaagctgaagagacagagccacctgctgctgcagagcagcatccccgaccagcagctgctgaaggccctggacgagaacgccaagctgacccagcagctggaggaggagagaatccagcaccagcagaaggtgaaggagctggaggagcagctggagaacgagaccctgcacaaggagatccacaacctgaagcagcagctggagctgctggaggaggacaagaaggagctggagctgaagtaccagaacagcgaggagaaggccagaaacctgaagcacagcgtggacgagctgcagaagagagtgaaccagagcgagaacagcgtgcccccccccccccccccccccccccccctgcccccccccccccccaaccccatcagaagcctgatgagcatgatcagaaagagaagccaccccagcggcagcggcgccaagaaggagaaggccacccagcccgagaccaccgaggaggtgaccgacctgaagagacaggccgtggaggagatgatggacagaatcaagaagggcgtgcacctgagacccgtgaaccagaccgccagacccaagaccaagcccgagagcagcaagggctgcgagagcgccgtggacgagctgaagggcatcctgggcaccctgaacaagagcaccagcagcagaagcctgaagagcctggaccccgagaacagcgagaccgagctggagagaatcctgagaagaagaaaggtgaccgccgaggccgacagcagcagccccaccggcatcctggccaccagcgagagcaagagcatgcccgtgctgggcagcgtgagcagcgtgaccaagaccgccctgaacaagaagaccctggaggccgagttcaacagccccagcccccccacccccgagcccggcgagggccccagaaagctggagggctgcaccagcagcaaggtgaccttccagccccccagcagcatcggctgcagaaagaagtacatcgacggcgagaagcaggccgagcccgtggtggtgctggaccccgtgagcacccacgagccccagaccaaggaccaggtggccgagaaggaccccacccagcacaaggaggacgagggcgagatccagcccgagaacaaggaggacagcatcgagaacgtgagagagaccgacagcagcaactgctag

SEQ ID NO: 44543 - DNA, 1950 bp, Artificial Sequence
  derived and/or modified sequence
atgaacagcagcgacgaggagaagcagctgcagctgatcaccagcctgaaggagcaggccatcggcgagtacgaggacctgagagccgagaaccagaagaccaaggagaagtgcgacaagatcagacaggagagagacgaggccgtgaagaagctggaggagttccagaagatcagccacatggtgatcgaggaggtgaacttcatgcagaaccacctggagatcgagaagacctgcagagagagcgccgaggccctggccaccaagctgaacaaggagaacaagaccctgaagagaatcagcatgctgtacatggccaagctgggccccgacgtgatcaccgaggagatcaacatcgacgacgaggacagcaccaccgacaccgacggcgccgccgagacctgcgtgagcgtgcagtgccagaagcagatcaaggagctgagagaccagatcgtgagcgtgcaggaggagaagaagatcctggccatcgagctggagaacctgaagagcaagctggtggaggtgatcgaggaggtgaacaaggtgaagcaggagaagaccgtgctgaacagcgaggtgctggagcagagaaaggtgctggagaagtgcaacagagtgagcatgctggccgtggaggagtacgaggagatgcaggtgaacctggagctggagaaggacctgagaaagaaggccgagagcttcgcccaggagatgttcatcgagcagaacaagctgaagagacagagccacctgctgctgcagagcagcatccccgaccagcagctgctgaaggccctggacgagaacgccaagctgacccagcagctggaggaggagagaatccagcaccagcagaaggtgaaggagctggaggagcagctggagaacgagaccctgcacaaggagatccacaacctgaagcagcagctggagctgctggaggaggacaagaaggagctggagctgaagtaccagaacagcgaggagaaggccagaaacctgaagcacagcgtggacgagctgcagaagagagtgaaccagagcgagaacagcgtgcccccccccccccccccccccccccccctgcccccccccccccccaaccccatcagaagcctgatgagcatgatcagaaagagaagccaccccagcggcagcggcgccaagaaggagaaggccacccagcccgagaccaccgaggaggtgaccgacctgaagagacaggccgtggaggagatgatggacagaatcaagaagggcgtgcacctgagacccgtgaaccagaccgccagacccaagaccaagcccgagagcagcaagggctgcgagagcgccgtggacgagctgaagggcatcctgggcaccctgaacaagagcaccagcagcagaagcctgaagagcctggaccccgagaacagcgagaccgagctggagagaatcctgagaagaagaaaggtgaccgccgaggccgacagcagcagccccaccggcatcctggccaccagcgagagcaagagcatgcccgtgctgggcagcgtgagcagcgtgaccaagaccgccctgaacaagaagaccctggaggccgagttcaacagccccagcccccccacccccgagcccggcgagggccccagaaagctggagggctgcaccagcagcaaggtgaccttccagccccccagcagcatcggctgcagaaagaagtacatcgacggcgagaagcaggccgagcccgtggtggtgctggaccccgtgagcacccacgagccccagaccaaggaccaggtggccgagaaggaccccacccagcacaaggaggacgagggcgagatccagcccgagaacaaggaggacagcatcgagaacttcttccccttccacttcggcttcgagggcgtgctgcccctggccggcgtgaccctgagcaccaaggccagagaccccaagtag

SEQ ID NO: 44544 - DNA, 3941 bp, Artificial Sequence
  derived and/or modified sequence
attgcgtcccgctctacctctgtggttctttgggagcgacccccgggaagcgtccaaagtggagttcccacacacgctgcgaacccacagccggttttctctgaactcgcgtccctgagtccgggaggtggaggcggagaaaagggtgcggagcgaccccacgcagggccgccccccctcccaccagcgcgtcctgccgcgccggcagccacaggctggcatagcggctgccgacccgccctcgttcctccaccccctgaacgggactgctgggcccgccccgccccgcctgcaggtgaagcggccgcagccgccgagtaggtgcgtggggatgatctcactcgcgcgctccgcgccaggaggaggaggagcgggagcggatccaacttccgggtagtggagccgcaagccaccggcatcttgctttttcttccccctcctcctgtgtgccccgcgccgctccctctttcccttttattcccggccccacccgccaaaatgaacagctcggacgaagagaagcagctgcagctcattaccagtctgaaggagcaagcaataggcgaatatgaagaccttagagcagagaaccagaaaacaaaggagaagtgtgacaaaattaggcaagaacgagatgaagccgttaaaaaactggaagaatttcagaaaatttctcacatggtcatagaggaagttaatttcatgcagaaccatcttgaaatagagaagacttgtcgagaaagtgctgaagctttggcaacaaagctaaataaagaaaataaaacgttgaaaagaatcagcatgttgtacatggccaagctgggaccagatgtaataactgaagagataaacattgatgatgaagattcgactacagacacagacggtgccgccgagacttgtgtctcagtacagtgtcagaagcaaattaaagaacttcgagatcaaattgtatctgttcaggaggaaaagaagattttagccattgagctggaaaatctcaagagcaaactcgtagaagtaattgaagaagtaaataaagttaaacaagaaaagactgttttaaattcagaagttcttgaacagagaaaagtcttagaaaaatgcaatagagtgtccatgttagctgtagaagagtatgaggagatgcaagtaaacctggagctggagaaggaccttcgaaagaaagcagagtcatttgcacaagagatgttcattgagcaaaacaagctaaagagacaaagccaccttctgctgcagagctccatccctgatcagcagcttttgaaagctttagacgaaaatgcaaaactcacccagcaacttgaagaagagagaattcagcatcaacaaaaggtcaaagaattagaagagcaactagaaaatgaaacactccacaaagaaatacacaacctcaaacagcaactggagcttctagaggaagataaaaaggaattggaattgaaatatcagaattctgaagagaaagccagaaatttaaagcactctgttgatgaactccagaaacgagtgaaccagtctgagaattcagtacctccaccacctcctcctccaccaccacttccccctccacctcccaatcctatccgatccctcatgtccatgatccggaaacgatcccaccccagtggcagtggtgctaagaaagaaaaggcaactcaaccagaaacaactgaagaagtcacagatctaaagaggcaagcagttgaagagatgatggatagaattaaaaagggagttcatcttagacccgttaatcagacagccagaccgaagacaaagccagaatcttcgaaaggctgcgaaagtgcagtggatgaactaaaaggaatactggggacacttaacaaatccactagttcaagaagcttaaaatcccttgaccctgaaaacagtgaaactgagttagaaaggattttgcgtcgcagaaaggtgacagcagaagcagatagcagtagtccaactgggatattagccacctcagagtccaaatccatgccagtgttgggttctgtatccagtgtaacaaaaacagccttgaacaagaaaactctggaggcagaattcaacagcccgtcccccccaacacctgagccaggtgaagggccccgtaaattggaaggatgcacaagttccaaggttacgtttcagcctcccagtagcattggatgcaggaaaaaatacattgacggtgaaaaacaagccgaaccagttgtagttttagatcctgtttctacacatgaaccccaaaccaaagaccaggttgctgaaaaagatccaactcaacacaaggaggatgaaggcgaaattcaaccagaaaacaaagaagacagcattgaaaacgtgagagagacagacagctccaactgctgatccataaaccagaagcctgacatgtttggaagtccttttcaataagcacatgattagtgttgttatattggcaagggctgtagacattctgctctggtcactgtattcagaatacaggttcttttctggtgtcacttttgtaagtagcaactataaacataagtaagctgtttagcaaaacacacattcctagtaggttttggttttttgatctttataaagatgaggtttttttcctagttactgtattaagtatgacttcttttagaaggttacaaaaaaattcagatgttgatacctttttaggaaatgtgcataccactcatcaaatggaatgctgaaagtttgaggtgcttgtatataatcggataaacaaaactgatcaacccaatgtgattttaaaagcccccaaagaagcttctgttttgggtctgatcctcttgatggagaaactgcagcagcatggaaattgttgggtactgtggcatacaagttattttctacagtagactgagataaactgaaaactcaggagctggcatcaaactcgtagtcccatagtcagtgttaattacacacattgttaactattggatgaaaaatacatgctattgattgtgtccaaagcctcccgaggacctccgtggggatgctctggtagcctgaatacagaactgaggtgaaagtccaaaccttgaattttacagtagtaagttggtaaaccatgtgctctgtgctatgagttaattatgttttcccaaatactaatgtggcacaagtaccatattttatcagagttcttatgtacagtatggtgaagataagtgacaagcacacatttttcttgcttcactgctgttctatattacacaggtttgttgttgttttttttaaaaaagaaattaagcagtagttagtctctaaaaatacaatgtttcaggctaccacagtgaataaatagaaatgtaatcagggattaaaaaaaaaacttatgcagcttttcaaagttgattgtttcaaaattggtgtttatttaaaataagtggtaatgtacttgaatgcactttttatgacaatgattcagtaatggtaattttactattaaagaaagtgaaaggtttagttttgttagcatggctcagcatgtagctgtcaggtgtttttcacctaagggcaaaagaaaatgatagtaataattgcagtagttgtattgtattgtatttttgcacgtgtggtaagcataggcttgaagaggtgggtaggcaggtacatgtacttcctaaatttggagataattatctttctgtaagttcgttatgcttgactgtttccatgttctcccaataatgattttatagttacttatcactttactcatggagaattaaaacgtaatgtttttcaactgtatctttctttaactggataatactgctatatgatatgcttactacagactgcattaattcacgaaacgaattctgttatgctgtaatttgaactctcctcaccacaacttattaaaaaggcaccaatagtttcccatt

SEQ ID NO: 44545 - DNA, 1896 bp, Artificial Sequence
  derived and/or modified sequence
atgaacagctcagatgaagaaaagcagctgcagcttattacttcactgaaggaacaggcaataggagaatacgaggatctgagagccgagaaccagaaaaccaaagagaagtgcgacaaaatcagacaagagcgagatgaggctgtgaagaagctcgaggaattccagaaaataagccatatggtgatagaggaagtcaactttatgcaaaatcatctggagattgaaaaaacgtgccgcgaatccgctgaagctctggcaacaaagcttaataaagagaataagacattgaaacgtataagcatgctgtacatggcaaagctgggccctgatgttattactgaagaaataaatatagatgatgaggactcaacgactgacactgatggagcagctgagacctgtgtcagcgtgcaatgccagaaacaaattaaagagctccgggatcagatcgtgtctgtacaggaggagaagaaaattctggccatcgaactggaaaacctaaagtccaaactagtcgaggtgatagaggaggtgaataaggtgaaacaggagaagaccgtgctgaacagtgaggttctcgaacagcgtaaggtcctagaaaagtgtaatcgggtctcgatgctggccgtcgaggagtacgaggaaatgcaggtcaatctggagttggagaaagaccttagaaaaaaggcggagtcatttgcccaggagatgtttatagagcagaataaacttaaacggcagtcacacctcttactgcaaagcagcatacctgaccagcagctactcaaggcattagatgagaacgcgaaattgactcagcagctcgaggaggagcgcattcagcaccagcagaaggtgaaggagctagaggaacagctcgagaacgagactcttcacaaagaaattcacaatctcaaacagcaattggagctgctggaggaggataaaaaagagttagagctcaaatatcagaactccgaggagaaagcccggaaccttaaacatagcgtggacgagctgcagaaaagagttaaccagtcagagaactccgtaccacctccaccccctccacccccacctctgccaccgccgcctcccaatccaatccggagtctcatgagcatgatacggaagcgctcacaccccagtggcagcggggcgaaaaaagaaaaggcgacccagccggaaacgaccgaagaagtcacggacctcaagagacaggccgtggaagagatgatggatagaatcaagaagggagttcatctgcggccggttaaccagaccgccaggccaaagacaaaaccagagtcatccaagggttgcgagtcagccgtcgatgaactgaaaggaatcctggggacccttaataagagcaccagctcccgcagcctgaaatctctggaccccgagaattccgaaacagagctggagcgcattttgaggagaaggaaggttactgccgaggccgacagctcctccccaaccggaatcctcgcaacatctgaaagcaaatcaatgcccgtgctcggctcagtgtcctcagtaaccaagaccgccctgaacaaaaagactttagaagcagagttcaattcgccatccccccccacccccgagccgggagagggccctcgaaaactggagggatgcacctcctccaaggtgacttttcagcccccttctagtattggctgccggaagaagtacatcgacggagaaaagcaggctgagcccgtcgtggtccttgatccagtcagtacccacgagccccagacaaaagaccaggtggctgaaaaagatcctactcaacacaaagaagacgagggcgaaattcagcccgaaaataaagaagacagcattgagaacgtgcgggagactgactcctcaaactgttag

SEQ ID NO: 44546 - DNA, 1950 bp, Artificial Sequence
  derived and/or modified sequence
atgaacagtagcgacgaagagaaacagctgcaactgatcacaagtctgaaggaacaggccatcggtgagtacgaggatctccgtgcagaaaaccaaaagaccaaggagaagtgcgataaaattaggcaggaacgggacgaggctgtaaagaaactggaggagttccagaaaatctcccatatggtaatagaggaggtcaactttatgcaaaatcacctagagattgagaagacttgtcgggaatccgcagaggcactggcaaccaaacttaacaaggaaaataagactctcaaacggatttctatgctgtacatggccaagctggggccagatgtcatcacagaggaaattaacatcgatgacgaagattctacaaccgacacagacggagctgccgagacatgcgtgagtgttcagtgccagaaacagattaaagaattgcgtgatcaaattgttagcgtacaggaagagaaaaaaatccttgccatcgaactggaaaatcttaaatctaaattggttgaggtcattgaggaggtaaacaaggtcaagcaggaaaaaacagtactgaattccgaagtgctggagcagagaaaggtcctggaaaaatgcaatcgcgtttcaatgctcgccgtcgaagagtacgaagaaatgcaggtgaatctggaacttgagaaagatttgagaaagaaggcggaaagcttcgcgcaggagatgttcatcgaacagaataaactcaagcgccagtctcatctgttactgcaaagttctattccagaccagcagttacttaaagcccttgacgagaatgccaaactgacacaacaactggaggaggagcgaatacagcaccagcagaaagtgaaagaactcgaggaacaattagagaacgagactctgcataaggagatacacaacctcaaacagcagctcgaactcttagaagaggacaagaaggaattggagctcaaatatcagaactctgaagaaaaagcacgcaatcttaagcacagcgtcgacgaattgcagaagcgcgtgaatcagtctgagaattcagtgcctccaccacccccgccaccacctcccctaccccctccccctccaaaccctatcagatcgctcatgagtatgattcggaaaaggagccacccctcaggaagtggagccaagaaagagaaagctacacagcctgagaccaccgaggaagtgaccgacctgaagaggcaggctgtggaagaaatgatggatcggatcaagaaaggagtccacctccggccagtgaaccaaacagcacggccaaagacaaagccagagtctagtaaggggtgtgagagcgcggtcgatgagttgaaaggcatcctgggtactctgaataaatcaactagttcacgctccctcaagtccctagaccctgaaaacagtgagaccgaactggaacgcatcctccggcgccggaaggtaactgctgaggcagactcctcatcgccaaccgggattttagccactagcgaatcaaagagcatgcccgtacttggcagcgtctcgtctgtgacaaagactgcactgaataagaagaccttggaagccgagtttaattccccaagccctcccacacccgagcccggagagggaccacggaagctcgaaggatgtacttcttcgaaagtcacctttcagcctccctcatcaattggctgtcgaaagaaatacatcgacggggaaaagcaagctgagcctgttgtggtgctcgacccagttagcacacatgaacctcagacgaaagatcaggtggctgagaaggatcccacccagcacaaagaagatgaaggagagatacagcctgagaacaaagaagatagcatcgagaacttctttcctttccacttcggtttcgaaggggtgttgccactagccggcgtaactctctccactaaagcccgcgacccaaagtag

SEQ ID NO: 44547 - DNA, 1896 bp, Artificial Sequence
  derived and/or modified sequence
atgaacagcagtgatgaggagaagcagctgcagctgatcaccagcctgaaggagcaggccatcggggagtatgaggacctgcgggcagagaaccagaagaccaaggagaagtgtgacaagatccggcaggagagagatgaggccgtgaagaagctggaggagttccagaagatcagccacatggtgattgaggaggtgaacttcatgcagaaccacctggagattgagaagacctgccgggagagcgctgaggccctggccaccaagctgaacaaggagaacaagaccctgaagaggatctccatgctgtacatggccaagctgggcccagatgtgatcacagaggagatcaacattgatgatgaggacagcaccacagacacagatggagctgctgagacctgtgtgtctgtgcagtgccagaagcagatcaaggagctgcgggaccagatcgtgtctgtgcaggaggagaagaagatcctggccatcgagctggagaacctgaagagcaagctggtggaggtgattgaggaggtgaacaaggtgaagcaggagaagacagtgctgaacagcgaggtgctggagcagaggaaggtgctggagaagtgcaacagagtgtccatgctggccgtggaggagtatgaggagatgcaggtgaacctggagctggagaaggacctgaggaagaaggccgagagctttgcccaggagatgttcatcgagcagaacaagctgaagaggcagagccacctgctgctgcagagcagcatcccagaccagcagctgctgaaggccctggatgaaaatgccaagctgacccagcagctggaggaggagcgcatccagcaccagcagaaggtgaaggagctggaggagcagctggagaatgagaccctgcacaaggagatccacaacctgaagcagcagctggagctgctggaggaggacaagaaggagctggagctgaagtaccagaacagcgaggagaaggccaggaacctgaagcacagcgtggatgagctgcagaagagggtgaaccagagtgaaaattctgtgcccccacctcctcctcctcctccacccctgcccccacctccacccaaccccatccgcagcctgatgtccatgatcaggaagaggagccaccccagcggcagcggggccaagaaggagaaggccacccagcctgagaccacagaggaggtgacagacctgaagaggcaggccgtggaggagatgatggaccgcatcaagaagggcgtgcacctgcggcctgtgaaccagacagcccggcccaagaccaagccagagagcagcaagggctgtgagagcgctgtggatgagctgaagggcatcctgggcaccctgaacaagagcaccagcagccgcagcctgaagagcctggaccctgaaaattctgaaacagagctggagcgcatcctgcggcggaggaaggtgacagctgaggccgacagcagcagccccaccggcatcctggccaccagcgagagcaagtccatgcctgtgctgggctctgtgtcctctgtgaccaagacagccctgaacaagaagaccctggaggccgagttcaacagccccagcccccccaccccagagcccggggagggccccaggaagctggagggctgcaccagcagcaaggtgaccttccagccccccagcagcatcggctgcaggaagaagtacattgatggagagaagcaggccgagcctgtggtggtgctggaccctgtgtccacccatgagccccagaccaaggaccaggtggccgagaaggaccccacccagcacaaggaggatgaaggagagatccagcctgagaacaaggaggacagcattgaaaatgtgcgggagacagacagcagcaactgctag

SEQ ID NO: 44548 - DNA, 1950 bp, Artificial Sequence
  derived and/or modified sequence
atgaacagcagtgatgaggagaagcagctgcagctgatcaccagcctgaaggagcaggccatcggggagtatgaggacctgcgggcagagaaccagaagaccaaggagaagtgtgacaagatccggcaggagagagatgaggccgtgaagaagctggaggagttccagaagatcagccacatggtgattgaggaggtgaacttcatgcagaaccacctggagattgagaagacctgccgggagagcgctgaggccctggccaccaagctgaacaaggagaacaagaccctgaagaggatctccatgctgtacatggccaagctgggcccagatgtgatcacagaggagatcaacattgatgatgaggacagcaccacagacacagatggagctgctgagacctgtgtgtctgtgcagtgccagaagcagatcaaggagctgcgggaccagatcgtgtctgtgcaggaggagaagaagatcctggccatcgagctggagaacctgaagagcaagctggtggaggtgattgaggaggtgaacaaggtgaagcaggagaagacagtgctgaacagcgaggtgctggagcagaggaaggtgctggagaagtgcaacagagtgtccatgctggccgtggaggagtatgaggagatgcaggtgaacctggagctggagaaggacctgaggaagaaggccgagagctttgcccaggagatgttcatcgagcagaacaagctgaagaggcagagccacctgctgctgcagagcagcatcccagaccagcagctgctgaaggccctggatgaaaatgccaagctgacccagcagctggaggaggagcgcatccagcaccagcagaaggtgaaggagctggaggagcagctggagaatgagaccctgcacaaggagatccacaacctgaagcagcagctggagctgctggaggaggacaagaaggagctggagctgaagtaccagaacagcgaggagaaggccaggaacctgaagcacagcgtggatgagctgcagaagagggtgaaccagagtgaaaattctgtgcccccacctcctcctcctcctccacccctgcccccacctccacccaaccccatccgcagcctgatgtccatgatcaggaagaggagccaccccagcggcagcggggccaagaaggagaaggccacccagcctgagaccacagaggaggtgacagacctgaagaggcaggccgtggaggagatgatggaccgcatcaagaagggcgtgcacctgcggcctgtgaaccagacagcccggcccaagaccaagccagagagcagcaagggctgtgagagcgctgtggatgagctgaagggcatcctgggcaccctgaacaagagcaccagcagccgcagcctgaagagcctggaccctgaaaattctgaaacagagctggagcgcatcctgcggcggaggaaggtgacagctgaggccgacagcagcagccccaccggcatcctggccaccagcgagagcaagtccatgcctgtgctgggctctgtgtcctctgtgaccaagacagccctgaacaagaagaccctggaggccgagttcaacagccccagcccccccaccccagagcccggggagggccccaggaagctggagggctgcaccagcagcaaggtgaccttccagccccccagcagcatcggctgcaggaagaagtacattgatggagagaagcaggccgagcctgtggtggtgctggaccctgtgtccacccatgagccccagaccaaggaccaggtggccgagaaggaccccacccagcacaaggaggatgaaggagagatccagcctgagaacaaggaggacagcattgagaacttcttccccttccacttcggctttgagggcgtgctgcccctggccggcgtgaccctgagcaccaaggcccgggaccccaagtag

SEQ ID NO: 44549 - DNA, 2448 bp, Artificial Sequence
  derived and/or modified sequence
attgcgtcccgctctacctctgtggttctttgggagcgacccccgggaagcgtccaaagtggagttcccacacacgctgcgaacccacagccggttttctctgaactcgcgtccctgagtccgggaggtggaggcggagaaaagggtgcggagcgaccccacgcagggccgccccccctcccaccagcgcgtcctgccgcgccggcagccacaggctggcatagcggctgccgacccgccctcgttcctccaccccctgaacgggactgctgggcccgccccgccccgcctgcaggtgaagcggccgcagccgccgagtaggtgcgtggggatgatctcactcgcgcgctccgcgccaggaggaggaggagcgggagcggatccaacttccgggtagtggagccgcaagccaccggcatcttgctttttcttccccctcctcctgtgtgccccgcgccgctccctctttcccttttattcccggccccacccgccaaaatgaacagctcggacgaagagaagcagctgcagctcattaccagtctgaaggagcaagcaataggcgaatatgaagaccttagagcagagaaccagaaaacaaaggagaagtgtgacaaaattaggcaagaacgagatgaagccgttaaaaaactggaagaatttcagaaaatttctcacatggtcatagaggaagttaatttcatgcagaaccatcttgaaatagagaagacttgtcgagaaagtgctgaagctttggcaacaaagctaaataaagaaaataaaacgttgaaaagaatcagcatgttgtacatggccaagctgggaccagatgtaataactgaagagataaacattgatgatgaagattcgactacagacacagacggtgccgccgagacttgtgtctcagtacagtgtcagaagcaaattaaagaacttcgagatcaaattgtatctgttcaggaggaaaagaagattttagccattgagctggaaaatctcaagagcaaactcgtagaagtaattgaagaagtaaataaagttaaacaagaaaagactgttttaaattcagaagttcttgaacagagaaaagtcttagaaaaatgcaatagagtgtccatgttagctgtagaagagtatgaggagatgcaagtaaacctggagctggagaaggaccttcgaaagaaagcagagtcatttgcacaagagatgttcattgagcaaaacaagctaaagagacaaagccaccttctgctgcagagctccatccctgatcagcagcttttgaaagctttagacgaaaatgcaaaactcacccagcaacttgaagaagagagaattcagcatcaacaaaaggtcaaagaattagaagagcaactagaaaatgaaacactccacaaagaaatacacaacctcaaacagcaactggagcttctagaggaagataaaaaggaattggaattgaaatatcagaattctgaagagaaagccagaaatttaaagcactctgttgatgaactccagaaacgagtgaaccagtctgagaattcagtacctccaccacctcctcctccaccaccacttccccctccacctcccaatcctatccgatccctcatgtccatgatccggaaacgatcccaccccagtggcagtggtgctaagaaagaaaaggcaactcaaccagaaacaactgaagaagtcacagatctaaagaggcaagcagttgaagagatgatggatagaattaaaaagggagttcatcttagacccgttaatcagacagccagaccgaagacaaagccagaatcttcgaaaggctgcgaaagtgcagtggatgaactaaaaggaatactggggacacttaacaaatccactagttcaagaagcttaaaatcccttgaccctgaaaacagtgaaactgagttagaaaggattttgcgtcgcagaaaggtgacagcagaagcagatagcagtagtccaactgggatattagccacctcagagtccaaatccatgccagtgttgggttctgtatccagtgtaacaaaaacagccttgaacaagaaaactctggaggcagaattcaacagcccgtcccccccaacacctgagccaggtgaagggccccgtaaattggaaggatgcacaagttccaaggttacgtttcagcctcccagtagcattggatgcaggaaaaaatacattgacggtgaaaaacaagccgaaccagttgtagttttagatcctgtttctacacatgaaccccaaaccaaagaccaggttgctgaaaaagatccaactcaacacaaggaggatgaaggcgaaattcaaccagaaaacaaagaagacagcattgaaaactttttcccttttcactttggttttgagggggttttgcccctggctggggtgacactgtcaaccaaagcaagggatcccaaatag

SEQ ID NO: 44550 - DNA, 1896 bp, Artificial Sequence
  derived and/or modified sequence
atgaacagcagcgacgaggagaagcagctgcagctgatcaccagcctcaaagaacaggctattggcgagtatgaggatttacgcgcagagaatcagaagaccaaagaaaaatgcgataagatcagacaagaacgcgatgaggccgttaagaagttggaggagttccagaagataagtcacatggtcattgaggaagtcaattttatgcagaaccatttagaaatcgaaaagacctgtcgagagtcagccgaggccctggctactaagctgaataaggagaacaagaccttaaagagaataagcatgctatatatggcaaaactcggaccagatgttataaccgaggaaattaatattgacgacgaggatagtaccaccgacaccgatggcgctgcggagacttgtgtatctgtgcaatgtcagaaacagatcaaggagctgagagatcagatcgtttccgtgcaggaggagaagaagatcctagctatcgagctggaaaatcttaaaagtaagctggtggaagtcatcgaagaagtgaacaaggtgaagcaggagaagacagtactgaattcagaggtgctcgaacagagaaaagtccttgagaaatgtaatagggtgtccatgctggcggtcgaagagtacgaagaaatgcaggttaacttagaactcgaaaaggacctcaggaaaaaggccgagtcattcgcccaggaaatgtttatcgaacaaaacaagctcaagaggcaatcccacctcctgctgcaatcctcgattcctgatcagcaactcctgaaagccctcgacgaaaacgcaaaactgactcagcagctggaagaagaaagaatccaacatcaacagaaggtcaaagagctagaagagcaactcgaaaacgaaactttgcataaagaaatccacaatttaaagcaacagttggagttactggaggaggacaaaaaggaactggaactcaagtaccagaactctgaagaaaaggcccggaaccttaagcactcagttgacgagctacagaaacgcgtaaatcagtctgagaactctgtaccaccgccgcccccacctccacctcccttgcccccccctccccctaacccgatcagatcgcttatgtctatgattagaaagcgctctcatccatctggatcaggcgcaaagaaagaaaaggctacacaacctgagacaacagaagaggtgaccgatcttaaaaggcaggcggtcgaggagatgatggaccggataaagaagggagtccatctgcgtcctgtcaaccagacagcacgcccgaaaacgaagccggaaagttcaaaggggtgtgaatctgcggttgatgagctcaagggcattctaggtacacttaataaatctacatcttccagatccttgaagagtttggatccggaaaattccgaaacagagttggaacgcatcctgcggagaaggaaggtcacagccgaggcagattcctcttctcccacggggatcctagcgacgtcggaatctaagtccatgcccgttctcggctccgtatcttctgttacaaagacagccctgaacaagaagacactagaggccgagttcaattcaccgtcccctccaaccccagagcccggagagggcccaaggaagctcgagggctgcacctcgagcaaggttactttccaacctccctcctccataggatgccggaagaagtacatcgatggggagaagcaagccgagcccgtcgtggtgctggatcctgtcagtacacacgaacctcagacgaaggaccaggttgccgagaaagatccaacccagcacaaggaagatgaaggcgaaatacaacctgaaaataaggaagactccatcgagaacgtccgcgaaacagatagttctaactgctag

SEQ ID NO: 44551 - DNA, 1950 bp, Artificial Sequence
  derived and/or modified sequence
atgaacagcagcgacgaggagaagcagctgcagctgatcaccagcctgaaagaacaagcgatcggtgagtatgaggacctccgggctgagaatcagaaaaccaaggagaaatgtgacaaaattcgtcaggaaagagatgaagccgttaaaaaattggaagaatttcagaagatctcacacatggtcatcgaggaggtgaatttcatgcagaatcacctagaaatcgagaaaacatgtcgtgagtctgccgaggccctggccaccaagcttaacaaggagaacaaaactttaaagaggatcagcatgctgtatatggccaaactaggccccgacgttataaccgaagagataaatatcgatgacgaagatagcacaaccgataccgatggcgctgcagagacgtgtgtgagcgtgcagtgtcagaagcagattaaggaactcagagaccagattgtgtctgttcaggaagaaaagaagatcctcgccatcgagctggagaacctgaagtccaaactggtcgaggtgatcgaggaggtgaacaaggtcaaacaggaaaagacggtattaaattcagaagtattggaacagcggaaggttctggagaagtgtaatagggtgtccatgctggctgtggaggagtacgaagagatgcaagtgaacctggagcttgagaaggatctccgaaagaaggcggagagtttcgcacaggagatgtttattgagcagaacaagctcaagcgccagtcacacctactgcttcagagttcgatcccggatcaacagctgcttaaagccctcgacgagaatgccaaactaacccagcagttagaagaggagcgaatccaacaccagcagaaagtgaaggagctagaagagcagctggaaaatgaaaccctccataaagaaatacacaacctgaaacaacaactggaactgctcgaggaagataagaaggaactggaattgaagtaccaaaattccgaggagaaggcccggaacctcaaacactctgtggatgagctgcaaaaaagggtgaaccagagcgaaaacagtgtccccccgccacccccaccacctccccccttacctcccccccctcctaaccccatcaggtctctgatgtctatgatcagaaagcggtcacatccgtccggctcaggggcaaaaaaagagaaagccacccagcccgagacaaccgaagaggtgaccgatttaaaaaggcaagccgtagaggagatgatggaccgaatcaaaaagggcgttcatttacggccagtcaaccaaacagctcgtccgaagaccaaacctgagtcgtccaaggggtgcgaaagtgctgtcgatgagctaaagggcatactggggacattgaataagtcaacctccagccgcagcctgaaatctcttgatccggaaaacagcgaaacagagttggagaggatactgcgccgtaggaaggttacggcagaagctgatagctcatcccctaccggcatcctcgctaccagcgaatcgaagtctatgcccgtgctgggtagcgtcagtagcgtgaccaaaaccgccctgaacaaaaagactctggaagccgagttcaattccccttcccctccaactccagagcctggagaaggtcctagaaagttagaaggctgcaccagctccaaagtgactttccaacctccttccagcattgggtgtcgcaaaaaatatatagatggcgagaaacaagcggaaccggtagtggtgctggatcccgtgtccacccacgaaccgcaaacaaaagaccaagtcgccgaaaaggacccgacccagcataaggaggatgaaggggagatccagccggagaataaggaggactccatcgagaactttttcccctttcatttcgggttcgagggcgttctcccattggcaggtgtgactctttccactaaggcacgagacccaaaatag

SEQ ID NO: 44552 - DNA, 1896 bp, Artificial Sequence
  derived and/or modified sequence
atgaactctagcgacgaggaaaagcagctccaacttatcacgagcttaaaggaacaggctatcggcgagtatgaagatctgcgggcagaaaaccagaagaccaaggaaaaatgtgacaaaatcagacaggagcgcgacgaggccgtgaagaaactggaggagttccagaaaatctcccacatggtgattgaggaggtaaactttatgcaaaaccatctcgaaatcgagaagacctgccgcgagtcagcagaggcgcttgccacaaaattgaacaaggagaacaaaactctgaagagaatctcaatgctctacatggcgaaacttggaccagatgtgataacagaagagatcaacattgatgacgaggattctaccacagacacagatggggctgcagaaacgtgcgtgtcagtgcaatgccaaaagcaaatcaaggagcttcgggatcagattgtgtcagttcaagaggaaaaaaaaatcctggcgatagagctggagaacctgaaatccaagctcgtggaagtgattgaggaagtgaacaaggtcaagcaagaaaaaactgtgcttaatagcgaagtgctggagcaacgcaaagtactagagaaatgtaatagggttagcatgctagccgtagaggagtacgaggaaatgcaggttaatctggaactggagaaggacttgaggaagaaggccgagagttttgcacaggaaatgtttatcgaacagaacaaactgaagcgacagagccatttactgttgcaatcttcgattcccgaccagcagctgctgaaggcacttgacgagaacgctaagttaacacaacagttagaagaagagcgtattcagcatcagcaaaaagttaaagaattagaggaacagttagagaacgagaccctacacaaggagattcataatctgaagcagcagttagagcttcttgaagaggataagaaggagctagaattaaagtatcagaacagcgaagagaaggcccgaaacctgaagcattccgtcgatgagcttcagaagagggtgaaccagtctgaaaattccgtacctcccccacccccacccccaccaccactcccaccacctcctcctaatcccatccggagcttaatgtctatgatcagaaagaggtcacatccctccgggtctggagcaaaaaaggagaaagccacacaacctgagacaacagaagaagtgaccgacctgaagcggcaggctgtcgaggaaatgatggacagaataaagaaaggcgtccacctccgaccagtgaatcagacagccagacccaaaacaaagccagaatcttcaaaaggctgcgagtcagcggtcgacgagctgaaggggatcctggggacactgaacaaaagcacatcttcaagaagtttgaagagcttagatccagagaactctgagacagagcttgagagaatcctaagacggaggaaggtcaccgccgaggcggattcatcttcccctactggtatccttgcaacatccgagtccaagagtatgccagttcttggctcagtatccagtgtgaccaagacagccctgaacaaaaaaaccctcgaagcagagttcaatagtcctagtcccccaacccctgagcctggtgagggccctcgtaagctcgagggttgcacgtcctccaaggtgactttccagcccccttccagcatcgggtgcagaaaaaaatacatcgatggagagaaacaagccgaaccggtcgtggtactggaccctgtgtccacccatgaacctcagactaaagaccaggtagcagaaaaagaccctacccagcacaaagaggacgaaggcgaaatacagccagagaataaagaggatagcattgaaaatgtcagagagactgactccagtaattgctag

SEQ ID NO: 44553 - DNA, 1950 bp, Artificial Sequence
  derived and/or modified sequence
atgaattcaagcgatgaggaaaaacagctgcagctgattactagcctcaaagaacaggctataggagaatatgaggacctgcgtgccgaaaaccagaagaccaaagagaagtgcgacaaaattcggcaggagcgggacgaggccgtgaagaagctggaggaattccagaaaatttcacacatggttattgaggaggtgaacttcatgcagaaccacctggagatcgaaaaaacatgtcgagagagcgccgaggcgcttgccacaaaactcaacaaagagaataagactctcaagaggatttcaatgctctatatggcaaaactgggacccgatgttattacagaagagatcaacatcgatgatgaagatagcaccacagacaccgacggcgctgcggaaacctgcgtcagcgttcagtgtcagaagcaaatcaaggaactgcgggatcagattgtctctgtgcaggaagaaaagaagattctggctatagaattagagaatctgaagagtaaactggtggaggtgatagaagaagtgaacaaagtaaagcaggaaaaaactgtactcaactctgaggttctcgagcagcgcaaggtgttagagaagtgtaaccgtgtgtccatgctggcagtggaagagtacgaggaaatgcaagtcaacctcgagctagagaaagaccttagaaaaaaggccgagtccttcgcccaggagatgttcattgagcagaacaaactgaagcggcagagtcatctgctgctgcagagctcaattcctgaccagcaactcctgaaagcactggatgagaacgctaagcttactcagcagctggaggaagagcgcattcagcatcagcaaaaagtgaaagagttggaagaacaactggaaaacgagacactgcacaaggaaattcacaaccttaagcagcagcttgaacttctcgaagaagacaaaaaggaattggagctgaagtaccagaattccgaggaaaaggcacgtaatttaaagcactctgtggacgaactccagaaacgcgtgaatcagtcagaaaacagtgtccctcccccacctccaccccctccccctctgccaccccctccccctaaccctattcggagcttgatgtctatgatccggaagaggtcccatccaagtggctctggggcaaagaaagagaaagctacccaaccagagacgacagaggaggtgactgacctcaagaggcaggctgtagaggagatgatggaccgcatcaaaaaaggcgtccacctccgccctgtcaatcagacagctcggccaaaaactaagccagagtcaagcaaaggctgcgagagcgccgttgacgagctgaaagggatactgggaacactgaataagtccacaagttcgaggtctctcaaaagcctggatccagaaaatagcgagaccgagctcgagaggatcctgcgcagacggaaggttactgcagaagccgattcctcaagcccaaccggaattttggccacgtcagaatctaaaagcatgcccgtgctcgggtccgtcagctctgtcacaaaaactgctctcaacaaaaaaactctggaggcagaatttaattctccaagccccccaactcccgagcctggcgaaggaccaagaaagctcgaaggctgtaccagcagcaaagtcacctttcaaccgccaagttctatcggttgtagaaagaagtatattgatggcgaaaagcaggcagagccggtggtggtgttagatcctgtctccactcatgagccgcaaacgaaggatcaggtcgcagaaaaagatccaacccagcacaaggaggacgagggtgaaatccaacccgaaaacaaggaagacagtattgaaaacttcttcccttttcacttcgggttcgagggcgtgctccctctcgccggagtgaccttgagtacgaaggctcgtgaccccaagtag

SEQ ID NO: 44554 - protein, 131 aa, Artificial Sequence
  derived and/or modified sequence
MKIFLPVLLAALLGVERASSLMCFSCLNQKSNLYCLKPTICSDQDNYCVTVSASAGIGNLVTFGHSLSKTCSPACPIPEGVNVGVASMGISCCQSFLCNFSAADGGLRASVTLLGAGLLLSLLPALLRFGP

SEQ ID NO: 44555 - protein, 88 aa, Artificial Sequence
  derived and/or modified sequence
MKIFLPVLLAALLGVERASSLMCFSCLNQKSNLYCLKPTICSDQDNYCVTVSASAGIGNLVTFGHSLSKTCSPACPIPEGVNVGVASM

SEQ ID NO: 44556 - DNA, 396 bp, Artificial Sequence
  derived and/or modified sequence
atgaagatctttctcccagtgctgctggctgctctgctcggagtcgaacgcgcaagttcactcatgtgtttctcttgtctaaatcagaagtcaaatctctattgtctgaaacctacaatttgtagcgaccaggataactactgcgtgaccgtctcggcgtctgccggcataggcaacctcgtgacattcgggcattctttgtccaagacctgttcacccgcttgccccattcctgagggcgtcaacgttggcgtggcctccatgggaattagctgttgtcagagctttctttgcaacttttctgccgctgatggtgggctgcgggcctcagtgaccttacttggggcgggactactgctcagtcttttgccagctcttctcaggtttggcccatag

SEQ ID NO: 44557 - DNA, 396 bp, Artificial Sequence
  derived and/or modified sequence
atgaagattttcctccccgtgctcctggcggccctgctcggggtggagcgggctagctctctgatgtgcttctcatgccttaaccagaagtctaacttgtactgcctcaaacctacaatctgtagcgatcaggacaattactgcgtgaccgtgagcgctagcgccggcattggcaacttggtgacgttcggtcacagcttgtcgaagacgtgctcgccggcatgccccatccctgagggtgtgaatgtgggcgttgcgagtatgggaatttcgtgctgccaaagttttttgtgcaactttagtgcagcggacggcgggttgagagcctcagtgaccctccttggcgccggactgctgttaagtttactgcctgccctgcttaggtttggaccatag

SEQ ID NO: 44558 - DNA, 267 bp, Artificial Sequence
  derived and/or modified sequence
atgaagatttttttacctgtattattggctgccctcctcggcgttgagcgggcatcttctttgatgtgcttctcttgcctcaatcagaagagcaacctctactgcctcaagcctacgatttgcagcgaccaggacaactactgcgttaccgtcagtgcaagcgccggaattggtaacctggttacctttgggcacagcctgagcaagacctgctctcccgcatgtcctataccagagggcgtcaatgtgggcgtggccagcatgtag

SEQ ID NO: 44559 - DNA, 396 bp, Artificial Sequence
  derived and/or modified sequence
atgaagatcttcctccccgtgctgttagcggctttgctgggagtcgagcgggcaagcagtctgatgtgcttcagctgtcttaaccagaaaagcaacctttattgtcttaaaccaacaatttgcagtgatcaagataactattgcgtgaccgtgtcagctagtgcaggaatagggaacctcgtgacctttggccattccctgagcaagacttgctcccccgcctgtcctattcccgagggggtgaatgtgggggtggcttctatgggcattagctgctgtcagtcttttctctgcaatttcagcgctgctgacggtggactcagggcgtcagtgaccctgctgggagctggccttctgctttctctgctccccgcacttcttagatttggcccttag

SEQ ID NO: 44560 - DNA, 396 bp, Artificial Sequence
  derived and/or modified sequence
atgaagatctttcttcctgtcttactggccgccctgctgggggtagaaagggcttcgagtctgatgtgcttcagttgcctgaaccagaagagcaatctctactgccttaagcctaccatctgtagcgaccaggacaactattgtgtgactgtgagtgcctccgcgggaattggcaacctggttacattcgggcatagtctgtccaaaacatgctcccccgcctgtcccatacccgaaggcgttaatgtcggggtcgcctcgatgggcatctcatgttgtcagtctttcctttgcaatttttccgcagctgatggcgggctcagggccagtgtgaccctactgggcgcaggcctgctcttatccctcttgcccgcactcctaagattcggtccttag

SEQ ID NO: 44561 - DNA, 396 bp, Artificial Sequence
  derived and/or modified sequence
atgaagatttttcttccggtcctcctggcagctcttctgggcgtagagagggccagcagccttatgtgcttttcatgcctgaaccagaagtctaacttgtactgcctaaaacccaccatttgctctgaccaagacaactattgtgtgacagtctccgcctcagccggtattggcaacctagtaaccttcggccacagtcttagtaagacttgttctcccgcctgccctattcccgagggcgtgaacgtcggagttgcttcaatgggaatttcctgttgccagtccttcctgtgcaatttcagtgcggcagacggcggcctgcgagccagcgtgactctcttgggtgccggactgctccttagcctgctacccgctctgttgagattcggaccctag

SEQ ID NO: 44562 - DNA, 396 bp, Artificial Sequence
  derived and/or modified sequence
atgaagattttcctgcccgttctgttggccgcactcctcggcgtggagcgcgccagcagtcttatgtgtttctcatgcctaaaccagaaatcgaacctgtattgtttgaaaccaacaatatgctcagaccaagataactattgtgttacagtgagtgcttctgccgggataggcaacctagttacattcggacacagtctatctaagacgtgctcaccggcctgccctatacccgaaggagttaatgtgggggtcgcctcaatgggaatctcttgctgtcagagttttctgtgtaatttctctgcagccgatggggggctgcgggcctcagtcaccctcctgggcgccgggcttctcttgtcactcctgcctgctctgcttcgatttggcccatag

SEQ ID NO: 44563 - DNA, 396 bp, Artificial Sequence
  derived and/or modified sequence
atgaaaattttcctcccagttttgctggcagcgctactgggtgttgagcgtgctagttctcttatgtgcttcagttgcttgaatcagaagagtaatctatactgcctcaagccaaccatatgtagtgaccaagataactattgcgtgaccgtatccgcaagtgccggaatcggcaacctcgttactttcggtcattccctatcaaaaacctgcagtcctgcctgtcctattcccgagggggtaaatgtgggcgttgcctccatgggaatctcctgttgtcagagttttctttgcaacttcagcgccgccgacggcggactaagagcatccgtgactctactcggtgctggactcctcctatctttactgcccgcactccttagattcgggccctag

SEQ ID NO: 44564 - DNA, 396 bp, Artificial Sequence
  derived and/or modified sequence
atgaagatcttcctgcctgtgctgctggccgccctgctgggcgtggagcgggccagcagcctgatgtgcttcagctgcctgaaccagaagagcaacctgtactgcctgaagcccaccatctgcagcgaccaggacaactactgtgtgacagtgtctgccagcgctggcatcggcaacctggtgaccttcggccacagcctgagcaagacctgcagccctgcctgccccatccctgagggcgtgaatgtgggcgtggcctccatgggcatcagctgctgccagagcttcctgtgcaacttctctgctgctgatggcggcctgcgggcctctgtgaccctgctgggcgccggcctgctgctgagcctgctgcctgccctgctgcgcttcggcccctag

SEQ ID NO: 44565 - DNA, 267 bp, Artificial Sequence
  derived and/or modified sequence
atgaagatcttcctgcctgtgctgctggccgccctgctgggcgtggagcgggccagcagcctgatgtgcttcagctgcctgaaccagaagagcaacctgtactgcctgaagcccaccatctgcagcgaccaggacaactactgtgtgacagtgtctgccagcgctggcatcggcaacctggtgaccttcggccacagcctgagcaagacctgcagccctgcctgccccatccctgagggcgtgaatgtgggcgtggcctccatgtag

SEQ ID NO: 44566 - DNA, 1181 bp, Artificial Sequence
  derived and/or modified sequence
cccggggccgcgcggctgcctgggaggctccgggccagccgcggtccagagcgcgcgaggttcggggagctcggccaggctgctggtacctgcgtccgcccggcgagcaggacaggctgctttggtttgtgacctccaggcaggacggccatcctctccagaatgaagatcttcttgccagtgctgctggctgcccttctgggtgtggagcgagccagctcgctgatgtgcttctcctgcttgaaccagaagagcaatctgtactgcctgaagccgaccatctgctccgaccaggacaactactgcgtgactgtgtctgctagtgccggcattgggaatctcgtgacatttggccacagcctgagcaagacctgttccccggcctgccccatcccagaaggcgtcaatgttggtgtggcttccatgggcatcagctgctgccagagctttctgtgcaatttcagtgcggccgatggcgggctgcgggcaagcgtcaccctgctgggtgccgggctgctgctgagcctgctgccggccctgctgcggtttggcccctgaccgcccagaccctgtcccccgatcccccagctcaggaaggaaagcccagccctttctggatcccacagtgtatgggagcccctgactcctcacgtgcctgatctgtgcccttggtcccaggtcaggcccaccccctgcacctccacctgccccagcccctgcctctgccccaagtggggccagctgccctcacttctggggtggatgatgtgaccttccttgggggaccgcggaagggacgagggttccctggagtcttacggtccaacatcaggaccaagtcccatggacatgctgacagggtccccagggagaccgtgtcagtagggatgtgtgcctggctgtgtacgtgggtgtgcagtgcacgtgagagcacgtggcggcttctgggggccatgtttggggagggaggtgtgccagcagcctggagagcctcagtccctgtagccccctgccctggcacagctgcatgcacttcaagggcagcctttgggggttggggtttctgccacttccgggtctaggccctgccccaaatccagccagtcctgccccagcccacccccacattggagccctcctgctgctttggtgcctcaaataaatacagatgtcccccagct

SEQ ID NO: 44567 - DNA, 1173 bp, Artificial Sequence
  derived and/or modified sequence
ccggggccgcgcggctgcctgggaggctccgggccagccgcggtccagagcgcgcgaggttcggggagctcggccaggctgctggtacctgcgtccgcccggcggacaggctgctttggtttgtgacctccaggcaggacggccatcctctccagaatgaagatcttcttgccagtgctgctggctgcccttctgggtgtggagcgagccagctcgctgatgtgcttctcctgcttgaaccagaagagcaatctgtactgcctgaagccgaccatctgctccgaccaggacaactactgcgtgactgtgtctgctagtgccggcattgggaatctcgtgacatttggccacagcctgagcaagacctgttccccggcctgccccatcccagaaggcgtcaatgttggtgtggcttccatgggcatcagctgctgccagagctttctgtgcaatttcagtgcggccgatggcgggctgcgggcaagcgtcaccctgctgggtgccgggctgctgctgagcctgctgccggccctgctgcggtttggcccctgaccgcccagaccctgtcccccgatcccccagctcaggaaggaaagcccagccctttctggatcccacagtgtatgggagcccctgactcctcacgtgcctgatctgtgcccttggtcccaggtcaggcccaccccctgcacctccacctgccccagcccctgcctctgccccaagtggggccagctgccctcacttctggggtggatgatgtgaccttccttgggggaccgcggaagggacgagggttccctggagtcttacggtccaacatcaggaccaagtcccatggacatgctgacagggtccccagggagaccgtgtcagtagggatgtgtgcctggctgtgtacgtgggtgtgcagtgcacgtgagagcacgtggcggcttctgggggccatgtttggggagggaggtgtgccagcagcctggagagcctcagtccctgtagccccctgccctggcacagctgcatgcacttcaagggcagcctttgggggttggggtttctgccacttccgggtctaggccctgccccaaatccagccagtcctgccccagcccacccccacattggagccctcctgctgctttggtgcctcaaataaatacagatgtcccccag

SEQ ID NO: 44568 - DNA, 1335 bp, Artificial Sequence
  derived and/or modified sequence
gaacagcccagcctggagcgggaagcagggacaagatgacctcaggaatcccaggctgcgggggtgcctgcgtcctcccctcccgagctccactccgcaggcgagacccccaacactgctccccgacactctccgaggcacccctcctccgtgctcacacccaaacacgtctgctcacccgtgggcttcccaccccgaacacaacgaggactgtccaggtgtcagtgacggtcaccccgacctggtcccctgtccggcctcgccaggacaggctgctttggtttgtgacctccaggcaggacggccatcctctccagaatgaagatcttcttgccagtgctgctggctgcccttctgggtgtggagcgagccagctcgctgatgtgcttctcctgcttgaaccagaagagcaatctgtactgcctgaagccgaccatctgctccgaccaggacaactactgcgtgactgtgtctgctagtgccggcattgggaatctcgtgacatttggccacagcctgagcaagacctgttccccggcctgccccatcccagaaggcgtcaatgttggtgtggcttccatgggcatcagctgctgccagagctttctgtgcaatttcagtgcggccgatggcgggctgcgggcaagcgtcaccctgctgggtgccgggctgctgctgagcctgctgccggccctgctgcggtttggcccctgaccgcccagaccctgtcccccgatcccccagctcaggaaggaaagcccagccctttctggatcccacagtgtatgggagcccctgactcctcacgtgcctgatctgtgcccttggtcccaggtcaggcccaccccctgcacctccacctgccccagcccctgcctctgccccaagtggggccagctgccctcacttctggggtggatgatgtgaccttccttgggggaccgcggaagggacgagggttccctggagtcttacggtccaacatcaggaccaagtcccatggacatgctgacagggtccccagggagaccgtgtcagtagggatgtgtgcctggctgtgtacgtgggtgtgcagtgcacgtgagagcacgtggcggcttctgggggccatgtttggggagggaggtgtgccagcagcctggagagcctcagtccctgtagccccctgccctggcacagctgcatgcacttcaagggcagcctttgggggttggggtttctgccacttccgggtctaggccctgccccaaatccagccagtcctgccccagcccacccccacattggagccctcctgctgctttggtgcctcaaataaatacagatgtcccccag

SEQ ID NO: 44569 - DNA, 1419 bp, Artificial Sequence
  derived and/or modified sequence
cagagcgcgcgaggttcggggagctcggccaggctgctggtacctgcgtccgcccggcggcctccccgaatgtttccaaagatctggggcgggagcgggcggagactgccgccaggagcctcccggccgccccagggctgcgcagccactggagcccatcacccaactccagacgctcctggctcctctacgtgggccgggagggacagccttgaggactaggggagggggcacgggaccttgcagagctcctggccggaaagggaggattgaccgcccccggcatatcaccccggagcactggaacccgcccccgcttcttgttttggcactggtggtgcttgcgagcaggacaggctgctttggtttgtgacctccaggcaggacggccatcctctccagaatgaagatcttcttgccagtgctgctggctgcccttctgggtgtggagcgagccagctcgctgatgtgcttctcctgcttgaaccagaagagcaatctgtactgcctgaagccgaccatctgctccgaccaggacaactactgcgtgactgtgtctgctagtgccggcattgggaatctcgtgacatttggccacagcctgagcaagacctgttccccggcctgccccatcccagaaggcgtcaatgttggtgtggcttccatgggcatcagctgctgccagagctttctgtgcaatttcagtgcggccgatggcgggctgcgggcaagcgtcaccctgctgggtgccgggctgctgctgagcctgctgccggccctgctgcggtttggcccctgaccgcccagaccctgtcccccgatcccccagctcaggaaggaaagcccagccctttctggatcccacagtgtatgggagcccctgactcctcacgtgcctgatctgtgcccttggtcccaggtcaggcccaccccctgcacctccacctgccccagcccctgcctctgccccaagtggggccagctgccctcacttctggggtggatgatgtgaccttccttgggggaccgcggaagggacgagggttccctggagtcttacggtccaacatcaggaccaagtcccatggacatgctgacagggtccccagggagaccgtgtcagtagggatgtgtgcctggctgtgtacgtgggtgtgcagtgcacgtgagagcacgtggcggcttctgggggccatgtttggggagggaggtgtgccagcagcctggagagcctcagtccctgtagccccctgccctggcacagctgcatgcacttcaagggcagcctttgggggttggggtttctgccacttccgggtctaggccctgccccaaatccagccagtcctgccccagcccacccccacattggagccctcctgctgctttggtgcctcaaataaatacagatgtccccca

SEQ ID NO: 44570 - DNA, 740 bp, Artificial Sequence
  derived and/or modified sequence
agagcgcgcgaggttcggggagctcggccaggctgctggtacctgcgtccgcccggcgggtctcactctgttgcccaggctgcagtgcagtggcatgatcatagttcacttcagtcttgaactccctggctcaagagatcctcccacctcagcctcccaagtagctgaccacagagcaggacaggctgctttggtttgtgacctccaggcaggacggccatcctctccagaatgaagatcttcttgccagtgctgctggctgcccttctgggtgtggagcgagccagctcgctgatgtgcttctcctgcttgaaccagaagagcaatctgtactgcctgaagccgaccatctgctccgaccaggacaactactgcgtgactgtgtctgctagtgccggcattgggaatctcgtgacatttggccacagcctgagcaagacctgttccccggcctgccccatcccagaaggcgtcaatgttggtgtggcttccatgggcatcagctgctgccagagctttctgtgcaatttcagtgcggccgatggcgggctgcgggcaagcgtcaccctgctgggtgccgggctgctgctgagcctgctgccggccctgctgcggtttggcccctgaccgcccagaccctgtcccccgatcccccagctcaggaaggaaagcccagccctttctggatcccacagtgtatgggagcccctgactcctcacgtgcctgatctgtgcccttg

SEQ ID NO: 44571 - DNA, 1256 bp, Artificial Sequence
  derived and/or modified sequence
cagccgcggtccagagcgcgcgaggttcggggagctcggccaggctgctggtacctgcgtccgcccggcgggtctcactctgttgcccaggctgcagtgcagtggcatgatcatagttcacttcagtcttgaactccctggctcaagagatcctcccacctcagcctcccaagtagctgaccacaggacaggctgctttggtttgtgacctccaggcaggacggccatcctctccagaatgaagatcttcttgccagtgctgctggctgcccttctgggtgtggagcgagccagctcgctgatgtgcttctcctgcttgaaccagaagagcaatctgtactgcctgaagccgaccatctgctccgaccaggacaactactgcgtgactgtgtctgctagtgccggcattgggaatctcgtgacatttggccacagcctgagcaagacctgttccccggcctgccccatcccagaaggcgtcaatgttggtgtggcttccatgggcatcagctgctgccagagctttctgtgcaatttcagtgcggccgatggcgggctgcgggcaagcgtcaccctgctgggtgccgggctgctgctgagcctgctgccggccctgctgcggtttggcccctgaccgcccagaccctgtcccccgatcccccagctcaggaaggaaagcccagccctttctggatcccacagtgtatgggagcccctgactcctcacgtgcctgatctgtgcccttggtcccaggtcaggcccaccccctgcacctccacctgccccagcccctgcctctgccccaagtggggccagctgccctcacttctggggtggatgatgtgaccttccttgggggaccgcggaagggacgagggttccctggagtcttacggtccaacatcaggaccaagtcccatggacatgctgacagggtccccagggagaccgtgtcagtagggatgtgtgcctggctgtgtacgtgggtgtgcagtgcacgtgagagcacgtggcggcttctgggggccatgtttggggagggaggtgtgccagcagcctggagagcctcagtccctgtagccccctgccctggcacagctgcatgcacttcaagggcagcctttgggggttggggtttctgccacttccgggtctaggccctgccccaaatccagccagtcctgccccagcccacccccacattggagccctcctgctgctttggtgcctcaaataaatacagatgtcccccagc

SEQ ID NO: 44572 - DNA, 868 bp, Artificial Sequence
  derived and/or modified sequence
caggctgctggtacctgcgtccgcccggcggcctccccgaatgtttccaaagatctggggcgggagcgggcggagactgccgccaggagcctcccggccgccccagggctgcgcagccactggagcccatcacccaactccagacgctcctggctcctctacgtgggccgggagggacagccttgaggactaggggagggggcacgggaccttgcagagctcctggccggaaagggaggattgaccgcccccggcatatcaccccggagcactggaacccgcccccgcttcttgttttggcactggtggtgcttgcggacaggctgctttggtttgtgacctccaggcaggacggccatcctctccagaatgaagatcttcttgccagtgctgctggctgcccttctgggtgtggagcgagccagctcgctgatgtgcttctcctgcttgaaccagaagagcaatctgtactgcctgaagccgaccatctgctccgaccaggacaactactgcgtgactgtgtctgctagtgccggcattgggaatctcgtgacatttggccacagcctgagcaagacctgttccccggcctgccccatcccagaaggcgtcaatgttggtgtggcttccatgggcatcagctgctgccagagctttctgtgcaatttcagtgcggccgatggcgggctgcgggcaagcgtcaccctgctgggtgccgggctgctgctgagcctgctgccggccctgctgcggtttggcccctgaccgcccagaccctgtcccccgatcccccagctcaggaaggaaagcccagccctttctggatcccacagtgtatgggagcccctgactcctcacgtgcctgatc

SEQ ID NO: 44573 - DNA, 857 bp, Artificial Sequence
  derived and/or modified sequence
ttcggggagctcggccaggctgctggtacctgcgtccgcccggcggcaggacggccatcctctccagaatgaagatcttcttgccagtgctgctggctgcccttctgggtgtggagcgagccagctcgctgatgtgcttctcctgcttgaaccagaagagcaatctgtactgcctgaagccgaccatctgctccgaccaggacaactactgcgtgactgtgtctgctagtgccggcattgggaatctcgtgacatttggccacagcctgagcaagacctgttccccggcctgccccatcccagaaggcgtcaatgttggtgtggcttccatgggcatcagctgctgccagagctttctgtgcaatttcagtgcggccgatggcgggctgcgggcaagcgtcaccctgctgggtgccgggctgctgctgagcctgctgccggccctgctgcggtttggcccctgaccgcccagaccctgtcccccgatcccccagctcaggaaggaaagcccagccctttctggatcccacagtgtatgggagcccctgactcctcacgtgcctgatctgtgcccttggtcccaggtcaggcccaccccctgcacctccacctgccccagcccctgcctctgccccaagtggggccagctgccctcacttctggggtggatgatgtgaccttccttgggggaccgcggaagggacgagggttccctggagtcttacggtccaacatcaggaccaagtcccatggacatgctgacagggtccccagggagaccgtgtcagtagggatgtgtgcctggctgtgtacgtgggtgtgcagtgcacgtgagagcacgtggcggcttctggggg

SEQ ID NO: 44574 - DNA, 396 bp, Artificial Sequence
  derived and/or modified sequence
atgaagatcttcctgcccgtgctgctggccgccctgctgggcgtggagcgggctagcagtttaatgtgcttcagttgtctgaatcagaagagtaatctatattgcctcaaaccaacaatatgctctgatcaagacaactattgcgttactgtcagcgccagcgctggaataggcaacctcgtgacattcgggcatagcctgtcaaagacttgcagccctgcatgtccaatccctgaaggggtcaatgtgggcgtcgccagcatgggaatcagctgctgccagtcattcctctgcaactttagtgccgccgatgggggcctgagggccagcgtcactctgcttggggctgggctgctgctgagccttttgcctgctttactacgctttggcccttag

SEQ ID NO: 44575 - DNA, 396 bp, Artificial Sequence
  derived and/or modified sequence
atgaagatcttcctgcccgtgctgctggccgccctgctgggcgtggaacgcgctagcagcctgatgtgtttctcctgtcttaatcagaaaagtaacctctattgtctcaagccgactatatgcagcgaccaggataactattgtgtcacagtgagtgctagcgccggcattggtaatctggtcacgttcggacattccttaagcaaaacgtgttcgcctgcctgccctattccagagggagtgaatgtgggagtggcctccatgggcatcagctgctgtcagtctttcctatgcaacttcagcgccgcagatggcggactccgcgcttctgttacactgctaggagccggtctcctgctgagtctgctgcccgcccttctgaggtttggtccctag

SEQ ID NO: 44576 - DNA, 267 bp, Artificial Sequence
  derived and/or modified sequence
atgaagatcttcctgcccgtgctgctggccgccctgctgggcgtggagagagccagcagcctgatgtgctttagctgcttaaatcagaaatctaatttgtactgtctcaaaccgacaatatgttcagaccaggataattactgcgtcaccgtctcagcatcagccggaattggaaacctggttacgtttggacactcactgagtaaaacttgctccccagcctgtcccatcccagagggggtaaacgtcggtgtggcgagcatgtag

SEQ ID NO: 44577 - DNA, 396 bp, Artificial Sequence
  derived and/or modified sequence
atgaagatcttcctgcccgtgctgctggccgccctgctgggcgtggagcgtgctagttcactgatgtgtttctcctgcctgaatcagaagagtaacctgtattgcctgaagcccactatttgcagtgaccaagataactattgcgtcacagtgagtgcttccgcggggatcggtaatctggttaccttcggacacagtttatccaagacctgtagcccggcgtgtcctatacccgagggcgttaacgtcggagtggcgtctatgggcatctcgtgttgtcagtctttcctgtgcaacttctccgctgctgatggcgggttgagagcatccgttaccctgctgggcgcggggctgctcctgtctcttctcccggcattactgcggtttggcccatag

SEQ ID NO: 44578 - DNA, 396 bp, Artificial Sequence
  derived and/or modified sequence
atgaagatcttcctgcccgtgctgctggccgccctgctgggcgtggaaagagcgagttctcttatgtgcttttcctgtctcaaccagaaaagcaacctgtattgcctgaaacccacgatttgcagtgaccaggataactattgtgtcaccgtgagcgcttccgccggaatcggcaacctcgtgacttttggacactccctgtcaaagacatgctcccccgcgtgcccaattcccgaaggggtgaacgttggggtggccagcatgggcatctcttgctgccaatctttcttgtgtaattttagcgctgccgacggtggtcttagagcatccgtcaccctcctgggggcaggcttgctgctcagtctcctacccgccctcctgagatttgggccctag

SEQ ID NO: 44579 - DNA, 396 bp, Artificial Sequence
  derived and/or modified sequence
atgaagatcttcctgcccgtgctgctggccgccctgctgggcgtggaacgggcgtcctcccttatgtgctttagctgtctcaatcagaaaagtaacctctactgcctgaaaccaactatctgttctgaccaggataattactgcgtgaccgtctccgctagtgccgggatcggcaacctagttacattcggccattcactgagcaagacctgctccccagcttgccccatccccgaaggcgtgaatgtgggtgttgccagtatgggcatttcttgttgccaaagtttcctctgtaacttctctgcagccgacgggggtttaagagccagcgtcaccctattgggcgccgggctcctgctgtctttgctgcccgccctattgcgcttcggaccctag

SEQ ID NO: 44580 - DNA, 396 bp, Artificial Sequence
  derived and/or modified sequence
atgaagatcttcctgcccgtgctgctggccgccctgctgggcgtggagcgggccagtagtttaatgtgttttagctgtctgaaccagaagtccaatctctactgcctaaagcccacaatctgttcagaccaggacaactactgcgtgacagtctctgcctctgccggcatcgggaatctggtgacatttggccatagtctcagcaaaacttgcagccccgcttgtcccatcccagaaggtgttaatgtgggcgttgcgtcgatgggaatctcttgctgccagtctttcctgtgtaacttttcagctgcagacgggggccttcgtgcgagcgtcacactactcggcgctgggctcctcctgtccctgttgcctgccttgctacggtttggcccatag

SEQ ID NO: 44581 - DNA, 396 bp, Artificial Sequence
  derived and/or modified sequence
atgaagatcttcctgcccgtgctgctggccgccctgctgggcgtggagcgggcgtccagcctgatgtgcttttcatgtctgaatcagaagagcaacctttactgcctgaaacctacaatctgtagtgaccaggataattattgcgtgacagtttctgcatccgcagggattggaaacctggtgaccttcggtcatagtctctctaagacttgctcccctgcatgtccaattccagaaggtgtcaacgtaggagttgcttccatgggaattagctgttgccagtcatttttgtgtaacttttctgccgccgatggtgggctcagagcatccgtcacccttcttggggccggccttctgttgtcgctactacctgcattgctgagattcggtccttag

SEQ ID NO: 44582 - DNA, 396 bp, Artificial Sequence
  derived and/or modified sequence
atgaaaatctttctgccggtgctgctcgcggcactactcggggtagagagggccagctcacttatgtgcttttcgtgtcttaaccaaaaatctaatctgtattgtctgaaaccaacaatctgcagcgaccaggacaattattgcgtcaccgtttcagcaagcgcagggataggcaatctcgtaacattcggccacagcctctctaagacgtgttccccagcctgccccatcccagagggcgtcaacgtgggagtggcctctatgggaatttcatgctgccagtccttcctgtgtaacttttctgctgcggacggaggcctccgggctagcgttactctcttgggcgcaggtctgctgcttagtctgttaccggcactcctgcgcttcggtccatag

SEQ ID NO: 44583 - DNA, 396 bp, Artificial Sequence
  derived and/or modified sequence
atgaaaatctttctgccagtgcttctggcggctctcctgggcgtggagagagcgtctagtctcatgtgcttttcctgcttaaaccaaaagagcaatctgtactgcttaaaacccacgatctgttcagatcaagacaactactgtgtgactgtatctgcctcggctgggattggtaacttggtgactttcggccactccctctcgaaaacctgctcaccggcttgcccaatcccagagggggtaaacgttggcgtggcgagcatgggaattagttgctgccagtcctttctctgcaatttctctgctgcagacggcggactcagggcaagcgtgactctgctgggggcagggcttctgcttagtctgttacccgcactgcttaggtttggaccttag

SEQ ID NO: 44584 - DNA, 267 bp, Artificial Sequence
  derived and/or modified sequence
atgaagatcttcctccccgttctactggcggcactgctcggagttgagcgtgcctcaagcttaatgtgctttagctgcttaaatcaaaaatcaaatctgtattgcctcaagcctacaatttgttctgaccaggacaattattgcgtgactgtgtcggcttcggccggaatcggaaatctggtgacctttggtcacagcctctcaaagacttgctctcccgcatgtcctatccccgagggggtaaatgtgggggtggcctctatgtag

SEQ ID NO: 44585 - DNA, 396 bp, Artificial Sequence
  derived and/or modified sequence
atgaagatttttcttcccgtgctgctagccgcattactcggagtagagcgggctagctctttaatgtgcttcagctgtcttaaccagaaatctaatctgtactgcctaaagcctacaatttgctcagaccaagacaattattgcgtgactgtgagtgcgtccgccggtatcggcaacctcgtgacctttggacattccttgagcaagacctgctcacctgcgtgccctatcccggagggagttaatgtgggcgttgcttcaatgggcattagttgctgtcagtccttcctttgtaacttctccgccgcagatggtggactgcgggcatcggttaccttgttaggtgccggactgctgctctcgttgctccctgccctactgcggtttggtccatag

SEQ ID NO: 44586 - DNA, 396 bp, Artificial Sequence
  derived and/or modified sequence
atgaaaattttcctcccagtcttactcgctgctctattaggagtggaaagggcttcctcacttatgtgtttcagctgtctgaaccaaaagagcaacctgtactgccttaaacccactatctgcagcgatcaagataactactgcgtaacggtttccgcctcagccggaataggcaacctggtgacctttggacacagtctaagcaagacctgctcgcctgcttgccccattcctgaaggggtgaacgtcggtgtagcatcaatgggaatctcctgctgccagtctttcttgtgtaacttcagcgccgctgacggcggtctccgggcatcggtaaccctgctgggcgcaggcttgttgctgagcttattgcctgctttgttgaggtttggaccctag

SEQ ID NO: 44587 - DNA, 396 bp, Artificial Sequence
  derived and/or modified sequence
atgaagatctttctgcccgtcctcttggcggctctactcggcgtggagagggcaagcagtctgatgtgcttctcttgcctgaaccagaaatctaacctgtattgtttgaaaccaaccatctgttctgaccaagacaactattgtgttacagtaagcgcgtctgcaggaatcggcaacctggttaccttcggccactccttgagtaagacatgctctcccgcttgccccatcccagaaggagtcaacgtgggggtcgcatccatggggatctcatgttgccagtccttcctatgtaactttagcgcggctgatggagggctaagagcctcggtgactctgttgggggctggcctgctgctaagccttctgcctgcccttctgcgattcggtccgtag

SEQ ID NO: 44588 - DNA, 396 bp, Artificial Sequence
  derived and/or modified sequence
atgaaaatattcctaccagtgctactggctgccctgctcggagtcgagcgtgcatcatcactgatgtgcttcagctgtctgaatcagaagtcaaacttatactgccttaaacccaccatttgctctgaccaggataattattgcgtcaccgtgtcagcgagcgcgggaatcggcaatctggtaacgttcggtcacagtctgtccaagacatgctcccccgcatgtcctatccctgagggtgtcaacgtcggcgttgcttccatggggatctcgtgctgtcagtcctttctctgcaacttttctgccgctgacggaggccttagagcttctgtaactttacttggtgctggcttgctgctgtcactgcttccggctcttctgcgtttcgggccttag

SEQ ID NO: 44589 - DNA, 396 bp, Artificial Sequence
  derived and/or modified sequence
atgaagatttttttgcccgtgctgctggctgctctccttggagtggaacgcgctagcagtctaatgtgcttttcctgtctgaaccagaagagtaacctgtactgtcttaagcctaccatctgcagcgatcaggataactattgtgtgacggtctctgcaagtgccggtataggtaacttggtgacttttgggcattctctctccaaaacgtgctctccggcatgccccatccccgagggggtgaatgtgggagtggccagcatgggcatttcatgctgtcagtcctttctctgtaattttagcgcagctgacggcggactcagagctagtgttactctgctgggggctggcttgctgctgtctctgcttccagcactgctgagattcggcccatag

SEQ ID NO: 44590 - DNA, 396 bp, Artificial Sequence
  derived and/or modified sequence
atgaagatcttcctgcccgtgctgctggccgccctgctgggcgtggagagagccagcagcctgatgtgcttcagctgcctgaaccagaagagcaacctgtactgcctgaagcccaccatctgcagcgaccaggacaactactgcgtgaccgtgagcgccagcgccggcatcggcaacctggtgaccttcggccacagcctgagcaagacctgcagccccgcctgccccatccccgagggcgtgaacgtgggcgtggccagcatgggcatcagctgctgccagagcttcctgtgcaacttcagcgccgccgacggcggcctgagagccagcgtgaccctgctgggcgccggcctgctgctgagcctgctgcccgccctgctgagattcggcccctag

SEQ ID NO: 44591 - DNA, 267 bp, Artificial Sequence
  derived and/or modified sequence
atgaagatcttcctgcccgtgctgctggccgccctgctgggcgtggagagagccagcagcctgatgtgcttcagctgcctgaaccagaagagcaacctgtactgcctgaagcccaccatctgcagcgaccaggacaactactgcgtgaccgtgagcgccagcgccggcatcggcaacctggtgaccttcggccacagcctgagcaagacctgcagccccgcctgccccatccccgagggcgtgaacgtgggcgtggccagcatgtag

SEQ ID NO: 44592 - protein, 467 aa, Artificial Sequence
  derived and/or modified sequence
MHSTTPISSLFSFTSPAVKRLLGWKQGDEEEKWAEKAVDSLVKKLKKKKGAMDELERALSCPGQPSKCVTIPRSLDGRLQVSHRKGLPHVIYCRVWRWPDLQSHHELKPLECCEFPFGSKQKEVCINPYHYRRVETPVLPPVLVPRHSEYNPQLSLLAKFRSASLHSEPLMPHNATYPDSFQQPPCSALPPSPSHAFSQSPCTASYPHSPGSPSEPESPYQHSVDTPPLPYHATEASETQSGQPVDATADRHVVLSIPNGDFRPVCYEEPQHWCSVAYYELNNRVGETFQASSRSVLIDGFTDPSNNRNRFCLGLLSNVNRNSTIENTRRHIGKGVHLYYVGGEVYAECVSDSSIFVQSRNCNYQHGFHPATVCKIPSGCSLKVFNNQLFAQLLAQSVHHGFEVVYELTKMCTIRMSFVKGWGAEYHRQDVTSTPCWIEIHLHGPLQWLDKVLTQMGSPHNPISSVS

SEQ ID NO: 44593 - DNA, 1404 bp, Artificial Sequence
  derived and/or modified sequence
atgcattctacaacccccattagctcactgttttccttcaccagtccggcagttaagcgcctactaggttggaagcagggcgacgaagaggaaaagtgggctgaaaaagctgtagactccctggtcaagaagttgaagaagaagaagggggctatggacgagctagaacgagcccttagctgccccggccagcccagcaaatgcgtgacgatccctagaagccttgacggcagacttcaggtgagccatcgcaagggcctaccacacgtgatctattgccgcgtgtggaggtggccagatctccaaagtcaccacgagctcaagcccttagaatgctgcgagttcccgtttggctcaaagcaaaaggaagtttgcattaacccatatcattaccggcgggttgagactccagtgctgcctccagttttggtcccacgtcacagtgaatataatccccaactgagcctgctcgccaaattccgctcagcttcgctccatagcgagccccttatgccccacaacgctacgtaccctgatagcttccagcaacctccctgttcggctctgcccccgtctccatcccacgccttcagccagtcaccctgcactgccagctaccctcattctcccggcagcccttctgagcctgagagtccttaccagcactccgtggacacaccacccttgccctaccatgccaccgaggcatctgagacccagtccgggcagccagttgatgccacggcagatcgccatgtagtcctgtccatacccaacggagatttccggccggtttgctacgaggagcctcagcattggtgcagtgttgcatactatgagttaaacaatcgggtgggcgaaaccttccaggccagcagccggtcggtactaattgacggctttaccgaccccagtaacaataggaacaggttttgcctggggctcctgtccaacgtgaatcggaatagtaccatcgaaaacacccgccggcatattggtaagggagtgcacctgtactacgttgggggcgaagtctacgccgagtgtgtgtccgacagtagcatattcgtgcagagcaggaactgtaactatcagcatggctttcaccctgccacggtgtgcaaaattccctctgggtgttctcttaaagtctttaacaatcaactgttcgcccagctcctcgcgcagtctgttcatcatggcttcgaagtggtgtacgagctgactaaaatgtgcactattcgtatgtcatttgtgaaaggttggggggcggaatatcacaggcaggatgtcacgtctactccctgctggattgagattcatttgcacggacccctgcaatggttggacaaggtgctgactcagatgggtagtccacataaccctatctcctccgtctcttag

SEQ ID NO: 44594 - DNA, 1404 bp, Artificial Sequence
  derived and/or modified sequence
atgcactctaccacgcccatttccagtcttttctcgttcaccagtccagccgtgaagcggctattaggctggaaacagggagacgaagaagagaaatgggctgaaaaagccgtggattcacttgtgaaaaaactgaagaagaagaaaggggccatggacgaacttgagcgcgccctaagctgcccgggacagcccagcaagtgcgtaaccattccgcgttcgctggatggcaggctgcaggttagtcaccgcaagggcttaccccacgtgatttactgtcgagtttggcgttggccggacctgcagtctcatcatgaattgaaacctctggaatgctgcgagtttcccttcggctcaaaacaaaaagaggtctgtattaacccttatcactaccggcgggtagagacgccagtcctgcctcccgtgctggtcccgcgacactctgaatacaatccccagctgagcctcctggccaaattccggagcgcctcactacatagcgagccactgatgcctcacaatgcaacttaccctgactcatttcagcagcccccctgctccgcattgcccccaagcccttcccacgcattcagccagagcccatgcacagcttcatacccccattctcccgggtctccttccgagcccgaaagtccctatcagcactctgtggacacccctcccctcccgtatcacgccaccgaggcctccgaaactcagagcggacagccagttgacgcaacagccgatagacatgtggtgttgagtattcctaatggtgactttcggcctgtctgctacgaagaaccccaacattggtgttcagttgcctactatgaactcaacaatcgcgtgggagagactttccaggcgtcatcccgttcggtgctgatcgacggcttcaccgatccatccaacaatcgtaataggttttgcctgggattattgtccaatgtgaacagaaacagtactattgagaacacgcgccgccatatcggaaagggtgtgcatctttactatgtgggtggagaggtgtacgccgaatgtgtgtccgactcgtcaatcttcgtccagtccagaaattgtaattaccaacatggattccaccccgcaacagtatgcaaaatcccctcaggctgctccctgaaagtgtttaacaaccagctgttcgcccagctgctggctcagtcagtgcaccatggtttcgaggtcgtgtacgagctaaccaaaatgtgtactataagaatgtcgttcgttaaaggatggggcgccgagtatcaccgccaggatgtgactagtacaccatgctggatcgagatccacctacacggcccacttcaatggctcgacaaagtgctaactcagatggggtccccccacaatcctatctccagcgttagttag

SEQ ID NO: 44595 - DNA, 1404 bp, Artificial Sequence
  derived and/or modified sequence
atgcacagcaccacccccatcagcagcctcttctccttcaccagccctgctgtgaagaggctgctgggctggaagcagggagatgaggaggagaagtgggccgagaaggctgtggacagcctggtgaagaagctgaagaagaagaagggggccatggatgagctggagcgggccctgagctgccccggccagcccagcaaatgtgtgaccatccccaggagcctggatggccgcctgcaggtgagccacaggaagggcctgccccacgtgatctactgccgggtgtggcgctggccagacctgcagagccaccacgagctgaagcccctggagtgctgtgagttccccttcggcagcaagcagaaggaggtgtgcatcaacccctaccactaccgccgggtggagacccctgtgctgccccctgtgctggtgcccaggcacagcgagtacaacccccagctgagcctgctggccaagttccgcagcgccagcctgcacagcgagcccctgatgccccacaatgccacctacccagacagcttccagcagcccccctgcagcgccctgccccccagccccagccacgccttcagccagagcccctgcacagccagctacccccacagccctggcagccccagcgagcctgagagcccctaccagcacagcgtggacaccccacccctgccctaccacgccacagaggccagcgagacccagagcggccagcctgtggatgccacagctgacagacatgtggtgctgagcatccccaatggagacttccggcctgtgtgctatgaggagccccagcactggtgcagcgtggcctactatgagctgaacaacagagtgggggagaccttccaggccagcagccgctctgtgctgattgatggcttcacagaccccagcaacaacagaaaccgcttctgcctgggcctgctgagcaatgtgaacagaaacagcaccatcgagaacaccaggaggcacatcggcaagggcgtgcacctgtactacgtgggcggggaggtgtatgcagaatgtgtgtctgacagcagcatctttgtgcagagcaggaactgcaactaccagcacggcttccacccagccaccgtgtgcaagatccccagcggctgcagcctgaaggtgttcaacaaccagctgtttgcccagctgctggcccagagcgtgcaccacggctttgaggtggtgtatgagctgaccaagatgtgcaccatccgcatgagctttgtgaagggctggggcgctgagtaccaccggcaggatgtgaccagcaccccctgctggattgagatccacctgcacggccccctgcagtggctggacaaggtgctgacccagatgggcagcccccacaaccccatcagctctgtgtcctag

SEQ ID NO: 44596 - DNA, 1404 bp, Artificial Sequence
  derived and/or modified sequence
atgcacagcaccacccccatcagcagcctgttcagcttcaccagcccagcagttaaaagactcctcggctggaagcagggcgatgaggaggaaaagtgggcagaaaaagctgtagactctctggtgaaaaaactcaagaagaaaaagggggctatggatgaattggagagagcccttagttgtcccggacagccctcgaaatgtgtcacaatacccagaagtctcgacggcagattgcaggtaagtcacaggaagggactcccacatgtgatctattgccgtgtctggagatggcctgacctccagtcacatcacgagctgaaacccttagagtgctgtgagttcccctttggtagcaagcagaaggaggtgtgcatcaacccctatcattatcgacgggtcgaaacacctgtgctcccacccgtcctggtccccagacattctgagtataacccccagctctcccttcttgcaaaatttcgatccgcatctctgcatagcgagccactgatgccgcacaatgccacgtacccagatagctttcagcaacccccatgcagtgctctcccgccatcaccatctcatgcattctctcagtctccttgcaccgcaagctaccctcactctcccgggtccccctccgagccggagtccccttaccagcactccgtggacaccccgccgctcccttaccatgccacagaagcttctgaaacccagtctgggcagcctgttgatgccacggcagatcgccatgtggtgctttcaatccccaatggcgactttaggcctgtttgttatgaggagccacagcattggtgctcagtggcctattacgagttgaacaatcgtgtaggcgagacatttcaagcctcctcacgaagcgttcttatcgatggctttaccgaccctagcaacaaccgaaatcggttttgtctggggcttctgtccaatgtgaacaggaattcaacaattgaaaatactcgcaggcatattggaaagggtgtgcatctgtattatgttggtggcgaagtgtacgctgagtgcgtgagcgatagttcaatattcgtgcaaagcagaaattgcaactaccagcatgggttccaccccgccactgtctgtaaaatcccttctgggtgttccttgaaggtgttcaacaatcagctgtttgcccagttacttgcccagagcgtacaccacgggttcgaagtcgtgtatgaacttactaagatgtgcaccatccggatgtccttcgtcaagggctggggcgccgagtaccacagacaggatgtcactagtactccatgttggatcgagatacacctgcacgggcccctgcagtggctggacaaagtcctgactcaaatgggctctccacataaccccatatcgtctgtgtcctag

SEQ ID NO: 44597 - DNA, 1404 bp, Artificial Sequence
  derived and/or modified sequence
atgcacagcaccacccccatcagcagcctgttcagcttcaccagccccgcagtgaagcgtctgctgggttggaaacaaggggatgaggaggaaaaatgggcagagaaagccgttgattccctggttaaaaagcttaaaaaaaagaaaggggctatggatgagctcgaacgggctcttagctgtcccggacagccgtccaagtgtgtcaccatccccaggtccttagacggaaggcttcaggtcagccaccggaaaggcctcccgcacgtgatctattgtcgtgtgtggagatggccggacctgcaaagccatcatgagctcaagcccttggaatgctgtgagttcccttttggaagcaaacaaaaggaagtgtgcatcaacccttaccattaccgccgagtggagacgccggttctaccacctgtgctcgtaccccgtcacagcgaatataacccccagctgagcctcttggctaaatttaggtcggcatcattacactctgagcccctgatgccacacaacgccacctaccctgattcctttcagcagcctccttgtagtgcactgccccctagccctagccacgccttctcgcaaagtccatgtaccgcctcatatccacactcccctggttcgccatctgagccagaaagcccatatcagcactccgtggataccccgcctttaccataccacgcaactgaagcatcggaaacacagagcggtcagcccgttgatgccaccgctgatcggcatgtggtgttaagcattccaaatggggactttcggcccgtgtgctacgaagagccacagcactggtgcagtgtcgcctactatgagctgaacaacagagttggtgaaaccttccaagcgagtagcaggtccgtcctgattgatggatttacggacccctcaaacaatcgaaaccgcttctgtcttgggcttctgtctaatgttaaccggaacagcacaattgaaaataccagacggcacattggcaaaggcgtgcacttgtactacgtggggggagaggtgtatgcagagtgtgtctcagacagtagcatattcgtgcagtcccggaactgcaattaccagcacggcttccaccctgcgacagtctgcaaaattccatcaggatgctcgctgaaggtattcaacaaccagctgtttgcacagcttctggcccagtcagtgcaccacggattcgaagtagtctatgagctcacaaagatgtgtaccattcgcatgtcctttgttaagggatggggggctgaatatcaccggcaggacgttacttctacaccttgctggatcgaaatccacttgcacggtccactccagtggctcgacaaagtgctcactcaaatgggttccccccacaaccccatctcttcagtgtcctag

SEQ ID NO: 44598 - DNA, 1404 bp, Artificial Sequence
  derived and/or modified sequence
atgcactctaccactcccatatccagtttgttctcctttaccagtcctgcagtcaaacggctcctgggttggaaacagggtgatgaggaggagaaatgggccgaaaaggccgttgactcactagtaaaaaagttgaagaagaagaaaggggcaatggacgagctggaacgagctctcagttgtcctggtcaaccgtctaagtgtgttaccattcccaggtccctggacggacggttacaggtgagtcacagaaagggccttccccatgtcatttactgtagagtctggcggtggccggatctacaaagccaccatgagctgaagcctctggagtgttgcgaatttccgtttggaagcaaacagaaggaggtgtgtatcaacccttaccactaccgccgagttgagacccctgtgctgcctcccgttctagtccccaggcattcagagtacaatccccaactcagccttctggccaaattccgctccgcgagcctgcactccgaaccgctcatgccacacaatgcaacctaccccgactccttccagcagccaccatgcagtgccctccctccaagcccttctcacgcattctcccagagcccttgtactgcatcttatcctcacagtcccggatcccccagcgaaccagaatcaccttatcaacatagtgtggataccccgccactgccctatcacgccacagaggccagtgaaactcagtccggccagcccgtggacgcaaccgccgaccggcatgtggtgctttctatccctaacggagattttaggcctgtctgttatgaggagccgcaacactggtgtagcgtcgcatactacgaactgaataacagggtcggcgaaacattccaggcttcttcccgctctgtgctgatcgatgggtttacggatccaagcaacaatcgcaaccgcttctgtctggggctgcttagtaacgttaatagaaactctactatagagaacacaagacggcatatcgggaaaggagttcatctgtactacgtgggaggcgaagtgtatgcagaatgtgtgtcagattctagcatttttgtacaatcccgcaattgcaattatcagcatgggtttcacccggctactgtctgcaagatacctagcgggtgttccctgaaggtcttcaacaaccagctcttcgcccagttgctggcccagtctgtacaccatggctttgaagttgtgtatgagttaacgaaaatgtgtaccattagaatgtcatttgtgaaaggctggggagcagaataccatagacaggacgtcaccagcacaccctgctggatcgaaatccacctgcacggacctctgcagtggcttgataaggtgcttacgcaaatgggttcacctcacaatccaatatccagcgtgtcctag

SEQ ID NO: 44599 - DNA, 1404 bp, Artificial Sequence
  derived and/or modified sequence
atgcattcaaccacccccatatcgagcctgttcagttttacatcaccagccgtaaagagactattgggctggaagcaaggcgacgaagaggagaaatgggctgaaaaagcagtggattcgctggtaaaaaagctcaaaaagaagaagggggcaatggatgaactggagcgggctctgagttgcccaggccagccttctaagtgtgttacaattccacgttctctcgacggcagattgcaggtgtctcacagaaagggccttccacacgtgatctactgcagagtgtggcggtggcctgacctgcagtcacaccacgagctcaaacccctcgagtgctgcgagttcccattcggatctaaacaaaaagaggtctgcatcaatccctaccattatcggagagttgaaacacccgtcctgccacccgtgttggttccgaggcattctgaatacaacccacagctgagcttgttggccaagttcagaagcgcttctctgcattccgagcccctaatgccccataacgcaacctaccccgacagctttcagcagcctccttgttccgcactgccaccgtctccatcacatgcgttttcccaaagcccctgcacggccagctatcctcacagccccggatccccgtcagagcccgaaagcccctaccagcactctgttgacactccccctctcccttaccacgccactgaggcctcggaaacccagtcaggccagcccgtggacgccacggcagatcgccatgtagttctgtcaataccaaatggcgatttccgccctgtgtgttatgaggaacctcagcactggtgcagcgtggcttactacgagcttaacaacagggtcggggaaacttttcaagccagctcccgctcagtgttgattgacggattcaccgatcccagcaataataggaatcgcttttgcttgggccttctgtccaacgtcaatcggaattcaaccatcgagaatactaggcgtcacataggtaagggggtccacctctactacgttggaggtgaagtgtatgcagaatgtgtgagcgattcaagcatatttgtccagtcacgaaactgcaattaccaacacggatttcacccggcaactgtctgcaagattccgtcaggatgctctttaaaagtgttcaacaatcagctctttgcccagttgctggctcaaagtgtgcaccacgggtttgaggtggtgtacgaactcaccaaaatgtgcacaatccgcatgagtttcgtgaagggatggggggctgagtaccacagacaggacgtgacctccacaccatgctggatcgaaattcacctgcacggtcctttgcaatggcttgataaagttttaactcagatgggatcaccccacaaccctataagcagcgtgtcttag

SEQ ID NO: 44600 - DNA, 5592 bp, Artificial Sequence
  derived and/or modified sequence
cgcactaatacgggcgatgaggcttcgcggctccagtctgactgacgccggctggggccgccgccgccgccgccgccgccgccgctgctgcagccgctgtctcggtccccgccgccgccgccgggccctgcaggcgctgggcgcgcgcagccaggcaagttggccaccctgttcaagggcttaggagaaagtcaacacacttcgcaacttgaattggtcccagctgctcccagaagaacgggcgggttggtccctatgccacccctggagagctactcgccgcccactttgccgtgaagggctgtgcggttcccgtgcgcgccggagcctgctgtggcctcttatgcactccaccacccccatcagctccctcttctccttcaccagccccgcagtgaagagactgctaggctggaagcaaggagatgaagaggaaaagtgggcagagaaggcagtggactctctagtgaagaagttaaagaagaagaagggagccatggacgagctggagagggctctcagctgcccggggcagcccagcaaatgcgtcacgattccccgctccctggacgggcggctgcaggtgtcccaccgcaagggcctgccccatgtgatttactgtcgcgtgtggcgctggccggatctgcagtcccaccacgagctgaagccgctggagtgctgtgagttcccatttggctccaagcagaaagaagtgtgcattaacccttaccactaccgccgggtggagactccagtactgcctcctgtgctcgtgccaagacacagtgaatataacccccagctcagcctcctggccaagttccgcagcgcctccctgcacagtgagccactcatgccacacaacgccacctatcctgactctttccagcagcctccgtgctctgcactccctccctcacccagccacgcgttctcccagtccccgtgcacggccagctaccctcactccccaggaagtccttctgagccagagagtccctatcaacactcagttgacacaccacccctgccttatcatgccacagaagcctctgagacccagagtggccaacctgtagatgccacagctgatagacatgtagtgctatcgataccaaatggagactttcgaccagtttgttacgaggagccccagcactggtgctcggtcgcctactatgaactgaacaaccgagttggggagacattccaggcttcctcccgaagtgtgctcatagatgggttcaccgacccttcaaataacaggaacagattctgtcttggacttctttctaatgtaaacagaaactcaacgatagaaaataccaggagacatataggaaagggtgtgcacttgtactacgtcgggggagaggtgtatgccgagtgcgtgagtgacagcagcatctttgtgcagagccggaactgcaactatcaacacggcttccacccagctaccgtctgcaagatccccagcggctgcagcctcaaggtcttcaacaaccagctcttcgctcagctcctggcccagtcagttcaccacggctttgaagtcgtgtatgaactgaccaagatgtgtactatccggatgagttttgttaagggttggggtgctgagtatcatcgccaggatgtcaccagcaccccctgctggattgagattcatcttcatgggccactgcagtggctggacaaagttctgactcagatgggctctccacataaccccatttcttcagtgtcttaacagtcatgtcttaagctgcatttccataggatagaggctattgcagggagtggcttgtatcatttcagatttgcaactgaagtttctaaaaacatgtgtaaatacatagaatgtatactgttcttattttttttaatcaccgtttgttttgtgctttctagttaacctgatgccagtacagtgcaattggaaaagcaggactttggtgcctgtgctataagcagcagattttgtgggaggaaacacttgagaggcgatattgtcaacagtatttgaagggtgttagcagaataaaagacagctttagtcagccgtgtcattataaagcatgttgtgtggcctcacagaaacattgaaactgtttatacagcaaaagtcaggtattagcagcactaaagcaaatatcactcagatgaaacaaagcagtgaaacccctacagtttaaatgatgtcacttttagtgctgttggcaagaaaaaaaaaacaacaaacttgtacaatgaattaatgagataggccatagaaactttatttctaaggttgacatacctatagctgggctcctgtgctcatattcagtggtacattttaaacaaactgtgatcggaaaagaaaaaaaactgtgaagccaaaagtcatgttccctcagtctaccactgtaaaaacagagtctaatatgggaaaataaatatgaaaatagcatgaaatgctgtttcccagattgcaagataagaccagaacttggtccaagagccagccacccagggagactcctgctttccacagaggagaccaggttcctgtcgtgctggttgttcgtgtcaggcagtcctgcaaactttgagtctgcgcagcgtgccagaatagcttgtgtttcagtcctgtgtcaagaagcaggtgaaaccaaaggttggagaaaagcatcacacgtcgacttacactttctcatttcccacgttccagtctcctgggaagggcactctttcgccacgttttcctgcctcttggcaaatattaactctttgcagatcactaaagcaacagtaaagactttgagaaaatctagacacattattggatcaatgagttatttaacctagtgtctagtgattatctaacctggaaataaattcccaaggaaagtgataataatttcataatcatctgcaatttctggggaacagtggtactgaataataagacatcttttaaaaatatacacaatattaaaaacctgttcttattttactttagatgagggaggaaaatcccccaaatttctaggtactttcatatatatacttgccatgcactaaacactgcattgcttggaaaaatatttcacaccctctttaaaaatgtacaatttaagatggcagttatgcttgtaacagacagcacttcagtaatccaagaagtttcttcatttatacattttatctcaactctttctagcattagtgcacatggtagtttttctaattaaattgtattcaaggtagaaatgatcatgtgagaaagatatatgattgagctactactgtcacctcttacagttactagtgttagctaatagaaactttcatatatacacatagaaaagaattattacattttacattgaaaaatgtaatatatggcccatgtagtgtatagaaaaatctgtagtttattggttcatcaactatgtattgtgcacctacctatgggtgtcaggtacaatgttaggtactgtagaatcaaatgtaaataagagacagtcccagccctcagggagccgagaacctaatagtgaatctgtttgtacagacatcttcatgtttcagaacttttaaaacaaaacaaaataatgtaatctatcatcttttgcttgaaagaatgtgattgatttcttatctctgttttgaaattatttccttactcttctgcaaagtcaggtaatggattccttgtataaatgctacttttcttccatgtctcaaagttgttttttttcctcccctttcttccctgttttccaataattctccatgtccccttttcttagaaaaggcattaatatggtgaatcttgtatgggaaccattccatgggagaacttcaacacagtttttgctccagagatcaaacatagctttcgtgatctctctaccagctatctaacttatcctctggtaatctttttttttttttttttttttttgagatggagtctcgctgtgtcaccaggccagagtgcagtggcgtgatcttggctcactgcaacctctgcctcccgggttcgagtgattctcctgcctcagcctcccaagtagttgggactacaggctaccacgcccagctaatttttatatttttagtagagacggggtttcaccatggtagccagaatggtctctatctcttgaccttgtgatccgcccgcctcagcctcccaaagtgctgggattacaggcgtgagccactgcgcccggcttcctctggtaatcttacacctttacagaattaatctaaactggtggctcataaatgacattaaaaacaaaaaaaaaatctggatgcagtggctcattcctatagtcccagcactttgggaggccaaggcgggaggatcatctgagcccaggagtttggggctgtagtgaactatgatcatacaacttcattctagcctgggtgacaaagtgacaccctgtctctaaacaaaaatcaagaaacaaaaaacttgtatttccctgcagctttgggaagccagaacacaatattgcagtgaatctgaattttctgtgacaaataaattattaaattggcacatatgatcatcaccagtcatgtctcatcaaaagcctttattatgatgcttgtacattttgaagaatttagaattaatgagaagttaaccctttagtcattgtaacacaatcatattttaatcagctttttcttttgctaccaagagtttcaaaaaataaatgcagtatttgatttcaggctgctaaatgggctcatttagcattcattccttgatgtagacattaaaaaaaaaactgaatagcattctttccaggataactaataaagcagacatgctaagcctataaatacatcagcactgcagcacacgtttaaggttgccacggacaaggatcacacaatagagaacactgtagtaacatttcggtctgctcacaagacccagaacattgatcagtttttgttgttggtttattatttttctgttaaaaaattgtgaaaagtttgttttagctagatgatattttaatagctgcgagtgctttggaactataaagatgtcactacttaacacatataccttatgttttgttttgttttgttttacactcagtataaatcaggagaagttagccaaccatctagcatttagaatcctcttttttattgtcttctaaggatatggatgttcccataacagcaacaaaacagcaacaaaaacatttcataaatatcacttgatagactgtaagcacctgcttaactttgtgtcccaaatatttagtgtgtatatatatatatatatatacacacacacacacatatatattcaacaaataaagcaaaatataacatgcatttcacattttgtctttccctgttacgattttaatagcagaactgtatgacaagtttaggtgatcctagcatatgttaaattcaaattaatgtaaaacagattaacaacaacaaagaaactgtctatttgagtgaagtcatgctttctattataataacttggcttcggttatccatcaaatgcacacttatactgttatctgattgtttataataaagaatactgtacttata

SEQ ID NO: 44601 - DNA, 5389 bp, Artificial Sequence
  derived and/or modified sequence
gcaacttgaattggtcccagctgctcccagaagaacgggcgggttggtccctatgccacccctggagagctactcgccgcccactttgccgtgaagggctgtgcggttcccgtgcgcgccggagcctgctgtggcctcttatgcactccaccacccccatcagctccctcttctccttcaccagccccgcagtgaagagactgctaggctggaagcaaggagatgaagaggaaaagtgggcagagaaggcagtggactctctagtgaagaagttaaagaagaagaagggagccatggacgagctggagagggctctcagctgcccggggcagcccagcaaatgcgtcacgattccccgctccctggacgggcggctgcaggtgtcccaccgcaagggcctgccccatgtgatttactgtcgcgtgtggcgctggccggatctgcagtcccaccacgagctgaagccgctggagtgctgtgagttcccatttggctccaagcagaaagaagtgtgcattaacccttaccactaccgccgggtggagactccagtactgcctcctgtgctcgtgccaagacacagtgaatataacccccagctcagcctcctggccaagttccgcagcgcctccctgcacagtgagccactcatgccacacaacgccacctatcctgactctttccagcagcctccgtgctctgcactccctccctcacccagccacgcgttctcccagtccccgtgcacggccagctaccctcactccccaggaagtccttctgagccagagagtccctatcaacactcagttgacacaccacccctgccttatcatgccacagaagcctctgagacccagagtggccaacctgtagatgccacagctgatagacatgtagtgctatcgataccaaatggagactttcgaccagtttgttacgaggagccccagcactggtgctcggtcgcctactatgaactgaacaaccgagttggggagacattccaggcttcctcccgaagtgtgctcatagatgggttcaccgacccttcaaataacaggaacagattctgtcttggacttctttctaatgtaaacagaaactcaacgatagaaaataccaggagacatataggaaagggtgtgcacttgtactacgtcgggggagaggtgtatgccgagtgcgtgagtgacagcagcatctttgtgcagagccggaactgcaactatcaacacggcttccacccagctaccgtctgcaagatccccagcggctgcagcctcaaggtcttcaacaaccagctcttcgctcagctcctggcccagtcagttcaccacggctttgaagtcgtgtatgaactgaccaagatgtgtactatccggatgagttttgttaagggttggggtgctgagtatcatcgccaggatgtcaccagcaccccctgctggattgagattcatcttcatgggccactgcagtggctggacaaagttctgactcagatgggctctccacataaccccatttcttcagtgtcttaacagtcatgtcttaagctgcatttccataggatagaggctattgcagggagtggcttgtatcatttcagatttgcaactgaagtttctaaaaacatgtgtaaatacatagaatgtatactgttcttattttttttaatcaccgtttgttttgtgctttctagttaacctgatgccagtacagtgcaattggaaaagcaggactttggtgcctgtgctataagcagcagattttgtgggaggaaacacttgagaggcgatattgtcaacagtatttgaagggtgttagcagaataaaagacagctttagtcagccgtgtcattataaagcatgttgtgtggcctcacagaaacattgaaactgtttatacagcaaaagtcaggtattagcagcactaaagcaaatatcactcagatgaaacaaagcagtgaaacccctacagtttaaatgatgtcacttttagtgctgttggcaagaaaaaaaaaacaacaaacttgtacaatgaattaatgagataggccatagaaactttatttctaaggttgacatacctatagctgggctcctgtgctcatattcagtggtacattttaaacaaactgtgatcggaaaagaaaaaaaactgtgaagccaaaagtcatgttccctcagtctaccactgtaaaaacagagtctaatatgggaaaataaatatgaaaatagcatgaaatgctgtttcccagattgcaagataagaccagaacttggtccaagagccagccacccagggagactcctgctttccacagaggagaccaggttcctgtcgtgctggttgttcgtgtcaggcagtcctgcaaactttgagtctgcgcagcgtgccagaatagcttgtgtttcagtcctgtgtcaagaagcaggtgaaaccaaaggttggagaaaagcatcacacgtcgacttacactttctcatttcccacgttccagtctcctgggaagggcactctttcgccacgttttcctgcctcttggcaaatattaactctttgcagatcactaaagcaacagtaaagactttgagaaaatctagacacattattggatcaatgagttatttaacctagtgtctagtgattatctaacctggaaataaattcccaaggaaagtgataataatttcataatcatctgcaatttctggggaacagtggtactgaataataagacatcttttaaaaatatacacaatattaaaaacctgttcttattttactttagatgagggaggaaaatcccccaaatttctaggtactttcatatatatacttgccatgcactaaacactgcattgcttggaaaaatatttcacaccctctttaaaaatgtacaatttaagatggcagttatgcttgtaacagacagcacttcagtaatccaagaagtttcttcatttatacattttatctcaactctttctagcattagtgcacatggtagtttttctaattaaattgtattcaaggtagaaatgatcatgtgagaaagatatatgattgagctactactgtcacctcttacagttactagtgttagctaatagaaactttcatatatacacatagaaaagaattattacattttacattgaaaaatgtaatatatggcccatgtagtgtatagaaaaatctgtagtttattggttcatcaactatgtattgtgcacctacctatgggtgtcaggtacaatgttaggtactgtagaatcaaatgtaaataagagacagtcccagccctcagggagccgagaacctaatagtgaatctgtttgtacagacatcttcatgtttcagaacttttaaaacaaaacaaaataatgtaatctatcatcttttgcttgaaagaatgtgattgatttcttatctctgttttgaaattatttccttactcttctgcaaagtcaggtaatggattccttgtataaatgctacttttcttccatgtctcaaagttgttttttttcctcccctttcttccctgttttccaataattctccatgtccccttttcttagaaaaggcattaatatggtgaatcttgtatgggaaccattccatgggagaacttcaacacagtttttgctccagagatcaaacatagctttcgtgatctctctaccagctatctaacttatcctctggtaatctttttttttttttttttttttttgagatggagtctcgctgtgtcaccaggccagagtgcagtggcgtgatcttggctcactgcaacctctgcctcccgggttcgagtgattctcctgcctcagcctcccaagtagttgggactacaggctaccacgcccagctaatttttatatttttagtagagacggggtttcaccatggtagccagaatggtctctatctcttgaccttgtgatccgcccgcctcagcctcccaaagtgctgggattacaggcgtgagccactgcgcccggcttcctctggtaatcttacacctttacagaattaatctaaactggtggctcataaatgacattaaaaacaaaaaaaaaatctggatgcagtggctcattcctatagtcccagcactttgggaggccaaggcgggaggatcatctgagcccaggagtttggggctgtagtgaactatgatcatacaacttcattctagcctgggtgacaaagtgacaccctgtctctaaacaaaaatcaagaaacaaaaaacttgtatttccctgcagctttgggaagccagaacacaatattgcagtgaatctgaattttctgtgacaaataaattattaaattggcacatatgatcatcaccagtcatgtctcatcaaaagcctttattatgatgcttgtacattttgaagaatttagaattaatgagaagttaaccctttagtcattgtaacacaatcatattttaatcagctttttcttttgctaccaagagtttcaaaaaataaatgcagtatttgatttcaggctgctaaatgggctcatttagcattcattccttgatgtagacattaaaaaaaaaactgaatagcattctttccaggataactaataaagcagacatgctaagcctataaatacatcagcactgcagcacacgtttaaggttgccacggacaaggatcacacaatagagaacactgtagtaacatttcggtctgctcacaagacccagaacattgatcagtttttgttgttggtttattatttttctgttaaaaaattgtgaaaagtttgttttagctagatgatattttaatagctgcgagtgctttggaactataaagatgtcactacttaacacatataccttatgttttgttttgttttgttttacactcagtataaatcaggagaagttagccaaccatctagcatttagaatcctcttttttattgtcttctaaggatatggatgttcccataacagcaacaaaacagcaacaaaaacatttcataaatatcacttgatagactgtaagcacctgcttaactttgtgtcccaaatatttagtgtgtatatatatatatatatatacacacacacacacatatatattcaacaaataaagcaaaatataacatgcatttcacattttgtctttccctgttacgattttaatagcagaactgtatgacaagtttaggtgatcctagcatatgttaaattcaaattaatgtaaaacagattaacaacaacaaagaaactgtctatttgagtgaagtcatgctttctattataataacttggcttcggttatccatcaaatgcacacttatactgttatctgattgtttataataaagaatactgtacttata

SEQ ID NO: 44602 - DNA, 1404 bp, Artificial Sequence
  derived and/or modified sequence
atgcacagcaccacccccatcagcagcctgttcagcttcaccagccccgccgtgaagagactgctgggctggaagcagggcgacgaggaggagaagtgggccgagaaggccgtggacagcctggtgaagaagctgaagaagaagaagggcgccatggacgagctggagagagccctgagctgccccggccagcccagcaagtgcgtgaccatccccagaagcctggacggcagactgcaggtgagccacagaaagggcctgccccacgtgatctactgcagagtgtggagatggcccgacctgcagagccaccacgagctgaagcccctggagtgctgcgagttccccttcggcagcaagcagaaggaggtgtgcatcaacccctaccactacagaagagtggagacccccgtgctgccccccgtgctggtgcccagacacagcgagtacaacccccagctgagcctgctggccaagttcagaagcgccagcctgcacagcgagcccctgatgccccacaacgccacctaccccgacagcttccagcagcccccctgcagcgccctgccccccagccccagccacgccttcagccagagcccctgcaccgccagctacccccacagccccggcagccccagcgagcccgagagcccctaccagcacagcgtggacaccccccccctgccctaccacgccaccgaggccagcgagacccagagcggccagcccgtggacgccaccgccgacagacacgtggtgctgagcatccccaacggcgacttcagacccgtgtgctacgaggagccccagcactggtgcagcgtggcctactacgagctgaacaacagagtgggcgagaccttccaggccagcagcagaagcgtgctgatcgacggcttcaccgaccccagcaacaacagaaacagattctgcctgggcctgctgagcaacgtgaacagaaacagcaccatcgagaacaccagaagacacatcggcaagggcgtgcacctgtactacgtgggcggcgaggtgtacgccgagtgcgtgagcgacagcagcatcttcgtgcagagcagaaactgcaactaccagcacggcttccaccccgccaccgtgtgcaagatccccagcggctgcagcctgaaggtgttcaacaaccagctgttcgcccagctgctggcccagagcgtgcaccacggcttcgaggtggtgtacgagctgaccaagatgtgcaccatcagaatgagcttcgtgaagggctggggcgccgagtaccacagacaggacgtgaccagcaccccctgctggatcgagatccacctgcacggccccctgcagtggctggacaaggtgctgacccagatgggcagcccccacaaccccatcagcagcgtgagctag

SEQ ID NO: 44603 - protein, 2261 aa, Artificial Sequence
  derived and/or modified sequence
MARFGDEMPARYGGGGSGAAAGVVVGSGGGRGAGGSRQGGQPGAQRMYKQSMAQRARTMALYNPIPVRQNCLTVNRSLFLFSEDNVVRKYAKKITEWPPFEYMILATIIANCIVLALEQHLPDDDKTPMSERLDDTEPYFIGIFCFEAGIKIIALGFAFHKGSYLRNGWNVMDFVVVLTGILATVGTEFDLRTLRAVRVLRPLKLVSGIPSLQVVLKSIMKAMIPLLQIGLLLFFAILIFAIIGLEFYMGKFHTTCFEEGTDDIQGESPAPCGTEEPARTCPNGTKCQPYWEGPNNGITQFDNILFAVLTVFQCITMEGWTDLLYNSNDASGNTWNWLYFIPLIIIGSFFMLNLVLGVLSGEFAKERERVENRRAFLKLRRQQQIERELNGYMEWISKAEEVILAEDETDGEQRHPFDGALRRTTIKKSKTDLLNPEEAEDQLADIASVGSPFARASIKSAKLENSTFFHKKERRMRFYIRRMVKTQAFYWTVLSLVALNTLCVAIVHYNQPEWLSDFLYYAEFIFLGLFMSEMFIKMYGLGTRPYFHSSFNCFDCGVIIGSIFEVIWAVIKPGTSFGISVLRALRLLRIFKVTKYWASLRNLVVSLLNSMKSIISLLFLLFLFIVVFALLGMQLFGGQFNFDEGTPPTNFDTFPAAIMTVFQILTGEDWNEVMYDGIKSQGGVQGGMVFSIYFIVLTLFGNYTLLNVFLAIAVDNLANAQELTKDEQEEEEAANQKLALQKAKEVAEVSPLSAANMSIAVKEQQKNQKPAKSVWEQRTSEMRKQNLLASREALYNEMDPDERWKAAYTRHLRPDMKTHLDRPLVVDPQENRNNNTNKSRAAEPTVDQRLGQQRAEDFLRKQARYHDRARDPSGSAGLDARRPWAGSQEAELSREGPYGRESDHHAREGSLEQPGFWEGEAERGKAGDPHRRHVHRQGGSRESRSGSPRTGADGEHRRHRAHRRPGEEGPEDKAERRARHREGSRPARGGEGEGEGPDGGERRRRHRHGAPATYEGDARREDKERRHRRRKENQGSGVPVSGPNLSTTRPIQQDLGRQDPPLAEDIDNMKNNKLATAESAAPHGSLGHAGLPQSPAKMGNSTDPGPMLAIPAMATNPQNAASRRTPNNPGNPSNPGPPKTPENSLIVTNPSGTQTNSAKTARKPDHTTVDIPPACPPPLNHTVVQVNKNANPDPLPKKEEEKKEEEEDDRGEDGPKPMPPYSSMFILSTTNPLRRLCHYILNLRYFEMCILMVIAMSSIALAAEDPVQPNAPRNNVLRYFDYVFTGVFTFEMVIKMIDLGLVLHQGAYFRDLWNILDFIVVSGALVAFAFTGNSKGKDINTIKSLRVLRVLRPLKTIKRLPKLKAVFDCVVNSLKNVFNILIVYMLFMFIFAVVAVQLFKGKFFHCTDESKEFEKDCRGKYLLYEKNEVKARDREWKKYEFHYDNVLWALLTLFTVSTGEGWPQVLKHSVDATFENQGPSPGYRMEMSIFYVVYFVVFPFFFVNIFVALIIITFQEQGDKMMEEYSLEKNERACIDFAISAKPLTRHMPQNKQSFQYRMWQFVVSPPFEYTIMAMIALNTIVLMMKFYGASVAYENALRVFNIVFTSLFSLECVLKVMAFGILNYFRDAWNIFDFVTVLGSITDILVTEFGNNFINLSFLRLFRAARLIKLLRQGYTIRILLWTFVQSFKALPYVCLLIAMLFFIYAIIGMQVFGNIGIDVEDEDSDEDEFQITEHNNFRTFFQALMLLFRSATGEAWHNIMLSCLSGKPCDKNSGILTRECGNEFAYFYFVSFIFLCSFLMLNLFVAVIMDNFEYLTRDSSILGPHHLDEYVRVWAEYDPAACGRIHYKDMYSLLRVISPPLGLGKKCPHRVACKRLLRMDLPVADDNTVHFNSTLMALIRTALDIKIAKGGADKQQMDAELRKEMMAIWPNLSQKTLDLLVTPHKSTDLTVGKIYAAMMIMEYYRQSKAKKLQAMREEQDRTPLMFQRMEPPSPTQEGGPGQNALPSTQLDPGGALMAHESGLKESPSWVTQRAQEMFQKTGTWSPEQGPPTDMPNSQPNSQSVEMREMGRDGYSDSEHYLPMEGQGRAASMPRLPAENQRRRGRPRGNNLSTISDTSPMKRSASVLGPKARRLDDYSLERVPPEENQRHHQRRRDRSHRASERSLGRYTDVDTGLGTDLSMTTQSGDLPSKERDQERGRPKDRKHRQHHHHHHHHHHPPPPDKDRYAQERPDHGRARARDQRWSRSPSEGREHMAHRQ

SEQ ID NO: 44604 - DNA, 6786 bp, Artificial Sequence
  derived and/or modified sequence
atggcacgctttggggatgagatgcctgcgcgttatggcggtgggggaagcggcgcggccgctggggtggtcgttgggtctggcggaggcaggggggccggagggtccagacagggggggcagcctggggcccagcggatgtataagcagtccatggcgcagagggccagaacaatggcgctgtataaccctataccagtcaggcagaactgtctgaccgtcaacagatcgcttttcttgttctctgaagataacgtggtccggaagtacgcaaaaaagatcaccgagtggcctccttttgagtacatgatattggcaaccataatcgcaaattgcattgtgcttgccttagaacagcacctgccagacgacgacaagaccccaatgtccgagcgcctcgacgataccgagccctattttatcggtatcttctgctttgaggctggtatcaaaatcatagccctggggttcgctttccacaaaggtagctatcttcgaaacggttggaatgttatggatttcgtggtggtgctaacaggcatactcgcgacggtagggacagagtttgacttgcgcaccctacgcgccgtgcgggtgttacgtccacttaagctggtgagtggcattccttccctccaggtcgttctgaagagcatcatgaaagccatgatcccactgctgcagattggcttgcttttatttttcgccatattgatcttcgctatcatcggcctggagttttacatgggcaagtttcacacaacatgctttgaagaaggaactgacgatattcagggggaaagtcctgcaccatgtggaacagaagagcctgcgcgcacatgtccgaatggtactaaatgccaaccatactgggaaggtcccaataacggtatcacccagtttgacaatatactgtttgccgttcttactgtctttcagtgtatcactatggagggatggactgatcttttatacaactccaacgatgcgtccggcaatacttggaactggctctactttattcccctgataataatcggatcctttttcatgctgaatctggtcctcggggttctctctggcgaattcgctaaagaaagagaacgtgtcgaaaacaggagagccttccttaagttaagaaggcagcagcagatcgagagagaacttaatggttacatggagtggatctctaaagcagaagaggtgatcctggcagaggatgagacggatggtgagcaaaggcaccctttcgatggagctcttagaaggacgacgatcaaaaagagcaaaacggacctgttaaaccccgaggaggccgaagaccagttagccgacatcgcctctgtgggatcccccttcgctcgcgccagtatcaagagtgctaagcttgagaattctacattttttcataaaaaagaaagacggatgcggttttacataaggaggatggtaaagacacaggctttttactggaccgttttgtcactcgtcgctcttaatacactgtgtgtcgctatagttcactataaccagccagaatggctgtcagatttcctgtactacgccgagttcatctttctggggttattcatgtcagaaatgttcatcaaaatgtatggcttgggtacaaggccttacttccactctagtttcaattgctttgactgcggcgtcatcatcggctctatctttgaagtgatttgggcggtgatcaagcccgggacttctttcggcataagcgtgctgcgggccctcagactgctccgtatctttaaagtgacaaagtattgggcatctcttcgcaatttggtggtgagcctgttgaattctatgaagtccattatttcattgttgttcctcttgtttctcttcattgtcgtgttcgcactgttgggcatgcagctttttggcggacagttcaactttgacgaaggtacaccccctaccaacttcgatacattccccgccgctattatgacagtgtttcagatcttaaccggtgaagactggaatgaggtcatgtatgacggcatcaagtcccaggggggagtgcagggaggaatggtattcagcatttacttcattgtattgactcttttcggtaactacactctcctaaatgtgttcctcgcaatagcagttgataatctcgctaatgcccaggagctgacaaaagatgagcaggaagaggaagaagccgctaaccaaaaattggctctccaaaaggccaaagaagtagcggaagtcagcccactgtccgctgccaacatgtctatcgcggttaaagagcagcagaagaaccagaagccagcgaaatcggtctgggagcagagaactagtgaaatgcgcaagcagaacctgctcgcatcaagagaagcgctgtacaatgaaatggatccagacgagaggtggaaagcagcctatacacggcacctgcgcccagatatgaagactcacctcgatcgaccacttgttgtggatccgcaagaaaatcggaacaataataccaacaaatcccgggctgcggaaccaactgtcgatcagaggctgggacagcaacgggctgaagacttcttgaggaagcaggccaggtaccacgatagagcccgggatcccagcgggtcagcaggcctggatgcaaggagaccttgggctgggtctcaagaagctgagttgtcgcgcgagggtccatacggcagggaaagtgatcaccacgcacgagaaggctcgttagaacaacccggcttttgggagggtgaagccgaacgcggtaaggcgggtgacccacaccggcgccatgtgcatagacagggcggcagtcgagagtctcgcagtggctcacctcgcaccggcgccgatggggaacacaggagacatagggcgcatagacgtccgggcgaggaggggcctgaagataaagcagaacgccgggcgcgtcatcgcgaggggtcaaggcccgcaagaggaggtgagggcgagggtgagggccctgatggtggagagagacgtcgccggcatcggcatggtgctcccgcaacatacgagggggacgcacggcgcgaggacaaggaacgacgtcacagacgacgaaaggagaatcagggatccggagttccagtgagtgggccaaacctttctaccacgcgtccgatccagcaggacctcggcagacaggacccacctctggctgaggacattgacaacatgaaaaataataaactggccactgctgagagcgcagctcctcacggctccctcggacatgccggccttccccagtcccccgctaaaatgggcaattcaaccgaccccggccctatgctcgctatccccgcaatggccacaaacccacaaaatgccgcttcacgacgcacaccaaacaaccccggaaacccttctaatcccggacctccaaagacgccagagaactcactcatcgtcacaaacccatccggtactcaaactaacagcgcgaagacggccaggaaaccggatcacacaacggttgatatcccacccgcctgccctccacccctaaatcacacagttgtgcaagtgaacaaaaacgcgaacccggatccactccctaaaaaagaagaagagaaaaaagaggaggaagaggacgatcgcggtgaagacggacctaagcctatgccaccctattcatccatgtttatactatcaacaactaaccctctccggaggctgtgtcactatatcctgaatcttcgctattttgagatgtgcattctgatggtcatcgccatgtcttccatcgctcttgccgccgaggaccccgtccagccaaatgctcctagaaataatgtgctgagatattttgactacgtgttcacaggtgtattcacatttgagatggttattaaaatgatcgatctgggcctggtcttgcaccagggagcctatttccgcgatttgtggaacatcctcgatttcatcgtggtgagcggagcactggtggctttcgcatttacgggcaatagcaaaggaaaggacataaacacaatcaagagcttgagggtcctgagggttctgcgcccactcaaaactatcaaacggctcccaaaactgaaggctgtgttcgattgcgtcgtgaattcactgaaaaacgtcttcaatatcctaattgtctatatgctcttcatgtttatcttcgctgtggttgcggtgcagctgtttaagggcaaatttttccattgcaccgacgagagtaaagaattcgaaaaggactgtagaggcaagtatctcctgtacgagaagaacgaagttaaagctcgggaccgggaatggaaaaaatacgaattccattacgataacgtgctgtgggccctgctgacgctctttaccgtctctaccggggagggctggccccaggtgctgaagcactcagtcgacgctacttttgaaaaccagggaccgagtcctggctaccgcatggagatgagtatcttctatgttgtgtatttcgtggtttttcccttcttctttgttaacattttcgtggctcttatcataatcacatttcaggagcaaggcgacaagatgatggaagaatattctctggagaagaacgaacgcgcgtgtatcgactttgctatttccgctaagccgctcacccggcacatgcctcagaacaaacagtccttccagtatcgaatgtggcagttcgtggtgagtccccctttcgaatacaccatcatggcaatgattgcactaaatacaatcgtgctgatgatgaagttttacggcgccagtgtggcctatgaaaacgccctgagagtcttcaacatcgtctttacctccctgttttccttagaatgcgtgctcaaggtgatggcgttcggcatccttaactactttcgcgacgcctggaatattttcgactttgtgaccgttctcggctccattactgacatcctggtgactgaattcgggaacaactttattaacctaagcttcttaagactgtttcgtgccgcgaggcttataaagctgctccggcagggatataccattaggattctactttggacttttgtgcagtcctttaaagcgctcccgtatgtgtgcctactgatcgccatgctcttttttatttacgccatcatcggcatgcaagtgtttggcaacattggcattgacgtggaggacgaggatagtgacgaggatgaattccagattacggagcacaataacttcagaaccttcttccaggcactaatgctcctctttcgtagtgcaaccggagaggcctggcacaatatcatgttgagctgcctgagcgggaagccctgtgataagaattcaggcatccttacccgggagtgcggtaatgagtttgcatatttttactttgtgtcctttatttttctttgcagcttcttgatgctgaacctgttcgttgctgtgatcatggacaatttcgaataccttacaagagactcaagcattctggggccacaccacctggatgaatacgtgagggtctgggcagaatacgacccagcggcttgtgggagaattcactacaaagatatgtattctttgctaagagtgataagtccccccctgggtctgggaaagaagtgcccgcatagggttgcctgtaaaagactgctgcgtatggatctccctgtagctgacgacaatacagtgcactttaattcaacacttatggctttgattcggaccgcactggatatcaagattgccaaggggggggcggataaacaacaaatggacgctgaactccggaaagaaatgatggcaatctggcccaacctgtcccaaaagacactggacctcctggtgacaccccacaaatcaactgacctcaccgtcgggaaaatttatgcagcaatgatgattatggaatattatcgacaatccaaagctaaaaaactccaggccatgcgggaagagcaagaccgcacacccttgatgtttcagaggatggaacctccaagccccacacaagaagggggcccgggacagaatgctttgcccagcacacagttggacccagggggggcccttatggcccacgaaagcggactgaaggaaagtccatcctgggttacccagagagcacaagagatgtttcagaaaaccgggacgtggagccccgagcaggggcctcccaccgacatgcccaactcccaacccaattctcaaagcgttgaaatgagagaaatgggacgcgacggctacagtgattcagagcactatcttcctatggaggggcaggggcgcgctgcctcaatgccacgcctgccagctgaaaaccagaggcgaagaggtcgacctagagggaacaacctctccactatcagcgataccagccccatgaagaggtccgccagcgtcctaggacccaaggccagacgcctggacgattattctctggagagggtcccccctgaggagaaccaaagacaccatcagcggcgccgagaccgatcgcatcgggcttccgagagatcgttgggccgctacaccgacgtagacaccgggctgggtacggatctttccatgacgacccaaagtggcgatctacctagtaaagaacgtgaccaagaacgggggcgcccaaaggatagaaaacataggcaacatcaccaccaccatcatcaccatcatcatccaccaccaccagataaagacaggtacgctcaggagcggccagaccatggtcgggcccgcgctcgagatcagagatggtcccgctccccctccgagggccgagagcacatggcccaccgccaatag

SEQ ID NO: 44605 - DNA, 804 bp, Artificial Sequence
  derived and/or modified sequence
atgttatttatgtttatctttgccgtggttgcggtccagctgttcaagggtaaattttttcactgtaccgatgagagtaaggagtttgagaaggactgcagagggaagtatttgctgtacgagaaaaacgaggtgaaagccagggacagggaatggaaaaaatacgaattccattacgataatgtgctctgggctctgcttacactgttcactgtttccacgggcgaggggtggccacaagttcttaagcactcggtggacgctacgtttgaaaaccagggccccagccctggttacagaatggagatgtctatcttttacgtcgtttatttcgtcgtatttcccttttttttcgtaaatatctttgtggccttgatcataattacatttcaagaacagggagataaaatgatggaagagtattcactggagaagaatgagagggcctgcatagactttgcaataagcgctaaacccctgacaagacacatgccgcaaaacaagcagtcctttcagtatagaatgtggcagtttgtggtgtcccccccttttgaatatactatcatggctatgatagcattgaatacgatcgtgctgatgatgaagttttatggtgcatctgttgcttacgagaacgcactgcgcgttttcaacattgtgtttacctctcttttcagcctggaatgcgttcttaaggtcatggcattcggcattttgaattattttagggatgcctggaacatatttgactttgtgactgttctggggtcaataaccgacatcttagtgaccgagtttggttag

SEQ ID NO: 44606 - DNA, 6786 bp, Artificial Sequence
  derived and/or modified sequence
atggccaggtttggagatgagatgcctgcccgctatggaggcggcggcagcggggctgctgctggggtggtggtgggcagcggcggcggcagaggagctgggggcagccggcagggcggccagcccggggcccagaggatgtacaagcagagcatggcccagagggcccggaccatggccctgtacaaccccatccctgtgcggcagaactgcctgactgtgaacagaagcctcttcctgttctctgaagataatgtggtgaggaaatatgccaagaagatcacagagtggcccccatttgagtacatgatcctggccaccatcatcgccaactgcatcgtgctggccctggagcagcacctgcctgatgatgacaagacccccatgtctgagcggctggatgacacagagccctacttcatcggcatcttctgctttgaggccggcatcaagatcatcgccctgggctttgccttccacaagggcagctacctgagaaatggctggaatgtgatggactttgtggtggtgctgaccggcatcctggccaccgtgggcacagaatttgacctgcggaccctgcgggctgtgcgggtgctgcggcccctgaagctggtgtctggcatccccagcctgcaggtggtgctgaagagcatcatgaaggccatgatccccctgctgcagatcggcctgctgctcttctttgccatcctgatctttgccatcatcggcctggagttctacatgggcaagttccacaccacctgctttgaggagggcacagatgacatccagggcgagagccctgccccctgtggcacagaggagcccgcccggacctgccccaacggcaccaagtgccagccctactgggagggccccaacaacggcatcacccagtttgacaacatcctgtttgctgtgctgaccgtcttccagtgcatcaccatggagggctggacagacctgctgtacaacagcaatgatgccagcggcaacacctggaactggctgtacttcatccccctcatcatcatcggcagcttcttcatgctgaacctggtgctgggcgtgctgagcggggagtttgccaaggagcgggagcgggtggagaacagaagagccttcctgaagctgcggcggcagcagcagatcgagcgggagctgaatggctacatggagtggatcagcaaggccgaggaggtgatcctggccgaggatgaaacagatggagagcagaggcacccctttgatggagccctgcggaggaccaccatcaagaagagcaagacagacctgctgaaccctgaggaggccgaggaccagctggccgacatcgcctctgtgggcagcccctttgcccgggccagcatcaagagcgccaagctggagaacagcaccttcttccacaagaaggagaggaggatgaggttctacatccggaggatggtgaagacccaggccttctactggacagtgctgagcctggtggccctgaacaccctgtgtgtggccatcgtgcactacaaccagcctgagtggctgagtgacttcctgtactatgcagagttcatcttcctgggcctcttcatgtctgagatgttcatcaagatgtatggcctgggcacccggccctacttccacagcagcttcaactgctttgactgtggggtcatcatcggcagcatctttgaggtgatctgggccgtcatcaagccaggcaccagctttggcatctctgtgctgcgggccctgcggctgctgcgcatcttcaaggtgaccaagtactgggccagcctgaggaacctggtggtgtccctgctgaacagcatgaagagcatcatcagcctgctcttcctgctcttcctgttcatcgtggtgtttgccctgctgggcatgcagctgtttggaggccagttcaactttgatgagggcaccccacccaccaactttgacaccttccctgctgccatcatgaccgtcttccagatcctgaccggggaggactggaatgaggtgatgtatgatggcatcaagagccagggcggcgtgcagggcggcatggtgttcagcatctacttcatcgtgctgaccctgtttggaaactacaccctgctgaatgtgttcctggccatcgctgtggacaacctggccaatgcccaggagctgaccaaggatgagcaggaggaggaggaggccgccaaccagaagctggccctgcagaaggccaaggaggtggccgaggtgagccccctgtctgctgccaacatgagcattgctgtgaaggagcagcagaagaaccagaagccagccaagtctgtgtgggagcagaggaccagcgagatgaggaagcagaacctgctggccagccgggaggccctgtacaatgagatggaccctgatgagcgctggaaggccgcctacaccaggcacctgcggccagacatgaagacccacctggaccggcccctggtggtggacccccaggagaacagaaacaacaacaccaacaagagcagagctgctgagcccaccgtggaccagaggctgggccagcagagagctgaggacttcctgaggaagcaggcccgctaccatgaccgggcccgggaccccagcggcagcgctggcctggatgcccggcggccctgggccggcagccaggaggccgagctgagccgggagggcccctacggccgggagagtgaccaccacgcccgggagggcagcctggagcagcccggcttctgggagggggaggccgagcggggcaaggccggggacccccacagaagacatgtgcaccggcagggcggcagccgggagagccgcagcggcagccccaggactggagcagatggagagcacagaagacaccgggcccacagaagacctggagaggagggccctgaggacaaggccgagcggcgggcccggcaccgggagggcagcaggcctgcccggggcggggagggggagggggagggcccagatggaggagagaggagaagaagacaccgccacggggccccagccacctatgaaggagatgcccggcgggaggacaaggagaggaggcacagaagaaggaaggagaaccagggcagcggcgtgcctgtgtctggccccaacctgagcaccacccggcccatccagcaggacctgggccggcaggacccccccctggccgaggacatcgacaacatgaagaacaacaagctggccacagctgagagcgctgcccctcatggcagcctgggccatgctggcctgccccagagccctgccaagatgggcaacagcacagaccccggccccatgctggccatcccagccatggccaccaacccccagaatgctgccagcaggaggacccccaacaaccctggcaaccccagcaaccctggcccccccaagaccccagagaacagcctcatcgtgaccaaccccagcggcacccagaccaacagcgccaagacagccaggaagccagaccacaccaccgtggacatccccccagcctgccccccacccctgaaccacacagtggtgcaggtgaacaagaatgccaacccagaccccctgcccaagaaggaggaggagaagaaggaggaggaggaggatgacagaggagaagatggccccaagcccatgccaccctacagctccatgttcatcctgagcaccaccaaccccctgcggcggctgtgccactacatcctgaacctgcgctactttgagatgtgcatcctgatggtgattgccatgagcagcatcgccctggccgctgaggaccctgtgcagcccaatgcccccagaaataatgtgctgcgctactttgattatgtgttcaccggggtcttcacctttgagatggtgatcaagatgattgacctgggcctggtgctgcaccagggcgcctacttccgggacctgtggaacatcctggacttcatcgtggtgtctggggccctggtggcctttgccttcaccggcaacagcaagggcaaggacatcaacaccatcaagagcctgcgggtgctgcgggtgctgcggcccctgaagaccatcaagaggctgcccaagctgaaggctgtgtttgactgtgtggtgaacagcctgaagaatgtgttcaacatcctgattgtgtacatgctgttcatgttcatctttgctgtggtggccgtgcagctgttcaagggcaagttcttccactgcacagatgagagcaaggagtttgagaaggactgccggggcaagtacctgctgtatgagaagaatgaggtgaaggcccgggaccgggagtggaagaagtatgagttccactatgacaacgtgctgtgggccctgctgaccctcttcaccgtgtccactggagagggctggccccaggtgctgaagcacagcgtggatgccacctttgagaaccagggccccagccctggctacaggatggagatgagcatcttctacgtggtgtactttgtggtgttccccttcttctttgtgaacatctttgtggccctgatcatcatcaccttccaggagcagggcgacaagatgatggaggagtacagcctggagaagaatgaaagagcctgcatcgactttgccatcagcgccaagcccctgaccaggcacatgccccagaacaagcagagcttccagtacaggatgtggcagtttgtggtgagccccccatttgagtacaccatcatggccatgattgccctgaacaccatcgtgctgatgatgaagttctacggggcctctgtggcctatgaaaatgccctgcgggtcttcaacatcgtgttcaccagcctcttcagcctggagtgtgtgctgaaggtgatggccttcggcatcctgaactacttcagagatgcctggaacatctttgattttgtgacagtgctgggcagcatcacagacatcctggtgacagaatttggaaacaacttcatcaacctgtccttcctgcggctcttccgggccgcccggctcatcaagctgctgcggcagggctacaccatccgcatcctgctgtggacctttgtgcagagcttcaaggccctgccctacgtgtgcctgctgattgccatgctgttcttcatctatgccatcatcggcatgcaggtgtttggaaatattggaattgatgtggaggatgaggacagtgatgaagatgagttccagatcacagagcacaacaacttccgcaccttcttccaggccctgatgctgctcttccgcagcgccaccggggaggcctggcacaacatcatgctgagctgcctgagcggcaagccctgtgacaagaacagcggcatcctgaccagagaatgtggaaatgaatttgcctacttctactttgtgtccttcatcttcctgtgcagcttcctgatgctgaacctgtttgtggccgtcatcatggacaactttgagtacctgacccgggacagcagcatcctgggcccccaccacctggatgaatatgtgcgggtgtgggccgagtatgaccctgctgcctgtggccgcatccactacaaggacatgtacagcctgctgcgggtcatcagcccccccctgggcctgggcaagaagtgcccccaccgggtggcctgcaagaggctgctgaggatggacctgcctgtggctgatgacaacacagtgcacttcaacagcaccctgatggccctgatcagaacagccctggacatcaagatcgccaagggcggcgctgacaagcagcagatggatgctgagctgaggaaggagatgatggccatctggcccaacctgagccagaagaccctggacctgctggtgaccccccacaagagcacagacctgactgtgggcaagatctatgctgccatgatgatcatggagtactaccggcagagcaaggccaagaagctgcaggccatgagggaggagcaggacaggacccccctgatgttccagaggatggagccccccagccccacccaggagggcggccctggccagaatgccctgcccagcacccagctggaccccggcggggccctgatggcccatgaaagtggcctgaaggagagccccagctgggtgacccagagggcccaggagatgttccagaagacaggcacctggagccctgagcagggccccccaacagacatgcccaacagccagcccaacagccagagcgtggagatgagggagatgggcagagatggctacagcgacagcgagcactacctgcccatggagggccagggccgggccgcctccatgccccggctgcctgctgagaaccagaggcggcggggccggccccggggcaacaacctgagcaccatcagtgacaccagccccatgaagaggtctgcctctgtgctgggccccaaggcccggcggctggatgactacagcctggagcgggtgcccccagaggagaaccagaggcaccaccagaggcggcgggacaggagccaccgggccagcgagaggagcctgggccgctacacagatgtggacaccggcctgggcacagacctgtccatgaccacccagagcggggacctgcccagcaaggagcgggaccaggagcggggccggcccaaggacaggaagcaccggcagcaccaccaccaccaccaccaccaccaccaccccccacctccagacaaggacagatatgcccaggagaggccagaccacggccgggcccgggcccgggaccagcgctggagccgcagccccagcgagggccgggagcacatggcccaccggcagtag

SEQ ID NO: 44607 - DNA, 804 bp, Artificial Sequence
  derived and/or modified sequence
atgctgttcatgttcatctttgctgtggtggccgtgcagctgttcaagggcaagttcttccactgcacagatgagagcaaggagtttgagaaggactgccggggcaagtacctgctgtatgagaagaatgaggtgaaggcccgggaccgggagtggaagaagtatgagttccactatgacaacgtgctgtgggccctgctgaccctcttcaccgtgtccactggagagggctggccccaggtgctgaagcacagcgtggatgccacctttgagaaccagggccccagccctggctacaggatggagatgagcatcttctacgtggtgtactttgtggtgttccccttcttctttgtgaacatctttgtggccctgatcatcatcaccttccaggagcagggcgacaagatgatggaggagtacagcctggagaagaatgaaagagcctgcatcgactttgccatcagcgccaagcccctgaccaggcacatgccccagaacaagcagagcttccagtacaggatgtggcagtttgtggtgagccccccatttgagtacaccatcatggccatgattgccctgaacaccatcgtgctgatgatgaagttctacggggcctctgtggcctatgaaaatgccctgcgggtcttcaacatcgtgttcaccagcctcttcagcctggagtgtgtgctgaaggtgatggccttcggcatcctgaactacttcagagatgcctggaacatctttgattttgtgacagtgctgggcagcatcacagacatcctggtgacagaatttggatag

SEQ ID NO: 44608 - DNA, 6786 bp, Artificial Sequence
  derived and/or modified sequence
atggcccggttcggcgacgagatgcccgcccggtacggcggcggcggctctggtgctgctgccggcgtggtcgtgggctctggaggcggaaggggcgccggcgggtctagacagggtggtcagccaggagcccagcgaatgtataagcagagcatggcccagcgggctcgcacaatggcgctttacaatccaatcccagtgaggcaaaattgcctcaccgtcaacagaagcctgttcttgttttccgaggataacgtggtcaggaaatacgccaaaaagattaccgaatggccaccttttgagtatatgatactagctactataattgcgaattgtattgtgttagcgctcgagcagcacctcccagacgatgataaaactcctatgtctgagcgcttggacgataccgagccctattttatagggatcttctgtttcgaagctggcattaagattattgctctcggattcgcatttcataaggggtcttatctgcgcaatggatggaatgtcatggatttcgtggtggtgttgacagggatattggccaccgtgggaactgagtttgacctgcgcactctgcgagccgtgagagtccttcgccctctaaaactggtctctggtataccgagtctacaggtggtcctcaagtcaatcatgaaggcgatgattccccttttacagatcggtctcctgctgttcttcgctatactgatattcgcaataatcggcctggaattttatatgggcaagttccacaccacctgttttgaggaagggacagatgatatccagggggaaagtcccgctccatgcggcacagaggaaccggcgcgaacctgccccaacgggacaaaatgccaaccttattgggagggacccaataatggcattacccagtttgataatattcttttcgctgttctgacagtgtttcaatgtattactatggagggctggacagatttgttgtacaattccaatgacgcctccggaaatacgtggaattggttatactttattcccctgattatcatcggaagcttttttatgttgaacttagtcctgggagtgttgtctggtgagtttgccaaagagcgtgagcgggtcgagaatcgtcgggcgtttctcaagttgagacggcagcaacaaattgaacgggaattgaatggctacatggagtggatctctaaagccgaagaagtgattctcgccgaggatgaaactgatggagaacagagacatcccttcgacggtgcccttcgtcgtaccacaataaaaaaatcgaaaaccgatctgttgaatcctgaggaggcagaggaccagcttgctgatatcgcgagcgttggatcgccctttgcgcgggcctcaatcaaatctgccaagttggagaacagcacattcttccataaaaaggagaggcgcatgcggttctacattaggcggatggtgaaaactcaggccttctattggacggtgctctcgcttgttgcactaaatacactgtgcgtggctattgtgcattacaaccagcccgagtggctgagcgattttttatattatgccgagtttatttttctgggcctattcatgtccgagatgttcattaagatgtatggtctggggacaagaccatacttccatagctcatttaattgctttgactgtggagtaatcatcggctccatttttgaggtgatctgggcggtaatcaaaccaggtacctcctttggcatcagcgttctgcgcgctcttcggctgctgcgcatattcaaggtcaccaaatactgggcgagtctgaggaatctggtggtgagcctgttgaattccatgaagagcattattagccttcttttcttgctgttcttatttatcgtggtctttgcactgctaggaatgcagctctttggaggacagttcaatttcgacgagggaactcctccgaccaatttcgacactttccctgcagccataatgaccgtatttcagatactcacgggagaggattggaatgaggtgatgtacgatggaatcaagagtcagggaggcgtgcaaggtggcatggttttctcgatctattttatagtgctgaccctgttcggcaattacaccctcttgaatgttttcttggctatcgctgttgacaacctggccaacgcgcaggagttaactaaagacgagcaggaggaggaggaggcagccaatcagaagctggcactccagaaagctaaggaggtagctgaagtgagcccactttccgctgctaatatgagcatcgcagtcaaggagcagcaaaaaaatcagaagcccgccaaatcagtgtgggaacaacgtacgtcagagatgcgtaagcagaacctactggcctcaagagaagcactgtacaatgaaatggatccagacgagcggtggaaagccgcctatactcgtcacctgcgccccgacatgaagacacacctggacagaccgctggtggtcgatcctcaggaaaaccgaaataataacacgaataagtctagggccgcagagccaaccgttgaccagcgattgggccagcagagggccgaggacttcctccggaagcaagctaggtatcatgatagagctcgtgatccttccgggagcgcagggctggatgcccggcggccttgggccgggagtcaggaggcggagctgtccagagaagggccctatggaagagagagcgaccaccatgcacgcgagggaagcctcgagcagcctggcttttgggagggagaagccgagaggggcaaggctggcgacccccatagacgtcatgtacaccggcaggggggatccagggaaagcaggtctggatctccccgcaccggtgctgacggtgagcaccggcggcatcgtgctcataggcgccccggtgaggagggccccgaagataaagcggaacgcagagctcggcatagagaaggctctagaccagccaggggaggcgaaggcgaaggggaggggccagacggcggcgaaaggcgacgaagacatcgacacggagcgccagccacgtacgagggcgacgcccgaagggaggataaggaacgtaggcaccgtagaaggaaggaaaaccaggggtccggtgtccccgtctctggcccgaacttatctaccaccagaccaatccagcaagacttgggccgccaagacccccctctagcagaggatatcgacaacatgaaaaataacaaattggcaaccgccgagtctgcggccccacacggcagcctcggccacgcaggcctccctcagtctccagcaaaaatgggaaattccaccgatcctgggcccatgctggctattccggctatggccaccaacccgcagaacgcagcttcacggcgcaccccgaacaatcccggcaatccttccaaccccggcccccccaagactccagaaaacagtctgattgtaacgaacccttcaggcacacagactaacagcgctaagactgccagaaaaccagatcatactactgtcgatatccctccagcttgccctccgccattgaaccacaccgtagtacaggtaaacaagaacgccaaccccgaccccttgcccaaaaaagaagaggagaagaaagaggaggaggaggacgataggggagaggatggtcctaaacctatgccgccttactcatccatgttcatactgagcaccacgaacccgttaaggcgtctgtgccactatatcctgaatctgcggtatttcgagatgtgtatactgatggtaattgccatgagttcaattgcgttggcagcggaggaccctgtacagcccaacgccccacggaacaatgtcttgcgctacttcgattacgtgtttacaggtgttttcacttttgagatggtcataaagatgattgatctgggcctggtactgcatcagggagcatactttcgagacctgtggaacattctggactttatcgtggtttcaggagctcttgtggcattcgccttcactggaaacagcaaagggaaggatattaacacgatcaagtcactgagggtcctgagagtgctgcgacctttgaagaccattaagcggttacctaaactcaaagctgttttcgactgcgtcgtgaattcactcaaaaatgtgtttaacatattgattgtatacatgctattcatgtttattttcgcagtggtggcagtgcagcttttcaagggaaagttttttcactgtacagatgaatcgaaagagttcgaaaaagattgtcgcgggaaatatctgctgtatgagaagaatgaagtgaaggcaagagacagggagtggaaaaaatacgagtttcattacgacaatgtgctttgggccctgctcaccctctttacggtgagcaccggtgagggttggccccaggtactcaaacactctgtcgatgccacttttgaaaatcagggtccgagccctggatatagaatggagatgagcatcttttacgttgtctatttcgtcgttttccctttcttcttcgtgaacattttcgttgcgctgataattatcacattccaagagcagggggataagatgatggaagagtactcgttggagaagaacgagcgcgcctgtatcgattttgcgattagtgccaagccgctcacccggcacatgccacaaaacaaacagtcttttcagtatcggatgtggcagtttgtagtgagtcctcctttcgagtatacaatcatggccatgatcgctctgaatacaattgtgttaatgatgaagttttatggggccagcgtggcctacgaaaacgctcttcgagtctttaatattgtgttcacatccttatttagcctggagtgtgtgctcaaagtgatggcgtttggtatcctcaactattttcgcgatgcttggaacatatttgacttcgtgactgtcctgggctcgattaccgatatcttagttactgagttcggaaacaacttcatcaacctgtccttcctccggctgtttcgagcagctcgcctgattaaactgctaagacagggctacactatccgtatcttgttatggacctttgtgcagtcctttaaggccttgccctacgtatgcctcctgattgctatgctcttcttcatctacgcgattatcggaatgcaggttttcggcaacattgggattgatgtggaggatgaggatagtgacgaagacgaatttcagatcacggagcacaataactttcggacttttttccaggcccttatgctgctgtttaggagcgctaccggtgaggcatggcacaatataatgctttcctgcctatcggggaagccatgcgacaaaaactccggtatcctgaccagagagtgcggtaatgagtttgcctatttttactttgtttcttttatttttctgtgcagcttcctaatgctgaacctcttcgtggccgttatcatggataacttcgaatacctgacccgggattcatccatcctgggaccccatcacttggacgagtacgtgcgggtatgggctgaatatgatcccgctgcctgtggtcggattcattataaagatatgtattctctgcttagagtgattagtcctcctctcggccttggcaagaagtgcccacaccgggtggcctgtaaaaggttgctgcggatggacctacccgttgcagatgacaacacagttcattttaactctacactgatggcccttatccgcaccgccctggacataaagattgcaaaggggggagccgataagcagcagatggacgcggagctaaggaaagagatgatggcgatatggcctaatctttcacagaaaacattggatctgttagttactccccacaaaagcactgatctaactgtcggtaaaatctacgctgccatgatgatcatggagtactaccgccagtcaaaggcgaagaaattacaggctatgcgggaggaacaggacagaaccccattgatgtttcagcgcatggagcctcctagcccaacccaggagggcggccccggccagaatgcactgccttcgactcagttggatccggggggggccctgatggctcatgagagtggtttgaaggaatctccatcttgggtaactcaaagggcgcaggagatgtttcagaaaaccggtacatggagtcccgaacaaggcccacccactgatatgcctaactctcagcccaattcccagagtgtcgaaatgagggaaatgggtagggacgggtatagcgacagcgagcattacctgcctatggagggacagggtagggccgcctctatgccgcgattaccagcagagaaccaacgcagacgtggacggcctaggggaaacaatctgagtaccattagcgacacctcaccaatgaaaagatcagccagtgtcctgggccccaaggcccggagactggatgattacagtttggagcgggttccacctgaggaaaatcagcggcaccaccagcgccgaagggatagatcgcacagggcctccgagcggtcactgggcaggtatacagacgttgataccggtctggggaccgacctttctatgaccacccagagcggcgatttgccatcgaaggagagagaccaagagcgtgggcggccaaaagataggaagcataggcaacaccaccatcaccaccaccatcaccaccacccccccccaccagacaaggaccggtatgcccaggaaagacccgaccatggccgggcccgcgctcgcgaccagcggtggtctagatctccttcagagggacgcgagcacatggcccaccggcaatag

SEQ ID NO: 44609 - DNA, 804 bp, Artificial Sequence
  derived and/or modified sequence
atgctgttcatgttcatcttcgccgtggtggccgtgcagctgttcaaaggtaaattcttccattgtacggacgaatcaaaagaattcgagaaggactgtagaggcaaatacctcttgtacgagaagaacgaggtcaaggcaagagatcgggagtggaagaagtatgagttccattacgataatgtcctgtgggcactgctcacactctttaccgtgagcacaggtgaaggatggccacaggtgctcaagcactccgtggacgcaacctttgaaaaccagggaccctccccaggctacagaatggaaatgtcaatattttatgtggtgtactttgttgtgtttcctttcttcttcgtgaacatcttcgtcgccttgatcatcatcacttttcaggagcagggggacaaaatgatggaagaatacagtctggaaaaaaatgagagagcatgtattgactttgccattagcgcaaagcctctgacccggcatatgccgcaaaacaaacagagctttcaatacaggatgtggcagttcgtggtgtccccccccttcgagtataccattatggccatgatagctctcaacacaatagtgttaatgatgaagttttacggagcatcagtggcttacgaaaatgcgttacgggtattcaacatcgtgttcacatcactctttagcctggaatgtgtcttgaaggtcatggcatttggaatcctgaactacttccgagacgcctggaatatctttgatttcgtgacagtgctgggctcaattactgacatcctcgtgacggagtttggctag

SEQ ID NO: 44610 - DNA, 6785 bp, Artificial Sequence
  derived and/or modified sequence
atggcaagattcggagatgaaatgcccgcacggtacggaggcggagggtctggggcagctgcaggggtggtggtcggatccggtggcggtaggggggcaggagggtcaaggcaaggcggacagccaggtgctcagaggatgtataagcagtcgatggctcagcgggctcggaccatggcgctatacaatcctattcctgtccggcagaattgccttactgtgaacaggtctctcttcctgtttagcgaagacaatgtggtccgtaagtatgcgaagaagatcactgagtggcctccatttgaatacatgatcttagccactattatcgcgaactgtattgtgctcgcccttgagcagcacctgccagacgatgacaagacccccatgagtgagcgattggatgacaccgagccgtacttcattggcattttctgtttcgaggcagggatcaagataattgcactgggcttcgctttccataaaggcagctacttgagaaatggttggaacgtgatggacttcgtggtcgtactcacaggcatattggctaccgtcggaactgagttcgatctccgtaccctgagggcagtgagggttttgcggcctctgaagctagtgtctggcatccctagtctgcaagtggtactgaagtccattatgaaggctatgattcccctgctgcagatagggttgttgctgttctttgccatactgatctttgccataatcgggcttgaattctatatgggcaaattccacaccacatgcttcgaagaagggactgatgatatccagggagagtcaccagccccatgcggcaccgaggaaccagcccgtacctgtccaaacggcacgaaatgtcagccctactgggagggcccaaataatggcattacccagttcgacaacatcttgttcgcggtcctaaccgtgtttcagtgtatcactatggaagggtggactgatttgctgtacaattcaaatgacgcctcaggcaatacttggaactggttgtattttatccccttgatcatcatcggatcctttttcatgctgaacttagtactgggcgtgttatccggagaatttgcgaaagagagagagagagttgagaataggcgagccttcctgaaactgagaagacagcaacagatagaaagggaactgaacgggtacatggagtggatttctaaggcggaagaggtcattctggccgaggatgagacagacggagagcagcgtcatccgttcgacggcgcactcaggcgcacaacaatcaaaaagtccaaaacagacctactgaatccagaagaggcggaggaccaactggccgacattgcctcggttggctccccctttgcccgtgcaagcatcaaatccgccaagttggagaatagtacctttttccataagaaggaaagacgtatgcgattctatatcaggaggatggttaagactcaggccttttactggacggtcctctccctggtcgcacttaatactttatgtgtggccatagtgcattacaaccagcctgaatggttgtcagactttttatattacgccgagttcatcttcctggggcttttcatgtccgaaatgttcattaaaatgtatggattgggtacccgtccctattttcatagctccttcaactgttttgattgcggcgtgatcatcggatctatattcgaagtcatctgggcggtgattaagcccggaacttccttcggaatctcagtgctccgcgcattacgccttttgcggattttcaaggtgacgaagtattgggcgagcctgcggaatctggtggtctctctgttaaacagcatgaagtccatcattagcctgctgttcctactgtttttatttatcgtggttttcgcccttttggggatgcagcttttcggaggccagtttaattttgacgaaggcacccctcctaccaactttgacactttcccggcagcgatcatgacggtttttcagatcctgactggcgaggactggaatgaggtaatgtacgatggcatcaagagtcagggtggcgtccaaggagggatggtcttctccatctactttatcgtactcactctgtttggtaattatacgctgctgaatgtttttctggccattgctgtggataacctggcgaacgcacaggagctgaccaaggatgagcaggaggaagaggaggcagctaaccagaaattggctctgcagaaagccaaagaagtggcagaggttagtcctctgtccgccgctaatatgtccatcgccgtaaaggagcaacagaaaaaccagaagccggctaaatccgtttgggaacagcgaacctcggagatgcgcaaacagaaccttctggctagtagggaggctctttataacgaaatggatcccgatgagaggtggaaagccgcttatacccgtcacctaagaccagacatgaagactcacctggatcggccattggtggtcgatccacaggaaaatcgcaacaataacactaataagagccgggcagctgagcccaccgtggatcagcgactgggacaacagcgcgctgaagactttctgagaaagcaggccagataccatgatagagccagagatccctccgggtctgcaggactcgacgctcgtagaccatgggccggaagccaagaggcagagctgtcccgcgagggcccttacgggagagagtccgatcatcacgctagggagggctcactggagcaaccgggattctgggagggagaggcggaaaggggtaaggccggagatcctcatcggcgtcatgtgcatcgccagggtggctctcgtgagagcagaagcggatctcctcgtactggggcagacggagagcatcggaggcaccgggcacaccggaggcctggcgaggagggaccagaggataaggctgaaaggcgcgctcggcatagggagggcagcaggcctgctcgtggaggggagggagagggcgagggacctgacggcggagaaagacgaagacggcataggcacggcgcacccgctacatacgagggcgatgcaaggagagaggataaggagagacgccatcgcaggcgcaaagagaaccagggaagtggcgtgccagtctcaggtccaaatctctccactacacggcctatccagcaggacctgggccgtcaggaccccccactcgcagaagacatcgataacatgaaaaataataagcttgccacggctgagagtgccgctccccatggttcactggggcacgccggactgccacagtctccagccaaaatgggcaattccaccgatcctggccctatgctggcgattcctgcgatggccacaaacccccaaaacgccgcttctagaaggacccctaacaacccaggcaacccttccaatccgggtccccctaaaacccccgagaacagtctaatagttacaaatccctccggtacgcagacaaacagcgcgaagactgccagaaagcccgaccatacaacagttgacataccccctgcctgcccaccaccactgaaccatacagtggttcaggttaacaaaaatgcgaaccccgacccactgcccaagaaggaagaagagaaaaaggaagaggaggaggacgacaggggtgaggacggtccaaagccaatgcccccatacagcagcatgtttatcttgagtactaccaaccccttgcggaggctctgccactatatcctcaatctacggtatttcgaaatgtgtatcctgatggtgatagccatgtccagcatagctctggccgcagaggaccccgtccagcccaacgctccaagaaacaacgtgttgaggtacttcgactacgtctttacgggcgtgtttactttcgaaatggtaataaagatgatcgatctggggctggtgctccatcagggagcctacttcagggacctatggaacatcttggacttcattgtcgtcagcggtgctttagtcgcctttgccttcacaggcaattccaagggtaaggatattaacacgatcaaatcactgcgcgtactgagggtactccgcccattaaaaaccatcaagcggctgccaaagctgaaagccgtgttcgattgtgtagtgaacagcttgaagaacgtgtttaatattttaatcgtctacatgctgttcatgtttattttcgccgtggttgctgtccaactttttaaaggcaaatttttccattgtacagatgagtctaaggaatttgagaaggactgcagggggaaatacctgttatatgaaaagaatgaggtcaaagccagggaccgggagtggaagaagtacgagtttcattatgacaatgtcctgtgggccctgttgacactattcacggtgtccacgggagaaggttggccccaagtgctgaaacacagtgtcgatgccacctttgagaaccagggaccaagtccgggatatcgcatggaaatgtccatattctacgttgtctattttgtagtctttccgtttttcttcgttaatattttcgtggccctcattattattactttccaggaacagggagataaaatgatggaggagtattccctggaaaagaacgagcgggcttgtatcgatttcgccatcagcgcaaaacccctgacgagacatatgccacaaaataaacagagttttcagtaccgcatgtggcagtttgtggtgagcccccctttcgagtatactatcatggctatgattgccttaaacaccatcgtgctgatgatgaaattctacggggcttcagtggcctatgagaacgcgctgagagtttttaacatcgttttcacatccctcttctcactagaatgtgtgctgaaggtgatggcctttggcatcctgaattactttagggacgcctggaacatcttcgattttgtgactgttctgggctcgatcacagatattcttgtgactgagttcggaaataatttcatcaatctgtccttcttgcggctattccgcgctgcccgattaatcaaactattgagacagggctacaccatcagaatcctgttgtggacatttgtacagagtttcaaagcactcccttatgtgtgcctgctcatagccatgcttttttttatctacgctataatcggaatgcaggtgttcggtaatatcgggattgacgtcgaagatgaggattcggacgaagatgagtttcaaattactgaacataacaactttcgcacatttttccaggccctgatgcttctgtttcgctccgctacaggcgaagcctggcacaatattatgctgtcatgcctgtctggtaaaccatgcgataaaaatagtgggatcctaacacgcgagtgtggtaacgagttcgcgtacttctacttcgtgtcctttatttttttatgcagcttcctgatgctgaatctctttgtagcagtgataatggataatttcgagtatctcactagggattccagcatcttggggcctcaccatctcgatgagtacgttcgggtgtgggcagagtacgatcccgcagcatgcgggagaattcattacaaggacatgtacagtctattacgagtaatcagcccccctctaggcctaggtaagaaatgtccacatcgggtggcctgtaagcgcctgctgcgtatggatcttcctgtggcggatgacaataccgtgcattttaatagtacacttatggcactgattcgcacagctctcgacattaagatagcgaaggggggagcggacaagcagcagatggatgccgaactgcgcaaggaaatgatggccatctggcctaacctgtcccagaaaacgttggacctgctggtcacaccgcataaaagcaccgatctgaccgtgggaaaaatctacgccgcaatgatgataatggagtactacagacagtcgaaggctaagaaacttcaggccatgcgcgaagagcaggacagaacacccttgatgtttcagagaatggagcccccaagccctacccaggagggtgggccaggccagaacgccctcccctcaacccagctcgaccccggtggagcactgatggctcacgaaagcgggctgaaggagagcccttcatgggttacacaaagagcgcaggagatgttccagaagacggggacgtggtcgccagaacagggcccacccactgacatgcctaactcccagccaaacagccaaagcgtcgaaatgcgtgaaatgggaagagacggatattctgatagcgagcattatttgcctatggaaggccaggggcgagctgcatcgatgcccagattgcccgctgaaaatcagcggaggcgcggtaggccacggggaaataatttaagtacaatatcagacacttctccaatgaaacggtccgcctctgtgctggggcctaaagctagaagattggacgactacagtctggagcgagtaccccctgaagagaaccaaagacatcaccagagacgcagagatagatcccatagagcctcagaacgatccctgggtcgttacacagacgttgacactggcttggggacagacctctctatgacgactcagagtggcgacctcccatctaaggagcgggatcaggagcgtggtaggccaaaagaccgtaaacaccgacagcaccatcatcaccatcaccaccatcaccacccaccacccccagataaggaccgatatgcacaggaacgacccgatcacggtagggccagggcccgtgatcagcggtggtctagatctcctagcgagggccgtgagcacatggcacacagacagta

SEQ ID NO: 44611 - DNA, 804 bp, Artificial Sequence
  derived and/or modified sequence
atgctctttatgttcatcttcgcagtcgtggctgttcagttgttcaaaggtaagttcttccactgcaccgatgaatcgaaagaatttgagaaagactgtagaggcaaatacttgctgtacgagaaaaacgaggtgaaagcccgagaccgggaatggaagaagtacgaattccactacgataatgtgctgtgggctctacttacactgtttaccgtgagcacaggggagggttggccccaagtgctgaagcattctgtcgatgctacatttgagaaccagggccctagcccagggtatagaatggagatgagtattttttacgtagtgtacttcgtcgtctttccatttttctttgtaaacatcttcgtggctctgataatcattacctttcaggaacagggcgataagatgatggaagagtactcacttgaaaagaacgagcgtgcctgcatcgacttcgccataagcgcgaaacctctgacaaggcacatgccacagaacaaacaatctttccagtatcgtatgtggcagttcgtggtatcacccccatttgagtatacaataatggcgatgatcgctcttaacaccattgttctcatgatgaaattttatggcgcatccgtggcgtacgagaacgccctgcgcgttttcaacattgtgttcacttccttattttccctggagtgtgtgctgaaggtgatggccttcggcattcttaattatttcagagatgcttggaacatctttgacttcgtcacggttttgggaagcattacggacatcctggtcaccgaatttggatag

SEQ ID NO: 44612 - DNA, 8626 bp, Artificial Sequence
  derived and/or modified sequence
gatgtcccgagctgctatccccggctcggcccgggcagccgccttctgagcccccgacccgaggcgccgagccgccgccgcccgatgggctgggccgtggagcgtctccgcagtcgtagctccagccgccgcgctcccagccccggcagcctcagcatcagcggcggcggcggcggcggcggcgtcttccgcatcgttcgccgcagcgtaacccggagccctttgctctttgcagaatggcccgcttcggagacgagatgccggcccgctacgggggaggaggctccggggcagccgccggggtggtcgtgggcagcggaggcgggcgaggagccgggggcagccggcagggcgggcagcccggggcgcaaaggatgtacaagcagtcaatggcgcagagagcgcggaccatggcactctacaaccccatccccgtccgacagaactgcctcacggttaaccggtctctcttcctcttcagcgaagacaacgtggtgagaaaatacgccaaaaagatcaccgaatggcctccctttgaatatatgattttagccaccatcatagcgaattgcatcgtcctcgcactggagcagcatctgcctgatgatgacaagaccccgatgtctgaacggctggatgacacagaaccatacttcattggaattttttgtttcgaggctggaattaaaatcattgcccttgggtttgccttccacaaaggctcctacttgaggaatggctggaatgtcatggactttgtggtggtgctaacgggcatcttggcgacagttgggacggagtttgacctacggacgctgagggcagttcgagtgctgcggccgctcaagctggtgtctggaatcccaagtttacaagtcgtcctgaagtcgatcatgaaggcgatgatccctttgctgcagatcggcctcctcctattttttgcaatccttatttttgcaatcatagggttagaattttatatgggaaaatttcataccacctgctttgaagaggggacagatgacattcagggtgagtctccggctccatgtgggacagaagagcccgcccgcacctgccccaatgggaccaaatgtcagccctactgggaagggcccaacaacgggatcactcagttcgacaacatcctgtttgcagtgctgactgttttccagtgcataaccatggaagggtggactgatctcctctacaatagcaacgatgcctcagggaacacttggaactggttgtacttcatccccctcatcatcatcggctccttttttatgctgaaccttgtgctgggtgtgctgtcaggggagtttgccaaagaaagggaacgggtggagaaccggcgggcttttctgaagctgaggcggcaacaacagattgaacgtgagctcaatgggtacatggagtggatctcaaaagcagaagaggtgatcctcgccgaggatgaaactgacggggagcagaggcatccctttgatggagctctgcggagaaccaccataaagaaaagcaagacagatttgctcaaccccgaagaggctgaggatcagctggctgatatagcctctgtgggttctcccttcgcccgagccagcattaaaagtgccaagctggagaactcgaccttttttcacaaaaaggagaggaggatgcgtttctacatccgccgcatggtcaaaactcaggccttctactggactgtactcagtttggtagctctcaacacgctgtgtgttgctattgttcactacaaccagcccgagtggctctccgacttcctttactatgcagaattcattttcttaggactctttatgtccgaaatgtttataaaaatgtacgggcttgggacgcggccttacttccactcttccttcaactgctttgactgtggggttatcattgggagcatcttcgaggtcatctgggctgtcataaaacctggcacatcctttggaatcagcgtgttacgagccctcaggttattgcgtattttcaaagtcacaaagtactgggcatctctcagaaacctggtcgtctctctcctcaactccatgaagtccatcatcagcctgttgtttctccttttcctgttcattgtcgtcttcgcccttttgggaatgcaactcttcggcggccagtttaatttcgatgaagggactcctcccaccaacttcgatacttttccagcagcaataatgacggtgtttcagatcctgacgggcgaagactggaacgaggtcatgtacgacgggatcaagtctcaggggggcgtgcagggcggcatggtgttctccatctatttcattgtactgacgctctttgggaactacaccctcctgaatgtgttcttggccatcgctgtggacaatctggccaacgcccaggagctcaccaaggacgagcaagaggaagaagaagcagcgaaccagaaacttgccctacagaaagccaaggaggtggcagaagtgagtcctctgtccgcggccaacatgtctatagctgtgaaagagcaacagaagaatcaaaagccagccaagtccgtgtgggagcagcggaccagtgagatgcgaaagcagaacttgctggccagccgggaggccctgtataacgaaatggacccggacgagcgctggaaggctgcctacacgcggcacctgcggccagacatgaagacgcacttggaccggccgctggtggtggacccgcaggagaaccgcaacaacaacaccaacaagagccgggcggccgagcccaccgtggaccagcgcctcggccagcagcgcgccgaggacttcctcaggaaacaggcccgctaccacgatcgggcccgggaccccagcggctcggcgggcctggacgcacggaggccctgggcgggaagccaggaggccgagctgagccgggagggaccctacggccgcgagtcggaccaccacgcccgggagggcagcctggagcaacccgggttctgggagggcgaggccgagcgaggcaaggccggggacccccaccggaggcacgtgcaccggcaggggggcagcagggagagccgcagcgggtccccgcgcacgggcgcggacggggagcatcgacgtcatcgcgcgcaccgcaggcccggggaggagggtccggaggacaaggcggagcggagggcgcggcaccgcgagggcagccggccggcccggggcggcgagggcgagggcgagggccccgacgggggcgagcgcaggagaaggcaccggcatggcgctccagccacgtacgagggggacgcgcggagggaggacaaggagcggaggcatcggaggaggaaagagaaccagggctccggggtccctgtgtcgggccccaacctgtcaaccacccggccaatccagcaggacctgggccgccaagacccacccctggcagaggatattgacaacatgaagaacaacaagctggccaccgcggagtcggccgctccccacggcagccttggccacgccggcctgccccagagcccagccaagatgggaaacagcaccgaccccggccccatgctggccatccctgccatggccaccaacccccagaacgccgccagccgccggacgcccaacaacccggggaacccatccaatcccggcccccccaagacccccgagaatagccttatcgtcaccaaccccagcggcacccagaccaattcagctaagactgccaggaaacccgaccacaccacagtggacatccccccagcctgcccaccccccctcaaccacaccgtcgtacaagtgaacaaaaacgccaacccagacccactgccaaaaaaagaggaagagaagaaggaggaggaggaagacgaccgtggggaagacggccctaagccaatgcctccctatagctccatgttcatcctgtccacgaccaacccccttcgccgcctgtgccattacatcctgaacctgcgctactttgagatgtgcatcctcatggtcattgccatgagcagcatcgccctggccgccgaggaccctgtgcagcccaacgcacctcggaacaacgtgctgcgatactttgactacgtttttacaggcgtctttacctttgagatggtgatcaagatgattgacctggggctcgtcctgcatcagggtgcctacttccgtgacctctggaatattctcgacttcatagtggtcagtggggccctggtagcctttgccttcactggcaatagcaaaggaaaagacatcaacacgattaaatccctccgagtcctccgggtgctacgacctcttaaaaccatcaagcggctgccaaagctcaaggctgtgtttgactgtgtggtgaactcacttaaaaacgtcttcaacatcctcatcgtctacatgctattcatgttcatcttcgccgtggtggctgtgcagctcttcaaggggaaattcttccactgcactgacgagtccaaagagtttgagaaagattgtcgaggcaaatacctcctctacgagaagaatgaggtgaaggcgcgagaccgggagtggaagaagtatgaattccattacgacaatgtgctgtgggctctgctgaccctcttcaccgtgtccacgggagaaggctggccacaggtcctcaagcattcggtggacgccacctttgagaaccagggccccagccccgggtaccgcatggagatgtccattttctacgtcgtctactttgtggtgttccccttcttctttgtcaatatctttgtggccttgatcatcatcaccttccaggagcaaggggacaagatgatggaggaatacagcctggagaaaaatgagagggcctgcattgatttcgccatcagcgccaagccgctgacccgacacatgccgcagaacaagcagagcttccagtaccgcatgtggcagttcgtggtgtctccgcctttcgagtacacgatcatggccatgatcgccctcaacaccatcgtgcttatgatgaagttctatggggcttctgttgcttatgaaaatgccctgcgggtgttcaacatcgtcttcacctccctcttctctctggaatgtgtgctgaaagtcatggcttttgggattctgaattatttccgcgatgcctggaacatcttcgactttgtgactgttctgggcagcatcaccgatatcctcgtgactgagtttgggaataacttcatcaacctgagctttctccgcctcttccgagctgcccggctcatcaaacttctccgtcagggttacaccatccgcattcttctctggacctttgtgcagtccttcaaggccctgccttatgtctgtctgctgatcgccatgctcttcttcatctatgccatcattgggatgcaggtgtttggtaacattggcatcgacgtggaggacgaggacagtgatgaagatgagttccaaatcactgagcacaataacttccggaccttcttccaggccctcatgcttctcttccggagtgccaccggggaagcttggcacaacatcatgctttcctgcctcagcgggaaaccgtgtgataagaactctggcatcctgactcgagagtgtggcaatgaatttgcttatttttactttgtttccttcatcttcctctgctcgtttctgatgctgaatctctttgtcgccgtcatcatggacaactttgagtacctcacccgagactcctccatcctgggcccccaccacctggatgagtacgtgcgtgtctgggccgagtatgaccccgcagcttgcggtcggattcattataaggatatgtacagtttattacgagtaatatctccccctctcggcttaggcaagaaatgtcctcatagggttgcttgcaagcggcttctgcggatggacctgcccgtcgcagatgacaacaccgtccacttcaattccaccctcatggctctgatccgcacagccctggacatcaagattgccaagggaggagccgacaaacagcagatggacgctgagctgcggaaggagatgatggcgatttggcccaatctgtcccagaagacgctagacctgctggtcacacctcacaagtccacggacctcaccgtggggaagatctacgcagccatgatgatcatggagtactaccggcagagcaaggccaagaagctgcaggccatgcgcgaggagcaggaccggacacccctcatgttccagcgcatggagcccccgtccccaacgcaggaagggggacctggccagaacgccctcccctccacccagctggacccaggaggagccctgatggctcacgaaagcggcctcaaggagagcccgtcctgggtgacccagcgtgcccaggagatgttccagaagacgggcacatggagtccggaacaaggcccccctaccgacatgcccaacagccagcctaactctcagtccgtggagatgcgagagatgggcagagatggctactccgacagcgagcactacctccccatggaaggccagggccgggctgcctccatgccccgcctccctgcagagaaccagaggagaaggggccggccacgtgggaataacctcagtaccatctcagacaccagccccatgaagcgttcagcctccgtgctgggccccaaggcccgacgcctggacgattactcgctggagcgggtcccgcccgaggagaaccagcggcaccaccagcggcgccgcgaccgcagccaccgcgcctctgagcgctccctgggccgctacaccgatgtggacacaggcttggggacagacctgagcatgaccacccaatccggggacctgccgtcgaaggagcgggaccaggagcggggccggcccaaggatcggaagcatcgacagcaccaccaccaccaccaccaccaccaccatcccccgccccccgacaaggaccgctatgcccaggaacggccggaccacggccgggcacgggctcgggaccagcgctggtcccgctcgcccagcgagggccgagagcacatggcgcaccggcagtagttccgtaagtggaagcccagccccctcaacatctggtaccagcactccgcggcggggccgccgccagctcccccagaccccctccaccccccggccacacgtgtcctattcccctgtgatccgtaaggccggcggctcggggcccccgcagcagcagcagcagcagcagcagcagcagcagcagcaggcggtggccaggccgggccgggcggccaccagcggccctcggaggtacccaggccccacggccgagcctctggccggagatcggccgcccacggggggccacagcagcggccgctcgcccaggatggagaggcgggtcccaggcccggcccggagcgagtcccccagggcctgtcgacacggcggggcccggtggccggcatctggcccgcacgtgtccgaggggcccccgggtccccggcaccatggctactaccggggctccgactacgacgaggccgatggcccgggcagcgggggcggcgaggaggccatggccggggcctacgacgcgccaccccccgtacgacacgcgtcctcgggcgccaccgggcgctcgcccaggactccccgggcctcgggcccggcctgcgcctcgccttctcggcacggccggcgactccccaacggctactacccggcgcacggactggccaggccccgcgggccgggctccaggaagggcctgcacgaaccctacagcgagagtgacgatgattggtgctaagcccgggcgaggtggcgcccgcccggccccccacgcaccccacgcacacaccccacccgaggagccgcgcagaggccgcgggggcccagcacagagggcccgggagagggccagccgggagaccccagactctggagaggccagggctgggccacaagggtgtcccgcagagaccctcggccaaaagagaccctcctgggcagccacggcgccccccaaccagccccgatccccccacccacgacaggggctctcgggtgggaggcagggagcagacaaaccacacagccaagggatttgaattaactcagccatttttggagaactttggggaacatgaaaaaaaaaaaaaaaaaaaaaaaaaaaaacatttttaaaagaaaaaacggggagaaaaaaatagcttctattgatgagttttatcatctcaattgaatctttcctttccctgatgaagacagctggtggccgagtgcggcaaagaagccagaaggaaccagaatcccagtgccctacacccaccaccagacacactcacacccacacacgttctcagacacacacaagagtgcttgccggttataccaaaccctactattactgcctgcagaaatcaatttaaaaaaataataataacaataaacaattttaaaaaggacaaaaaaattaatgattgagaaaagaggcatttttttctgacatttggtcctgcttgaaacaacaaaagaagaagaaaaacccaccatcaccaccgattcctttgcttcttttttccttttttcctaccttgtttgaaaaccgtgggcttgggactgtgaattattgcatgacattcaaaaagaaaaaaaaaataaaaaaaagttgaatcaaa

SEQ ID NO: 44613 - DNA, 1006 bp, Artificial Sequence
  derived and/or modified sequence
cgacttcatagtggtcagtggggccctggtagcctttgccttcactggcaatagcaaaggaaaagacatcaacacgattaaatccctccgagtcctccgggtgctacgacctcttaaaaccatcaagcggctgccaaagctcaaggctgtgtttgactgtgtggtgaactcacttaaaaacgtcttcaacatcctcatcgtctacatgctattcatgttcatcttcgccgtggtggctgtgcagctcttcaaggggaaattcttccactgcactgacgagtccaaagagtttgagaaagattgtcgaggcaaatacctcctctacgagaagaatgaggtgaaggcgcgagaccgggagtggaagaagtatgaattccattacgacaatgtgctgtgggctctgctgaccctcttcaccgtgtccacgggagaaggctggccacaggtcctcaagcattcggtggacgccacctttgagaaccagggccccagccccgggtaccgcatggagatgtccattttctacgtcgtctactttgtggtgttccccttcttctttgtcaatatctttgtggccttgatcatcatcaccttccaggagcaaggggacaagatgatggaggaatacagcctggagaaaaatgagagggcctgcattgatttcgccatcagcgccaagccgctgacccgacacatgccgcagaacaagcagagcttccagtaccgcatgtggcagttcgtggtgtctccgcctttcgagtacacgatcatggccatgatcgccctcaacaccatcgtgcttatgatgaagttctatggggcttctgttgcttatgaaaatgccctgcgggtgttcaacatcgtcttcacctccctcttctctctggaatgtgtgctgaaagtcatggcttttgggattctgaattatttccgcgatgcctggaacatcttcgactttgtgactgttctgggcagcatcaccgatatcctcgtgactgagtttggg

SEQ ID NO: 44614 - DNA, 6786 bp, Artificial Sequence
  derived and/or modified sequence
atggccagattcggcgacgagatgcccgccagatacggcggcggcggcagcggcgccgccgccggcgtggtggtgggcagcggcggcggcagaggcgccggcggcagcagacagggcggccagcccggcgcccagagaatgtacaagcagagcatggcccagagagccagaaccatggccctgtacaaccccatccccgtgagacagaactgcctgaccgtgaacagaagcctgttcctgttcagcgaggacaacgtggtgagaaagtacgccaagaagatcaccgagtggccccccttcgagtacatgatcctggccaccatcatcgccaactgcatcgtgctggccctggagcagcacctgcccgacgacgacaagacccccatgagcgagagactggacgacaccgagccctacttcatcggcatcttctgcttcgaggccggcatcaagatcatcgccctgggcttcgccttccacaagggcagctacctgagaaacggctggaacgtgatggacttcgtggtggtgctgaccggcatcctggccaccgtgggcaccgagttcgacctgagaaccctgagagccgtgagagtgctgagacccctgaagctggtgagcggcatccccagcctgcaggtggtgctgaagagcatcatgaaggccatgatccccctgctgcagatcggcctgctgctgttcttcgccatcctgatcttcgccatcatcggcctggagttctacatgggcaagttccacaccacctgcttcgaggagggcaccgacgacatccagggcgagagccccgccccctgcggcaccgaggagcccgccagaacctgccccaacggcaccaagtgccagccctactgggagggccccaacaacggcatcacccagttcgacaacatcctgttcgccgtgctgaccgtgttccagtgcatcaccatggagggctggaccgacctgctgtacaacagcaacgacgccagcggcaacacctggaactggctgtacttcatccccctgatcatcatcggcagcttcttcatgctgaacctggtgctgggcgtgctgagcggcgagttcgccaaggagagagagagagtggagaacagaagagccttcctgaagctgagaagacagcagcagatcgagagagagctgaacggctacatggagtggatcagcaaggccgaggaggtgatcctggccgaggacgagaccgacggcgagcagagacaccccttcgacggcgccctgagaagaaccaccatcaagaagagcaagaccgacctgctgaaccccgaggaggccgaggaccagctggccgacatcgccagcgtgggcagccccttcgccagagccagcatcaagagcgccaagctggagaacagcaccttcttccacaagaaggagagaagaatgagattctacatcagaagaatggtgaagacccaggccttctactggaccgtgctgagcctggtggccctgaacaccctgtgcgtggccatcgtgcactacaaccagcccgagtggctgagcgacttcctgtactacgccgagttcatcttcctgggcctgttcatgagcgagatgttcatcaagatgtacggcctgggcaccagaccctacttccacagcagcttcaactgcttcgactgcggcgtgatcatcggcagcatcttcgaggtgatctgggccgtgatcaagcccggcaccagcttcggcatcagcgtgctgagagccctgagactgctgagaatcttcaaggtgaccaagtactgggccagcctgagaaacctggtggtgagcctgctgaacagcatgaagagcatcatcagcctgctgttcctgctgttcctgttcatcgtggtgttcgccctgctgggcatgcagctgttcggcggccagttcaacttcgacgagggcaccccccccaccaacttcgacaccttccccgccgccatcatgaccgtgttccagatcctgaccggcgaggactggaacgaggtgatgtacgacggcatcaagagccagggcggcgtgcagggcggcatggtgttcagcatctacttcatcgtgctgaccctgttcggcaactacaccctgctgaacgtgttcctggccatcgccgtggacaacctggccaacgcccaggagctgaccaaggacgagcaggaggaggaggaggccgccaaccagaagctggccctgcagaaggccaaggaggtggccgaggtgagccccctgagcgccgccaacatgagcatcgccgtgaaggagcagcagaagaaccagaagcccgccaagagcgtgtgggagcagagaaccagcgagatgagaaagcagaacctgctggccagcagagaggccctgtacaacgagatggaccccgacgagagatggaaggccgcctacaccagacacctgagacccgacatgaagacccacctggacagacccctggtggtggacccccaggagaacagaaacaacaacaccaacaagagcagagccgccgagcccaccgtggaccagagactgggccagcagagagccgaggacttcctgagaaagcaggccagataccacgacagagccagagaccccagcggcagcgccggcctggacgccagaagaccctgggccggcagccaggaggccgagctgagcagagagggcccctacggcagagagagcgaccaccacgccagagagggcagcctggagcagcccggcttctgggagggcgaggccgagagaggcaaggccggcgacccccacagaagacacgtgcacagacagggcggcagcagagagagcagaagcggcagccccagaaccggcgccgacggcgagcacagaagacacagagcccacagaagacccggcgaggagggccccgaggacaaggccgagagaagagccagacacagagagggcagcagacccgccagaggcggcgagggcgagggcgagggccccgacggcggcgagagaagaagaagacacagacacggcgcccccgccacctacgagggcgacgccagaagagaggacaaggagagaagacacagaagaagaaaggagaaccagggcagcggcgtgcccgtgagcggccccaacctgagcaccaccagacccatccagcaggacctgggcagacaggacccccccctggccgaggacatcgacaacatgaagaacaacaagctggccaccgccgagagcgccgccccccacggcagcctgggccacgccggcctgccccagagccccgccaagatgggcaacagcaccgaccccggccccatgctggccatccccgccatggccaccaacccccagaacgccgccagcagaagaacccccaacaaccccggcaaccccagcaaccccggcccccccaagacccccgagaacagcctgatcgtgaccaaccccagcggcacccagaccaacagcgccaagaccgccagaaagcccgaccacaccaccgtggacatcccccccgcctgccccccccccctgaaccacaccgtggtgcaggtgaacaagaacgccaaccccgaccccctgcccaagaaggaggaggagaagaaggaggaggaggaggacgacagaggcgaggacggccccaagcccatgcccccctacagcagcatgttcatcctgagcaccaccaaccccctgagaagactgtgccactacatcctgaacctgagatacttcgagatgtgcatcctgatggtgatcgccatgagcagcatcgccctggccgccgaggaccccgtgcagcccaacgcccccagaaacaacgtgctgagatacttcgactacgtgttcaccggcgtgttcaccttcgagatggtgatcaagatgatcgacctgggcctggtgctgcaccagggcgcctacttcagagacctgtggaacatcctggacttcatcgtggtgagcggcgccctggtggccttcgccttcaccggcaacagcaagggcaaggacatcaacaccatcaagagcctgagagtgctgagagtgctgagacccctgaagaccatcaagagactgcccaagctgaaggccgtgttcgactgcgtggtgaacagcctgaagaacgtgttcaacatcctgatcgtgtacatgctgttcatgttcatcttcgccgtggtggccgtgcagctgttcaagggcaagttcttccactgcaccgacgagagcaaggagttcgagaaggactgcagaggcaagtacctgctgtacgagaagaacgaggtgaaggccagagacagagagtggaagaagtacgagttccactacgacaacgtgctgtgggccctgctgaccctgttcaccgtgagcaccggcgagggctggccccaggtgctgaagcacagcgtggacgccaccttcgagaaccagggccccagccccggctacagaatggagatgagcatcttctacgtggtgtacttcgtggtgttccccttcttcttcgtgaacatcttcgtggccctgatcatcatcaccttccaggagcagggcgacaagatgatggaggagtacagcctggagaagaacgagagagcctgcatcgacttcgccatcagcgccaagcccctgaccagacacatgccccagaacaagcagagcttccagtacagaatgtggcagttcgtggtgagcccccccttcgagtacaccatcatggccatgatcgccctgaacaccatcgtgctgatgatgaagttctacggcgccagcgtggcctacgagaacgccctgagagtgttcaacatcgtgttcaccagcctgttcagcctggagtgcgtgctgaaggtgatggccttcggcatcctgaactacttcagagacgcctggaacatcttcgacttcgtgaccgtgctgggcagcatcaccgacatcctggtgaccgagttcggcaacaacttcatcaacctgagcttcctgagactgttcagagccgccagactgatcaagctgctgagacagggctacaccatcagaatcctgctgtggaccttcgtgcagagcttcaaggccctgccctacgtgtgcctgctgatcgccatgctgttcttcatctacgccatcatcggcatgcaggtgttcggcaacatcggcatcgacgtggaggacgaggacagcgacgaggacgagttccagatcaccgagcacaacaacttcagaaccttcttccaggccctgatgctgctgttcagaagcgccaccggcgaggcctggcacaacatcatgctgagctgcctgagcggcaagccctgcgacaagaacagcggcatcctgaccagagagtgcggcaacgagttcgcctacttctacttcgtgagcttcatcttcctgtgcagcttcctgatgctgaacctgttcgtggccgtgatcatggacaacttcgagtacctgaccagagacagcagcatcctgggcccccaccacctggacgagtacgtgagagtgtgggccgagtacgaccccgccgcctgcggcagaatccactacaaggacatgtacagcctgctgagagtgatcagcccccccctgggcctgggcaagaagtgcccccacagagtggcctgcaagagactgctgagaatggacctgcccgtggccgacgacaacaccgtgcacttcaacagcaccctgatggccctgatcagaaccgccctggacatcaagatcgccaagggcggcgccgacaagcagcagatggacgccgagctgagaaaggagatgatggccatctggcccaacctgagccagaagaccctggacctgctggtgaccccccacaagagcaccgacctgaccgtgggcaagatctacgccgccatgatgatcatggagtactacagacagagcaaggccaagaagctgcaggccatgagagaggagcaggacagaacccccctgatgttccagagaatggagccccccagccccacccaggagggcggccccggccagaacgccctgcccagcacccagctggaccccggcggcgccctgatggcccacgagagcggcctgaaggagagccccagctgggtgacccagagagcccaggagatgttccagaagaccggcacctggagccccgagcagggcccccccaccgacatgcccaacagccagcccaacagccagagcgtggagatgagagagatgggcagagacggctacagcgacagcgagcactacctgcccatggagggccagggcagagccgccagcatgcccagactgcccgccgagaaccagagaagaagaggcagacccagaggcaacaacctgagcaccatcagcgacaccagccccatgaagagaagcgccagcgtgctgggccccaaggccagaagactggacgactacagcctggagagagtgccccccgaggagaaccagagacaccaccagagaagaagagacagaagccacagagccagcgagagaagcctgggcagatacaccgacgtggacaccggcctgggcaccgacctgagcatgaccacccagagcggcgacctgcccagcaaggagagagaccaggagagaggcagacccaaggacagaaagcacagacagcaccaccaccaccaccaccaccaccaccacccccccccccccgacaaggacagatacgcccaggagagacccgaccacggcagagccagagccagagaccagagatggagcagaagccccagcgagggcagagagcacatggcccacagacagtag

SEQ ID NO: 44615 - DNA, 804 bp, Artificial Sequence
  derived and/or modified sequence
atgctgttcatgttcatcttcgccgtggtggccgtgcagctgttcaagggcaagttcttccactgcaccgacgagagcaaggagttcgagaaggactgcagaggcaagtacctgctgtacgagaagaacgaggtgaaggccagagacagagagtggaagaagtacgagttccactacgacaacgtgctgtgggccctgctgaccctgttcaccgtgagcaccggcgagggctggccccaggtgctgaagcacagcgtggacgccaccttcgagaaccagggccccagccccggctacagaatggagatgagcatcttctacgtggtgtacttcgtggtgttccccttcttcttcgtgaacatcttcgtggccctgatcatcatcaccttccaggagcagggcgacaagatgatggaggagtacagcctggagaagaacgagagagcctgcatcgacttcgccatcagcgccaagcccctgaccagacacatgccccagaacaagcagagcttccagtacagaatgtggcagttcgtggtgagcccccccttcgagtacaccatcatggccatgatcgccctgaacaccatcgtgctgatgatgaagttctacggcgccagcgtggcctacgagaacgccctgagagtgttcaacatcgtgttcaccagcctgttcagcctggagtgcgtgctgaaggtgatggccttcggcatcctgaactacttcagagacgcctggaacatcttcgacttcgtgaccgtgctgggcagcatcaccgacatcctggtgaccgagttcggctag

SEQ ID NO: 44616 - protein, 2495 aa, Artificial Sequence
  derived and/or modified sequence
MARFGDEMPARYGGGGSGAAAGVVVGSGGGRGAGGSRQGGQPGAQRMYKQSMAQRARTMALYNPIPVRQNCLTVNRSLFLFSEDNVVRKYAKKITEWPPFEYMILATIIANCIVLALEQHLPDDDKTPMSERLDDTEPYFIGIFCFEAGIKIIALGFAFHKGSYLRNGWNVMDFVVVLTGILATVGTEFDLRTLRAVRVLRPLKLVSGIPSLQVVLKSIMKAMIPLLQIGLLLFFAILIFAIIGLEFYMGKFHTTCFEEGTDDIQGESPAPCGTEEPARTCPNGTKCQPYWEGPNNGITQFDNILFAVLTVFQCITMEGWTDLLYNSNDASGNTWNWLYFIPLIIIGSFFMLNLVLGVLSGEFAKERERVENRRAFLKLRRQQQIERELNGYMEWISKAEEVILAEDETDGEQRHPFDGALRRTTIKKSKTDLLNPEEAEDQLADIASVGSPFARASIKSAKLENSTFFHKKERRMRFYIRRMVKTQAFYWTVLSLVALNTLCVAIVHYNQPEWLSDFLYYAEFIFLGLFMSEMFIKMYGLGTRPYFHSSFNCFDCGVIIGSIFEVIWAVIKPGTSFGISVLRALRLLRIFKVTKYWASLRNLVVSLLNSMKSIISLLFLLFLFIVVFALLGMQLFGGQFNFDEGTPPTNFDTFPAAIMTVFQILTGEDWNEVMYDGIKSQGGVQGGMVFSIYFIVLTLFGNYTLLNVFLAIAVDNLANAQELTKDEQEEEEAANQKLALQKAKEVAEVSPLSAANMSIAVKEQQKNQKPAKSVWEQRTSEMRKQNLLASREALYNEMDPDERWKAAYTRHLRPDMKTHLDRPLVVDPQENRNNNTNKSRAAEPTVDQRLGQQRAEDFLRKQARYHDRARDPSGSAGLDARRPWAGSQEAELSREGPYGRESDHHAREGSLEQPGFWEGEAERGKAGDPHRRHVHRQGGSRESRSGSPRTGADGEHRRHRAHRRPGEEGPEDKAERRARHREGSRPARGGEGEGEGPDGGERRRRHRHGAPATYEGDARREDKERRHRRRKENQGSGVPVSGPNLSTTRPIQQDLGRQDPPLAEDIDNMKNNKLATAESAAPHGSLGHAGLPQSPAKMGNSTDPGPMLAIPAMATNPQNAASRRTPNNPGNPSNPGPPKTPENSLIVTNPSGTQTNSAKTARKPDHTTVDIPPACPPPLNHTVVQVNKNANPDPLPKKEEEKKEEEEDDRGEDGPKPMPPYSSMFILSTTNPLRRLCHYILNLRYFEMCILMVIAMSSIALAAEDPVQPNAPRNNVLRYFDYVFTGVFTFEMVIKMIDLGLVLHQGAYFRDLWNILDFIVVSGALVAFAFTGNSKGKDINTIKSLRVLRVLRPLKTIKRLPKLKAVFDCVVNSLKNVFNILIVYMLFMFIFAVVAVQLFKGKFFHCTDESKEFEKDCRGKYLLYEKNEVKARDREWKKYEFHYDNVLWALLTLFTVSTGEGWPQVLKHSVDATFENQGPSPGYRMEMSIFYVVYFVVFPFFFVNIFVALIIITFQEQGDKMMEEYSLEKNERACIDFAISAKPLTRHMPQNKQSFQYRMWQFVVSPPFEYTIMAMIALNTIVLMMKFYGASVAYENALRVFNIVFTSLFSLECVLKVMAFGILNYFRDAWNIFDFVTVLGSITDILVTEFGNNFINLSFLRLFRAARLIKLLRQGYTIRILLWTFVQSFKALPYVCLLIAMLFFIYAIIGMQVFGNIGIDVEDEDSDEDEFQITEHNNFRTFFQALMLLFRSATGEAWHNIMLSCLSGKPCDKNSGILTRECGNEFAYFYFVSFIFLCSFLMLNLFVAVIMDNFEYLTRDSSILGPHHLDEYVRVWAEYDPAAWGRMPYLDMYQMLRHMSPPLGLGKKCPARVAYKRLLRMDLPVADDNTVHFNSTLMALIRTALDIKIAKGGADKQQMDAELRKEMMAIWPNLSQKTLDLLVTPHKSTDLTVGKIYAAMMIMEYYRQSKAKKLQAMREEQDRTPLMFQRMEPPSPTQEGGPGQNALPSTQLDPGGALMAHESGLKESPSWVTQRAQEMFQKTGTWSPEQGPPTDMPNSQPNSQSVEMREMGRDGYSDSEHYLPMEGQGRAASMPRLPAENQTISDTSPMKRSASVLGPKARRLDDYSLERVPPEENQRHHQRRRDRSHRASERSLGRYTDVDTGLGTDLSMTTQSGDLPSKERDQERGRPKDRKHRQHHHHHHHHHHPPPPDKDRYAQERPDHGRARARDQRWSRSPSEGREHMAHRQGSSSVSGSPAPSTSGTSTPRRGRRQLPQTPSTPRPHVSYSPVIRKAGGSGPPQQQQQQQQQQQQQAVARPGRAATSGPRRYPGPTAEPLAGDRPPTGGHSSGRSPRMERRVPGPARSESPRACRHGGARWPASGPHVSEGPPGPRHHGYYRGSDYDEADGPGSGGGEEAMAGAYDAPPPVRHASSGATGRSPRTPRASGPACASPSRHGRRLPNGYYPAHGLARPRGPGSRKGLHEPYSESDDDWC

SEQ ID NO: 44617 - protein, 2506 aa, Artificial Sequence
  derived and/or modified sequence
MARFGDEMPARYGGGGSGAAAGVVVGSGGGRGAGGSRQGGQPGAQRMYKQSMAQRARTMALYNPIPVRQNCLTVNRSLFLFSEDNVVRKYAKKITEWPPFEYMILATIIANCIVLALEQHLPDDDKTPMSERLDDTEPYFIGIFCFEAGIKIIALGFAFHKGSYLRNGWNVMDFVVVLTGILATVGTEFDLRTLRAVRVLRPLKLVSGIPSLQVVLKSIMKAMIPLLQIGLLLFFAILIFAIIGLEFYMGKFHTTCFEEGTDDIQGESPAPCGTEEPARTCPNGTKCQPYWEGPNNGITQFDNILFAVLTVFQCITMEGWTDLLYNSNDASGNTWNWLYFIPLIIIGSFFMLNLVLGVLSGEFAKERERVENRRAFLKLRRQQQIERELNGYMEWISKAEEVILAEDETDGEQRHPFDALRRTTIKKSKTDLLNPEEAEDQLADIASVGSPFARASIKSAKLENSTFFHKKERRMRFYIRRMVKTQAFYWTVLSLVALNTLCVAIVHYNQPEWLSDFLYYAEFIFLGLFMSEMFIKMYGLGTRPYFHSSFNCFDCGVIIGSIFEVIWAVIKPGTSFGISVLRALRLLRIFKVTKYWASLRNLVVSLLNSMKSIISLLFLLFLFIVVFALLGMQLFGGQFNFDEGTPPTNFDTFPAAIMTVFQILTGEDWNEVMYDGIKSQGGVQGGMVFSIYFIVLTLFGNYTLLNVFLAIAVDNLANAQELTKDEQEEEEAANQKLALQKAKEVAEVSPLSAANMSIAVKEQQKNQKPAKSVWEQRTSEMRKQNLLASREALYNEMDPDERWKAAYTRHLRPDMKTHLDRPLVVDPQENRNNNTNKSRAAEPTVDQRLGQQRAEDFLRKQARYHDRARDPSGSAGLDARRPWAGSQEAELSREGPYGRESDHHAREGSLEQPGFWEGEAERGKAGDPHRRHVHRQGGSRESRSGSPRTGADGEHRRHRAHRRPGEEGPEDKAERRARHREGSRPARGGEGEGEGPDGGERRRRHRHGAPATYEGDARREDKERRHRRRKENQGSGVPVSGPNLSTTRPIQQDLGRQDPPLAEDIDNMKNNKLATAESAAPHGSLGHAGLPQSPAKMGNSTDPGPMLAIPAMATNPQNAASRRTPNNPGNPSNPGPPKTPENSLIVTNPSGTQTNSAKTARKPDHTTVDIPPACPPPLNHTVVQVNKNANPDPLPKKEEEKKEEEEDDRGEDGPKPMPPYSSMFILSTTNPLRRLCHYILNLRYFEMCILMVIAMSSIALAAEDPVQPNAPRNNVLRYFDYVFTGVFTFEMVIKMIDLGLVLHQGAYFRDLWNILDFIVVSGALVAFAFTGNSKGKDINTIKSLRVLRVLRPLKTIKRLPKLKAVFDCVVNSLKNVFNILIVYMLFMFIFAVVAVQLFKGKFFHCTDESKEFEKDCRGKYLLYEKNEVKARDREWKKYEFHYDNVLWALLTLFTVSTGEGWPQVLKHSVDATFENQGPSPGYRMEMSIFYVVYFVVFPFFFVNIFVALIIITFQEQGDKMMEEYSLEKNERACIDFAISAKPLTRHMPQNKQSFQYRMWQFVVSPPFEYTIMAMIALNTIVLMMKFYGASVAYENALRVFNIVFTSLFSLECVLKVMAFGILNYFRDAWNIFDFVTVLGSITDILVTEFGNNFINLSFLRLFRAARLIKLLRQGYTIRILLWTFVQSFKALPYVCLLIAMLFFIYAIIGMQVFGNIGIDVEDEDSDEDEFQITEHNNFRTFFQALMLLFRSATGEAWHNIMLSCLSGKPCDKNSGILTRECGNEFAYFYFVSFIFLCSFLMLNLFVAVIMDNFEYLTRDSSILGPHHLDEYVRVWAEYDPAAWGRMPYLDMYQMLRHMSPPLGLGKKCPARVAYKRLLRMDLPVADDNTVHFNSTLMALIRTALDIKIAKGGADKQQMDAELRKEMMAIWPNLSQKTLDLLVTPHKSTDLTVGKIYAAMMIMEYYRQSKAKKLQAMREEQDRTPLMFQRMEPPSPTQEGGPGQNALPSTQLDPGGALMAHESGLKESPSWVTQRAQEMFQKTGTWSPEQGPPTDMPNSQPNSQSVEMREMGRDGYSDSEHYLPMEGQGRAASMPRLPAENQRRRGRPRGNNLSTISDTSPMKRSASVLGPKARRLDDYSLERVPPEENQRHHQRRRDRSHRASERSLGRYTDVDTGLGTDLSMTTQSGDLPSKERDQERGRPKDRKHRQHHHHHHHHHHPPPPDKDRYAQERPDHGRARARDQRWSRSPSEGREHMAHRQGSSSVSGSPAPSTSGTSTPRRGRRQLPQTPSTPRPHVSYSPVIRKAGGSGPPQQQQQQQQQQQQQAVARPGRAATSGPRRYPGPTAEPLAGDRPPTGGHSSGRSPRMERRVPGPARSESPRACRHGGARWPASGPHVSEGPPGPRHHGYYRGSDYDEADGPGSGGGEEAMAGAYDAPPPVRHASSGATGRSPRTPRASGPACASPSRHGRRLPNGYYPAHGLARPRGPGSRKGLHEPYSESDDDWC

SEQ ID NO: 44618 - protein, 267 aa, Artificial Sequence
  derived and/or modified sequence
MLFMFIFAVVAVQLFKGKFFHCTDESKEFEKDCRGKYLLYEKNEVKARDREWKKYEFHYDNVLWALLTLFTVSTGEGWPQVLKHSVDATFENQGPSPGYRMEMSIFYVVYFVVFPFFFVNIFVALIIITFQEQGDKMMEEYSLEKNERACIDFAISAKPLTRHMPQNKQSFQYRMWQFVVSPPFEYTIMAMIALNTIVLMMKFYGASVAYENALRVFNIVFTSLFSLECVLKVMAFGILNYFRDAWNIFDFVTVLGSITDILVTEFG

SEQ ID NO: 44619 - DNA, 7488 bp, Artificial Sequence
  derived and/or modified sequence
atggcaaggtttggagacgagatgcccgctagatatggaggtggcggttccggcgccgcagccggggtagtggtggggtcaggaggcggcagaggcgcagggggatctcgtcagggagggcaacccggagcccaaagaatgtacaagcaatcaatggcccagcgagcccgtactatggccctgtacaatcccatccccgtgcgccagaactgcctgaccgtgaacagaagcctgtttctgttttccgaggataacgtggttcgaaaatatgctaagaagattaccgagtggccccctttcgagtatatgattttagcaaccattatagcaaactgtattgttctggccctcgagcagcacttacctgatgatgataaaacccctatgtccgagaggctggatgacacggagccttatttcatcggaattttttgctttgaagccgggataaagattattgcccttgggttcgccttccacaaagggtcttatctgcgcaacggctggaatgtcatggattttgtggtcgtgctgaccggaattctggcaacagtcggcaccgagttcgacctgagaactttgagagcggtcagggtactgaggcctctgaaactggtaagcggtataccttcactgcaggtcgttctgaaatcgatcatgaaggccatgattccgctgcttcagatcggccttcttctcttcttcgctatcttaatctttgctatcattggactggagttttacatgggtaagtttcataccacctgtttcgaagaagggaccgatgatattcagggcgagtctccagccccctgtggcaccgaggagcccgctagaacttgccctaatggaacgaagtgtcagccttactgggaggggcccaataacgggatcactcagttcgacaatatcctctttgcagtcctgacagttttccaatgcattactatggagggctggacagacttactgtacaattccaacgatgcctccggcaatacatggaattggctgtactttattccccttatcatcattggaagcttctttatgctgaatttagtcctgggcgtgttatccggagagtttgctaaggagagggagcgtgtcgagaacaggcgtgcctttcttaaattgcgcaggcagcagcagattgaacgagaactcaatggctatatggagtggattagcaaggccgaagaggtgatcctggcagaggacgagactgatggagagcagcggcaccccttcgatggggccctcaggcgcacaaccattaagaaatctaaaacagatctgctgaatccagaggaagccgaggatcagctcgcagacattgcatccgtggggtctccgtttgcacgcgcgtctatcaagagcgcaaaactggagaattctaccttttttcataaaaaagagagaaggatgcggttttacatacggagaatggttaaaacccaagcgttttactggacagttctaagtttggtcgcactgaacaccctctgcgtggctatcgttcattataatcaacccgaatggctatctgacttcttgtactacgcggagttcatttttcttggtctgttcatgagtgagatgttcatcaaaatgtacgggctgggcacaagaccctacttccacagctcatttaactgcttcgattgtggagtgatcatcggctctattttcgaagtcatttgggccgtaatcaaacccgggacatccttcggtatatcagttctacgagccctacggctgctccggattttcaaagtgaccaagtactgggcctccttgcgaaatttagtggtatccttgctgaacagcatgaaatctataatatctctgctattcctcctgttcttgtttattgtcgtgtttgccttactcggtatgcagttgtttggcggacagttcaactttgacgaaggaacgccccctacaaacttcgacacctttccagctgctattatgaccgtgtttcagattttgactggcgaggattggaatgaggtgatgtatgacggcattaagtctcagggcggagtacagggaggaatggtgtttagcatctactttattgtccttaccttgttcgggaactacaccctgctgaatgtttttctggccattgcagtcgacaaccttgctaacgcccaggaacttacaaaggacgagcaagaggaagaagaagcagccaaccagaagttggcgctccagaaggcaaaggaggtggccgaggtgagtccactgtcagcagccaacatgtctatcgctgttaaagaacaacagaagaaccaaaagcctgcgaagagcgtgtgggagcagcgcacaagtgaaatgcggaagcagaatctgctggcaagtagagaggctctttacaatgagatggatccagacgagaggtggaaggccgcgtacaccagacacctcaggccggatatgaaaactcatctggaccggcctctcgtggtggacccacaggaaaatagaaacaataacacaaacaagtcacgcgctgcggagccgactgtggaccagcggctcggccagcagcgcgccgaagatttccttagaaaacaggcccggtatcacgacagagcgcgcgatccatccggcagcgccggactcgacgcacggcggccttgggctggcagccaggaggctgaattgagtagagagggcccttatgggcgggagtctgaccatcacgcgcgtgaaggaagcctggaacagcctgggttttgggaaggggaagctgaacgcggcaaggccggtgaccctcatagacgccacgtacatcggcaaggcggatccagagagtcccggtctggtagccccaggacgggagccgacggtgagcacaggcgacatcgggcccaccgcaggcctggcgaagaaggtcctgaagataaagccgagcgccgcgctcgccaccgcgagggcagtcgacccgcccgggggggtgaaggggaaggcgagggccctgacgggggcgaacggagacgcagacaccgccacggagctccggccacctatgaaggggacgctaggcgagaagataaagagcgacgtcacagaaggcggaaagagaatcaagggagcggcgttccagtatccggcccaaacctttccacaacaagaccaatccagcaggacctaggaaggcaggatccgccgctggcagaggacattgataatatgaaaaataacaagctggctacagctgaatccgcagcgccccatggctcactcgggcatgcgggccttcctcagagtcccgccaagatgggcaacagcacggaccccgggcctatgctagcaattccggcaatggctaccaatccacagaacgccgcttcaagacgcacgccgaataaccccggcaatccctctaaccctggcccccccaaaactcccgaaaactccctgatagttacaaacccctctggtacacaaacaaattccgccaaaaccgctagaaagcccgaccatacgaccgtggatatcccccccgcttgtcctccacccctcaaccacaccgtggtgcaagtaaataaaaacgccaacccggaccccctgcctaaaaaggaagaagaaaagaaggaagaagaggaagatgacaggggagaagacggacccaagcctatgccaccttatagcagcatgttcatcctgtctaccactaaccctctgcggcggttgtgccactacatactgaatcttagatactttgagatgtgcatcctcatggtgattgcgatgtcttccatcgcactggccgccgaggatcccgtgcagccaaacgccccccggaacaatgtgctccggtattttgactatgttttcactggtgtgtttacattcgaaatggtaatcaagatgattgacctggggctggttctgcatcaaggggcctacttccgggacctgtggaatatcttagatttcatcgtcgtcagcggggcactggtggcttttgctttcaccgggaattctaaaggaaaggatattaacacaattaaaagtctgagagtgctgagagtcctgcgcccacttaagactatcaagagattgcctaagctgaaggcagtgtttgactgcgtagtcaactctctgaagaacgtctttaacattttaatagtatacatgcttttcatgtttatttttgcagttgtggccgtgcaattgtttaaaggtaaattctttcattgtaccgatgaatccaaggagttcgagaaggattgtagaggtaagtatctgctgtatgaaaagaatgaggttaaggctagagatagggaatggaagaaatacgaattccactatgataatgtgctgtgggccctgcttaccctgtttactgtaagtactggggagggatggcctcaggtgctgaaacatagtgtggatgccacgttcgagaaccaaggaccttcccccggatatagaatggaaatgtcgatcttctatgtagtgtatttcgtggtgttccccttcttcttcgtgaacatttttgtagcactgatcatcatcactttccaggaacaaggagacaagatgatggaggaatactctctggaaaagaacgaacgcgcctgtattgattttgctatatccgccaaacctctcacccgacacatgccacagaacaagcaatcatttcagtaccgcatgtggcagtttgtggtctccccgccgttcgagtacaccatcatggccatgattgcgctgaacactattgtgctaatgatgaagttttacggggcctcagtcgcttatgagaacgcccttcgagtatttaatatcgtgtttactagtttgttttctctggaatgcgtgctgaaggtaatggccttcgggatcttaaactattttcgtgatgcatggaatatttttgattttgtgactgtactggggtcaatcaccgacatacttgtcacagagttcgggaataacttcataaacttgagcttcctgcggctgttccgcgcagcaagactcatcaaattgcttcgtcagggctacaccatccggattcttctgtggacgtttgttcagagttttaaagccctcccctatgtgtgtctgctgatcgccatgctcttctttatttatgcgataatcggaatgcaagtgtttggcaacatcggcatcgatgttgaggacgaggattccgacgaagacgagtttcaaattaccgagcataacaacttccggacatttttccaggccctcatgttactgttccggagtgccactggtgaggcttggcataacatcatgctcagttgcctgtccggaaaaccatgcgacaaaaacagcgggatcctgacacgagaatgcgggaatgagtttgcctacttttatttcgtctctttcatctttctctgttccttcctaatgctcaacttgttcgtcgccgttatcatggataactttgaatacctcacccgcgactcaagcatacttggacctcaccatctggacgagtacgtccgggtgtgggccgagtacgacccggccgcctggggacgcatgccatacctggacatgtaccagatgctcagacatatgtccccccccctgggtctgggaaagaaatgccctgcccgagtcgcatataaacgtctgctgcggatggacctccctgttgccgacgacaacacagttcacttcaactctacattaatggctctgatcagaacagcactggacataaagattgcaaagggtggcgccgacaagcaacaaatggacgccgagcttagaaaagaaatgatggccatctggcctaacctctcacaaaaaacgctggatctactggtcacccctcataaaagcacagacctcacggtaggcaagatctatgccgctatgatgattatggaatactacagacagtccaaagctaagaagctgcaggccatgagagaggagcaggataggacgcctctcatgttccaaaggatggagccccccagccccactcaagaaggcggcccaggtcagaatgcacttccctccactcagttggacccggggggggcactcatggctcacgaaagtggtcttaaggagagcccttcttgggtcactcagagggcacaggaaatgtttcaaaaaaccgggacctggtcacccgagcagggtcctcctaccgatatgcctaactctcagcctaactcacagtctgtcgaaatgcgcgagatgggcagggacggttatagcgattctgagcattacctgccaatggaaggccaagggagggctgcttcgatgcccagactgcctgccgaaaaccaaactatctcggacacgagcccaatgaaacgatcggctagcgtacttggccccaaagcaaggcggttggatgactactctctggagagagttcctccagaggaaaaccagagacatcaccaaagaagacgggataggtctcatagggcctctgagcgctcactagggaggtatactgacgtggacactgggttgggtacagacctttccatgacgacccagagtggggatctaccatctaaagaaagggaccaggagcgtggccggcctaaggatcgaaaacacaggcagcatcatcatcatcatcatcatcaccaccacccccctcccccggacaaagataggtatgcacaggagaggcccgaccacgggcgcgccagggctcgcgatcaacgatggtcccgcagcccttccgagggtcgggagcacatggctcatcgtcagggctcatcaagtgtgagtggcagccctgcaccctcaacgagtggaacctcaactccaagaagggggcgccggcagcttcctcaaaccccgagtacaccacggccccacgtgagctattctccagtgatccggaaagccgggggttctggaccccctcagcaacagcagcagcagcagcagcagcagcagcagcaggctgtggccaggccagggagagccgctactagcggtccacggcgttaccccggccctactgctgaacccctcgccggagacaggccaccgacgggcggacattcttccgggcgatcacctagaatggagcggcgcgtgccaggccctgcaaggtctgaaagccccagggcctgccgacacgggggggcccgatggccagcttcaggacctcatgtcagtgagggtcctccagggccaaggcatcacggttactatcgcgggagtgactacgatgaggccgacggacctggttccggtggcggtgaagaggccatggctggagcatacgatgctccccctcctgtcagacatgcctcctccggcgccactgggcgctctccccgcacaccacgtgcgagcgggccggcatgcgcttcccccagtcgacatggtaggaggctgcccaatggctactaccccgctcatgggttggcacgcccacgcggccctggcagtcggaagggactgcacgaaccctacagcgagtccgatgacgactggtgctag

SEQ ID NO: 44620 - DNA, 7521 bp, Artificial Sequence
  derived and/or modified sequence
atggcgagattcggtgatgagatgcctgccagatacggcgggggcggttccggcgctgctgccggagttgtagtgggatcagggggaggccggggcgcaggtggcagccggcaaggcgggcagcccggcgcacagagaatgtataagcagtccatggcacagagagctaggactatggccctgtacaaccctatacccgtgcgacaaaattgtctcacggtcaacagatccctctttttgttctctgaggataacgttgttagaaaatatgctaagaaaattacggagtggcccccattcgagtatatgatcctggcgaccatcatagccaactgtatcgtactggccttggagcaacatcttcctgatgacgataaaacccccatgtcggaaagactggatgatacagagccttactttatcggtattttttgcttcgaggctggaatcaaaatcatagccttagggtttgccttccacaaaggttcttaccttcggaatgggtggaacgtgatggatttcgtagtggtcctcacagggatattggctacagtcgggaccgagttcgacttacgcacactgcgggcagtgcgcgtgctccggccgctgaagctggtctcgggcataccctcactgcaggtggttctcaagtcaattatgaaggctatgataccactgcttcagatcgggctgttgctgttcttcgcaatcctgattttcgctattatcgggcttgagttttacatgggaaagtttcacacaacttgttttgaggagggtacagacgatatccagggggaatcgccggcaccctgtggaaccgaggaaccagcccgtacatgtcccaacgggaccaaatgtcagccttactgggagggtccaaataacggaatcacacaattcgataacattctctttgcagtgctcaccgtcttccagtgtatcactatggaaggttggacggacctgctgtacaattccaacgatgcctctgggaatacatggaattggctctacttcatcccactgattatcatcggctcctttttcatgttgaatttagtcctcggggtcttgagcggggagttcgctaaagagagggagcgcgtggaaaacaggagagcttttctcaaactcagaaggcagcaacagattgagagggagctgaatggttacatggagtggatttcaaaggccgaggaagttatccttgctgaggacgaaacagacggcgaacagagacaccccttcgatgccctgcggcgcaccactattaaaaagtcaaagaccgaccttttgaacccggaagaggcggaggatcaactggcagacatcgccagcgtgggatccccttttgcaagggcctctatcaagtcagcaaagctggagaattctacgttctttcacaagaaggaaaggaggatgcgattctacattagacgcatggtcaagactcaggctttctactggactgtgctgtccctggtggctttgaatacgctgtgtgtcgctatcgtgcattacaaccaacccgagtggctctccgacttcctgtactatgccgagtttatctttctgggtttattcatgtcagaaatgtttatcaagatgtatgggctgggcactcgtccctactttcactccagcttcaactgtttcgattgcggggttatcatcggttctatcttcgaggtgatttgggcagttatcaagccaggcacaagttttggcatctcagtcctccgggcgctgagactgctgcgaatcttcaaagtcacgaagtattgggcttcgctgaggaacctggttgtctccctgcttaacagtatgaaatccatcatatctctgttattcttgctctttctgtttatcgtggtgttcgccctgctgggcatgcagctctttggaggtcagttcaatttcgacgaaggcacccctcccactaatttcgacacctttcccgcggccatcatgacagtcttccagatcctgaccggcgaggattggaatgaagtgatgtatgacgggatcaaaagtcaggggggtgtacagggcggcatggtgttctcaatttattttatcgtgctaaccctgtttggtaattacactctgctaaacgtgtttttggcaattgccgtggataacctcgcaaatgcacaagagctgacaaaagatgagcaagaggaggaagaggcagctaaccagaagttagctttgcagaaagctaaagaagttgccgaagtctcacctctgtcggccgcgaatatgtcaatcgccgtcaaagagcagcagaagaatcagaagccagccaagtccgtgtgggaacaacggactagcgaaatgcggaagcagaacctcctggcatccagagaggccctgtacaacgagatggatcctgatgaaagatggaaggctgcctacacccgacatctacgtccggatatgaagacacatctcgatcgtcccctggttgtggatccacaagagaatcgcaataacaacaccaataagagccgcgcagcagagccaaccgtggatcagagactgggccagcagcgggctgaggattttctcaggaaacaagcacggtaccacgaccgtgctcgggatccgtctggaagtgccggtctcgatgctcgtcgtccttgggccggaagccaggaggctgagctgagcagggaaggtccctatgggcgggagtcagaccaccacgccagggaaggcagtctcgagcagcccggtttctgggagggtgaagcagaaagaggcaaggccggagatccacataggcgccacgttcatagacaggggggtagcagggaaagcaggtccgggagcccccgaacaggcgcagacggcgaacacaggagacacagggcccatcgacgacctggtgaggaagggcccgaagataaagccgagaggcgtgctaggcatcgcgaaggaagcagacctgcaagagggggcgaaggggagggtgagggacctgacggcggtgaaaggcggcgaaggcaccgacacggtgctcctgccacttatgagggtgacgcaaggagggaggataaggaacggagacatagacggcggaaggagaatcagggctcaggggtgccggtgtcaggcccaaacctctcaaccacacgccccatccaacaggacctaggacgccaagacccgccactcgccgaagatatcgacaacatgaagaacaataagctagcaactgccgagtctgctgcccctcacggaagccttgggcatgctggcctgccacagtcgcccgcaaaaatggggaattccacagacccgggccctatgctagccattccggccatggccacaaatccgcagaacgccgccagccggcggacccctaacaatcccggtaatccaagcaatcctggtcctcccaagacacccgaaaattcactgatcgtaacaaatccctctggtacacagacaaactccgccaagacagccagaaagcctgatcacaccacagtggatattcctcctgcctgccccccccccctgaaccacactgtagtgcaggttaacaaaaatgctaatccagatcccctgcctaaaaaggaggaggaaaaaaaggaggaggaggaggacgaccgcggcgaagacggaccgaaacctatgcccccttacagctctatgtttattctgagcactactaatccgctgcgcagactgtgtcactatatactcaacttgcgctacttcgagatgtgcatccttatggtgatcgccatgagctctatcgccctagccgcagaagatcccgtccagcccaacgccccccggaacaacgtcctgcggtacttcgactacgtctttaccggcgtgtttaccttcgaaatggtaattaaaatgatcgacctagggctggtgttgcaccaaggcgcttactttcgagatctatggaatatcctcgacttcatcgtggtttctggcgccctcgttgcattcgcatttacgggaaattctaagggaaaagatatcaacacaattaaatctcttcgggtgcttagggtgctacggccactgaaaaccatcaaaagacttccaaagctgaaagctgtgtttgattgcgttgtgaactctctgaaaaatgtgtttaatatccttattgtgtacatgttgtttatgttcatttttgcagtggttgccgtacagctgttcaagggaaaattttttcattgtactgatgaaagcaaggaattcgagaaggattgtagaggaaagtacttgctgtacgagaaaaatgaggtgaaggcccgagatagagagtggaagaagtacgaattccactacgataatgtgctctgggccctcttgaccctcttcaccgtgtcaacaggagaagggtggccacaagtgctgaagcactccgttgacgctacattcgaaaaccaaggaccttctccaggctaccgtatggagatgtctatcttttacgtggtgtatttcgtggtcttcccattcttttttgtgaacattttcgtagccctcatcattatcacgttccaggagcaaggcgataagatgatggaggagtattcattggagaagaacgaaagggcttgcatcgactttgcgatcagtgccaaaccgctaactcgacatatgcctcagaataagcagagttttcagtacaggatgtggcagttcgtcgtatctcctccgttcgaatacactatcatggctatgattgcattgaatacgatagtgctgatgatgaagttctatggtgccagcgttgcttacgagaatgcgttacgtgtgttcaacatcgtgttcaccagcctttttagccttgaatgcgtgctaaaagtgatggcctttggcattctcaactactttagggacgcatggaacatatttgactttgtgacagtgcttggctcaattacagacatcctcgtcaccgagttcggcaataatttcattaatctgtcctttttacgactctttcgggccgcccgtcttattaagctgctgaggcaggggtacaccatcaggattctcctgtggactttcgttcagtctttcaaggccctgccgtacgtgtgtctgctaatcgcgatgctttttttcatctacgctatcatcggaatgcaggtctttgggaatataggaattgatgtggaagacgaggattccgatgaggatgaatttcagataaccgagcacaataactttagaacattcttccaagcactgatgctcctgtttcggtctgccacgggagaggcgtggcacaacatcatgctctcatgcctgtcagggaaaccctgcgataagaattccggaatactcacgagggaatgcggaaatgaattcgcttacttctatttcgtgtccttcattttcctctgcagttttctcatgctgaacctttttgtggccgttattatggataactttgaatacctaactcgcgactccagtatattggggccccaccacctggacgagtacgtgagggtatgggcagagtacgacccagccgcttggggtcggatgccatacttggatatgtatcagatgctgcgccacatgtctccgcccctgggcctgggaaagaagtgcccggcgcgtgtcgcatacaagaggcttctgcgcatggacttgcctgtagcggatgacaacacagtccatttcaatagtacactgatggccctcatacgcaccgccctcgatattaagattgccaagggcggcgccgataaacagcagatggatgccgagctccggaaagagatgatggctatttggccaaatctgtcgcagaaaaccctggatctcctggtgactccacataagtccactgacttgacagtaggcaaaatctatgccgcaatgatgataatggaatattaccggcagtccaaggcaaaaaaacttcaagccatgcgcgaggagcaggatcgcaccccacttatgtttcagcggatggaacccccctcccctacacaggaggggggtcccggccagaacgccctgccttctacccagctcgacccagggggggcgctgatggctcacgaatccggcctgaaagaatctccttcttgggttacccagcgcgctcaagagatgttccagaagactggaacctggagccccgaacaggggccacctactgacatgcctaacagtcagccaaattcccagtcggtggagatgcgggagatgggccgggatgggtacagtgacagcgaacactacctgcccatggaaggacagggaagagccgcctcaatgcctcgcctgcctgcagaaaatcagcgtagacggggaaggcctagggggaacaacctctccacaatttcagatacatctccaatgaagcgcagcgctagcgtgctggggcctaaggcacgccgcctggacgattattctctcgagagggttccccccgaggagaatcaaaggcaccaccagaggcggagggatagatcgcatcgggcatctgagcggagcttaggacgatatacggatgttgatacgggcttgggaacagatctgagtatgaccacccaaagcggtgaccttccctctaaggaaagagaccaggagcggggccggccgaaagaccggaaacaccggcagcatcatcaccaccaccaccatcaccatcatccgcctcctcccgataaagatagatacgcccaggaacgcccggatcatggccgcgcacgcgcacgagatcagagatggtctaggagtccatccgaaggccgggagcacatggcgcatcgtcagggcagttcgagtgtctcgggctcgcctgcaccctctacttccggtacctccacaccaagacgcggcagaagacagctcccccagacaccctcaaccccccgccctcacgtttcatactcgcctgtgattcgaaaggccggcgggagtggaccccctcaacagcagcagcagcaacagcagcagcagcagcaacaagcggtggcaagaccaggcagagcagcgacaagtggccccaggagatatccaggacctaccgcagagccgctcgcaggcgatcgccctcccaccggcggtcacagcagtgggaggtcccctagaatggaaagacgagtacccggacctgcacggagcgagtctcctagggcctgtaggcatgggggagctaggtggcccgcctctgggccccatgtgtcagagggacctccaggcccccgtcaccatgggtactaccgggggagtgattacgacgaggccgacggtccgggttctggtggaggggaggaagcgatggcaggggcttatgatgccccacctccagtacgccacgctagctcaggagccaccggacggtcgccccggacacccagagcatcgggtcccgcctgtgcctccccctccaggcacggtaggaggcttccaaacggctattacccggcccatggactagctcgacccaggggcccaggctctcgcaaaggtctacacgaaccttatagtgagtctgatgatgactggtgctag

SEQ ID NO: 44621 - DNA, 7488 bp, Artificial Sequence
  derived and/or modified sequence
atggccaggtttggagatgagatgcctgcccgctatggaggcggcggcagcggggctgctgctggggtggtggtgggcagcggcggcggcagaggagctgggggcagccggcagggcggccagcccggggcccagaggatgtacaagcagagcatggcccagagggcccggaccatggccctgtacaaccccatccctgtgcggcagaactgcctgactgtgaacagaagcctcttcctgttctctgaagataatgtggtgaggaaatatgccaagaagatcacagagtggcccccatttgagtacatgatcctggccaccatcatcgccaactgcatcgtgctggccctggagcagcacctgcctgatgatgacaagacccccatgtctgagcggctggatgacacagagccctacttcatcggcatcttctgctttgaggccggcatcaagatcatcgccctgggctttgccttccacaagggcagctacctgagaaatggctggaatgtgatggactttgtggtggtgctgaccggcatcctggccaccgtgggcacagaatttgacctgcggaccctgcgggctgtgcgggtgctgcggcccctgaagctggtgtctggcatccccagcctgcaggtggtgctgaagagcatcatgaaggccatgatccccctgctgcagatcggcctgctgctcttctttgccatcctgatctttgccatcatcggcctggagttctacatgggcaagttccacaccacctgctttgaggagggcacagatgacatccagggcgagagccctgccccctgtggcacagaggagcccgcccggacctgccccaacggcaccaagtgccagccctactgggagggccccaacaacggcatcacccagtttgacaacatcctgtttgctgtgctgaccgtcttccagtgcatcaccatggagggctggacagacctgctgtacaacagcaatgatgccagcggcaacacctggaactggctgtacttcatccccctcatcatcatcggcagcttcttcatgctgaacctggtgctgggcgtgctgagcggggagtttgccaaggagcgggagcgggtggagaacagaagagccttcctgaagctgcggcggcagcagcagatcgagcgggagctgaatggctacatggagtggatcagcaaggccgaggaggtgatcctggccgaggatgaaacagatggagagcagaggcacccctttgatggagccctgcggaggaccaccatcaagaagagcaagacagacctgctgaaccctgaggaggccgaggaccagctggccgacatcgcctctgtgggcagcccctttgcccgggccagcatcaagagcgccaagctggagaacagcaccttcttccacaagaaggagaggaggatgaggttctacatccggaggatggtgaagacccaggccttctactggacagtgctgagcctggtggccctgaacaccctgtgtgtggccatcgtgcactacaaccagcctgagtggctgagtgacttcctgtactatgcagagttcatcttcctgggcctcttcatgtctgagatgttcatcaagatgtatggcctgggcacccggccctacttccacagcagcttcaactgctttgactgtggggtcatcatcggcagcatctttgaggtgatctgggccgtcatcaagccaggcaccagctttggcatctctgtgctgcgggccctgcggctgctgcgcatcttcaaggtgaccaagtactgggccagcctgaggaacctggtggtgtccctgctgaacagcatgaagagcatcatcagcctgctcttcctgctcttcctgttcatcgtggtgtttgccctgctgggcatgcagctgtttggaggccagttcaactttgatgagggcaccccacccaccaactttgacaccttccctgctgccatcatgaccgtcttccagatcctgaccggggaggactggaatgaggtgatgtatgatggcatcaagagccagggcggcgtgcagggcggcatggtgttcagcatctacttcatcgtgctgaccctgtttggaaactacaccctgctgaatgtgttcctggccatcgctgtggacaacctggccaatgcccaggagctgaccaaggatgagcaggaggaggaggaggccgccaaccagaagctggccctgcagaaggccaaggaggtggccgaggtgagccccctgtctgctgccaacatgagcattgctgtgaaggagcagcagaagaaccagaagccagccaagtctgtgtgggagcagaggaccagcgagatgaggaagcagaacctgctggccagccgggaggccctgtacaatgagatggaccctgatgagcgctggaaggccgcctacaccaggcacctgcggccagacatgaagacccacctggaccggcccctggtggtggacccccaggagaacagaaacaacaacaccaacaagagcagagctgctgagcccaccgtggaccagaggctgggccagcagagagctgaggacttcctgaggaagcaggcccgctaccatgaccgggcccgggaccccagcggcagcgctggcctggatgcccggcggccctgggccggcagccaggaggccgagctgagccgggagggcccctacggccgggagagtgaccaccacgcccgggagggcagcctggagcagcccggcttctgggagggggaggccgagcggggcaaggccggggacccccacagaagacatgtgcaccggcagggcggcagccgggagagccgcagcggcagccccaggactggagcagatggagagcacagaagacaccgggcccacagaagacctggagaggagggccctgaggacaaggccgagcggcgggcccggcaccgggagggcagcaggcctgcccggggcggggagggggagggggagggcccagatggaggagagaggagaagaagacaccgccacggggccccagccacctatgaaggagatgcccggcgggaggacaaggagaggaggcacagaagaaggaaggagaaccagggcagcggcgtgcctgtgtctggccccaacctgagcaccacccggcccatccagcaggacctgggccggcaggacccccccctggccgaggacatcgacaacatgaagaacaacaagctggccacagctgagagcgctgcccctcatggcagcctgggccatgctggcctgccccagagccctgccaagatgggcaacagcacagaccccggccccatgctggccatcccagccatggccaccaacccccagaatgctgccagcaggaggacccccaacaaccctggcaaccccagcaaccctggcccccccaagaccccagagaacagcctcatcgtgaccaaccccagcggcacccagaccaacagcgccaagacagccaggaagccagaccacaccaccgtggacatccccccagcctgccccccacccctgaaccacacagtggtgcaggtgaacaagaatgccaacccagaccccctgcccaagaaggaggaggagaagaaggaggaggaggaggatgacagaggagaagatggccccaagcccatgccaccctacagctccatgttcatcctgagcaccaccaaccccctgcggcggctgtgccactacatcctgaacctgcgctactttgagatgtgcatcctgatggtgattgccatgagcagcatcgccctggccgctgaggaccctgtgcagcccaatgcccccagaaataatgtgctgcgctactttgattatgtgttcaccggggtcttcacctttgagatggtgatcaagatgattgacctgggcctggtgctgcaccagggcgcctacttccgggacctgtggaacatcctggacttcatcgtggtgtctggggccctggtggcctttgccttcaccggcaacagcaagggcaaggacatcaacaccatcaagagcctgcgggtgctgcgggtgctgcggcccctgaagaccatcaagaggctgcccaagctgaaggctgtgtttgactgtgtggtgaacagcctgaagaatgtgttcaacatcctgattgtgtacatgctgttcatgttcatctttgctgtggtggccgtgcagctgttcaagggcaagttcttccactgcacagatgagagcaaggagtttgagaaggactgccggggcaagtacctgctgtatgagaagaatgaggtgaaggcccgggaccgggagtggaagaagtatgagttccactatgacaacgtgctgtgggccctgctgaccctcttcaccgtgtccactggagagggctggccccaggtgctgaagcacagcgtggatgccacctttgagaaccagggccccagccctggctacaggatggagatgagcatcttctacgtggtgtactttgtggtgttccccttcttctttgtgaacatctttgtggccctgatcatcatcaccttccaggagcagggcgacaagatgatggaggagtacagcctggagaagaatgaaagagcctgcatcgactttgccatcagcgccaagcccctgaccaggcacatgccccagaacaagcagagcttccagtacaggatgtggcagtttgtggtgagccccccatttgagtacaccatcatggccatgattgccctgaacaccatcgtgctgatgatgaagttctacggggcctctgtggcctatgaaaatgccctgcgggtcttcaacatcgtgttcaccagcctcttcagcctggagtgtgtgctgaaggtgatggccttcggcatcctgaactacttcagagatgcctggaacatctttgattttgtgacagtgctgggcagcatcacagacatcctggtgacagaatttggaaacaacttcatcaacctgtccttcctgcggctcttccgggccgcccggctcatcaagctgctgcggcagggctacaccatccgcatcctgctgtggacctttgtgcagagcttcaaggccctgccctacgtgtgcctgctgattgccatgctgttcttcatctatgccatcatcggcatgcaggtgtttggaaatattggaattgatgtggaggatgaggacagtgatgaagatgagttccagatcacagagcacaacaacttccgcaccttcttccaggccctgatgctgctcttccgcagcgccaccggggaggcctggcacaacatcatgctgagctgcctgagcggcaagccctgtgacaagaacagcggcatcctgaccagagaatgtggaaatgaatttgcctacttctactttgtgtccttcatcttcctgtgcagcttcctgatgctgaacctgtttgtggccgtcatcatggacaactttgagtacctgacccgggacagcagcatcctgggcccccaccacctggatgaatatgtgcgggtgtgggccgagtatgaccctgctgcctggggccgcatgccctacctggacatgtaccagatgctgcggcacatgagcccccccctgggcctgggcaagaagtgcccagcccgggtggcctacaagaggctgctgaggatggacctgcctgtggctgatgacaacacagtgcacttcaacagcaccctgatggccctgatcagaacagccctggacatcaagatcgccaagggcggcgctgacaagcagcagatggatgctgagctgaggaaggagatgatggccatctggcccaacctgagccagaagaccctggacctgctggtgaccccccacaagagcacagacctgactgtgggcaagatctatgctgccatgatgatcatggagtactaccggcagagcaaggccaagaagctgcaggccatgagggaggagcaggacaggacccccctgatgttccagaggatggagccccccagccccacccaggagggcggccctggccagaatgccctgcccagcacccagctggaccccggcggggccctgatggcccatgaaagtggcctgaaggagagccccagctgggtgacccagagggcccaggagatgttccagaagacaggcacctggagccctgagcagggccccccaacagacatgcccaacagccagcccaacagccagagcgtggagatgagggagatgggcagagatggctacagcgacagcgagcactacctgcccatggagggccagggccgggccgcctccatgccccggctgcctgctgagaaccagaccatcagtgacaccagccccatgaagaggtctgcctctgtgctgggccccaaggcccggcggctggatgactacagcctggagcgggtgcccccagaggagaaccagaggcaccaccagaggcggcgggacaggagccaccgggccagcgagaggagcctgggccgctacacagatgtggacaccggcctgggcacagacctgtccatgaccacccagagcggggacctgcccagcaaggagcgggaccaggagcggggccggcccaaggacaggaagcaccggcagcaccaccaccaccaccaccaccaccaccaccccccacctccagacaaggacagatatgcccaggagaggccagaccacggccgggcccgggcccgggaccagcgctggagccgcagccccagcgagggccgggagcacatggcccaccggcagggcagcagctctgtgtctggcagccctgcccccagcaccagcggcaccagcaccccaagaagaggccggcggcagctgccccagacccccagcaccccccggccccacgtgtcctacagccctgtgatcaggaaggccggcggcagcggccccccccagcagcagcagcagcagcagcagcagcagcagcagcaggccgtggcccggcccggccgggccgccaccagcggcccccggcgctacccaggccccacagctgagcccctggccggggaccggcccccaactggaggccacagcagcggccgcagccccaggatggagcggcgggtgcccggccctgcccggtctgagagcccccgggcctgccgccacggcggggcccgctggccagccagcggcccccacgtgtctgagggccccccaggccccaggcaccacggctactaccggggcagtgactatgatgaagcagatggccctggcagcggcggcggggaggaggccatggccggggcctatgatgcccctcctcctgtgagacatgccagcagcggggccaccggccgcagccccaggaccccccgggccagcggccctgcctgtgccagccccagcagacatggaagaaggctgcccaacggctactacccagcccacggcctggcccggccccggggccctggcagcaggaagggcctgcacgagccctacagcgagagtgatgatgactggtgctag

SEQ ID NO: 44622 - DNA, 7521 bp, Artificial Sequence
  derived and/or modified sequence
atggccaggtttggagatgagatgcctgcccgctatggaggcggcggcagcggggctgctgctggggtggtggtgggcagcggcggcggcagaggagctgggggcagccggcagggcggccagcccggggcccagaggatgtacaagcagagcatggcccagagggcccggaccatggccctgtacaaccccatccctgtgcggcagaactgcctgactgtgaacagaagcctcttcctgttctctgaagataatgtggtgaggaaatatgccaagaagatcacagagtggcccccatttgagtacatgatcctggccaccatcatcgccaactgcatcgtgctggccctggagcagcacctgcctgatgatgacaagacccccatgtctgagcggctggatgacacagagccctacttcatcggcatcttctgctttgaggccggcatcaagatcatcgccctgggctttgccttccacaagggcagctacctgagaaatggctggaatgtgatggactttgtggtggtgctgaccggcatcctggccaccgtgggcacagaatttgacctgcggaccctgcgggctgtgcgggtgctgcggcccctgaagctggtgtctggcatccccagcctgcaggtggtgctgaagagcatcatgaaggccatgatccccctgctgcagatcggcctgctgctcttctttgccatcctgatctttgccatcatcggcctggagttctacatgggcaagttccacaccacctgctttgaggagggcacagatgacatccagggcgagagccctgccccctgtggcacagaggagcccgcccggacctgccccaacggcaccaagtgccagccctactgggagggccccaacaacggcatcacccagtttgacaacatcctgtttgctgtgctgaccgtcttccagtgcatcaccatggagggctggacagacctgctgtacaacagcaatgatgccagcggcaacacctggaactggctgtacttcatccccctcatcatcatcggcagcttcttcatgctgaacctggtgctgggcgtgctgagcggggagtttgccaaggagcgggagcgggtggagaacagaagagccttcctgaagctgcggcggcagcagcagatcgagcgggagctgaatggctacatggagtggatcagcaaggccgaggaggtgatcctggccgaggatgaaacagatggagagcagaggcacccctttgatgccctgcggaggaccaccatcaagaagagcaagacagacctgctgaaccctgaggaggccgaggaccagctggccgacatcgcctctgtgggcagcccctttgcccgggccagcatcaagagcgccaagctggagaacagcaccttcttccacaagaaggagaggaggatgaggttctacatccggaggatggtgaagacccaggccttctactggacagtgctgagcctggtggccctgaacaccctgtgtgtggccatcgtgcactacaaccagcctgagtggctgagtgacttcctgtactatgcagagttcatcttcctgggcctcttcatgtctgagatgttcatcaagatgtatggcctgggcacccggccctacttccacagcagcttcaactgctttgactgtggggtcatcatcggcagcatctttgaagtcatctgggccgtcatcaagccaggcaccagctttggcatctctgtgctgcgggccctgcggctgctgcgcatcttcaaggtgaccaagtactgggccagcctgaggaacctggtggtgtccctgctgaacagcatgaagagcatcatcagcctgctcttcctgctcttcctgttcatcgtggtgtttgccctgctgggcatgcagctgtttggaggccagttcaactttgatgagggcaccccacccaccaactttgacaccttccctgctgccatcatgacagtgttccagatcctgactggagaggactggaatgaggtgatgtatgatggcatcaagagccagggcggcgtgcagggcggcatggtgttcagcatctacttcatcgtgctgaccctgtttggaaactacaccctgctgaatgtgttcctggccatcgctgtggacaacctggccaatgcccaggagctgaccaaggatgagcaggaggaggaggaggccgccaaccagaagctggccctgcagaaggccaaggaggtggccgaggtgagccccctgtctgctgccaacatgagcattgctgtgaaggagcagcagaagaaccagaagccagccaagtctgtgtgggagcagaggaccagcgagatgaggaagcagaacctgctggccagccgggaggccctgtacaatgagatggaccctgatgagcgctggaaggccgcctacaccaggcacctgcggccagacatgaagacccacctggaccggcccctggtggtggacccccaggagaacagaaacaacaacaccaacaagagcagagctgctgagcccaccgtggaccagaggctgggccagcagagagctgaggacttcctgaggaagcaggcccgctaccatgaccgggcccgggaccccagcggcagcgctggcctggatgcccggcggccctgggccggcagccaggaggccgagctgagccgggagggcccctacggccgggagagtgaccaccacgcccgggagggcagcctggagcagcccggcttctgggagggggaggccgagcggggcaaggccggggacccccaccggcggcacgtgcaccggcagggcggcagccgggagagccgcagcggcagccccaggactggagcagatggagagcaccggcggcaccgggcccaccggcggcctggagaggagggccctgaggacaaggccgagcggcgggcccggcaccgggagggcagcaggcctgcccggggcggggagggggagggggagggcccagatggaggagagaggagaagaagacacagacatggagccccagccacctatgaaggagatgcccggcgggaggacaaggagcggcggcacagaagaagaaaagaaaaccagggcagcggcgtgcctgtgtctggccccaacctgagcaccacccggcccatccagcaggacctgggccggcaggacccccccctggctgaagatattgacaacatgaagaacaacaagctggccacagctgagagcgctgccccccacggcagcctgggccacgccggcctgccccagagccctgccaagatgggcaacagcacagatcctggccccatgctggccatcccagccatggccaccaacccccagaatgctgccagcaggaggacccccaacaaccctggcaaccccagcaaccctggcccccccaagaccccagagaacagcctgattgtgaccaaccccagcggcacccagaccaacagcgccaagacagccaggaagccagaccacaccaccgtggacatccccccagcctgccccccacccctgaaccacacagtggtgcaggtgaacaagaatgccaacccagaccccctgcccaagaaggaggaggagaagaaggaggaggaggaggatgacagaggagaagatggccccaagcccatgccaccctacagctccatgttcatcctgagcaccaccaaccccctgcggcggctgtgccactacatcctgaacctgcgctactttgagatgtgcatcctgatggtgattgccatgagcagcatcgccctggccgcagaagatcctgtgcagcccaatgcccccaggaacaacgtgctgcgctactttgattatgtgttcaccggggtcttcacctttgagatggtgatcaagatgattgacctgggcctggtgctgcaccagggcgcctacttccgggacctgtggaacatcctggacttcatcgtggtgtctggggccctggtggcctttgccttcaccggcaacagcaagggcaaggacatcaacaccatcaagagcctgcgggtgctgcgggtgctgcggcccctgaagaccatcaagaggctgcccaagctgaaggctgtgtttgactgtgtggtgaacagcctgaagaatgtgttcaacatcctgattgtgtacatgctgttcatgttcatctttgctgtggtggccgtgcagctgttcaagggcaagttcttccactgcacagatgagagcaaggagtttgagaaggactgccggggcaagtacctgctgtatgagaagaatgaggtgaaggcccgggaccgggagtggaagaagtatgagttccactatgacaacgtgctgtgggccctgctgaccctcttcaccgtgtccactggagagggctggccccaggtgctgaagcacagcgtggatgccacctttgagaaccagggccccagccctggctacaggatggagatgagcatcttctacgtggtgtactttgtggtgttccccttcttctttgtgaacatctttgtggccctgatcatcatcaccttccaggagcagggcgacaagatgatggaggagtacagcctggagaagaatgaaagagcctgcatcgactttgccatcagcgccaagcccctgaccaggcacatgccccagaacaagcagagcttccagtacaggatgtggcagtttgtggtgtccccaccatttgagtacaccatcatggccatgattgccctgaacaccatcgtgctgatgatgaagttctatggagcctctgtggcctatgaaaatgccctgcgggtcttcaacatcgtgttcaccagcctcttcagcctggagtgtgtgctgaaggtgatggccttcggcatcctgaactacttcagagatgcctggaacatctttgattttgtgacagtgctgggcagcatcacagacatcctggtgacagaatttggaaacaacttcatcaacctgtccttcctgcggctcttccgggccgcccggctcatcaagctgctgcggcagggctacaccatccgcatcctgctgtggacctttgtgcagagcttcaaggccctgccctacgtgtgcctgctgattgccatgctgttcttcatctatgccatcatcggcatgcaggtgtttggaaacatcggcattgatgtggaggatgaagattctgatgaagatgagttccagatcacagagcacaacaacttccgcaccttcttccaggccctgatgctgctcttccgcagcgccactggagaggcctggcacaacatcatgctgagctgcctgagcggcaagccctgtgacaagaacagcggcatcctgacccgggagtgtggaaatgaatttgcctacttctactttgtgtccttcatcttcctgtgcagcttcctgatgctgaacctgtttgtggccgtcatcatggacaactttgagtacctgacccgggacagcagcatcctgggcccccaccacctggatgaatatgtgcgggtgtgggccgagtatgaccctgctgcctggggccgcatgccctacctggacatgtaccagatgctgcggcacatgagcccccccctgggcctgggcaagaagtgcccagcccgggtggcctacaagaggctgctgaggatggacctgcctgtggctgatgacaacacagtgcacttcaacagcaccctgatggccctgatcagaacagccctggacatcaagatcgccaagggcggcgctgacaagcagcagatggatgctgagctgaggaaggagatgatggccatctggcccaacctgagccagaagaccctggacctgctggtgaccccccacaagagcacagacctgactgtgggcaagatctatgctgccatgatgatcatggagtactaccggcagagcaaggccaagaagctgcaggccatgagggaggagcaggacaggacccccctgatgttccagaggatggagccccccagccccacccaggagggcggccctggccagaatgccctgcccagcacccagctggaccctggaggagccctgatggcccacgagagcggcctgaaggagagccccagctgggtgacccagagggcccaggagatgttccagaagacaggcacctggagccctgagcagggccccccaacagacatgcccaacagccagcccaacagccagagcgtggagatgagggagatgggcagagatggctacagcgacagcgagcactacctgcccatggagggccagggccgggccgcctccatgccccggctgcctgctgagaaccagaggagaagaggccggccccggggcaacaacctgagcaccatcagtgacaccagccccatgaagaggtctgcctctgtgctgggccccaaggcccggcggctggatgactacagcctggagcgggtgcccccagaggagaaccagaggcaccaccagaggagaagagacaggagccaccgggccagcgagaggagcctgggccgctacacagatgtggacaccggcctgggcacagacctgtccatgaccacccagagcggggacctgcccagcaaggagcgggaccaggagcggggccggcccaaggacaggaagcaccggcagcaccaccaccaccaccaccaccaccaccaccccccacctccagacaaggacagatatgcccaggagaggccagaccacggccgggcccgggcccgggaccagcgctggagccgcagccccagcgagggccgggagcacatggcccaccggcagggcagcagctctgtgtctggcagccctgcccccagcaccagcggcaccagcaccccccggcggggccggcggcagctgccccagacccccagcaccccccggccccacgtgtcctacagccctgtgatcaggaaggccggcggcagcggccccccccagcagcagcagcagcagcagcagcagcagcagcagcaggccgtggcccggcccggccgggccgccaccagcggcccccggcgctacccaggccccacagctgagcccctggccggggaccggccccccaccggcggccacagcagcggccgcagccccaggatggagaggagagtgcccggccctgcccggtctgagagcccccgggcctgcagacatggaggagcccgctggccagccagcggcccccacgtgtctgagggccccccaggccccaggcaccacggctactaccggggcagtgactatgatgaagcagatggccctggcagcggcggcggggaggaggccatggccggggcctatgatgcccctcctcctgtgagacatgccagcagcggggccaccggccgcagccccaggaccccccgggccagcggccctgcctgtgccagccccagccgccacggccggcggctgcccaacggctactacccagcccacggcctggcccggccccggggccctggcagcaggaagggcctgcacgagccctacagcgagagtgatgatgactggtgctag

SEQ ID NO: 44623 - DNA, 7488 bp, Artificial Sequence
  derived and/or modified sequence
atggcccggttcggcgacgagatgcccgcccggtacggcggcggcggctcaggagccgcagcgggagtggtggtcgggtctggcggcggccggggcgctggaggaagccggcagggcggacaaccgggagcgcaacgaatgtataaacagagtatggcccagcgcgcccgaaccatggctttgtataatccaatacctgtgcgccagaattgcctgactgtcaaccgctcactattcctgttttccgaggataacgtcgttcggaagtatgctaaaaaaatcacagaatggccccccttcgaatacatgatcctagctaccattattgccaactgtattgtactggcactcgagcagcacctgccagacgatgataagaccccaatgtctgaaaggctggatgataccgaaccttatttcatcggcatattttgctttgaagccggaatcaagataatcgctcttggattcgccttccacaaagggagttacttaagaaacggatggaatgtgatggacttcgtggtggtgctcacgggcatcctcgccacagtgggaaccgaattcgaccttcgcactctgcgagccgtccgagtgctaagacctttgaagctcgtgtcaggaattccaagtctgcaggttgtgctaaagtcgattatgaaggctatgatccctttgctccagatcggcttgcttctgtttttcgcgatcctgattttcgccattattggcctagaattctacatgggaaaattccacacaacctgttttgaggaggggactgacgacatccagggagaatcccctgcaccatgtggcaccgaagagccagcccgaacatgtcccaacggaacgaaatgccagccatattgggaaggcccgaacaatggcatcacccagttcgacaatatcttgttcgctgtgctgacagtgttccaatgcatcaccatggagggctggacagatctgctctataactctaacgacgcttctgggaatacctggaactggctgtacttcatcccacttataataatcgggtccttttttatgcttaacttagttcttggtgtgctgtccggagagtttgccaaagaacgggagcgggtggaaaaccgtcgcgcctttcttaaactccggaggcaacagcagatcgagagggaattgaacggatatatggagtggatcagtaaagccgaagaagtcattctagcagaagatgaaaccgatggcgaacagcgacatcctttcgatggtgcacttaggagaactaccatcaagaagagtaaaactgatcttcttaaccccgaggaggctgaggatcagcttgccgacatcgcatcagtcggaagtccattcgcccgggcctcaattaaaagcgccaaactggaaaacagcaccttctttcataagaaagagagacggatgcgcttctatatccgaagaatggtaaagacacaggccttctactggaccgtgcttagccttgtcgcattgaatactttgtgcgtggccatcgtccactataatcagcctgaatggttgtccgacttcctgtattacgccgaattcatctttcttggcttatttatgtccgagatgtttatcaaaatgtatggtctggggaccaggccttatttccactccagctttaactgctttgattgcggggtgattattggatctattttcgaggtgatctgggcagtgataaaaccaggaacgagcttcggaatttccgtgctgcgggcactgcgcctcctgcgcattttcaaggtaacaaaatactgggcttctctgagaaacctggttgtaagtctcttaaacagcatgaaatcgatcatttccctgctgtttttactgtttcttttcattgtggtatttgcactgctgggaatgcagctgtttggaggtcagttcaactttgacgaaggtactccccctacaaatttcgatacattcccggctgctattatgaccgttttccaaatcctgaccggcgaggactggaacgaagtgatgtatgacggcataaaatcccagggtggcgtacagggcggtatggtatttagtatatatttcattgttttgacactattcggtaactacacactgctgaacgttttcctagcaatcgcagtggataatctcgccaatgcgcaggaattaactaaggacgaacaggaggaggaggaagctgccaatcagaaactggcactgcagaaggcaaaggaggttgcagaggtcagccctctgtccgccgccaatatgtctattgctgttaaggagcagcagaaaaatcagaagcccgcaaaaagtgtgtgggagcagagaacttctgaaatgcgcaagcaaaatctcctggcctctcgggaggccctgtacaacgagatggacccagatgagcggtggaaggctgcctacacaaggcacctgcgccctgatatgaaaacacacctcgacagacctcttgtggtcgatcctcaggaaaaccgtaataacaacaccaataagtcacgggcagccgagcctactgtcgatcaacgcttgggacagcaaagggccgaagatttcttgcggaaacaggccagataccacgatagggccagagacccaagtggaagtgccgggttggacgctcgccggccttgggcagggagccaagaggcagagctgtctagggagggcccttacgggcgtgaatccgaccatcacgcccgggaaggatccctggaacagcccgggttttgggaaggcgaggccgagcgggggaaagccggtgacccccaccggcgtcatgtgcacagacagggcggctccagggagagtagaagtggctcgcccaggacaggggcggacggggagcacaggcggcatagggcgcaccgtagaccaggggaggaaggccccgaagataaggcagagcgcagggcccggcaccgagaggggtccagacctgctcgcgggggtgagggagaaggcgagggtccagacgggggcgaacggcggcgccgccaccgtcatggagctcctgcaacatacgagggtgacgcccggagagaagacaaagaacggaggcatcgccgcagaaaggaaaaccagggatccggcgtcccagtatctggccctaatctcagcacgaccaggcctatccagcaagatctgggaagacaagatccaccactggcagaggatatcgataatatgaaaaacaacaaactggctacagctgaaagtgccgcaccccacggatcattgggacatgctggcctgcctcagagtccagccaaaatgggcaacagcacagatccagggcctatgctggctatcccagccatggctactaacccgcaaaatgctgcgtctcggagaacacccaataacccagggaatccctccaaccctggccctccaaagacccctgagaacagcctgatcgtgaccaatccctccggcacccagaccaattccgctaaaaccgcccggaagcccgaccatacaacagtggacattcctccagcgtgcccgcctccgctcaaccatacagtggttcaggtaaataaaaacgctaatcctgaccccctgccaaaaaaagaggaggagaagaaggaggaggaagaagacgatcgcggagaagacgggccaaagcctatgccaccctactcatcgatgtttatcctgtctaccactaacccgctgagaaggctctgccactatatcctcaatctacggtacttcgaaatgtgcattctgatggttattgcaatgagttctatcgccctcgccgccgaggatccagtgcagcctaatgctcccagaaacaacgtcctccgttatttcgattatgtgttcacaggcgtgttcacatttgagatggtcatcaagatgatcgatctgggcttagtgctgcatcagggagcatattttcgggacctgtggaatattcttgattttatcgtggtgagcggcgctttggttgctttcgcttttaccgggaatagcaaaggcaaagatattaatactattaaatccctgcgtgtcctgcgagtgctgagacccttaaagacaattaagagacttccgaaactgaaggccgtgttcgattgtgtggtgaactcactgaagaacgtgtttaacattctaatcgtatacatgctctttatgtttatctttgctgtcgtggccgtacaactcttcaagggtaagttttttcactgcactgacgaatccaaggagttcgagaaggactgtagggggaaatacctgctgtatgaaaagaacgaggtaaaggccagagatagagagtggaaaaagtacgagttccactacgataatgtactgtgggctctgctcacactcttcacagtgtcaactggcgaaggatggccccaggtgttgaaacactcagttgatgcgactttcgaaaatcagggccctagcccaggctaccgtatggagatgagcatattctacgtggtgtacttcgttgtatttccttttttctttgttaacatcttcgtggctctgatcattattaccttccaagaacagggtgataagatgatggaagagtatagtctggaaaagaatgaaagggcatgcatcgatttcgccatcagcgccaagccacttacaagacacatgcctcaaaataaacagagctttcagtacagaatgtggcagtttgtggtcagtccgcccttcgagtacactattatggctatgatcgccctcaatacaatcgtgttaatgatgaagttctacggggccagcgtggcctacgagaatgcattgcgggtttttaatattgtctttacaagcctgttctctctggagtgtgtgctgaaagtgatggcattcggaatcttgaattactttagagacgcatggaacatctttgattttgttaccgtactcggctccatcaccgatatcctggtcacagagtttggaaacaactttatcaatctctctttcctccggctttttcgggcagccagactgattaagcttttgagacagggttacaccataaggatcttgctgtggacctttgtccagtctttcaaagctttgccatacgtgtgcctgttgatcgcaatgcttttttttatatacgctatcatcggtatgcaggttttcggaaatatcggcatcgatgtggaagatgaagactccgacgaggatgaattccagatcactgaacacaataactttcggaccttttttcaggctctcatgctactttttagatcagcaacaggtgaagcatggcataatataatgctgtcatgcctgtctggtaaaccatgtgataaaaacagtggcattctcacacgtgagtgtggcaacgagttcgcttacttttattttgtgtccttcatatttctgtgctcattcctcatgctgaacctgtttgtggccgtgattatggacaacttcgagtacctcactcgtgactcaagcatcctggggccacaccacttggatgagtatgtacgtgtgtgggccgaatacgaccccgcggcgtggggaagaatgccgtacctagacatgtaccagatgctacgccacatgtcacctcccctcggactaggtaagaagtgccccgcaagggtggcatataagagactgctgaggatggatctacccgtagcagatgataacacagtgcatttcaacagcactttaatggctcttattcggacagcactggatattaagattgccaaagggggcgccgacaagcaacagatggatgcagagctgagaaaagagatgatggctatctggccaaacctgtctcagaaaacactagaccttctggtgacccctcacaagagtaccgatttgactgtgggtaagatctacgccgcaatgatgattatggagtactataggcaatcgaaggctaagaaactgcaggcgatgagagaggagcaggataggacccccctcatgttccagaggatggagcctcccagtcccactcaggagggtgggcccggccagaatgccctgccgtctacgcagctggaccctggaggcgccctgatggcacatgaaagcggcctgaaagaatccccaagttgggtaacccaaagggcccaggagatgtttcaaaagaccggaacctggagtccagaacagggtcctcctacggatatgcccaattcgcagccaaattcacagagcgtggaaatgcgggagatgggacgcgatggctactcagactcagaacactacttgcctatggaaggtcagggcagagcagctagcatgccccggcttcccgcagagaaccagacaattagcgacaccagtcccatgaagaggagcgcctccgtgttgggccccaaggcgagaagattggacgactattccctggagagggtgccccccgaagaaaaccagaggcaccatcagcggcgcagagaccgtagccatcgtgcttcagagaggagtttgggccgatatacagacgtggataccggtctcggcacggacctcagtatgacgacgcagtccggtgacctccctagtaaggagcgggaccaggagcgcggtaggcccaaggacagaaaacatagacaacaccatcatcaccatcaccatcaccatcacccaccgcctcctgataaggaccgatacgctcaagaacgcccagatcacgggagggcgcgggcaagagaccagaggtggtcccggagcccatccgagggcagagaacacatggctcaccgtcagggatcgtcgagtgtgtcaggcagcccagctcccagtacatcaggaacgagcacccctcgaagagggagacgccagctgccacagacacccagtacaccaagacctcacgtgtcgtatagtcccgtgatcaggaaggccggtggcagtggtccgccacaacagcagcaacagcagcagcaacagcagcaacaacaggccgtggcaagacctgggagggctgccacaagcggtcctcggcggtacccggggcctacagccgaaccactagctggtgatcgccccccaactgggggccactctagtggccggagtcctcgtatggagcggagagttcctggacctgcacggagcgagagtccccgcgcctgtcgtcatggcggtgcaaggtggcctgcctcaggtcctcacgtctccgaaggcccacccgggccaaggcaccatgggtattaccgaggaagcgattacgatgaggcagacggtcccggttcaggtggtggggaagaggccatggctggtgcttacgacgcccccccacccgtacgccacgcctctagtggtgctacagggcgatccccacgaaccccccgtgcatctggccctgcatgtgcttccccttctcgccatggacgcagattgcccaatggctattaccccgctcatggcctcgccaggccccggggtcctggaagtcggaaaggcttgcacgaaccatacagcgagtctgacgatgactggtgttag

SEQ ID NO: 44624 - DNA, 7521 bp, Artificial Sequence
  derived and/or modified sequence
atggcccggttcggcgacgagatgcccgcccggtacggcggcggcggaagcggcgctgccgctggcgtcgttgttgggtccgggggaggacgaggcgcagggggctcacgccaggggggtcagccaggcgcccaaagaatgtacaagcagagtatggcccagagggcgcgcaccatggccctgtataaccctattcctgtgcggcagaactgcctgactgtcaatcggagccttttcctgttcagtgaagacaatgttgtgcgaaaatacgcgaagaagattactgagtggccccccttcgagtacatgatccttgctacaattatcgccaattgcatcgtgttagcacttgaacagcatcttcctgacgacgacaagacacctatgagcgaacggctggatgatacagagccctatttcataggcattttttgtttcgaagcgggaattaaaattatcgctcttggtttcgctttccacaagggaagttacctgcggaatggttggaacgttatggacttcgtcgtggtgctgaccgggatcctggccacagtaggtaccgagtttgatctgcggacacttcgagcagttagggtcctgaggcctttgaaattggtctctggtattccttccctccaggtggttctcaaatctatcatgaaggccatgatccctctgctccagattggtttgctcctcttctttgcgatattaattttcgctattatcggactcgaattttacatggggaaatttcataccacatgcttcgaagaaggcacagatgacattcagggggagtctccggcgccttgtggcacagaggagcctgcccgtacatgcccaaatggcacaaagtgccagccgtactgggaggggcctaacaacggcatcacccaattcgataatattctgtttgcagttctgaccgtgtttcaatgtataaccatggaagggtggaccgatctgttgtataatagcaatgatgccagcggcaatacctggaattggctctactttattccgctgattattatcgggagcttttttatgctgaacctggtgctgggggtgctatccggcgagtttgcaaaggaaagagaaagggtcgaaaatcgtagagcattcctgaagcttcggagacagcagcagatcgagcgcgaattgaatgggtatatggagtggatcagcaaggcggaggaggtcattcttgccgaagacgagactgatggagaacaaaggcaccccttcgacgcacttaggagaaccaccattaagaagtcaaagactgatctgctgaatccagaggaagcagaagatcagctggctgatattgctagcgtgggttcgccattcgccagagcctcaattaaatcagccaagctggaaaacagcacgttctttcataagaaagagcgccggatgcgtttttacatccggcggatggtcaagactcaggctttttactggactgtgttgtccctcgtcgcattaaacaccctgtgcgttgctatcgtccattacaatcaaccagaatggctgtctgactttctctattacgctgaattcattttcctagggctcttcatgagcgagatgtttattaaaatgtacggcttgggaacaaggccatattttcactccagctttaactgctttgactgcggcgtgatcattggaagtattttcgaagtcatttgggctgtcataaagccaggcacgtctttcgggattagcgtgctgagggctttgcggctgctgagaatctttaaggtcacgaagtactgggctagtctgcgaaaccttgtcgtgtctctccttaactctatgaaatcaattatatcgctgctattcctgttgttcctttttattgtcgtgttcgcccttttgggaatgcagctcttcggcggccaatttaacttcgatgaaggcaccccaccaacaaatttcgatacattccccgctgccattatgacggtttttcaaatcctcaccggtgaagattggaacgaggtgatgtacgacggcataaaatcccagggcggggtgcagggcggtatggtcttctccatctatttcattgttctcaccctgtttggcaattataccctacttaacgtattcctcgccattgccgttgataacttggcgaatgctcaggaattgacaaaagacgagcaggaggaagaagaggccgccaatcagaaactcgctctgcaaaaggctaaggaggtggcagaggtatctcccttgagtgccgctaatatgagtattgcagttaaagagcagcagaagaatcagaaacccgctaaaagtgtttgggagcagcgtacttctgagatgcggaaacagaatctactggcatctcgcgaggcgctgtataacgaaatggaccccgacgaaagatggaaggctgcctacacccggcacctacgaccggacatgaagacccacttggaccggcctcttgtggtggacccacaggagaatcgtaataataacacgaacaagtctagagccgcagaacccacggtcgatcagaggctcgggcagcagcgagctgaggacttcctcaggaaacaggccaggtaccacgacagagctagggatcctagcggatccgctggcctggatgcgagacgtccgtgggccggctctcaggaggccgaactgagtagggaaggcccttatggacgggaaagcgatcaccatgctagagaaggttcactggaacaacctggattttgggagggagaggccgagcgtggaaaggctggtgacccgcacaggcgacatgtccacagacagggtgggtcaagggagtcaaggagcggcagtcccagaactggtgccgacggagaacaccggcggcaccgcgcacatcgaaggcctggcgaggagggaccggaggacaaggctgagcggcgcgctaggcatcgtgaaggtagtcgtccagcccggggcggagagggcgagggggagggacccgacgggggtgaacggaggagacgccaccggcatggagcccctgccacttatgaaggcgatgcccgcagagaagataaagagcggagacatagaagaagaaaagaaaatcagggatcgggtgtccctgtcagtgggccaaatctgtctacaactagacccatccagcaggacctaggaagacaggacccacccctcgctgaggatatcgataacatgaaaaataataagttggctaccgctgagtcagccgccccccatggaagtctgggacacgcaggtttgccccaatcacctgcaaagatgggcaattcaaccgatcctgggccaatgctcgcaatccctgcaatggcgaccaacccccaaaacgccgcttcccgtaggacacctaacaacccagggaacccaagcaaccctggcccccccaagacccctgaaaacagcctcatcgttactaatccttccgggacgcagaccaattccgccaagaccgccagaaaacctgatcacactacagtggacattcccccggcttgtccacccccgttgaaccacaccgtagtccaggtaaacaaaaacgccaaccccgatccattacccaaaaaggaggaggagaaaaaagaggaggaggaggacgacaggggagaggacggacctaaacctatgcccccctattccagcatgtttattctctcaaccactaatccacttcgcagactgtgccactacatcctaaatctaaggtattttgagatgtgcattcttatggtgatcgcaatgagcagtatagctttggcggctgaggatccagtacaacctaatgcccccagaaataacgtgttgaggtactttgactacgtgttcactggggtcttcacatttgaaatggtgattaagatgatcgacttgggtctcgtgctacaccagggagcttatttcagggacctgtggaatattctggactttattgtggtgtccggggcgctggtggcattcgcatttaccggaaattctaagggcaaagatataaacaccattaagagcctgcgggtcctccgagtcctgcggcccctgaaaacaatcaagagacttcctaaactgaaagctgttttcgattgtgtcgttaactctctcaaaaacgtgttcaatatcctcattgtgtatatgctatttatgttcatctttgctgtggttgccgtacagctttttaaaggaaagttcttccactgcacagacgagagtaaggagttcgagaaggactgccgcggaaagtacctcctctacgagaagaatgaagttaaagccagggatcgcgagtggaagaaatatgaatttcattatgataatgtcctgtgggctttgctgacattgttcactgtatccacaggagaggggtggcctcaggttctcaagcactccgtggacgctaccttcgagaatcagggcccttcgcctggctatagaatggagatgagtatcttttacgtcgtgtatttcgtggtgttcccattcttttttgtgaacattttcgtcgcgctgattattatcactttccaagagcagggggacaaaatgatggaggaatacagcctggaaaagaacgagcgcgcatgtatcgattttgccatctcagcaaagccactgacacggcatatgccccaaaacaagcaaagctttcagtacaggatgtggcagtttgttgtatctcctccattcgagtacacgatcatggccatgatcgcccttaacactattgttctgatgatgaagttctatggggccagtgtcgcttacgaaaatgcactgcgcgtgtttaatattgtctttacgtctctgttttctctggagtgcgtcctcaaggttatggcctttggaatcctaaactatttccgagatgcctggaacatcttcgatttcgtgactgtgctgggctccattacagacattctcgtgaccgagttcgggaataatttcatcaacctttcttttctgagactgtttagggcagcaaggctgattaagcttttgcggcagggatacacaatcagaatcctcctctggactttcgttcagagctttaaggcacttccatatgtttgtctactaatcgccatgttatttttcatttacgcaattatcgggatgcaggtgtttggtaatattggtatcgacgtggaggacgaagattctgatgaagatgagttccaaatcacggagcacaacaacttccgcacattctttcaggcgctgatgttgctgtttcgctccgccaccggagaggcctggcacaatatcatgctctcctgcttgagcgggaagccatgtgacaaaaactctggaatcctcacaagagagtgcggcaatgaatttgcgtatttttacttcgtaagtttcatctttctgtgttcatttttgatgctaaacctgtttgtggcagtcatcatggataacttcgagtatcttacgagggactcaagcattctgggcccacatcatctggacgaatatgtgagagtatgggctgaatacgaccccgcagcctgggggagaatgccatatctagacatgtaccagatgctacgccacatgagccccccactgggtcttggaaagaagtgcccggcccgcgttgcatacaaaaggctcctgcgcatggacctgcctgtggctgacgacaacactgtgcacttcaattcgactctaatggcactcatccgaactgctctagatatcaagattgctaagggcggggcagacaaacaacagatggacgccgagctgaggaaggagatgatggctatctggcccaatttatcccagaagacactggacctgctagtgacacctcacaaatcaacagatctaactgttgggaagatctacgcagccatgatgataatggagtattatcgtcagtccaaggccaaaaagttgcaagctatgagagaagagcaggataggacccctctgatgttccagcgcatggagccccctagtccaactcaggaaggcgggcctgggcaaaacgccctgcccagcactcaactggaccccggaggggctctcatggcccacgaatccggccttaaggagtccccatcctgggttactcagcgcgctcaggagatgttccaaaagactggcacctggtctccagaacaaggccctccaactgacatgcctaactcacaacctaattcgcagagcgttgaaatgagagagatggggcgcgatggttactccgattcagaacactacttacctatggaggggcaaggccgggctgcgtccatgcctaggctccctgctgagaatcagcgcaggagggggcggccaaggggtaataatttgagcaccattagcgacacttcccccatgaagaggagtgctagcgttctcgggcccaaggcgagaaggctggatgattacagcctcgagcgggtgccgcccgaagagaatcagcgtcatcaccagaggcgccgcgacagatctcacagagcttccgagagaagtctgggcagatacaccgacgtagataccgggctagggacagaccttagcatgaccacccagagcggggatctgcctagcaaggagcgcgatcaggagcgggggcgtcccaaggaccgtaaacaccggcagcatcatcaccaccaccatcatcatcatcatccacctcctcctgataaagaccgctacgctcaggagcggccggatcacggacgtgcccgggccagagaccagcgctggagccgcagtcctagcgagggaagagagcatatggcacaccgccaaggatcctcatccgtgagcggctcccctgcaccatcaacgtccggcacctccacacctcgaagaggacgccggcagctccctcagacccctagcacgcctaggccccatgtctcttatagcccggtcataaggaaggccgggggaagcgggccaccacagcagcagcaacagcagcagcaacagcagcagcagcaggccgttgcacgtcccggcagagctgcgacctccggcccgaggagatatccgggccccaccgccgagcccttggccggcgatcgccccccaaccggcggacatagtagtgggcggagtccacggatggagcgacgcgtccccgggccggcacggagcgaatcacctcgcgcctgtcgccacggcggggcgcgctggccggctagcggcccacatgtgtcagaaggaccgccgggaccaagacaccacgggtactaccgcggctctgattacgatgaagccgatgggcccgggtccggaggaggcgaagaggctatggctggtgcctatgatgccccgcctcccgtgagacacgcgagttccggagcgactggacgctctcccagaactcccagagcctccggccccgcatgcgcctccccgtcaaggcacggccgcaggctgccaaatggctactatcccgcccacgggttagccagaccaagaggtcccggaagtagaaaaggcctacatgagccatattccgaaagcgacgatgattggtgttag

SEQ ID NO: 44625 - DNA, 7487 bp, Artificial Sequence
  derived and/or modified sequence
atggcaaggttcggcgacgaaatgcctgcaagatacgggggtggcggaagtggggcagccgctggcgttgtggtcgggtcaggagggggaaggggcgctgggggaagcagacagggcggacaacctggcgcacagcgcatgtacaaacaaagtatggcccagcgtgccagaactatggccctctataatcccatccctgttagacaaaactgtctgaccgtcaatagatccctcttcctcttctccgaagacaacgtcgttagaaagtacgcaaagaagattacagaatggcctccattcgaatacatgattttggccacgattatcgcaaattgcatcgtgctggcgctggagcagcacctaccagatgacgataaaacacccatgagcgagaggcttgatgatactgaaccctacttcatcggcattttttgtttcgaggccggaattaaaattattgcccttggcttcgccttccacaagggttcctacctgcggaacgggtggaacgttatggacttcgttgtggttcttactggcatcttagccactgtcggtactgagttcgatttaagaactctccgagcggtcagagtactgcgcccactcaaactggtctccggcatacctagcctgcaagtagtactcaaaagtataatgaaggccatgatccccctcctgcagataggactgttgctgttcttcgcaattctcatcttcgccatcatcggactcgagttctacatgggtaagtttcatactacgtgtttcgaggaaggtacagacgacatacagggggaaagccccgctccttgcggcactgaggagcctgccagaacctgcccaaacggtacaaaatgtcagccttattgggagggtcccaacaatggaattactcagttcgacaatatcctgttcgcagttcttaccgtatttcagtgtattaccatggaaggatggactgacctactgtataatagtaacgatgcgtccggcaatacttggaactggctatactttatcccgctgatcattatcggtagcttcttcatgctgaatttagtcctaggcgtgctgtcaggcgaattcgcaaaggaaagggagcgggtcgagaaccgccgtgcctttttgaaactgagaaggcagcagcagatagaaagggaactcaacggctatatggagtggatttcaaaagctgaggaggtgattctagccgaagacgaaactgacggagagcagagacacccctttgacggggctctgaggcggacgacaatcaagaagtcaaagacggatctactcaatccagaggaggcggaggatcaactggctgatattgcctcagtagggagcccctttgccagggcctctattaaaagcgccaagttagagaacagcactttttttcataagaaagagaggagaatgcggttctacatccggagaatggtgaagacccaggccttttactggacggtattgagtttggtggccctgaatacattgtgtgtggctatagtccattataatcagcctgaatggctgtcggatttcttatactacgcagaattcatcttcctaggtctttttatgagcgaaatgtttataaaaatgtatggtctgggtacccgcccatacttccacagtagtttcaactgcttcgactgcggtgtgataattgggtccattttcgaggtcatctgggctgtaattaaacccggaacctcattcgggatctcagtgttacgggctctgcgacttcttcgcatcttcaaagtcactaaatattgggcctccctccggaatctcgtggtgagtctgctgaactcaatgaagtccattatctcactcctattcctgctgtttctattcatcgtggtgttcgcactgttagggatgcaactattcggaggccaatttaattttgacgaggggacacccccaaccaacttcgatacgtttcctgcggctattatgacagtcttccaaatactgactggggaggattggaatgaagttatgtacgatggcatcaagagtcagggaggagtccaggggggaatggtgtttagtatctacttcatcgtcttaacgctatttgggaactacaccctactgaacgtattcctggcgattgccgtggacaatctcgccaatgcccaagaactcactaaagacgaacaggaagaggaagaagctgcaaatcaaaagctagccctgcagaaagctaaggaagtagctgaagtgtctccccttagcgctgcaaatatgtccatagccgtaaaagaacagcagaagaatcagaaaccagccaaatccgtgtgggaacagaggacttccgagatgcggaagcagaatctgttagcctcaagagaagcattgtataatgaaatggaccccgatgagcggtggaaagctgcatacacaagacatctgcggcctgatatgaaaacacatttggatcgccctttagtcgtggatccacaggaaaatcgcaacaacaatactaataagtccagagccgctgagcccacagtagaccaacggctggggcagcagagagccgaggacttcctgcggaaacaggccaggtaccacgatcgagcaagagatccctctggtagcgccggtctagacgccagacgtccctgggccggttcccaggaagctgagctgtcgcgggaggggccatacggacgcgaaagtgaccaccatgccagagagggttcgttggaacagcccggtttctgggaaggagaagctgaaaggggcaaagccggagatccccacagaagacatgtgcaccgccaggggggatcccgtgagtcgcgctccggcagcccaagaaccggtgcggacggagaacacagaagacatcgggcacaccgaaggccaggggaggagggacccgaagataaggctgagcggcgtgctagacacagggaagggtcacggcctgcgcgaggaggtgagggcgagggcgagggcccagatgggggagaaaggcggagacggcacagacatggagcaccggctacttatgagggagacgctaggagagaagataaagagaggagacatcggcgacgcaaagagaatcagggctctggggtgccagtgtctggacctaatctgagcactactcgcccaatccaacaggatctggggagacaggatccgcctctggctgaggacatagacaatatgaagaataacaagctggccaccgccgaatccgccgcaccacatggcagtctcggccacgctggcctacctcagtcaccggcaaaaatgggcaattcgactgatccaggtcctatgttagccatccctgctatggccacgaatccacaaaatgcagcgagccgacgaacacccaacaacccaggcaatcccagtaatcctggaccacccaaaactcccgagaacagtttgatcgtgactaatcctagcggtacccagactaattctgccaaaacagcaaggaagcccgatcacaccactgtggacatcccccctgcatgcccgcctcccttgaatcatactgttgtgcaggtgaataagaatgctaatccggaccccttacccaagaaagaagaagaaaaaaaggaagaagaggaggacgacagaggtgaggatggcccaaagccgatgcctccttactcctctatgttcattctcagcacaacaaatcctctgagaaggctatgccactacatactcaacttgagatacttcgagatgtgtattctcatggtcatcgccatgtcgtcaattgccctcgctgcagaagaccccgtacaaccaaacgcccctagaaataacgttttgcggtattttgactatgtcttcacgggtgtttttacattcgagatggttatcaaaatgatcgacctgggccttgtactgcaccagggtgcatactttcgcgacctatggaacatcctggacttcatagtggtgtccggcgcactggtcgcgttcgcctttacagggaactccaagggaaaggacattaacactatcaagagcctcagggtgctgcgggtactacggcctttgaaaacgattaagcggctgccaaaactcaaagccgtttttgactgtgtcgtgaactcattaaagaatgtcttcaatatattgatagtttacatgctctttatgttcatcttcgctgtggtggcggttcagctgttcaaaggcaaatttttccactgtaccgatgaatcaaaggaattcgaaaaggactgtagagggaagtatctgctttacgagaaaaacgaggtaaaagctagagacagggagtggaaaaaatatgagttccactacgataacgtattatgggcactgctcaccctgttcacagtgtctaccggggaaggctggccccaggtgcttaagcactcagtagacgcaacattcgagaaccaaggtccttcaccaggttaccgcatggaaatgagcatcttctatgtagtgtactttgttgtgttcccatttttctttgtcaacattttcgtggcactgatcataataaccttccaggagcagggcgacaagatgatggaagagtactcccttgaaaaaaacgagagagcatgtatagacttcgccatcagtgccaagcctctgacgaggcacatgcctcagaacaagcagtcgtttcagtacagaatgtggcagtttgttgtgagtcctcctttcgagtataccatcatggcaatgattgctctgaacaccatcgtgcttatgatgaagttctatggggctagtgtcgcttacgaaaatgccctgcgagtctttaacatagtgtttaccagcttgttctccctggaatgtgtgctgaaggtgatggctttcggcatactcaattactttcgggacgcgtggaacatcttcgactttgtcacggtgctgggctccattacagacatcctggtgacagagtttggtaacaatttcattaatctgtcattcctccgactgttcagagccgcaagactcattaagctccttcggcagggatacacaataagaatattgctgtggaccttcgtccagagtttcaaggccctaccatatgtgtgtctgcttattgccatgcttttctttatttatgcaattatcggtatgcaagtgtttggaaacataggtatcgatgtggaggacgaagactctgatgaggatgaattccagataaccgaacataataattttaggaccttttttcaggccttgatgttgctttttagatccgcgacaggggaggcttggcacaatattatgttatcctgcctttctgggaaaccctgcgataagaattcaggcatccttaccagggaatgtggcaacgagttcgcgtatttctacttcgtctcctttatctttctctgtagcttcctgatgctgaacctgttcgttgcagtgattatggacaacttcgagtacttgacccgggatagtagcatactggggcctcatcatcttgacgaatatgtcagagtgtgggccgagtatgatcccgctgcctggggacggatgccttacttagatatgtaccaaatgcttcgccacatgagtcccccactgggcttaggaaagaaatgccccgctcgggttgcatacaagcgtctgctacgcatggacctgcccgtagcggatgacaacactgttcatttcaattccactctcatggccttgatcagaactgccttggatatcaaaatcgccaaggggggagccgacaaacagcagatggacgccgaactgaggaaagaaatgatggccatatggcccaacctcagccaaaaaaccctggacctgctggtaacaccacataaaagcacggatctgacagtgggcaagatctacgcagcaatgatgatcatggagtattaccgtcaatccaaggcgaaaaaactgcaggccatgagagaggagcaggaccgcacaccactgatgttccagcggatggaacctccatctcctacacaggagggcggacccggacaaaatgcattaccttcaacacagctggacccaggcggtgccctgatggcccacgagtcaggacttaaagaatccccgagctgggttacccaacgtgctcaggagatgttccagaaaacggggacctggagccctgaacaaggcccacctactgatatgcccaacagccagccgaacagccagtccgttgaaatgcgcgaaatgggtagagacggttatagcgattccgagcactacttacctatggagggtcaggggagagccgcttctatgccacggttgcccgctgaaaatcaaaccattagcgacacgtccccaatgaagaggagcgcctcggtgctaggtcctaaggctaggcgcctggatgactactcactggagcgggtccctcccgaggaaaaccagaggcatcatcagcgtcggagggacaggtctcatcgcgctagtgaaagatcgctgggccgttacaccgatgtggatactggcttgggcaccgacctgagtatgaccacccagtctggtgacctccctagcaaggagagagatcaggaacgcggtagacccaaagatagaaagcacagacagcatcatcaccatcatcaccaccaccaccatccgccaccgcctgacaaagacaggtacgcacaagaaagacctgatcacggcagagccagagcaagggatcagcgctggtcccgctctccatcagagggtcgggagcacatggcccataggcagggaagtagcagtgtatctggcagccctgccccttcaacaagtggtactagcactcccagacgaggacgcagacagctgccccagactccttcgacccctaggccccacgtgtcttactccccggtgatcaggaaagcaggtgggtccgggccaccacaacagcaacagcaacagcaacagcaacagcagcagcaggccgtggcgcgacctgggagagccgctacatctggcccacgtagatatccgggtcccaccgccgagcccttagccggtgaccggccacctacgggtggacattcttcaggcagatcacctaggatggaacgtagggttcctggccctgcacgtagcgagtcaccacgcgcttgtaggcacggaggtgcgagatggcctgccagtggccctcacgtgtcagagggcccacctgggccacgacaccacgggtattaccggggaagcgactacgatgaggctgacgggcctggatcagggggaggcgaggaagccatggctggtgcatacgatgcccctcccccagtccgacatgcctctagcggcgctaccggacgttcgccgaggacgcccagggcctctggaccagcctgcgcctctcccagccgacacggccgaaggctgcccaatggctattacccagctcacggtctggctcggcctagggggccaggctcacgcaaggggctgcatgagccttactccgagagcgatgacgattggtgtta

SEQ ID NO: 44626 - DNA, 7520 bp, Artificial Sequence
  derived and/or modified sequence
atggccagatttggtgacgaaatgccagctcgctatggcggagggggaagcggcgcagccgctggggtagtagttgggtcagggggtggcagaggcgcaggcggaagtcgccaggggggtcagcctggcgctcaacgtatgtataagcaaagcatggcccagagggccagaacgatggcactctataaccctatccctgtccgacagaattgcctgaccgtaaacagaagcctgttcttattttctgaagataacgtcgtcagaaagtacgcgaagaagattaccgagtggccaccattcgaatacatgatcctggccacgatcattgcgaactgcatcgtgctggcgctcgaacaacacttgcccgacgatgacaagaccccgatgtctgagcgactggatgatacagagccatatttcattggaatcttctgcttcgaggctgggattaagatcatagccctggggtttgccttccataaagggtcttatttgcggaatggctggaacgttatggactttgtggtcgtcctgacaggtattctggccactgtaggaactgagttcgacctcagaacgctcagggccgtgcgtgtgctgaggccattaaaactcgtaagcggaatcccctccttacaagttgtcctcaaatcaatcatgaaagccatgatcccactgctgcagatcgggctcctactgttcttcgcgattcttatctttgctataatcggactggagttctacatgggcaagtttcacacaacttgcttcgaggagggcacggatgatattcagggggaatctccagctccctgtgggacagaggaacctgccaggacctgccccaacggcacaaagtgccaaccgtactgggagggaccgaacaacggcattacccagttcgataatattttgttcgcagtccttaccgtgtttcagtgtatcactatggagggctggactgacctgttatacaactcaaatgacgcgtcaggcaacacttggaattggctatatttcatccccctgatcattatagggagcttcttcatgctgaacttagtgctgggcgtgctctccggggagttcgccaaggaacgggagagggtggaaaatcgtagggcatttttaaaattacgacgccaacagcagatcgagcgagaattgaatggctatatggaatggatcagcaaggctgaagaggtaattctggccgaagacgaaacggatggagaacagagacatccatttgacgccctcaggcgcacaacaattaagaagagcaaaaccgacctactcaaccctgaggaagctgaagaccagctggccgatattgcgagcgtcgggtcaccttttgcacgcgcaagtatcaagtccgcgaagctggagaatagcaccttttttcataagaaggaacggcgaatgcggttttatattagacgcatggtgaagacccaggctttttactggaccgtactgtctttagtcgctctcaacaccctctgcgtggccattgtgcattataaccagcctgagtggttgagcgactttctttattacgcggagttcatttttctcggtctgtttatgtctgagatgttcataaagatgtatgggttgggtaccagaccgtacttccacagctcctttaattgctttgactgtggagtcatcattggctctatcttcgaggtgatttgggccgtgattaaacccggaacctcctttggaatcagtgtgctccgagccttgcgtcttcttcgtatctttaaggtgaccaagtattgggcttcccttcgcaacttggtcgtctcccttctcaactctatgaaatctattatttccttattgttcctgttattcctgtttatcgttgtgttcgccctgttagggatgcagttattcggagggcagttcaatttcgacgagggcacccccccaactaatttcgatacatttcccgctgccattatgacagtctttcaaatcctgaccggagaggattggaacgaagtgatgtatgacggtatcaagagtcaagggggagtgcaaggcggaatggtattcagcatctacttcattgtgcttaccttgttcggaaactatactctgctgaacgtgttccttgcaatcgccgtcgataacctcgcaaacgcccaggagctcaccaaggacgaacaggaggaggaagaggcggctaatcagaaattggcactccagaaagctaaagaggtcgcagaggtatcgcctcttagcgcagccaacatgtctatcgcggttaaagagcaacagaagaatcaaaagccagctaaatctgtttgggagcagcggacaagtgaaatgagaaaacaaaatctcctagcttccagagaggccctgtacaacgaaatggaccctgacgagcgatggaaagccgcttatacccgccatctcaggccagacatgaagacacacctggatcgccctctggtcgtggacccacaagaaaatcgcaataacaatactaacaaaagccgggctgccgagcccaccgtggatcagagactgggacagcaaagagccgaagacttccttagaaagcaggctcgatatcatgatcgcgcaagagacccctcgggttctgccggtctggacgcacgtcgaccttgggccggtagccaagaagccgaactctcccgggagggcccttacgggagggagtcagatcatcacgcgcgagagggaagtctggaacagccaggattttgggaaggtgaagctgagcggggtaaggctggcgatcctcatagaaggcacgtacaccgtcagggtggaagtcgggaaagtcgctccggcagccccaggaccggtgctgatggagaacaccgcagacaccgggcacacagacggccaggcgaggagggaccggaagacaaggccgagcggagagcccgacaccgcgagggctcgcggccagccagaggtggtgaaggtgagggggagggccctgacggaggtgaaagaagaagaagacacaggcacggagcaccagcgacctatgaaggggatgccagaagggaagataaagagaggagacacaggaggcgcaaggagaaccagggttctggagttcccgtgtctggccctaacctttcgaccacgcggcctattcagcaagacttaggacggcaagaccctccactcgcagaagacatcgataacatgaagaacaataagttagctacagcagaatcagcggctccacatggcagtcttggtcacgcaggactgccccaaagccctgcaaagatgggtaactccactgaccctgggccaatgctggcaatcccagctatggccactaatccccagaacgccgcttcacgtcggacacccaacaatcctggaaacccctccaatcctgggcctcctaaaacaccagagaattctctcatcgtgactaatcctagcggtacacagaccaacagtgccaaaaccgctcggaagcctgaccacactaccgtggatatacctcctgcctgtccaccacctctcaatcatactgttgtacaggttaataagaatgctaatcccgatccccttcccaagaaggaggaagagaaaaaggaagaagaggaggatgacagaggagaagatggacccaaacccatgccaccttattcgtccatgtttattctgtccaccaccaatcccctcagacggttgtgccattatatcctcaatctgagatacttcgaaatgtgtattctgatggtgattgctatgagttctatcgccttggccgctgaggatccagtgcaacccaacgcaccccgtaacaatgtgctgcgttattttgactatgtgttcaccggcgtgtttacatttgaaatggtaataaagatgatcgaccttggattggtcttacaccaaggtgcttactttagagacctatggaatatcctggacttcatagttgtgagtggcgctttggtggccttcgcattcactggcaatagtaagggtaaggatataaacactattaagtcgttgcgtgttcttagggtgctacgccctctgaaaaccatcaaacgactcccaaagctcaaggccgtgtttgattgcgtggtgaattcactgaaaaatgtcttcaatatcctgatcgtgtacatgctctttatgttcatattcgcagtggtcgccgtgcaattgtttaagggcaaattcttccattgcactgacgaatccaaggagttcgaaaaggattgccggggtaagtatctgctgtacgagaaaaatgaggtcaaggctcgagatcgggagtggaagaagtacgagtttcactatgacaatgtactatgggcactgctgaccctgttcacggtcagcactggggagggatggccccaggtactaaagcatagtgtagacgcaacatttgaaaatcagggaccgtcacctgggtatagaatggagatgtcaatcttctacgtcgtctattttgtggtgttccctttttttttcgtaaatattttcgttgctcttattattatcacgtttcaggaacagggagacaaaatgatggaggagtacagcctcgagaagaacgagagggcatgcattgattttgcaatttctgctaaaccacttacgcggcatatgccccagaataaacagtcctttcaataccgtatgtggcagttcgtggtctcacctccctttgagtataccatcatggccatgatcgctttaaataccattgtgttgatgatgaagttctacggggcttctgtggcttacgaaaacgcactgcgtgtgtttaacattgttttcaccagtctgttctccctcgaatgtgtgctgaaagtaatggctttcggaatcctgaactatttcagggacgcttggaatatttttgatttcgtaactgtgctggggagcatcacagacatactcgttactgaatttggaaacaattttatcaacttaagctttctgcggctctttagggctgccagattgattaaactgctgcgacagggatacaccataagaatcctcctctggacctttgtgcaatcatttaaggcactcccatatgtctgccttctcattgcgatgctattcttcatatatgcaataatcggaatgcaggtctttggaaacatcgggattgatgtggaggatgaagactctgatgaagacgagtttcagatcaccgagcataacaactttagaacgttctttcaggccctgatgcttctgttccgttcagcgactggcgaagcctggcataatatcatgctgtcatgcttatctgggaagccatgcgacaagaattccggcatcttaaccagggaatgtggtaacgagtttgcctatttctatttcgtgtccttcattttcctctgttcattcttaatgctgaatcttttcgtggctgtgattatggacaactttgagtatctgacccgagactccagtattttgggcccacatcacctcgatgagtacgtgagagtttgggcagagtacgaccctgcagcatggggacgtatgccatacttagacatgtaccagatgcttcgtcatatgagtcccccactggggttgggaaaaaaatgcccagcacgagtagcctacaagaggctgctgaggatggatctgcccgtggccgatgacaacacggttcatttcaactccacgctgatggccctgatcaggactgccttggacataaaaatagcgaaggggggagcagacaaacagcagatggacgcggagctccgaaaggagatgatggctatttggccaaatctgagtcagaagaccttagatctgttggtaactccccacaagagcacggacttgactgtcggtaagatctatgccgctatgatgattatggagtattatcgccaatctaaagcaaaaaagttacaggccatgcgggaagaacaagatagaacgcctcttatgtttcagagaatggagcctcctagccccactcaggagggcggtcctggccagaatgctttaccttcaacccagctggatcccggtggagctctgatggctcacgagtccgggttaaaagagtccccctcatgggtcactcagagagcacaggaaatgttccagaagactggcacctggagcccagagcaggggccacccaccgatatgcctaattctcagcctaactcccagagcgtggaaatgcgcgagatgggcagggatggatattccgactccgagcactaccttcctatggaaggacagggcagagctgcctcaatgcctagactgcccgctgaaaaccagcggaggcgtggccgacccaggggcaacaacttgagcactatcagtgacacaagtcccatgaagagatctgcttccgtcctaggcccaaaggcccgtcgcctcgacgattacagtctggaaagagtgcctccagaggaaaatcagcgccaccatcagaggagacgggatagatctcaccgggcatccgagaggagcctcgggcgttataccgatgtggataccgggctggggactgatctatccatgactacacagtcaggggatctgccttctaaggaaagagaccaggaacggggacggccaaaagacagaaaacatcgacagcatcatcaccatcaccaccatcaccaccacccacctccacccgataaagataggtacgcccaggagcggcctgaccacgggcgagccagggccagggaccaaaggtggagtcgaagtccctccgagggtagagaacatatggcccatagacaggggagtagctctgtgtcgggatctccagctccaagtacaagcggcacgagcacgccacgcagggggagaaggcagctacctcaaacgcctagcactccgagaccccatgtctcatacagtcctgtgatacgtaaagcgggaggctctggccctccgcaacagcagcaacagcagcagcagcagcagcagcagcaggcagtggcgagacccggtcgagccgcaacttccggtcccaggcgatatccgggacccaccgccgaacctttggccggagacaggccgccaacaggcggacacagctccggcaggagcccacgcatggagagacgggtacctggtcccgcacggagtgagagtccccgagcctgcagacacggaggagcgagatggcccgcatcagggccacacgtgagcgagggtccaccgggtcctagacatcacggttattacaggggaagcgattacgatgaagccgatggcccagggtccggagggggtgaggaggcaatggccggtgcttacgatgcgccaccaccagttcggcatgcctccagtggcgcaactgggagatctccaaggactcccagagcttcgggaccagcgtgcgcaagtccctcccgacacggcagaagacttcctaatggatattatcccgcacacgggctggctagaccaagaggccctggatcacggaaaggcctgcacgagccatatagcgagagcgatgacgattggtgcta

SEQ ID NO: 44627 - DNA, 8359 bp, Artificial Sequence
  derived and/or modified sequence
atggcccgcttcggagacgagatgccggcccgctacgggggaggaggctccggggcagccgccggggtggtcgtgggcagcggaggcgggcgaggagccgggggcagccggcagggcgggcagcccggggcgcaaaggatgtacaagcagtcaatggcgcagagagcgcggaccatggcactctacaaccccatccccgtccgacagaactgcctcacggttaaccggtctctcttcctcttcagcgaagacaacgtggtgagaaaatacgccaaaaagatcaccgaatggccaccctttgaatatatgattttagccaccatcatagcgaattgcatcgtcctcgcactggagcagcatctgcctgatgatgacaagaccccgatgtctgaacggctggatgacacagaaccatacttcattggaattttttgtttcgaggctggaattaaaatcattgcccttgggtttgccttccacaaaggctcctacttgaggaatggctggaatgtcatggactttgtggtggtgctaacgggcatcttggcgacagttgggacggagtttgacctacggacgctgagggcagttcgagtgctgcggccgctcaagctggtgtctggaatcccaagtttacaagtcgtcctgaagtcgatcatgaaggcgatgatccctttgctgcagatcggcctcctcctattttttgcaatccttatttttgcaatcatagggttagaattttatatgggaaaatttcataccacctgctttgaagaggggacagatgacattcagggtgagtctccggctccatgtgggacagaagagcccgcccgcacctgccccaatgggaccaaatgtcagccctactgggaagggcccaacaacgggatcactcagttcgacaacatcctgtttgcagtgctgactgttttccagtgcataaccatggaagggtggactgatctcctctacaatagcaacgatgcctcagggaacacttggaactggttgtacttcatccccctcatcatcatcggctccttttttatgctgaaccttgtgctgggtgtgctgtcaggggagtttgccaaagaaagggaacgggtggagaaccggcgggcttttctgaagctgaggcggcaacaacagattgaacgtgagctcaatgggtacatggagtggatctcaaaagcagaagaggtgatcctcgccgaggatgaaactgacggggagcagaggcatccctttgatggagctctgcggagaaccaccataaagaaaagcaagacagatttgctcaaccccgaagaggctgaggatcagctggctgatatagcctctgtgggttctcccttcgcccgagccagcattaaaagtgccaagctggagaactcgaccttttttcacaaaaaggagaggaggatgcgtttctacatccgccgcatggtcaaaactcaggccttctactggactgtactcagtttggtagctctcaacacgctgtgtgttgctattgttcactacaaccagcccgagtggctctccgacttcctttactatgcagaattcattttcttaggactctttatgtccgaaatgtttataaaaatgtacgggcttgggacgcggccttacttccactcttccttcaactgctttgactgtggggttatcattgggagcatcttcgaggtcatctgggctgtcataaaacctggcacatcctttggaatcagcgtgttacgagccctcaggttattgcgtattttcaaagtcacaaagtactgggcatctctcagaaacctggtcgtctctctcctcaactccatgaagtccatcatcagcctgttgtttctccttttcctgttcattgtcgtcttcgcccttttgggaatgcaactcttcggcggccagtttaatttcgatgaagggactcctcccaccaacttcgatacttttccagcagcaataatgacggtgtttcagatcctgacgggcgaagactggaacgaggtcatgtacgacgggatcaagtctcaggggggcgtgcagggcggcatggtgttctccatctatttcattgtactgacgctctttgggaactacaccctcctgaatgtgttcttggccatcgctgtggacaatctggccaacgcccaggagctcaccaaggacgagcaagaggaagaagaagcagcgaaccagaaacttgccctacagaaagccaaggaggtggcagaagtgagtcctctgtccgcggccaacatgtctatagctgtgaaagagcaacagaagaatcaaaagccagccaagtccgtgtgggagcagcggaccagtgagatgcgaaagcagaacttgctggccagccgggaggccctgtataacgaaatggacccggacgagcgctggaaggctgcctacacgcggcacctgcggccagacatgaagacgcacttggaccggccgctggtggtggacccgcaggagaaccgcaacaacaacaccaacaagagccgggcggccgagcccaccgtggaccagcgcctcggccagcagcgcgccgaggacttcctcaggaaacaggcccgctaccacgatcgggcccgggaccccagcggctcggcgggcctggacgcacggaggccctgggcgggaagccaggaggccgagctgagccgggagggaccctacggccgcgagtcggaccaccacgcccgggagggcagcctggagcaacccgggttctgggagggcgaggccgagcgaggcaaggccggggacccccaccggaggcacgtgcaccggcaggggggcagcagggagagccgcagcgggtccccgcgcacgggcgcggacggggagcatcgacgtcatcgcgcgcaccgcaggcccggggaggagggtccggaggacaaggcggagcggagggcgcggcaccgcgagggcagccggccggcccggggcggcgagggcgagggcgagggccccgacgggggcgagcgcaggagaaggcaccggcatggcgctccagccacgtacgagggggacgcgcggagggaggacaaggagcggaggcatcggaggaggaaagagaaccagggctccggggtccctgtgtcgggccccaacctgtcaaccacccggccaatccagcaggacctgggccgccaagacccacccctggcagaggatattgacaacatgaagaacaacaagctggccaccgcggagtcggccgctccccacggcagccttggccacgccggcctgccccagagcccagccaagatgggaaacagcaccgaccccggccccatgctggccatccctgccatggccaccaacccccagaacgccgccagccgccggacgcccaacaacccggggaacccatccaatcccggcccccccaagacccccgagaatagccttatcgtcaccaaccccagcggcacccagaccaattcagctaagactgccaggaaacccgaccacaccacagtggacatccccccagcctgcccaccccccctcaaccacaccgtcgtacaagtgaacaaaaacgccaacccagacccactgccaaaaaaagaggaagagaagaaggaggaggaggaagacgaccgtggggaagacggccctaagccaatgcctccctatagctccatgttcatcctgtccacgaccaacccccttcgccgcctgtgccattacatcctgaacctgcgctactttgagatgtgcatcctcatggtcattgccatgagcagcatcgccctggccgccgaggaccctgtgcagcccaacgcacctcggaacaacgtgctgcgatactttgactacgtttttacaggcgtctttacctttgagatggtgatcaagatgattgacctggggctcgtcctgcatcagggtgcctacttccgtgacctctggaatattctcgacttcatagtggtcagtggggccctggtagcctttgccttcactggcaatagcaaaggaaaagacatcaacacgattaaatccctccgagtcctccgggtgctacgacctcttaaaaccatcaagcggctgccaaagctcaaggctgtgtttgactgtgtggtgaactcacttaaaaacgtcttcaacatcctcatcgtctacatgctattcatgttcatcttcgccgtggtggctgtgcagctcttcaaggggaaattcttccactgcactgacgagtccaaagagtttgagaaagattgtcgaggcaaatacctcctctacgagaagaatgaggtgaaggcgcgagaccgggagtggaagaagtatgaattccattacgacaatgtgctgtgggctctgctgaccctcttcaccgtgtccacgggagaaggctggccacaggtcctcaagcattcggtggacgccacctttgagaaccagggccccagccccgggtaccgcatggagatgtccattttctacgtcgtctactttgtggtgttccccttcttctttgtcaatatctttgtggccttgatcatcatcaccttccaggagcaaggggacaagatgatggaggaatacagcctggagaaaaatgagagggcctgcattgatttcgccatcagcgccaagccgctgacccgacacatgccgcagaacaagcagagcttccagtaccgcatgtggcagttcgtggtgtctccgcctttcgagtacacgatcatggccatgatcgccctcaacaccatcgtgcttatgatgaagttctatggggcttctgttgcttatgaaaatgccctgcgggtgttcaacatcgtcttcacctccctcttctctctggaatgtgtgctgaaagtcatggcttttgggattctgaattatttccgcgatgcctggaacatcttcgactttgtgactgttctgggcagcatcaccgatatcctcgtgactgagtttgggaataacttcatcaacctgagctttctccgcctcttccgagctgcccggctcatcaaacttctccgtcagggttacaccatccgcattcttctctggacctttgtgcagtccttcaaggccctgccttatgtctgtctgctgatcgccatgctcttcttcatctatgccatcattgggatgcaggtgtttggtaacattggcatcgacgtggaggacgaggacagtgatgaagatgagttccaaatcactgagcacaataacttccggaccttcttccaggccctcatgcttctcttccggagtgccaccggggaagcttggcacaacatcatgctttcctgcctcagcgggaaaccgtgtgataagaactctggcatcctgactcgagagtgtggcaatgaatttgcttatttttactttgtttccttcatcttcctctgctcgtttctgatgctgaatctctttgtcgccgtcatcatggacaactttgagtacctcacccgagactcctccatcctgggcccccaccacctggatgagtacgtgcgtgtctgggccgagtatgaccccgcagcttggggccgcatgccttacctggacatgtatcagatgctgagacacatgtctccgcccctgggtctggggaagaagtgtccggccagagtggcttacaagcggcttctgcggatggacctgcccgtcgcagatgacaacaccgtccacttcaattccaccctcatggctctgatccgcacagccctggacatcaagattgccaagggaggagccgacaaacagcagatggacgctgagctgcggaaggagatgatggcgatttggcccaatctgtcccagaagacgctagacctgctggtcacacctcacaagtccacggacctcaccgtggggaagatctacgcagccatgatgatcatggagtactaccggcagagcaaggccaagaagctgcaggccatgcgcgaggagcaggaccggacacccctcatgttccagcgcatggagcccccgtccccaacgcaggaagggggacctggccagaacgccctcccctccacccagctggacccaggaggagccctgatggctcacgaaagcggcctcaaggagagcccgtcctgggtgacccagcgtgcccaggagatgttccagaagacgggcacatggagtccggaacaaggcccccctaccgacatgcccaacagccagcctaactctcagtccgtggagatgcgagagatgggcagagatggctactccgacagcgagcactacctccccatggaaggccagggccgggctgcctccatgccccgcctccctgcagagaaccagaccatctcagacaccagccccatgaagcgttcagcctccgtgctgggccccaaggcccgacgcctggacgattactcgctggagcgggtcccgcccgaggagaaccagcggcaccaccagcggcgccgcgaccgcagccaccgcgcctctgagcgctccctgggccgctacaccgatgtggacacaggcttggggacagacctgagcatgaccacccaatccggggacctgccgtcgaaggagcgggaccaggagcggggccggcccaaggatcggaagcatcgacagcaccaccaccaccaccaccaccaccaccatcccccgccccccgacaaggaccgctatgcccaggaacggccggaccacggccgggcacgggctcgggaccagcgctggtcccgctcgcccagcgagggccgagagcacatggcgcaccggcagggcagtagttccgtaagtggaagcccagccccctcaacatctggtaccagcactccgcggcggggccgccgccagctcccccagaccccctccaccccccggccacacgtgtcctattcccctgtgatccgtaaggccggcggctcggggcccccgcagcagcagcagcagcagcagcagcagcagcagcagcaggcggtggccaggccgggccgggcggccaccagcggccctcggaggtacccaggccccacggccgagcctctggccggagatcggccgcccacggggggccacagcagcggccgctcgcccaggatggagaggcgggtcccaggcccggcccggagcgagtcccccagggcctgtcgacacggcggggcccggtggccggcatctggcccgcacgtgtccgaggggcccccgggtccccggcaccatggctactaccggggctccgactacgacgaggccgatggcccgggcagcgggggcggcgaggaggccatggccggggcctacgacgcgccaccccccgtacgacacgcgtcctcgggcgccaccgggcgctcgcccaggactccccgggcctcgggcccggcctgcgcctcgccttctcggcacggccggcgactccccaacggctactacccggcgcacggactggccaggccccgcgggccgggctccaggaagggcctgcacgaaccctacagcgagagtgacgatgattggtgctaagcccgggcgaggtggcgcccgcccggccccccacgcaccccacgcacacaccccacccgaggagccgcgcagaggccgcgggggcccagcacagagggcccgggagagggccagccgggagaccccagactctggagaggccagggctgggccacaagggtgtcccgcagagaccctcggccaaaagagaccctcctgggcagccacggcgccccccaaccagccccgatccccccacccacgacaggggctctcgggtgggaggcagggagcagacaaaccacacagccaagggatttgaattaactcagccatttttggagaactttggggaacatgaaaaaaaaaaaaaaaaaaaaaaaaaaaaacatttttaaaagaaaaaacggggagaaaaaaatagcttctattgatgagttttatcatctcaattgaatctttcctttccctgatgaagacagctggtggccgagtgcggcaaagaagccagaaggaaccagaatcccagtgccctacacccaccaccagacacactcacacccacacacgttctcagacacacacaagagtgcttgccggttataccaaaccctactattactgcctgcagaaatcaatttaaaaaaataataataacaataaacaattttaaaaaggacaaaaaaattaatgattgagaaaagaggcatttttttctgacatttggtcctgcttgaaacaacaaaagaagaagaaaaacccaccatcaccaccgattcctttgcttcttttttccttttttcctaccttgtttgaaaaccgtgggcttgggactgtgaattattgcatgacattcaaaaagaaaaaaaaaataaaaaaaagttgaatcaaa

SEQ ID NO: 44628 - DNA, 8628 bp, Artificial Sequence
  derived and/or modified sequence
gatgtcccgagctgctatccccggctcggcccgggcagccgccttctgagcccccgacccgaggcgccgagccgccgccgcccgatgggctgggccgtggagcgtctccgcagtcgtagctccagccgccgcgctcccagccccggcagcctcagcatcagcggcggcggcggcggcggcggcgtcttccgcatcgttcgccgcagcgtaacccggagccctttgctctttgcagaatggcccgcttcggagacgagatgccggcccgctacgggggaggaggctccggggcagccgccggggtggtcgtgggcagcggaggcgggcgaggagccgggggcagccggcagggcgggcagcccggggcgcaaaggatgtacaagcagtcaatggcgcagagagcgcggaccatggcactctacaaccccatccccgtccgacagaactgcctcacggttaaccggtctctcttcctcttcagcgaagacaacgtggtgagaaaatacgccaaaaagatcaccgaatggcctccctttgaatatatgattttagccaccatcatagcgaattgcatcgtcctcgcactggagcagcatctgcctgatgatgacaagaccccgatgtctgaacggctggatgacacagaaccatacttcattggaattttttgtttcgaggctggaattaaaatcattgcccttgggtttgccttccacaaaggctcctacttgaggaatggctggaatgtcatggactttgtggtggtgctaacgggcatcttggcgacagttgggacggagtttgacctacggacgctgagggcagttcgagtgctgcggccgctcaagctggtgtctggaatcccaagtttacaagtcgtcctgaagtcgatcatgaaggcgatgatccctttgctgcagatcggcctcctcctattttttgcaatccttatttttgcaatcatagggttagaattttatatgggaaaatttcataccacctgctttgaagaggggacagatgacattcagggtgagtctccggctccatgtgggacagaagagcccgcccgcacctgccccaatgggaccaaatgtcagccctactgggaagggcccaacaacgggatcactcagttcgacaacatcctgtttgcagtgctgactgttttccagtgcataaccatggaagggtggactgatctcctctacaatagcaacgatgcctcagggaacacttggaactggttgtacttcatccccctcatcatcatcggctccttttttatgctgaaccttgtgctgggtgtgctgtcaggggagtttgccaaagaaagggaacgggtggagaaccggcgggcttttctgaagctgaggcggcaacaacagattgaacgtgagctcaatgggtacatggagtggatctcaaaagcagaagaggtgatcctcgccgaggatgaaactgacggggagcagaggcatccctttgatgctctgcggagaaccaccataaagaaaagcaagacagatttgctcaaccccgaagaggctgaggatcagctggctgatatagcctctgtgggttctcccttcgcccgagccagcattaaaagtgccaagctggagaactcgaccttttttcacaaaaaggagaggaggatgcgtttctacatccgccgcatggtcaaaactcaggccttctactggactgtactcagtttggtagctctcaacacgctgtgtgttgctattgttcactacaaccagcccgagtggctctccgacttcctttactatgcagaattcattttcttaggactctttatgtccgaaatgtttataaaaatgtacgggcttgggacgcggccttacttccactcttccttcaactgctttgactgtggggttatcattgggagcatcttcgaggtcatctgggctgtcataaaacctggcacatcctttggaatcagcgtgttacgagccctcaggttattgcgtattttcaaagtcacaaagtactgggcatctctcagaaacctggtcgtctctctcctcaactccatgaagtccatcatcagcctgttgtttctccttttcctgttcattgtcgtcttcgcccttttgggaatgcaactcttcggcggccagtttaatttcgatgaagggactcctcccaccaacttcgatacttttccagcagcaataatgacggtgtttcagatcctgacgggcgaagactggaacgaggtcatgtacgacgggatcaagtctcaggggggcgtgcagggcggcatggtgttctccatctatttcattgtactgacgctctttgggaactacaccctcctgaatgtgttcttggccatcgctgtggacaatctggccaacgcccaggagctcaccaaggacgagcaagaggaagaagaagcagcgaaccagaaacttgccctacagaaagccaaggaggtggcagaagtgagtcctctgtccgcggccaacatgtctatagctgtgaaagagcaacagaagaatcaaaagccagccaagtccgtgtgggagcagcggaccagtgagatgcgaaagcagaacttgctggccagccgggaggccctgtataacgaaatggacccggacgagcgctggaaggctgcctacacgcggcacctgcggccagacatgaagacgcacttggaccggccgctggtggtggacccgcaggagaaccgcaacaacaacaccaacaagagccgggcggccgagcccaccgtggaccagcgcctcggccagcagcgcgccgaggacttcctcaggaaacaggcccgctaccacgatcgggcccgggaccccagcggctcggcgggcctggacgcacggaggccctgggcgggaagccaggaggccgagctgagccgggagggaccctacggccgcgagtcggaccaccacgcccgggagggcagcctggagcaacccgggttctgggagggcgaggccgagcgaggcaaggccggggacccccaccggaggcacgtgcaccggcaggggggcagcagggagagccgcagcgggtccccgcgcacgggcgcggacggggagcatcgacgtcatcgcgcgcaccgcaggcccggggaggagggtccggaggacaaggcggagcggagggcgcggcaccgcgagggcagccggccggcccggggcggcgagggcgagggcgagggccccgacgggggcgagcgcaggagaaggcaccggcatggcgctccagccacgtacgagggggacgcgcggagggaggacaaggagcggaggcatcggaggaggaaagagaaccagggctccggggtccctgtgtcgggccccaacctgtcaaccacccggccaatccagcaggacctgggccgccaagacccacccctggcagaggatattgacaacatgaagaacaacaagctggccaccgcggagtcggccgctccccacggcagccttggccacgccggcctgccccagagcccagccaagatgggaaacagcaccgaccccggccccatgctggccatccctgccatggccaccaacccccagaacgccgccagccgccggacgcccaacaacccggggaacccatccaatcccggcccccccaagacccccgagaatagccttatcgtcaccaaccccagcggcacccagaccaattcagctaagactgccaggaaacccgaccacaccacagtggacatccccccagcctgcccaccccccctcaaccacaccgtcgtacaagtgaacaaaaacgccaacccagacccactgccaaaaaaagaggaagagaagaaggaggaggaggaagacgaccgtggggaagacggccctaagccaatgcctccctatagctccatgttcatcctgtccacgaccaacccccttcgccgcctgtgccattacatcctgaacctgcgctactttgagatgtgcatcctcatggtcattgccatgagcagcatcgccctggccgccgaggaccctgtgcagcccaacgcacctcggaacaacgtgctgcgatactttgactacgtttttacaggcgtctttacctttgagatggtgatcaagatgattgacctggggctcgtcctgcatcagggtgcctacttccgtgacctctggaatattctcgacttcatagtggtcagtggggccctggtagcctttgccttcactggcaatagcaaaggaaaagacatcaacacgattaaatccctccgagtcctccgggtgctacgacctcttaaaaccatcaagcggctgccaaagctcaaggctgtgtttgactgtgtggtgaactcacttaaaaacgtcttcaacatcctcatcgtctacatgctattcatgttcatcttcgccgtggtggctgtgcagctcttcaaggggaaattcttccactgcactgacgagtccaaagagtttgagaaagattgtcgaggcaaatacctcctctacgagaagaatgaggtgaaggcgcgagaccgggagtggaagaagtatgaattccattacgacaatgtgctgtgggctctgctgaccctcttcaccgtgtccacgggagaaggctggccacaggtcctcaagcattcggtggacgccacctttgagaaccagggccccagccccgggtaccgcatggagatgtccattttctacgtcgtctactttgtggtgttccccttcttctttgtcaatatctttgtggccttgatcatcatcaccttccaggagcaaggggacaagatgatggaggaatacagcctggagaaaaatgagagggcctgcattgatttcgccatcagcgccaagccgctgacccgacacatgccgcagaacaagcagagcttccagtaccgcatgtggcagttcgtggtgtctccgcctttcgagtacacgatcatggccatgatcgccctcaacaccatcgtgcttatgatgaagttctatggggcttctgttgcttatgaaaatgccctgcgggtgttcaacatcgtcttcacctccctcttctctctggaatgtgtgctgaaagtcatggcttttgggattctgaattatttccgcgatgcctggaacatcttcgactttgtgactgttctgggcagcatcaccgatatcctcgtgactgagtttgggaataacttcatcaacctgagctttctccgcctcttccgagctgcccggctcatcaaacttctccgtcagggttacaccatccgcattcttctctggacctttgtgcagtccttcaaggccctgccttatgtctgtctgctgatcgccatgctcttcttcatctatgccatcattgggatgcaggtgtttggtaacattggcatcgacgtggaggacgaggacagtgatgaagatgagttccaaatcactgagcacaataacttccggaccttcttccaggccctcatgcttctcttccggagtgccaccggggaagcttggcacaacatcatgctttcctgcctcagcgggaaaccgtgtgataagaactctggcatcctgactcgagagtgtggcaatgaatttgcttatttttactttgtttccttcatcttcctctgctcgtttctgatgctgaatctctttgtcgccgtcatcatggacaactttgagtacctcacccgagactcctccatcctgggcccccaccacctggatgagtacgtgcgtgtctgggccgagtatgaccccgcagcttggggccgcatgccttacctggacatgtatcagatgctgagacacatgtctccgcccctgggtctggggaagaagtgtccggccagagtggcttacaagcggcttctgcggatggacctgcccgtcgcagatgacaacaccgtccacttcaattccaccctcatggctctgatccgcacagccctggacatcaagattgccaagggaggagccgacaaacagcagatggacgctgagctgcggaaggagatgatggcgatttggcccaatctgtcccagaagacgctagacctgctggtcacacctcacaagtccacggacctcaccgtggggaagatctacgcagccatgatgatcatggagtactaccggcagagcaaggccaagaagctgcaggccatgcgcgaggagcaggaccggacacccctcatgttccagcgcatggagcccccgtccccaacgcaggaagggggacctggccagaacgccctcccctccacccagctggacccaggaggagccctgatggctcacgaaagcggcctcaaggagagcccgtcctgggtgacccagcgtgcccaggagatgttccagaagacgggcacatggagtccggaacaaggcccccctaccgacatgcccaacagccagcctaactctcagtccgtggagatgcgagagatgggcagagatggctactccgacagcgagcactacctccccatggaaggccagggccgggctgcctccatgccccgcctccctgcagagaaccagaggagaaggggccggccacgtgggaataacctcagtaccatctcagacaccagccccatgaagcgttcagcctccgtgctgggccccaaggcccgacgcctggacgattactcgctggagcgggtcccgcccgaggagaaccagcggcaccaccagcggcgccgcgaccgcagccaccgcgcctctgagcgctccctgggccgctacaccgatgtggacacaggcttggggacagacctgagcatgaccacccaatccggggacctgccgtcgaaggagcgggaccaggagcggggccggcccaaggatcggaagcatcgacagcaccaccaccaccaccaccaccaccaccatcccccgccccccgacaaggaccgctatgcccaggaacggccggaccacggccgggcacgggctcgggaccagcgctggtcccgctcgcccagcgagggccgagagcacatggcgcaccggcagggcagtagttccgtaagtggaagcccagccccctcaacatctggtaccagcactccgcggcggggccgccgccagctcccccagaccccctccaccccccggccacacgtgtcctattcccctgtgatccgtaaggccggcggctcggggcccccgcagcagcagcagcagcagcagcagcagcagcagcagcaggcggtggccaggccgggccgggcggccaccagcggccctcggaggtacccaggccccacggccgagcctctggccggagatcggccgcccacggggggccacagcagcggccgctcgcccaggatggagaggcgggtcccaggcccggcccggagcgagtcccccagggcctgtcgacacggcggggcccggtggccggcatctggcccgcacgtgtccgaggggcccccgggtccccggcaccatggctactaccggggctccgactacgacgaggccgatggcccgggcagcgggggcggcgaggaggccatggccggggcctacgacgcgccaccccccgtacgacacgcgtcctcgggcgccaccgggcgctcgcccaggactccccgggcctcgggcccggcctgcgcctcgccttctcggcacggccggcgactccccaacggctactacccggcgcacggactggccaggccccgcgggccgggctccaggaagggcctgcacgaaccctacagcgagagtgacgatgattggtgctaagcccgggcgaggtggcgcccgcccggccccccacgcaccccacgcacacaccccacccgaggagccgcgcagaggccgcgggggcccagcacagagggcccgggagagggccagccgggagaccccagactctggagaggccagggctgggccacaagggtgtcccgcagagaccctcggccaaaagagaccctcctgggcagccacggcgccccccaaccagccccgatccccccacccacgacaggggctctcgggtgggaggcagggagcagacaaaccacacagccaagggatttgaattaactcagccatttttggagaactttggggaacatgaaaaaaaaaaaaaaaaaaaaaaaaaaaaacatttttaaaagaaaaaacggggagaaaaaaatagcttctattgatgagttttatcatctcaattgaatctttcctttccctgatgaagacagctggtggccgagtgcggcaaagaagccagaaggaaccagaatcccagtgccctacacccaccaccagacacactcacacccacacacgttctcagacacacacaagagtgcttgccggttataccaaaccctactattactgcctgcagaaatcaatttaaaaaaataataataacaataaacaattttaaaaaggacaaaaaaattaatgattgagaaaagaggcatttttttctgacatttggtcctgcttgaaacaacaaaagaagaagaaaaacccaccatcaccaccgattcctttgcttcttttttccttttttcctaccttgtttgaaaaccgtgggcttgggactgtgaattattgcatgacattcaaaaagaaaaaaaaaataaaaaaaagttgaatcaaa

SEQ ID NO: 44629 - DNA, 7488 bp, Artificial Sequence
  derived and/or modified sequence
atggccagattcggcgacgagatgcccgccagatacggcggcggcggcagcggcgccgccgccggcgtggtggtgggcagcggcggcggcagaggcgccggcggcagcagacagggcggccagcccggcgcccagagaatgtacaagcagagcatggcccagagagccagaaccatggccctgtacaaccccatccccgtgagacagaactgcctgaccgtgaacagaagcctgttcctgttcagcgaggacaacgtggtgagaaagtacgccaagaagatcaccgagtggccccccttcgagtacatgatcctggccaccatcatcgccaactgcatcgtgctggccctggagcagcacctgcccgacgacgacaagacccccatgagcgagagactggacgacaccgagccctacttcatcggcatcttctgcttcgaggccggcatcaagatcatcgccctgggcttcgccttccacaagggcagctacctgagaaacggctggaacgtgatggacttcgtggtggtgctgaccggcatcctggccaccgtgggcaccgagttcgacctgagaaccctgagagccgtgagagtgctgagacccctgaagctggtgagcggcatccccagcctgcaggtggtgctgaagagcatcatgaaggccatgatccccctgctgcagatcggcctgctgctgttcttcgccatcctgatcttcgccatcatcggcctggagttctacatgggcaagttccacaccacctgcttcgaggagggcaccgacgacatccagggcgagagccccgccccctgcggcaccgaggagcccgccagaacctgccccaacggcaccaagtgccagccctactgggagggccccaacaacggcatcacccagttcgacaacatcctgttcgccgtgctgaccgtgttccagtgcatcaccatggagggctggaccgacctgctgtacaacagcaacgacgccagcggcaacacctggaactggctgtacttcatccccctgatcatcatcggcagcttcttcatgctgaacctggtgctgggcgtgctgagcggcgagttcgccaaggagagagagagagtggagaacagaagagccttcctgaagctgagaagacagcagcagatcgagagagagctgaacggctacatggagtggatcagcaaggccgaggaggtgatcctggccgaggacgagaccgacggcgagcagagacaccccttcgacggcgccctgagaagaaccaccatcaagaagagcaagaccgacctgctgaaccccgaggaggccgaggaccagctggccgacatcgccagcgtgggcagccccttcgccagagccagcatcaagagcgccaagctggagaacagcaccttcttccacaagaaggagagaagaatgagattctacatcagaagaatggtgaagacccaggccttctactggaccgtgctgagcctggtggccctgaacaccctgtgcgtggccatcgtgcactacaaccagcccgagtggctgagcgacttcctgtactacgccgagttcatcttcctgggcctgttcatgagcgagatgttcatcaagatgtacggcctgggcaccagaccctacttccacagcagcttcaactgcttcgactgcggcgtgatcatcggcagcatcttcgaggtgatctgggccgtgatcaagcccggcaccagcttcggcatcagcgtgctgagagccctgagactgctgagaatcttcaaggtgaccaagtactgggccagcctgagaaacctggtggtgagcctgctgaacagcatgaagagcatcatcagcctgctgttcctgctgttcctgttcatcgtggtgttcgccctgctgggcatgcagctgttcggcggccagttcaacttcgacgagggcaccccccccaccaacttcgacaccttccccgccgccatcatgaccgtgttccagatcctgaccggcgaggactggaacgaggtgatgtacgacggcatcaagagccagggcggcgtgcagggcggcatggtgttcagcatctacttcatcgtgctgaccctgttcggcaactacaccctgctgaacgtgttcctggccatcgccgtggacaacctggccaacgcccaggagctgaccaaggacgagcaggaggaggaggaggccgccaaccagaagctggccctgcagaaggccaaggaggtggccgaggtgagccccctgagcgccgccaacatgagcatcgccgtgaaggagcagcagaagaaccagaagcccgccaagagcgtgtgggagcagagaaccagcgagatgagaaagcagaacctgctggccagcagagaggccctgtacaacgagatggaccccgacgagagatggaaggccgcctacaccagacacctgagacccgacatgaagacccacctggacagacccctggtggtggacccccaggagaacagaaacaacaacaccaacaagagcagagccgccgagcccaccgtggaccagagactgggccagcagagagccgaggacttcctgagaaagcaggccagataccacgacagagccagagaccccagcggcagcgccggcctggacgccagaagaccctgggccggcagccaggaggccgagctgagcagagagggcccctacggcagagagagcgaccaccacgccagagagggcagcctggagcagcccggcttctgggagggcgaggccgagagaggcaaggccggcgacccccacagaagacacgtgcacagacagggcggcagcagagagagcagaagcggcagccccagaaccggcgccgacggcgagcacagaagacacagagcccacagaagacccggcgaggagggccccgaggacaaggccgagagaagagccagacacagagagggcagcagacccgccagaggcggcgagggcgagggcgagggccccgacggcggcgagagaagaagaagacacagacacggcgcccccgccacctacgagggcgacgccagaagagaggacaaggagagaagacacagaagaagaaaggagaaccagggcagcggcgtgcccgtgagcggccccaacctgagcaccaccagacccatccagcaggacctgggcagacaggacccccccctggccgaggacatcgacaacatgaagaacaacaagctggccaccgccgagagcgccgccccccacggcagcctgggccacgccggcctgccccagagccccgccaagatgggcaacagcaccgaccccggccccatgctggccatccccgccatggccaccaacccccagaacgccgccagcagaagaacccccaacaaccccggcaaccccagcaaccccggcccccccaagacccccgagaacagcctgatcgtgaccaaccccagcggcacccagaccaacagcgccaagaccgccagaaagcccgaccacaccaccgtggacatcccccccgcctgccccccccccctgaaccacaccgtggtgcaggtgaacaagaacgccaaccccgaccccctgcccaagaaggaggaggagaagaaggaggaggaggaggacgacagaggcgaggacggccccaagcccatgcccccctacagcagcatgttcatcctgagcaccaccaaccccctgagaagactgtgccactacatcctgaacctgagatacttcgagatgtgcatcctgatggtgatcgccatgagcagcatcgccctggccgccgaggaccccgtgcagcccaacgcccccagaaacaacgtgctgagatacttcgactacgtgttcaccggcgtgttcaccttcgagatggtgatcaagatgatcgacctgggcctggtgctgcaccagggcgcctacttcagagacctgtggaacatcctggacttcatcgtggtgagcggcgccctggtggccttcgccttcaccggcaacagcaagggcaaggacatcaacaccatcaagagcctgagagtgctgagagtgctgagacccctgaagaccatcaagagactgcccaagctgaaggccgtgttcgactgcgtggtgaacagcctgaagaacgtgttcaacatcctgatcgtgtacatgctgttcatgttcatcttcgccgtggtggccgtgcagctgttcaagggcaagttcttccactgcaccgacgagagcaaggagttcgagaaggactgcagaggcaagtacctgctgtacgagaagaacgaggtgaaggccagagacagagagtggaagaagtacgagttccactacgacaacgtgctgtgggccctgctgaccctgttcaccgtgagcaccggcgagggctggccccaggtgctgaagcacagcgtggacgccaccttcgagaaccagggccccagccccggctacagaatggagatgagcatcttctacgtggtgtacttcgtggtgttccccttcttcttcgtgaacatcttcgtggccctgatcatcatcaccttccaggagcagggcgacaagatgatggaggagtacagcctggagaagaacgagagagcctgcatcgacttcgccatcagcgccaagcccctgaccagacacatgccccagaacaagcagagcttccagtacagaatgtggcagttcgtggtgagcccccccttcgagtacaccatcatggccatgatcgccctgaacaccatcgtgctgatgatgaagttctacggcgccagcgtggcctacgagaacgccctgagagtgttcaacatcgtgttcaccagcctgttcagcctggagtgcgtgctgaaggtgatggccttcggcatcctgaactacttcagagacgcctggaacatcttcgacttcgtgaccgtgctgggcagcatcaccgacatcctggtgaccgagttcggcaacaacttcatcaacctgagcttcctgagactgttcagagccgccagactgatcaagctgctgagacagggctacaccatcagaatcctgctgtggaccttcgtgcagagcttcaaggccctgccctacgtgtgcctgctgatcgccatgctgttcttcatctacgccatcatcggcatgcaggtgttcggcaacatcggcatcgacgtggaggacgaggacagcgacgaggacgagttccagatcaccgagcacaacaacttcagaaccttcttccaggccctgatgctgctgttcagaagcgccaccggcgaggcctggcacaacatcatgctgagctgcctgagcggcaagccctgcgacaagaacagcggcatcctgaccagagagtgcggcaacgagttcgcctacttctacttcgtgagcttcatcttcctgtgcagcttcctgatgctgaacctgttcgtggccgtgatcatggacaacttcgagtacctgaccagagacagcagcatcctgggcccccaccacctggacgagtacgtgagagtgtgggccgagtacgaccccgccgcctggggcagaatgccctacctggacatgtaccagatgctgagacacatgagcccccccctgggcctgggcaagaagtgccccgccagagtggcctacaagagactgctgagaatggacctgcccgtggccgacgacaacaccgtgcacttcaacagcaccctgatggccctgatcagaaccgccctggacatcaagatcgccaagggcggcgccgacaagcagcagatggacgccgagctgagaaaggagatgatggccatctggcccaacctgagccagaagaccctggacctgctggtgaccccccacaagagcaccgacctgaccgtgggcaagatctacgccgccatgatgatcatggagtactacagacagagcaaggccaagaagctgcaggccatgagagaggagcaggacagaacccccctgatgttccagagaatggagccccccagccccacccaggagggcggccccggccagaacgccctgcccagcacccagctggaccccggcggcgccctgatggcccacgagagcggcctgaaggagagccccagctgggtgacccagagagcccaggagatgttccagaagaccggcacctggagccccgagcagggcccccccaccgacatgcccaacagccagcccaacagccagagcgtggagatgagagagatgggcagagacggctacagcgacagcgagcactacctgcccatggagggccagggcagagccgccagcatgcccagactgcccgccgagaaccagaccatcagcgacaccagccccatgaagagaagcgccagcgtgctgggccccaaggccagaagactggacgactacagcctggagagagtgccccccgaggagaaccagagacaccaccagagaagaagagacagaagccacagagccagcgagagaagcctgggcagatacaccgacgtggacaccggcctgggcaccgacctgagcatgaccacccagagcggcgacctgcccagcaaggagagagaccaggagagaggcagacccaaggacagaaagcacagacagcaccaccaccaccaccaccaccaccaccacccccccccccccgacaaggacagatacgcccaggagagacccgaccacggcagagccagagccagagaccagagatggagcagaagccccagcgagggcagagagcacatggcccacagacagggcagcagcagcgtgagcggcagccccgcccccagcaccagcggcaccagcacccccagaagaggcagaagacagctgccccagacccccagcacccccagaccccacgtgagctacagccccgtgatcagaaaggccggcggcagcggccccccccagcagcagcagcagcagcagcagcagcagcagcagcaggccgtggccagacccggcagagccgccaccagcggccccagaagataccccggccccaccgccgagcccctggccggcgacagaccccccaccggcggccacagcagcggcagaagccccagaatggagagaagagtgcccggccccgccagaagcgagagccccagagcctgcagacacggcggcgccagatggcccgccagcggcccccacgtgagcgagggcccccccggccccagacaccacggctactacagaggcagcgactacgacgaggccgacggccccggcagcggcggcggcgaggaggccatggccggcgcctacgacgcccccccccccgtgagacacgccagcagcggcgccaccggcagaagccccagaacccccagagccagcggccccgcctgcgccagccccagcagacacggcagaagactgcccaacggctactaccccgcccacggcctggccagacccagaggccccggcagcagaaagggcctgcacgagccctacagcgagagcgacgacgactggtgctag

SEQ ID NO: 44630 - DNA, 7521 bp, Artificial Sequence
  derived and/or modified sequence
atggccagattcggcgacgagatgcccgccagatacggcggcggcggcagcggcgccgccgccggcgtggtggtgggcagcggcggcggcagaggcgccggcggcagcagacagggcggccagcccggcgcccagagaatgtacaagcagagcatggcccagagagccagaaccatggccctgtacaaccccatccccgtgagacagaactgcctgaccgtgaacagaagcctgttcctgttcagcgaggacaacgtggtgagaaagtacgccaagaagatcaccgagtggccccccttcgagtacatgatcctggccaccatcatcgccaactgcatcgtgctggccctggagcagcacctgcccgacgacgacaagacccccatgagcgagagactggacgacaccgagccctacttcatcggcatcttctgcttcgaggccggcatcaagatcatcgccctgggcttcgccttccacaagggcagctacctgagaaacggctggaacgtgatggacttcgtggtggtgctgaccggcatcctggccaccgtgggcaccgagttcgacctgagaaccctgagagccgtgagagtgctgagacccctgaagctggtgagcggcatccccagcctgcaggtggtgctgaagagcatcatgaaggccatgatccccctgctgcagatcggcctgctgctgttcttcgccatcctgatcttcgccatcatcggcctggagttctacatgggcaagttccacaccacctgcttcgaggagggcaccgacgacatccagggcgagagccccgccccctgcggcaccgaggagcccgccagaacctgccccaacggcaccaagtgccagccctactgggagggccccaacaacggcatcacccagttcgacaacatcctgttcgccgtgctgaccgtgttccagtgcatcaccatggagggctggaccgacctgctgtacaacagcaacgacgccagcggcaacacctggaactggctgtacttcatccccctgatcatcatcggcagcttcttcatgctgaacctggtgctgggcgtgctgagcggcgagttcgccaaggagagagagagagtggagaacagaagagccttcctgaagctgagaagacagcagcagatcgagagagagctgaacggctacatggagtggatcagcaaggccgaggaggtgatcctggccgaggacgagaccgacggcgagcagagacaccccttcgacgccctgagaagaaccaccatcaagaagagcaagaccgacctgctgaaccccgaggaggccgaggaccagctggccgacatcgccagcgtgggcagccccttcgccagagccagcatcaagagcgccaagctggagaacagcaccttcttccacaagaaggagagaagaatgagattctacatcagaagaatggtgaagacccaggccttctactggaccgtgctgagcctggtggccctgaacaccctgtgcgtggccatcgtgcactacaaccagcccgagtggctgagcgacttcctgtactacgccgagttcatcttcctgggcctgttcatgagcgagatgttcatcaagatgtacggcctgggcaccagaccctacttccacagcagcttcaactgcttcgactgcggcgtgatcatcggcagcatcttcgaggtgatctgggccgtgatcaagcccggcaccagcttcggcatcagcgtgctgagagccctgagactgctgagaatcttcaaggtgaccaagtactgggccagcctgagaaacctggtggtgagcctgctgaacagcatgaagagcatcatcagcctgctgttcctgctgttcctgttcatcgtggtgttcgccctgctgggcatgcagctgttcggcggccagttcaacttcgacgagggcaccccccccaccaacttcgacaccttccccgccgccatcatgaccgtgttccagatcctgaccggcgaggactggaacgaggtgatgtacgacggcatcaagagccagggcggcgtgcagggcggcatggtgttcagcatctacttcatcgtgctgaccctgttcggcaactacaccctgctgaacgtgttcctggccatcgccgtggacaacctggccaacgcccaggagctgaccaaggacgagcaggaggaggaggaggccgccaaccagaagctggccctgcagaaggccaaggaggtggccgaggtgagccccctgagcgccgccaacatgagcatcgccgtgaaggagcagcagaagaaccagaagcccgccaagagcgtgtgggagcagagaaccagcgagatgagaaagcagaacctgctggccagcagagaggccctgtacaacgagatggaccccgacgagagatggaaggccgcctacaccagacacctgagacccgacatgaagacccacctggacagacccctggtggtggacccccaggagaacagaaacaacaacaccaacaagagcagagccgccgagcccaccgtggaccagagactgggccagcagagagccgaggacttcctgagaaagcaggccagataccacgacagagccagagaccccagcggcagcgccggcctggacgccagaagaccctgggccggcagccaggaggccgagctgagcagagagggcccctacggcagagagagcgaccaccacgccagagagggcagcctggagcagcccggcttctgggagggcgaggccgagagaggcaaggccggcgacccccacagaagacacgtgcacagacagggcggcagcagagagagcagaagcggcagccccagaaccggcgccgacggcgagcacagaagacacagagcccacagaagacccggcgaggagggccccgaggacaaggccgagagaagagccagacacagagagggcagcagacccgccagaggcggcgagggcgagggcgagggccccgacggcggcgagagaagaagaagacacagacacggcgcccccgccacctacgagggcgacgccagaagagaggacaaggagagaagacacagaagaagaaaggagaaccagggcagcggcgtgcccgtgagcggccccaacctgagcaccaccagacccatccagcaggacctgggcagacaggacccccccctggccgaggacatcgacaacatgaagaacaacaagctggccaccgccgagagcgccgccccccacggcagcctgggccacgccggcctgccccagagccccgccaagatgggcaacagcaccgaccccggccccatgctggccatccccgccatggccaccaacccccagaacgccgccagcagaagaacccccaacaaccccggcaaccccagcaaccccggcccccccaagacccccgagaacagcctgatcgtgaccaaccccagcggcacccagaccaacagcgccaagaccgccagaaagcccgaccacaccaccgtggacatcccccccgcctgccccccccccctgaaccacaccgtggtgcaggtgaacaagaacgccaaccccgaccccctgcccaagaaggaggaggagaagaaggaggaggaggaggacgacagaggcgaggacggccccaagcccatgcccccctacagcagcatgttcatcctgagcaccaccaaccccctgagaagactgtgccactacatcctgaacctgagatacttcgagatgtgcatcctgatggtgatcgccatgagcagcatcgccctggccgccgaggaccccgtgcagcccaacgcccccagaaacaacgtgctgagatacttcgactacgtgttcaccggcgtgttcaccttcgagatggtgatcaagatgatcgacctgggcctggtgctgcaccagggcgcctacttcagagacctgtggaacatcctggacttcatcgtggtgagcggcgccctggtggccttcgccttcaccggcaacagcaagggcaaggacatcaacaccatcaagagcctgagagtgctgagagtgctgagacccctgaagaccatcaagagactgcccaagctgaaggccgtgttcgactgcgtggtgaacagcctgaagaacgtgttcaacatcctgatcgtgtacatgctgttcatgttcatcttcgccgtggtggccgtgcagctgttcaagggcaagttcttccactgcaccgacgagagcaaggagttcgagaaggactgcagaggcaagtacctgctgtacgagaagaacgaggtgaaggccagagacagagagtggaagaagtacgagttccactacgacaacgtgctgtgggccctgctgaccctgttcaccgtgagcaccggcgagggctggccccaggtgctgaagcacagcgtggacgccaccttcgagaaccagggccccagccccggctacagaatggagatgagcatcttctacgtggtgtacttcgtggtgttccccttcttcttcgtgaacatcttcgtggccctgatcatcatcaccttccaggagcagggcgacaagatgatggaggagtacagcctggagaagaacgagagagcctgcatcgacttcgccatcagcgccaagcccctgaccagacacatgccccagaacaagcagagcttccagtacagaatgtggcagttcgtggtgagcccccccttcgagtacaccatcatggccatgatcgccctgaacaccatcgtgctgatgatgaagttctacggcgccagcgtggcctacgagaacgccctgagagtgttcaacatcgtgttcaccagcctgttcagcctggagtgcgtgctgaaggtgatggccttcggcatcctgaactacttcagagacgcctggaacatcttcgacttcgtgaccgtgctgggcagcatcaccgacatcctggtgaccgagttcggcaacaacttcatcaacctgagcttcctgagactgttcagagccgccagactgatcaagctgctgagacagggctacaccatcagaatcctgctgtggaccttcgtgcagagcttcaaggccctgccctacgtgtgcctgctgatcgccatgctgttcttcatctacgccatcatcggcatgcaggtgttcggcaacatcggcatcgacgtggaggacgaggacagcgacgaggacgagttccagatcaccgagcacaacaacttcagaaccttcttccaggccctgatgctgctgttcagaagcgccaccggcgaggcctggcacaacatcatgctgagctgcctgagcggcaagccctgcgacaagaacagcggcatcctgaccagagagtgcggcaacgagttcgcctacttctacttcgtgagcttcatcttcctgtgcagcttcctgatgctgaacctgttcgtggccgtgatcatggacaacttcgagtacctgaccagagacagcagcatcctgggcccccaccacctggacgagtacgtgagagtgtgggccgagtacgaccccgccgcctggggcagaatgccctacctggacatgtaccagatgctgagacacatgagcccccccctgggcctgggcaagaagtgccccgccagagtggcctacaagagactgctgagaatggacctgcccgtggccgacgacaacaccgtgcacttcaacagcaccctgatggccctgatcagaaccgccctggacatcaagatcgccaagggcggcgccgacaagcagcagatggacgccgagctgagaaaggagatgatggccatctggcccaacctgagccagaagaccctggacctgctggtgaccccccacaagagcaccgacctgaccgtgggcaagatctacgccgccatgatgatcatggagtactacagacagagcaaggccaagaagctgcaggccatgagagaggagcaggacagaacccccctgatgttccagagaatggagccccccagccccacccaggagggcggccccggccagaacgccctgcccagcacccagctggaccccggcggcgccctgatggcccacgagagcggcctgaaggagagccccagctgggtgacccagagagcccaggagatgttccagaagaccggcacctggagccccgagcagggcccccccaccgacatgcccaacagccagcccaacagccagagcgtggagatgagagagatgggcagagacggctacagcgacagcgagcactacctgcccatggagggccagggcagagccgccagcatgcccagactgcccgccgagaaccagagaagaagaggcagacccagaggcaacaacctgagcaccatcagcgacaccagccccatgaagagaagcgccagcgtgctgggccccaaggccagaagactggacgactacagcctggagagagtgccccccgaggagaaccagagacaccaccagagaagaagagacagaagccacagagccagcgagagaagcctgggcagatacaccgacgtggacaccggcctgggcaccgacctgagcatgaccacccagagcggcgacctgcccagcaaggagagagaccaggagagaggcagacccaaggacagaaagcacagacagcaccaccaccaccaccaccaccaccaccacccccccccccccgacaaggacagatacgcccaggagagacccgaccacggcagagccagagccagagaccagagatggagcagaagccccagcgagggcagagagcacatggcccacagacagggcagcagcagcgtgagcggcagccccgcccccagcaccagcggcaccagcacccccagaagaggcagaagacagctgccccagacccccagcacccccagaccccacgtgagctacagccccgtgatcagaaaggccggcggcagcggccccccccagcagcagcagcagcagcagcagcagcagcagcagcaggccgtggccagacccggcagagccgccaccagcggccccagaagataccccggccccaccgccgagcccctggccggcgacagaccccccaccggcggccacagcagcggcagaagccccagaatggagagaagagtgcccggccccgccagaagcgagagccccagagcctgcagacacggcggcgccagatggcccgccagcggcccccacgtgagcgagggcccccccggccccagacaccacggctactacagaggcagcgactacgacgaggccgacggccccggcagcggcggcggcgaggaggccatggccggcgcctacgacgcccccccccccgtgagacacgccagcagcggcgccaccggcagaagccccagaacccccagagccagcggccccgcctgcgccagccccagcagacacggcagaagactgcccaacggctactaccccgcccacggcctggccagacccagaggccccggcagcagaaagggcctgcacgagccctacagcgagagcgacgacgactggtgctag

SEQ ID NO: 44631 - protein, 128 aa, Artificial Sequence
  derived and/or modified sequence
MGIQGGSVLFGLLLVLAVFCHSGHSLQCYNCPNPTADCKTAVNCSSDFDACLITKAGLQVYNKCWKFEHCNFNDVTTRLRENELTYYCCKKDLCNFNEQLENGGTSLSEKTVLLLVTPFLAAAWSLHP

SEQ ID NO: 44632 - DNA, 387 bp, Artificial Sequence
  derived and/or modified sequence
atgggtattcaaggtgggtcagtcctgtttggactgcttctagtgttggcggtgttctgtcacagcggccacagcctgcaatgttataattgtcccaaccctacagccgattgtaaaacagcggtcaattgctcctccgactttgatgcttgcctgatcaccaaggcagggctccaagtatacaacaaatgctggaaatttgaacactgtaattttaacgacgttactacgaggctgcgagaaaacgaactgacttattattgttgcaagaaagacctctgcaatttcaacgaacaacttgagaacggtggtacctccttaagcgagaaaaccgtgctgctgcttgtgacgcctttcctcgccgccgcctggtccttacacccctag

SEQ ID NO: 44633 - DNA, 387 bp, Artificial Sequence
  derived and/or modified sequence
atggggattcaaggagggtcggtcctttttggtctgcttctggtgctggccgtgttttgccacagtgggcactctctgcagtgctacaactgcccgaaccccacagctgactgcaaaacagccgtgaactgtagctccgatttcgatgcatgcctgattactaaggcaggcctccaggtttacaataaatgttggaaattcgagcactgtaatttcaacgatgtcacaacacgacttcgggagaacgaactgacatactattgctgcaaaaaagacttgtgtaattttaacgaacagctcgaaaatggcggaacctccctgtcagagaagacggtcctacttctggtcactcctttcttggccgccgcatggagtctgcatccctag

SEQ ID NO: 44634 - DNA, 387 bp, Artificial Sequence
  derived and/or modified sequence
atgggcattcagggcggaagtgtgctgttcggtctgctgctggttctggctgtcttctgccactcagggcactctctccagtgttacaactgtcctaacccaacagctgattgcaagacagctgtgaactgcagttctgatttcgacgcttgcctcataactaaagccggactccaggtgtataataagtgctggaagttcgagcactgtaactttaacgacgtgaccactcgcctccgagaaaatgagctgacttactactgttgtaaaaaggatctgtgtaatttcaatgagcagctggagaatggtgggacctccctctcggagaaaaccgtgctgctcttggtgacacctttcctggctgccgcctggagtctgcatccgtag

SEQ ID NO: 44635 - DNA, 387 bp, Artificial Sequence
  derived and/or modified sequence
atggggattcagggaggctccgtgttgttcggccttctgctggtcctggccgtattttgccattcagggcatagcctgcaatgctataattgtccaaaccccaccgccgattgtaaaaccgcagttaactgctcatccgactttgatgcctgcttgataactaaggctgggctccaggtctataacaaatgttggaagttcgaacattgtaatttcaatgatgtgacaaccagactccgtgagaatgagctcacctactactgctgtaaaaaggacctctgtaactttaacgagcagttggagaatggggggacttctctatctgagaagactgtgctcctcctggtgacacctttcttggctgccgcgtggagtctccacccctag

SEQ ID NO: 44636 - DNA, 387 bp, Artificial Sequence
  derived and/or modified sequence
atgggtattcagggcggatcggtgctctttgggctgctgctcgtattggcggttttctgtcattcggggcactctctgcagtgttacaattgtcctaacccaactgctgattgcaagaccgctgtgaattgctctagcgattttgacgcttgcctcatcaccaaagcaggcctgcaggtttacaataaatgttggaagttcgaacattgcaactttaacgacgttactactagattgagagagaacgaattaacatattattgctgcaagaaggacctttgtaactttaatgaacagctagagaacgggggaactagcctttctgagaagactgttctgctactagtaaccccattcctggcggcggcctggtctctacacccttag

SEQ ID NO: 44637 - DNA, 387 bp, Artificial Sequence
  derived and/or modified sequence
atggggattcagggcgggtcagtgctgttcggcctgctgctggttctcgcagtgttctgtcactccgggcattcactccagtgctacaattgccctaaccccactgcagattgtaaaacggcagtgaattgctctagcgatttcgatgcctgcctgatcaccaaagccggactgcaggtttataataaatgttggaagtttgagcattgcaatttcaacgacgtgacaaccaggctgagggagaatgagttaacgtactattgctgcaagaaggatctgtgcaactttaacgagcagctcgagaacggcggtacttctctatccgaaaaaacagtccttctgttagtaacacctttcctagccgctgcgtggagtctacatccctag

SEQ ID NO: 44638 - DNA, 387 bp, Artificial Sequence
  derived and/or modified sequence
atgggcattcaaggcggttccgtgctgtttggcctgttattggtcctggcagtgttctgtcactcaggccacagtctgcagtgttacaattgtccaaacccaaccgcagactgcaagaccgcagtgaactgttctagcgactttgacgcctgccttataactaaagccggccttcaggtttacaacaaatgctggaaattcgaacactgtaactttaatgatgtgactacacggctgagggagaatgagctgacttattattgctgcaagaaggacctgtgcaactttaacgagcaactagagaacggaggaacatccctgtctgaaaaaaccgtgctactgctggtgactccttttctcgcggcagcttggtcactgcatccatag

SEQ ID NO: 44639 - DNA, 387 bp, Artificial Sequence
  derived and/or modified sequence
atggggattcaaggcggttcagtcctatttggactgctgctggtgctggccgtgttttgtcattctggccattcattacagtgttataattgcccaaatcctacggcagattgtaagacagccgtgaactgctcgagtgactttgacgcatgcctgatcactaaggccggtctgcaggtatataataagtgttggaaatttgagcattgcaactttaacgatgtcactacaaggctgcgtgaaaatgagctcacttattattgctgcaaaaaagatctgtgtaattttaacgagcagcttgaaaacggcggtacctccctgagcgagaaaaccgtccttcttctcgtgaccccattcttggctgccgcatggagcctgcacccttag

SEQ ID NO: 44640 - DNA, 387 bp, Artificial Sequence
  derived and/or modified sequence
atggggatccaaggcggcagcgtcctattcggtttgctcctcgttctggccgtgttctgccattccggccattccctccaatgttataactgtccaaacccaaccgcagattgtaagaccgccgtaaattgttcctcagatttcgatgcatgtctcattactaaggccggcctgcaagtatacaacaaatgttggaaattcgaacactgtaattttaatgacgtcaccacacgattacgtgaaaatgagctgacctactattgctgcaaaaaggacctctgcaatttcaatgaacagctggagaacgggggaacctctctatcagagaagactgttctgcttctcgtgacgccctttttggccgccgcatggtcactgcacccctag

SEQ ID NO: 44641 - DNA, 387 bp, Artificial Sequence
  derived and/or modified sequence
atgggcatccagggcggctctgtgctgtttggcctgctgctggtgctggccgtgttctgccacagcggccacagcctgcagtgctacaactgccccaaccccacagctgactgcaagacagctgtgaactgcagcagtgactttgatgcctgcctgatcaccaaggccggcctgcaggtgtacaacaagtgctggaagtttgagcactgcaacttcaatgatgtgaccacccggctgagagaaaatgagctgacctactactgctgcaagaaggacctgtgcaacttcaatgagcagctggagaatggaggcaccagcctgtctgagaagacagtgctgctgctggtgacccccttcctggccgccgcctggagcctgcacccctag

SEQ ID NO: 44642 - DNA, 387 bp, Artificial Sequence
  derived and/or modified sequence
atgggcatccagggcggcagcgtgctgttcggcctgctgctggtgctggctgtgttctgccactccggtcacagccttcagtgctataactgccctaaccctacggccgactgcaaaactgccgttaactgcagctcagactttgatgcgtgcctgatcaccaaggcgggtctccaggtatacaacaagtgttggaagttcgagcattgtaattttaacgatgtgaccacccgcctgcgcgagaatgaattaacgtattactgctgcaagaaagatttatgcaatttcaacgagcagctggagaatggtggaacttccctgagtgaaaagacagtgttactgctcgttaccccatttctggctgctgcatggtcccttcatccctag

SEQ ID NO: 44643 - DNA, 387 bp, Artificial Sequence
  derived and/or modified sequence
atgggcatccagggcggcagcgtgctgttcggcctgctgctggtgttggcagttttttgccattcaggacactccctccaatgctataactgtcctaatcctactgcagattgcaaaacagcagttaattgctcctccgacttcgacgcatgcctgatcactaaggctggtctgcaggtgtacaacaaatgttggaaattcgaacactgtaattttaacgatgttactacccggttaagagagaacgaactgacatattactgctgtaagaaggacctgtgcaactttaatgaacagctggagaacggtggcacttctctttcagagaagaccgttttgctgctggtgactcccttcttggccgccgcatggagcctacatccctag

SEQ ID NO: 44644 - DNA, 387 bp, Artificial Sequence
  derived and/or modified sequence
atgggcatccagggcggcagcgtgctgttcggcctgctgctggtgctggccgttttctgccatagtgggcattccctgcaatgctacaactgccctaatcccaccgccgactgcaaaactgctgtgaactgttcgagtgattttgatgcctgtctgattacaaaggccggattgcaggtgtataacaagtgttggaagttcgagcactgtaatttcaacgacgtcacgaccagactgcgggagaacgagcttacttattattgctgtaaaaaagacttatgcaatttcaatgaacagctggaaaacgggggaaccagcctgagcgaaaagactgtgctactgctagtgactccatttctggcagctgcctggtctctgcacccatag

SEQ ID NO: 44645 - DNA, 387 bp, Artificial Sequence
  derived and/or modified sequence
atgggcatccagggcggcagcgtgctgttcggcctgctgctggtgctggccgtgttctgtcatagtggacactctctgcagtgttacaattgtcctaaccccacggccgattgcaagactgccgttaactgttcatctgattttgacgcatgtctgatcactaaagcaggtctgcaggtgtataacaaatgttggaagtttgagcactgcaactttaacgatgttaccactcggctgagagagaacgagctgacctattactgctgtaagaaagatctatgtaattttaacgagcagcttgaaaatggtggcacgtcattaagtgaaaagactgtgctcttgttggtgacaccattcttggcagcagcatggtccctccatccctag

SEQ ID NO: 44646 - DNA, 387 bp, Artificial Sequence
  derived and/or modified sequence
atgggcatccagggcggcagcgtgctgttcggcctgctgctggtgctggcagtgttttgccactccggtcatagtctgcaatgctacaactgccccaacccaaccgcagattgtaagaccgctgtcaactgcagcagcgactttgatgcgtgtcttattaccaaagccggacttcaggtgtacaataagtgttggaagttcgagcactgcaacttcaacgacgtaacaaccaggctgagagaaaacgagttaacttactactgttgtaaaaaggacctctgtaatttcaacgagcaactcgagaatggaggcacaagcctgtctgagaaaactgtgttgcttctagtgacaccatttttggctgcagcttggtccttacacccatag

SEQ ID NO: 44647 - DNA, 387 bp, Artificial Sequence
  derived and/or modified sequence
atgggcatccagggcggcagcgtgctgttcggcctgctgctggtgctggcggtgttctgccatagtggccactctctgcagtgttataactgtcctaaccctaccgcggactgcaaaaccgctgtcaattgcagctccgacttcgacgcctgcttgattactaaggctggtcttcaggtgtataataagtgctggaaattcgaacactgcaatttcaatgatgtgacgacccggctgcgggagaatgagctgacgtattactgttgcaagaaagacctttgcaacttcaatgaacagcttgagaatgggggtacttccctctctgagaagaccgttctgctcctggtcaccccttttctggccgccgcctggtcattacatccctag

SEQ ID NO: 44648 - DNA, 387 bp, Artificial Sequence
  derived and/or modified sequence
atgggcatccagggcggcagcgtgctgttcggcctgctgctggtgctcgctgttttttgccatagcgggcactcactgcagtgttataactgtccaaatcccacagccgattgcaaaaccgcggtgaattgctcaagcgattttgatgcctgcttaataaccaaggccggactgcaggtttacaacaaatgctggaaattcgagcactgtaatttcaatgatgttactacgagattgcgtgaaaacgagcttacatattattgttgcaagaaggacctgtgtaatttcaatgaacagctggagaacgggggaacctctctctctgagaaaacagtcttacttctggtcactccattcctggcagcagcatggagtctgcatccatag

SEQ ID NO: 44649 - DNA, 387 bp, Artificial Sequence
  derived and/or modified sequence
atgggcatccagggcggcagcgtgctgttcggcctgctgctggtgctggctgtgttttgccatagcggccactctctgcagtgttataactgcccaaatccaaccgctgattgtaagaccgccgttaactgtagtagtgactttgacgcatgcttgattacaaaggctggactccaggtgtacaacaaatgctggaagtttgaacactgtaacttcaatgacgtcaccacgcgactgagagagaacgaacttacctactactgctgtaagaaggacctgtgcaatttcaatgagcaattagagaatgggggtacctcactgtctgagaagactgtgttgctcctggttacgccttttctggctgccgcctggagtctccacccctag

SEQ ID NO: 44650 - DNA, 387 bp, Artificial Sequence
  derived and/or modified sequence
atgggcatccagggcggcagcgtgctgttcggcctgctgctggtgctggcagtgttctgtcatagcggtcacagtctgcagtgctataattgccccaaccccacagcggactgcaagacggcggttaattgttcctccgactttgacgcctgtctgattacaaaggccgggctgcaggtctacaataaatgttggaagttcgaacactgcaactttaacgacgtaacgacacgcctgagggaaaacgaactgacatattactgctgtaaaaaagacctgtgtaactttaatgagcagcttgaaaatggtggaacctccttgtcggaaaaaacagttctcctcctggttaccccctttctcgccgctgcatggagtctccatccatag

SEQ ID NO: 44651 - DNA, 387 bp, Artificial Sequence
  derived and/or modified sequence
atgggtatccagggtggatcagtgcttttcgggctgctgcttgtgttagctgttttctgtcactccggacactctctccagtgctacaattgtcctaatcccacagccgattgtaaaacagccgtcaactgttctagcgatttcgacgcatgcctcataaccaaggccggactccaggtatacaacaagtgttggaagtttgaacattgtaacttcaatgatgtgacaacgcgcctgagagagaacgagctcacctactattgctgtaagaaagatctctgtaacttcaacgagcaattggagaacggaggcacctcattgtcagagaagacagtgctgttactggtgaccccctttctggccgctgcttggagcctgcatccttag

SEQ ID NO: 44652 - DNA, 387 bp, Artificial Sequence
  derived and/or modified sequence
atggggattcagggaggctccgtcttgtttggtctccttctggttctcgccgtgttctgtcactcaggccatagcttacaatgttacaactgcccgaatccgacagctgattgtaaaacagcggtgaattgctccagcgacttcgatgcatgtctgatcaccaaagcgggattacaggtgtacaataagtgttggaagttcgagcactgcaactttaacgatgttacaacgagactgagggagaatgaattaacctactactgctgcaaaaaagatctgtgcaatttcaacgagcaacttgagaacggcggaacctctctatctgagaagacagtgctgttactagtcacccctttcctggccgctgcatggagtctgcacccatag

SEQ ID NO: 44653 - DNA, 387 bp, Artificial Sequence
  derived and/or modified sequence
atgggcatccagggcggatctgtgctgttcgggctgcttcttgtcttggcagttttctgccactctggccattctctacagtgttataactgcccaaaccctaccgcggattgcaaaacggctgttaactgcagttcagactttgatgcctgtcttattaccaaagcaggacttcaggtgtacaataagtgttggaaattcgagcactgcaattttaacgacgtaactacgcggttacgcgaaaacgaactgacttactactgttgtaaaaaagatctttgtaattttaacgaacagctggagaacgggggaacctccctttcagaaaaaacagtcctgctcttagtcacccccttcctggctgccgcatggagccttcacccctag

SEQ ID NO: 44654 - DNA, 387 bp, Artificial Sequence
  derived and/or modified sequence
atgggcattcaaggcggttcagtcctgttcggcctcctcttggtgctggccgttttttgccacagcggtcattcgctccagtgctataattgccccaaccccacagccgattgcaagacagcggttaattgctcctccgactttgacgcatgtctgattactaaagctggtctccaggtctacaacaaatgttggaagttcgaacactgcaactttaacgacgtaactaccaggctacgcgagaatgaactgacatactactgctgcaagaaggatttgtgtaacttcaacgagcagctggaaaacgggggaacctctctgagtgagaagactgttttgctcctggtgacaccgttcttagctgcagcatggagcttacacccatag

SEQ ID NO: 44655 - DNA, 387 bp, Artificial Sequence
  derived and/or modified sequence
atgggcattcagggaggctcagtgctcttcggcctgttgctggtgctggccgtcttttgtcactctggacacagccttcagtgttataactgccccaatcctaccgcggactgtaagaccgccgtgaactgttcctcggactttgacgcgtgtctcataaccaaggccggacttcaagtctacaacaaatgctggaagttcgaacattgtaacttcaacgacgtgactacgcgcctacgagagaatgaactgacttattactgttgcaagaaggatctatgtaactttaatgaacagttagaaaacggcggtacctctctctcagaaaaaaccgtgctgttgttagtaacaccctttctggctgctgcatggtccctgcacccatag

SEQ ID NO: 44656 - DNA, 387 bp, Artificial Sequence
  derived and/or modified sequence
atgggtatccaaggaggctctgtactctttggtcttctcctggtattggctgtattctgccactctgggcactcgctgcaatgctataactgtcccaatcccacagctgattgcaagaccgccgtcaactgttcgtccgattttgacgcctgtctgattaccaaagccggactccaggtgtacaacaaatgctggaaatttgaacactgcaacttcaatgacgtaacaactcgtctacgcgagaacgaactcacttactactgctgtaaaaaagacctctgtaatttcaatgaacagctggaaaatgggggaaccagcctctccgaaaagaccgtgctccttctggttacccccttccttgctgcggcttggtccctccatccgtag

SEQ ID NO: 44657 - DNA, 387 bp, Artificial Sequence
  derived and/or modified sequence
atgggcatccagggcggaagtgttttgtttggactcttactcgttcttgcagttttttgtcatagcggccactccttacaatgctataactgccctaaccctaccgctgattgcaagactgccgtcaactgttcctcagatttcgatgcgtgtctaattaccaaggcgggactgcaggtttacaataaatgctggaagttcgagcattgtaacttcaacgacgtgactacccggctgcgggagaacgagctgacttactactgttgcaagaaggacctttgtaattttaacgaacaactggaaaatggcggtacctctcttagtgagaaaacggtgctgcttctagtgacaccgttcctggctgctgcatggtcccttcatccatag

SEQ ID NO: 44658 - DNA, 387 bp, Artificial Sequence
  derived and/or modified sequence
atggggatccagggaggatccgtgctcttcggcttactcctggtcctggcagtgttttgccactcgggacattcactgcaatgttacaattgcccaaatcccactgctgattgtaaaaccgcagttaattgttcttccgacttcgacgcctgcttgatcacaaaggccggactccaggtctacaataaatgctggaagttcgaacactgcaattttaacgacgtgacaaccaggcttagagagaacgagttgacgtactattgctgtaagaaagatttgtgcaattttaatgaacagctagagaatggcggaactagtctgagcgagaagacagtgctcctgctagtgacccccttcttggcggcagcctggtcccttcatccatag

SEQ ID NO: 44659 - DNA, 387 bp, Artificial Sequence
  derived and/or modified sequence
atgggtattcagggaggaagcgtactattcggtcttctcttagtgcttgctgtgttctgtcactcaggtcacagccttcagtgttacaactgtcccaatcccacagcagactgcaagactgctgtgaattgtagttccgactttgatgcctgtctgattacgaaagccggtttgcaggtatacaataagtgctggaagttcgagcactgcaattttaatgacgtaaccactcgcctgcgtgagaacgagctcacatactattgttgcaaaaaagatctctgcaattttaatgaacagctcgagaacggtggcacgtccctctccgaaaagactgtgctgctgcttgtcaccccctttctggcggctgcctggagtctccatccatag

SEQ ID NO: 44660 - DNA, 387 bp, Artificial Sequence
  derived and/or modified sequence
atggggattcaaggaggaagcgttctttttgggctgctgctcgttctagcagttttctgccactccggccattctcttcaatgttacaattgtcccaaccctactgctgactgcaaaaccgccgtcaattgcagtagtgacttcgatgcttgcctgatcactaaagctggcctgcaagtgtacaacaaatgctggaaattcgaacattgtaatttcaacgacgtgacgactagattacgagaaaacgaactgacctactactgctgtaaaaaagatctgtgcaatttcaatgagcagctcgaaaatggaggcacatcactctctgagaaaactgtcctgctgctggtcacaccttttcttgcagccgcatggtctcttcatccatag

SEQ ID NO: 44661 - DNA, 387 bp, Artificial Sequence
  derived and/or modified sequence
atgggtattcagggcggatccgtgttattcggcttgcttttagttttagccgtattttgccactccggccattcgcttcagtgttacaattgtcccaaccccaccgcagactgcaagaccgccgtcaactgctccagcgacttcgacgcttgtctgatcaccaaggccggactgcaagtatataataaatgctggaaattcgaacactgcaattttaacgacgtgactactaggctgcgggagaatgagctgacctactattgctgcaagaaagatctgtgtaacttcaacgagcagctggagaatggaggcaccagcttatctgagaagaccgttctacttttggtgacgccttttctagccgctgcctggtccctccatccctag

SEQ ID NO: 44662 - DNA, 387 bp, Artificial Sequence
  derived and/or modified sequence
atgggaattcaaggggggagtgtgctgtttggacttctcctcgtgctggccgtattctgccactcgggccacagccttcaatgctataattgcccaaatcccactgctgactgtaagacagccgtgaactgttcgagcgactttgatgcatgcctgattacaaaagcaggattgcaggtgtacaacaaatgttggaaatttgagcactgcaattttaatgacgtcaccacccgcctgcgtgaaaacgaactgacctattattgctgcaaaaaagacttgtgtaatttcaatgaacagttggaaaacggcgggacatctctgtccgagaaaaccgtgttactgcttgtgactccctttctggccgctgcctggagcctacatccctag

SEQ ID NO: 44663 - DNA, 387 bp, Artificial Sequence
  derived and/or modified sequence
atggggatccagggcggcagtgtactgtttgggttgcttcttgtccttgcggtcttttgtcactccggtcactctctccagtgctacaactgtccaaaccccacagcagattgcaaaactgcagtgaactgctcaagtgatttcgacgcctgcctcatcacaaaggccggactccaggtttataacaagtgctggaaattcgaacactgtaatttcaacgacgtcacgacaaggctcagagaaaacgaactgacatactattgctgcaagaaggacctgtgtaactttaacgaacagctcgaaaatggcggcacttcactctccgaaaaaacagtccttctgcttgtaaccccctttctggcggctgcttggtcactccatccttag

SEQ ID NO: 44664 - DNA, 387 bp, Artificial Sequence
  derived and/or modified sequence
atgggtattcaaggaggtagtgtgctcttcgggctgttgctagtattggccgttttctgtcactctggacactcattacagtgctataactgtccaaacccgactgctgactgtaaaaccgctgtgaattgcagttcggatttcgatgcttgtcttattacaaaagcaggactccaagtctacaataagtgctggaaatttgaacattgtaacttcaacgatgttacaactcgactgagagaaaatgaactgacctattactgctgcaagaaagatctatgtaatttcaatgaacagctcgaaaatggagggacaagtcttagcgagaaaaccgtccttctgcttgttacgcccttcttagctgccgcgtggtcgcttcatccctag

SEQ ID NO: 44665 - DNA, 387 bp, Artificial Sequence
  derived and/or modified sequence
atgggaatccaaggggggtccgttctcttcggtcttctccttgtcctagctgtgttctgccattccggccactcactgcaatgttataactgtcctaatcctactgccgactgtaagacggcggtaaactgctcttctgattttgatgcttgcctgattaccaaagcgggacttcaagtttataataaatgctggaagttcgaacattgtaacttcaacgacgtgaccaccagactgcgcgaaaacgagctaacatactattgctgcaaaaaagacctttgtaacttcaacgaacaactcgaaaatggcgggacctctttgtcagaaaaaactgtgctgctcctcgtaacaccgtttttggccgcagcatggtccttgcacccttag

SEQ ID NO: 44666 - DNA, 387 bp, Artificial Sequence
  derived and/or modified sequence
atgggaatccaggggggttctgtactcttcggcctgcttctcgtcctcgcagtgttctgtcattctggacattctctacagtgctacaactgccccaaccctactgccgattgcaagaccgctgtgaactgtagtagcgactttgacgcttgcctgattactaaagccggcctgcaggtctataataaatgctggaaatttgagcattgcaactttaatgatgtcaccaccagattgcgtgagaacgagctgacttactattgctgtaaaaaggatctttgcaatttcaacgaacaattagaaaatggcgggactagcttgtctgagaagactgttttactgttggtgacccccttcctcgccgccgcttggtcacttcatccatag

SEQ ID NO: 44667 - DNA, 387 bp, Artificial Sequence
  derived and/or modified sequence
atggggatccaaggtgggtcagtgttgttcgggttgctcctggttttagccgtattttgtcatagtggccacagtctgcagtgctacaactgtccgaatcctaccgccgactgtaagacagcagtgaattgctcttccgatttcgacgcctgccttattacaaaagcgggactgcaggtgtacaataaatgctggaaatttgaacactgtaacttcaacgatgtaacgacccgactgagagagaacgaactgacttactattgctgcaaaaaggatctttgcaacttcaatgagcaactcgaaaacggcggaacctctttatcagaaaaaaccgtgcttcttttagtgacacctttcctggctgccgcttggtctctgcacccatag

SEQ ID NO: 44668 - DNA, 387 bp, Artificial Sequence
  derived and/or modified sequence
atgggcatccagggcggcagtgtactcttcgggctgctgcttgtgttggccgttttctgccattctggacattctctgcaatgctataattgtcccaatccaaccgccgactgtaagaccgccgtaaactgctcttcggacttcgacgcatgtctcatcacaaaggcaggactgcaggtgtataataaatgctggaaattcgaacactgtaacttcaacgacgtgacaacacgactgcgcgaaaatgaactcacatactactgctgtaagaaggatctatgtaacttcaacgagcaattggaaaacggcggcaccagtctctcagagaagacggtcctcctcctagtaactcctttcctcgccgcagcatggtcgctccatccctag

SEQ ID NO: 44669 - DNA, 387 bp, Artificial Sequence
  derived and/or modified sequence
atgggcatacagggtggttccgtactctttggcctcctcctcgtgctggcggttttttgccactccggccattctctgcagtgctataattgtcccaacccaaccgctgactgtaaaacggctgtaaactgttcctctgattttgatgcatgcttgattaccaaggcaggactgcaagtctacaataaatgctggaagttcgaacattgtaactttaacgatgtcacaacccggctgcgggaaaatgagctaacctattattgttgtaaaaaagacttatgtaactttaacgagcagctggaaaatggaggcacatcactctctgagaaaactgtcctgctgctggtcacaccttttcttgcagccgcatggtctcttcatccatag

SEQ ID NO: 44670 - DNA, 387 bp, Artificial Sequence
  derived and/or modified sequence
atgggtattcagggcggatccgtgttattcggcttgcttttagttttagccgtattttgccactccggccattcgcttcagtgttacaattgtcccaaccccaccgcagactgcaagaccgccgtcaactgctccagcgacttcgacgcttgtctgatcaccaaggccggactgcaagtatataataaatgctggaaattcgaacactgcaattttaacgacgtgactactaggctgcgggagaatgagctgacctactattgctgcaagaaagatctgtgtaacttcaacgagcagctggagaacggaggcactagcttgtccgagaaaaccgttctgttactcgttactccatttcttgctgccgcatggtccctacatccctag

SEQ ID NO: 44671 - DNA, 387 bp, Artificial Sequence
  derived and/or modified sequence
atgggcatacagggaggaagtgtacttttcggcctgttgttagtcctggctgtgttttgccattctggccacagtctacagtgctacaattgtccaaaccccactgctgactgcaaaacagccgtgaactgctctagtgacttcgatgcatgtttaattaccaaggcaggacttcaagtgtacaataaatgctggaaatttgaacactgcaatttcaatgacgtcaccacacgccttcgcgagaacgaactcacgtattattgctgtaagaaagatctttgtaattttaatgaacaactggaaaatggcggtacctccctttccgaaaaaaccgttttgcttcttgttacacccttccttgctgcggcatggagcctgcatccctag

SEQ ID NO: 44672 - DNA, 387 bp, Artificial Sequence
  derived and/or modified sequence
atgggaattcaaggcggatccgtcttgtttggcctgctgcttgtgctggcagtgttttgccattctgggcactccctgcagtgctataattgcccaaaccctactgcagattgtaagactgctgtaaactgttcttccgattttgatgcttgccttatcaccaaagctggcctacaggtgtacaataaatgctggaagtttgaacattgcaattttaatgacgttacaacccgcctcagggagaatgagctgacctactactgctgcaaaaaggacttgtgtaacttcaatgaacaactggaaaatggcggcacttcactctccgaaaaaacagtccttctgcttgtaaccccctttctggcggctgcttggtcactccatccttag

SEQ ID NO: 44673 - DNA, 387 bp, Artificial Sequence
  derived and/or modified sequence
atgggtattcaaggaggtagtgtgctcttcgggctgttgctagtattggccgttttctgtcactctggacactcattacagtgctataactgtccaaacccgactgctgactgtaaaaccgctgtgaattgcagttcggatttcgatgcttgtcttattacaaaagcaggactccaagtctacaataagtgctggaaatttgaacattgtaacttcaacgatgttacaactcgactgagagaaaatgaactgacctattactgctgcaagaaagatctatgtaatttcaatgaacagctcgaaaacggcggtacatcactcagcgaaaaaactgttctgcttcttgtaacaccattcctggcagctgcatggagtcttcacccatag

SEQ ID NO: 44674 - DNA, 387 bp, Artificial Sequence
  derived and/or modified sequence
atgggcatacaaggtggatctgtcctctttggcctgcttctcgtccttgccgttttttgccactcaggtcacagcctccagtgctataattgccccaaccccacggctgattgtaaaaccgctgttaactgttcaagcgattttgacgcctgtcttattacgaaagctggtctgcaagtgtacaataagtgctggaaatttgagcattgtaattttaacgatgtgactaccaggcttagagaaaatgaattaacctattactgttgtaaaaaggacctttgcaattttaatgaacagcttgagaacggcggaacctctctaagtgaaaaaactgtgctcctccttgtcacccctttcctggcagctgcttggagtttacatccctag

SEQ ID NO: 44675 - DNA, 387 bp, Artificial Sequence
  derived and/or modified sequence
atggggatccaaggaggctctgtgttgtttggactgctgctcgtgttggccgttttttgccattctggacattctctgcaatgctataactgtcccaatcccaccgccgattgcaagaccgccgtgaattgtagctcagactttgacgcttgtctcatcacgaaagccgggctgcaggtatacaataagtgctggaaatttgaacactgcaatttcaatgacgtgactactagacttcgggaaaatgagttgacctactactgctgtaagaaggatttgtgtaacttcaacgagcaactcgaaaatggaggtacgtccctttcagaaaaaaccgtcctattactggttaccccgttccttgctgctgcttggtccttgcatccctag

SEQ ID NO: 44676 - DNA, 387 bp, Artificial Sequence
  derived and/or modified sequence
atgggcattcagggcggtagtgttttattcggactgttgttagtgctggccgttttttgccactccggacattccctgcagtgctataactgcccaaatccaactgccgattgcaagacagctgttaattgttcatccgatttcgatgcatgccttattaccaaagctggtctgcaggtttacaataaatgctggaagttcgagcattgtaacttcaacgacgtcacgacccgattgcgcgagaacgagcttacctattactgttgtaaaaaggatttgtgcaatttcaatgaacaactcgaaaatggaggaacaagcctcagtgaaaaaacagtactcctgctcgttaccccctttcttgccgctgcctggtcattgcatccgtag

SEQ ID NO: 44677 - DNA, 387 bp, Artificial Sequence
  derived and/or modified sequence
atgggcatccagggcggcagtgtactcttcgggctgctgcttgtgttggccgttttctgccattctggacattctctgcaatgctataattgtcccaatccaaccgccgactgtaagaccgccgtaaactgctcttcggacttcgacgcatgtctcatcacaaaggcaggactgcaggtgtataataaatgctggaaattcgaacactgtaacttcaacgacgtgacaacacgactgcgcgaaaatgaactcacatactactgctgtaagaaggatctatgtaacttcaacgagcaattggaaaacggcggaacatccctttcggaaaagactgtccttttacttgttacaccctttctcgctgctgcatggagccttcacccctag

SEQ ID NO: 44678 - DNA, 1775 bp, Artificial Sequence
  derived and/or modified sequence
aaagaatgcgggggctgagcgcagaagcggctcgaggctggaagaggatcttgggcgccgccagtctttagcaccagttggtgtaggagttgagacctacttcacagtagttctgtggacaatcacaatgggaatccaaggagggtctgtcctgttcgggctgctgctcgtcctggctgtcttctgccattcaggtcatagcctgcagtgctacaactgtcctaacccaactgctgactgcaaaacagccgtcaattgttcatctgattttgatgcgtgtctcattaccaaagctgggttacaagtgtataacaagtgttggaagtttgagcattgcaatttcaacgacgtcacaacccgcttgagggaaaatgagctaacgtactactgctgcaagaaggacctgtgtaactttaacgaacagcttgaaaatggtgggacatccttatcagagaaaacagttcttctgctggtgactccatttctggcagcagcctggagccttcatccctaagtcaacaccaggagagcttctcccaaactccccgttcctgcgtagtccgctttctcttgctgccacattctaaaggcttgatattttccaaatggatcctgttgggaaagaataaaattagcttgagcaacctggctaagatagaggggctctgggagactttgaagaccagtcctgtttgcagggaagccccacttgaaggaagaagtctaagagtgaagtaggtgtgacttgaactagattgcatgcttcctcctttgctcttgggaagaccagctttgcagtgacagcttgagtgggttctctgcagccctcagattatttttcctctggctccttggatgtagtcagttagcatcattagtacatctttggagggtggggcaggagtatatgagcatcctctctcacatggaacgctttcataaacttcagggatcccgtgttgccatggaggcatgccaaatgttccatatgtgggtgtcagtcagggacaacaagatccttaatgcagagctagaggacttctggcagggaagtggggaagtgttccagatagcagggcatgaaaacttagagaggtacaagtggctgaaaatcgagtttttcctctgtctttaaattttatatgggctttgttatcttccactggaaaagtgtaatagcatacatcaatggtgtgttaaagctatttccttgccttttttttattggaatggtaggatatcttggctttgccacacacagttacagagtgaacactctactacatgtgactggcagtattaagtgtgcttattttaaatgttactggtagaaaggcagttcaggtatgtgtgtatatagtatgaatgcagtggggacaccctttgtggttacagtttgagacttccaaaggtcatccttaataacaacagatctgcaggggtatgttttaccatctgcatccagcctcctgctaactcctagctgactcagcatagattgtataaaatacctttgtaacggctcttagcacactcacagatgtttgaggctttcagaagctcttctaaaaaatgatacacacctttcacaagggcaaactttttccttttccctgtgtattctagtgaatgaatctcaagattcagtagacctaatgacatttgtattttatgatcttggctgtatttaatggcataggctgacttttgcagatggaggaatttcttgattaatgttgaaaaaaaacccttgattatactctgttggacaaacc

SEQ ID NO: 44679 - DNA, 1889 bp, Artificial Sequence
  derived and/or modified sequence
tgcgggggctgagcgcagaagcggctcgaggctggaagaggatcttgggcgccgccaggttctgtggacaatcacaatgggaatccaaggagggtctgtcctgttcgggctgctgctcgtcctggctgtcttctgccattcaggtcatagcctgcagtgctacaactgtcctaacccaactgctgactgcaaaacagccgtcaattgttcatctgattttgatgcgtgtctcattaccaaagctgggttacaagtgtataacaagtgttggaagtttgagcattgcaatttcaacgacgtcacaacccgcttgagggaaaatgagctaacgtactactgctgcaagaaggacctgtgtaactttaacgaacagcttgaaaatggtgggacatccttatcagagaaaacagttcttctgctggtgactccatttctggcagcagcctggagccttcatccctaagtcaacaccaggagagcttctcccaaactccccgttcctgcgtagtccgctttctcttgctgccacattctaaaggcttgatattttccaaatggatcctgttgggaaagaataaaattagcttgagcaacctggctaagatagaggggctctgggagactttgaagaccagtcctgtttgcagggaagccccacttgaaggaagaagtctaagagtgaagtaggtgtgacttgaactagattgcatgcttcctcctttgctcttgggaagaccagctttgcagtgacagcttgagtgggttctctgcagccctcagattatttttcctctggctccttggatgtagtcagttagcatcattagtacatctttggagggtggggcaggagtatatgagcatcctctctcacatggaacgctttcataaacttcagggatcccgtgttgccatggaggcatgccaaatgttccatatgtgggtgtcagtcagggacaacaagatccttaatgcagagctagaggacttctggcagggaagtggggaagtgttccagatagcagggcatgaaaacttagagaggtacaagtggctgaaaatcgagtttttcctctgtctttaaattttatatgggctttgttatcttccactggaaaagtgtaatagcatacatcaatggtgtgttaaagctatttccttgccttttttttattggaatggtaggatatcttggctttgccacacacagttacagagtgaacactctactacatgtgactggcagtattaagtgtgcttattttaaatgttactggtagaaaggcagttcaggtatgtgtgtatatagtatgaatgcagtggggacaccctttgtggttacagtttgagacttccaaaggtcatccttaataacaacagatctgcaggggtatgttttaccatctgcatccagcctcctgctaactcctagctgactcagcatagattgtataaaatacctttgtaacggctcttagcacactcacagatgtttgaggctttcagaagctcttctaaaaaatgatacacacctttcacaagggcaaactttttccttttccctgtgtattctagtgaatgaatctcaagattcagtagacctaatgacatttgtattttatgatcttggctgtatttaatggcataggctgacttttgcagatggaggaatttcttgattaatgttgaaaaaaaacccttgattatactctgttggacaaaccgagtgcaatgaatgatgcttttctgaaaatgaaatataacaagtgggtgaatgtggttatggccgaaaaggatatgcagtatgcttaatggtagcaactgaaagaagacatcctgagcagtgccagctttcttctgttgatgccgttccctgaacataggaaaat

SEQ ID NO: 44680 - DNA, 1878 bp, Artificial Sequence
  derived and/or modified sequence
tgatggggaagatagtgttattcccacagtgtggtagtacacactggggcttatagggactgagcctactcaagggtatatggtgctgtgggtcagagctggggcatggcccagggattcagtgtgccttgactccccctgtaaatgttcctctcagaagccttcttggccttccagcccttggtttttgagacaaccagcagtcatttgttcgttcctgacattccttcctgtcccttccttccaggttctgtggacaatcacaatgggaatccaaggagggtctgtcctgttcgggctgctgctcgtcctggctgtcttctgccattcaggtcatagcctgcagtgctacaactgtcctaacccaactgctgactgcaaaacagccgtcaattgttcatctgattttgatgcgtgtctcattaccaaagctgggttacaagtgtataacaagtgttggaagtttgagcattgcaatttcaacgacgtcacaacccgcttgagggaaaatgagctaacgtactactgctgcaagaaggacctgtgtaactttaacgaacagcttgaaaatggtgggacatccttatcagagaaaacagttcttctgctggtgactccatttctggcagcagcctggagccttcatccctaagtcaacaccaggagagcttctcccaaactccccgttcctgcgtagtccgctttctcttgctgccacattctaaaggcttgatattttccaaatggatcctgttgggaaagaataaaattagcttgagcaacctggctaagatagaggggctctgggagactttgaagaccagtcctgtttgcagggaagccccacttgaaggaagaagtctaagagtgaagtaggtgtgacttgaactagattgcatgcttcctcctttgctcttgggaagaccagctttgcagtgacagcttgagtgggttctctgcagccctcagattatttttcctctggctccttggatgtagtcagttagcatcattagtacatctttggagggtggggcaggagtatatgagcatcctctctcacatggaacgctttcataaacttcagggatcccgtgttgccatggaggcatgccaaatgttccatatgtgggtgtcagtcagggacaacaagatccttaatgcagagctagaggacttctggcagggaagtggggaagtgttccagatagcagggcatgaaaacttagagaggtacaagtggctgaaaatcgagtttttcctctgtctttaaattttatatgggctttgttatcttccactggaaaagtgtaatagcatacatcaatggtgtgttaaagctatttccttgccttttttttattggaatggtaggatatcttggctttgccacacacagttacagagtgaacactctactacatgtgactggcagtattaagtgtgcttattttaaatgttactggtagaaaggcagttcaggtatgtgtgtatatagtatgaatgcagtggggacaccctttgtggttacagtttgagacttccaaaggtcatccttaataacaacagatctgcaggggtatgttttaccatctgcatccagcctcctgctaactcctagctgactcagcatagattgtataaaatacctttgtaacggctcttagcacactcacagatgtttgaggctttcagaagctcttctaaaaaatgatacacacctttcacaagggcaaactttttccttttccctgtgtattctagtgaatgaatctcaagattcagtagacctaatgacatttgtattttatgatcttggctgtatttaatggcataggctgacttttgcagatggaggaatttcttgattaatgttga

SEQ ID NO: 44681 - DNA, 741 bp, Artificial Sequence
  derived and/or modified sequence
attatacttcttacagtgaggagccagagcttccaggttctgtggacaatcacaatgggaatccaaggagggtctgtcctgttcgggctgctgctcgtcctggctgtcttctgccattcaggtcatagcctgcagtgctacaactgtcctaacccaactgctgactgcaaaacagccgtcaattgttcatctgattttgatgcgtgtctcattaccaaagctgggttacaagtgtataacaagtgttggaagtttgagcattgcaatttcaacgacgtcacaacccgcttgagggaaaatgagctaacgtactactgctgcaagaaggacctgtgtaactttaacgaacagcttgaaaatggtgggacatccttatcagagaaaacagttcttctgctggtgactccatttctggcagcagcctggagccttcatccctaagtcaacaccaggagagcttctcccaaactccccgttcctgcgtagtccgctttctcttgctgccacattctaaaggcttgatattttccaaatggatcctgttgggaaagaataaaattagcttgagcaacctggctaagatagaggggctctgggagactttgaagaccagtcctgtttgcagggaagccccacttgaaggaagaagtctaagagtgaagtaggtgtgacttgaactagattgcatgcttcctcctttgctcttgggaagaccagctttgcagtgacagcttgagtggg

SEQ ID NO: 44682 - DNA, 758 bp, Artificial Sequence
  derived and/or modified sequence
tttgactcactgaccctgatggggaagatagtgttattcccacagtgtggtagtacacactggggcttatagggactgagcctactcaagggtatatggtgctgtgggtcagagctggggcatggcccagggattcagtgtgccttgactccccctgttctgtggacaatcacaatgggaatccaaggagggtctgtcctgttcgggctgctgctcgtcctggctgtcttctgccattcaggtcatagcctgcagtgctacaactgtcctaacccaactgctgactgcaaaacagccgtcaattgttcatctgattttgatgcgtgtctcattaccaaagctgggttacaagtgtataacaagtgttggaagtttgagcattgcaatttcaacgacgtcacaacccgcttgagggaaaatgagctaacgtactactgctgcaagaaggacctgtgtaactttaacgaacagcttgaaaatggtgggacatccttatcagagaaaacagttcttctgctggtgactccatttctggcagcagcctggagccttcatccctaagtcaacaccaggagagcttctcccaaactccccgttcctgcgtagtccgctttctcttgctgccacattctaaaggcttgatattttccaaatggatcctgttgggaaagaataaaattagcttgagcaacctggctaagatagaggggctctgggagactttgaagaccagtcctgtttgcagggaagccccactt

SEQ ID NO: 44683 - DNA, 825 bp, Artificial Sequence
  derived and/or modified sequence
atttgactcactgaccctgatggggaagatagtgttattcccacagtgtggtagtacacactggggcttatagggactgagcctactcaagggttctgtggacaatcacaatgggaatccaaggagggtctgtcctgttcgggctgctgctcgtcctggctgtcttctgccattcaggtcatagcctgcagtgctacaactgtcctaacccaactgctgactgcaaaacagccgtcaattgttcatctgattttgatgcgtgtctcattaccaaagctgggttacaagtgtataacaagtgttggaagtttgagcattgcaatttcaacgacgtcacaacccgcttgagggaaaatgagctaacgtactactgctgcaagaaggacctgtgtaactttaacgaacagcttgaaaatggtgggacatccttatcagagaaaacagttcttctgctggtgactccatttctggcagcagcctggagccttcatccctaagtcaacaccaggagagcttctcccaaactccccgttcctgcgtagtccgctttctcttgctgccacattctaaaggcttgatattttccaaatggatcctgttgggaaagaataaaattagcttgagcaacctggctaagatagaggggctctgggagactttgaagaccagtcctgtttgcagggaagccccacttgaaggaagaagtctaagagtgaagtaggtgtgacttgaactagattgcatgcttcctcctttgctcttgggaagaccagctttgcagtgacagcttgagtgggttctctgcagccctcagattatttttcc

SEQ ID NO: 44684 - DNA, 789 bp, Artificial Sequence
  derived and/or modified sequence
ccaggttctgtggacaatcacaatgggaatccaaggagggtctgtcctgttcgggctgctgctcgtcctggctgtcttctgccattcaggtcatagcctgcagtgctacaactgtcctaacccaactgctgactgcaaaacagccgtcaattgttcatctgattttgatgcgtgtctcattaccaaagctgggttacaagtgtataacaagtgttggaagtttgagcattgcaatttcaacgacgtcacaacccgcttgagggaaaatgagctaacgtactactgctgcaagaaggacctgtgtaactttaacgaacagcttgaaaatggtgggacatccttatcagagaaaacagttcttctgctggtgactccatttctggcagcagcctggagccttcatccctaagtcaacaccaggagagcttctcccaaactccccgttcctgcgtagtccgctttctcttgctgccacattctaaaggcttgatattttccaaatggatcctgttgggaaagaataaaattagcttgagcaacctggctaagatagaggggctctgggagactttgaagaccagtcctgtttgcagggaagccccacttgaaggaagaagtctaagagtgaaacacattcctgaaggcgctaaaagacgaaaagttacaaggactgaagaccaagcaacctggaaagaagtcggcctctctctcctgaggagctgcctaccagagcttgggcagccacctccttaggtgttagtgcttagataatgtgtcccatttgttgtc

SEQ ID NO: 44685 - DNA, 686 bp, Artificial Sequence
  derived and/or modified sequence
gcagaagcggctcgaggctggaagaggatcttgggcgccgccagtctctctctgttgcccaagctggagtgcagtggcacagtcttggctcactgcaacctccacctcctgggtgcaagcgattctcgtgtctcagcctctcaagtagctgggattacaggttctgtggacaatcacaatgggaatccaaggagggtctgtcctgttcgggctgctgctcgtcctggctgtcttctgccattcaggtcatagcctgcagtgctacaactgtcctaacccaactgctgactgcaaaacagccgtcaattgttcatctgattttgatgcgtgtctcattaccaaagctgggttacaagtgtataacaagtgttggaagtttgagcattgcaatttcaacgacgtcacaacccgcttgagggaaaatgagctaacgtactactgctgcaagaaggacctgtgtaactttaacgaacagcttgaaaatggtgggacatccttatcagagaaaacagttcttctgctggtgactccatttctggcagcagcctggagccttcatccctaagtcaacaccaggagagcttctcccaaactccccgttcctgcgtagtccgctttctcttgctgccacattctaaaggcttgatattttccaaatggatcctgttgggaaagaataaaattag

SEQ ID NO: 44686 - DNA, 652 bp, Artificial Sequence
  derived and/or modified sequence
gaagcggctcgaggctggaagaggatcttgggcgccgccagtctctctctgttgcccaagctggagtgcagtggcacagtcttggctcactgcaacctccacctcctgggtgcaagcgattctcgtgtctcagcctctcaagtagctgggattacagtctttagcaccagttggtgtaggagttgagacctacttcacagtagttctgtggacaatcacaatgggaatccaaggagggtctgtcctgttcgggctgctgctcgtcctggctgtcttctgccattcaggtcatagcctgcagtgctacaactgtcctaacccaactgctgactgcaaaacagccgtcaattgttcatctgattttgatgcgtgtctcattaccaaagctgggttacaagtgtataacaagtgttggaagtttgagcattgcaatttcaacgacgtcacaacccgcttgagggaaaatgagctaacgtactactgctgcaagaaggacctgtgtaactttaacgaacagcttgaaaatggtgggacatccttatcagagaaaacagttcttctgctggtgactccatttctggcagcagcctggagccttcatccctaagtcaacaccaggagagcttctcccaaactccccgttcctgcgtag

SEQ ID NO: 44687 - DNA, 387 bp, Artificial Sequence
  derived and/or modified sequence
atgggcatccagggcggcagcgtgctgttcggcctgctgctggtgctggccgtgttctgccacagcggccacagcctgcagtgctacaactgccccaaccccaccgccgactgcaagaccgccgtgaactgcagcagcgacttcgacgcctgcctgatcaccaaggccggcctgcaggtgtacaacaagtgctggaagttcgagcactgcaacttcaacgacgtgaccaccagactgagagagaacgagctgacctactactgctgcaagaaggacctgtgcaacttcaacgagcagctggagaacggcggcaccagcctgagcgagaagaccgtgctgctgctggtgacccccttcctggccgccgcctggagcctgcacccctag

SEQ ID NO: 44688 - protein, 1235 aa, Artificial Sequence
  derived and/or modified sequence
MDGPTRGHGLRKKRRSRSQRDRERRSRGGLGAGAAGGGGAGRTRALSLASSSGSDKEDNGKPPSSAPSRPRPPRRKRRESTSAEEDIIDGFAMTSFVTFEALEKDVALKPQERVEKRQTPLTKKKREALTNGLSFHSKKSRLSHPHHYSSDRENDRNLCQHLGKRKKMPKALRQLKPGQNSCRDSDSESASGESKGFHRSSSRERLSDSSAPSSLGTGYFCDSDSDQEEKASDASSEKLFNTVIVNKDPELGVGTLPEHDSQDAGPIVPKISGLERSQEKSQDCCKEPIFEPVVLKDPCPQVAQPIPQPQTEPQLRAPSPDPDLVQRTEAPPQPPPLSTQPPQGPPEAQLQPAPQPQVQRPPRPQSPTQLLHQNLPPVQAHPSAQSLSQPLSAYNSSSLSLNSLSSSRSSTPAKTQPAPPHISHHPSASPFPLSLPNHSPLHSFTPTLQPPAHSHHPNMFAPPTALPPPPPLTSGSLQVAGHPAGSTYSEQDILRQELNTRFLASQSADRGASLGPPPYLRTEFHQHQHQHQHTHQHTHQHTFTPFPHAIPPTAIMPTPAPPMFDKYPTKVDPFYRHSLFHSYPPAVSGIPPMIPPTGPFGSLQGAFQPKLTDPFRPMLRKPGKWCAMHVHIAWQIYHHQQKVKKQMQSDPHKLDFGLKPEFLSRPPGPSLFGAIHHPHDLARPSTLFSAAGAAHPTGTPFGPPPHHSNFLNPAAHLEPFNRPSTFTGLAAVGGNAFGGLGNPSVTPNSMFGHKDGPSVQNFSNPHEPWNRLHRTPPSFPTPPPWLKPGELERSASAAAHDRDRDVDKRDSSVSKDDKERESVEKRHSSHPSPAPVLPVNALGHTRSSTEQIRAHLNTEAREKDKPKERERDHSESRKDLAADEHKAKEGHLPEKDGHGHEGRAAGEEAKQLARVPSPYVRTPVVESARPNSTSSREAEPRKGEPAYENPKKSSEVKVKEERKEDHDLPPEAPQTHRASEPPPPNSSSSVHPGPLASMPMTVGVTGIHPMNSISSLDRTRMMTPFMGISPLPGGERFPYPSFHWDPIRDPLRDPYRELDIHRRDPLGRDFLLRNDPLHRLSTPRLYEADRSFRDREPHDYSHHHHHHHHPLSVDPRREHERGGHLDERERLHMLREDYEHTRLHSVHPASLDGHLPHPSLITPGLPSMHYPRISPTAGNQNGLLNKTPPTAALSAPPPLISTLGGRPVSPRRTTPLSAEIRERPPSHTLKDIEAR

SEQ ID NO: 44689 - DNA, 3708 bp, Artificial Sequence
  derived and/or modified sequence
atggacggccccaccagaggccacggcctgagaaagaagagaagaagcagaagccagagagacagagagagaagaagcagaggcggcctgggcgccggcgccgccggcggcggcggcgccggcagaaccagagccctgagcctggccagcagcagcggcagcgacaaggaggacaacggcaagccccccagcagcgcccccagcagacccagaccccccagaagaaagagaagagagagcaccagcgccgaggaggacatcatcgacggcttcgccatgaccagcttcgtgaccttcgaggccctggagaaggacgtggccctgaagccccaggagagagtggagaagagacagacccccctgaccaagaagaagagagaggccctgaccaacggcctgagcttccacagcaagaagagcagactgagccacccccaccactacagcagcgacagagagaacgacagaaacctgtgccagcacctgggcaagagaaagaagatgcccaaggccctgagacagctgaagcccggccagaacagctgcagagacagcgacagcgagagcgccagcggcgagagcaagggcttccacagaagcagcagcagagagagactgagcgacagcagcgcccccagcagcctgggcaccggctacttctgcgacagcgacagcgaccaggaggagaaggccagcgacgccagcagcgagaagctgttcaacaccgtgatcgtgaacaaggaccccgagctgggcgtgggcaccctgcccgagcacgacagccaggacgccggccccatcgtgcccaagatcagcggcctggagagaagccaggagaagagccaggactgctgcaaggagcccatcttcgagcccgtggtgctgaaggacccctgcccccaggtggcccagcccatcccccagccccagaccgagccccagctgagagcccccagccccgaccccgacctggtgcagagaaccgaggcccccccccagcccccccccctgagcacccagcccccccagggcccccccgaggcccagctgcagcccgccccccagccccaggtgcagagaccccccagaccccagagccccacccagctgctgcaccagaacctgccccccgtgcaggcccaccccagcgcccagagcctgagccagcccctgagcgcctacaacagcagcagcctgagcctgaacagcctgagcagcagcagaagcagcacccccgccaagacccagcccgcccccccccacatcagccaccaccccagcgccagccccttccccctgagcctgcccaaccacagccccctgcacagcttcacccccaccctgcagccccccgcccacagccaccaccccaacatgttcgccccccccaccgccctgcccccccccccccccctgaccagcggcagcctgcaggtggccggccaccccgccggcagcacctacagcgagcaggacatcctgagacaggagctgaacaccagattcctggccagccagagcgccgacagaggcgccagcctgggcccccccccctacctgagaaccgagttccaccagcaccagcaccagcaccagcacacccaccagcacacccaccagcacaccttcacccccttcccccacgccatcccccccaccgccatcatgcccacccccgccccccccatgttcgacaagtaccccaccaaggtggaccccttctacagacacagcctgttccacagctacccccccgccgtgagcggcatcccccccatgatcccccccaccggccccttcggcagcctgcagggcgccttccagcccaagctgaccgaccccttcagacccatgctgagaaagcccggcaagtggtgcgccatgcacgtgcacatcgcctggcagatctaccaccaccagcagaaggtgaagaagcagatgcagagcgacccccacaagctggacttcggcctgaagcccgagttcctgagcagaccccccggccccagcctgttcggcgccatccaccacccccacgacctggccagacccagcaccctgttcagcgccgccggcgccgcccaccccaccggcacccccttcggcccccccccccaccacagcaacttcctgaaccccgccgcccacctggagcccttcaacagacccagcaccttcaccggcctggccgccgtgggcggcaacgccttcggcggcctgggcaaccccagcgtgacccccaacagcatgttcggccacaaggacggccccagcgtgcagaacttcagcaacccccacgagccctggaacagactgcacagaaccccccccagcttccccaccccccccccctggctgaagcccggcgagctggagagaagcgccagcgccgccgcccacgacagagacagagacgtggacaagagagacagcagcgtgagcaaggacgacaaggagagagagagcgtggagaagagacacagcagccaccccagccccgcccccgtgctgcccgtgaacgccctgggccacaccagaagcagcaccgagcagatcagagcccacctgaacaccgaggccagagagaaggacaagcccaaggagagagagagagaccacagcgagagcagaaaggacctggccgccgacgagcacaaggccaaggagggccacctgcccgagaaggacggccacggccacgagggcagagccgccggcgaggaggccaagcagctggccagagtgcccagcccctacgtgagaacccccgtggtggagagcgccagacccaacagcaccagcagcagagaggccgagcccagaaagggcgagcccgcctacgagaaccccaagaagagcagcgaggtgaaggtgaaggaggagagaaaggaggaccacgacctgccccccgaggccccccagacccacagagccagcgagccccccccccccaacagcagcagcagcgtgcaccccggccccctggccagcatgcccatgaccgtgggcgtgaccggcatccaccccatgaacagcatcagcagcctggacagaaccagaatgatgacccccttcatgggcatcagccccctgcccggcggcgagagattcccctaccccagcttccactgggaccccatcagagaccccctgagagacccctacagagagctggacatccacagaagagaccccctgggcagagacttcctgctgagaaacgaccccctgcacagactgagcacccccagactgtacgaggccgacagaagcttcagagacagagagccccacgactacagccaccaccaccaccaccaccaccaccccctgagcgtggaccccagaagagagcacgagagaggcggccacctggacgagagagagagactgcacatgctgagagaggactacgagcacaccagactgcacagcgtgcaccccgccagcctggacggccacctgccccaccccagcctgatcacccccggcctgcccagcatgcactaccccagaatcagccccaccgccggcaaccagaacggcctgctgaacaagaccccccccaccgccgccctgagcgcccccccccccctgatcagcaccctgggcggcagacccgtgagccccagaagaaccacccccctgagcgccgagatcagagagagaccccccagccacaccctgaaggacatcgaggccagatag

SEQ ID NO: 44690 - DNA, 3708 bp, Artificial Sequence
  derived and/or modified sequence
atggatgggccaacgagaggtcacggactgaggaagaaacgcagaagtaggtcccagcgcgatcgggagcggagatctagaggaggcctgggcgccggtgcagcaggtggcggtggcgcgggacgcactcgggccctgtctctagccagctcttcaggcagcgataaggaggataacggaaaaccccccagtagcgcgccttcgcgaccgcgaccccccaggcggaaacgtcgcgagagcacaagcgccgaggaggatattatcgacggctttgccatgacttcgtttgttaccttcgaagctctcgaaaaagacgtggctcttaagccccaggaacgggtggagaaacggcagacacccttaacgaaaaaaaaaagagaggcgttaaccaatggactgtcattccactccaagaaaagcagactgtctcacccgcatcactactccagtgatagagagaacgacaggaacctctgtcagcatctggggaagagaaaaaaaatgcccaaagcgctgaggcagctgaagcccgggcagaattcatgccgggactctgattcagagagcgcttccggagagagtaaaggctttcacagaagttcttctagggaacggctgtccgactcctcggctccgtcctccttgggaacaggatacttctgcgactctgatagtgatcaagaggagaaggctagcgacgcctccagtgaaaagctgtttaacacagtaatcgtaaataaagaccctgagctgggagtgggaacccttcccgagcatgattcccaggacgccgggcccattgtgcctaagatttctggcctggaacgaagccaggagaagtcccaggactgttgcaaggaacccatctttgagcccgtagttttgaaagatccctgcccacaggtagcccagccaatcccgcagccccagacagagccacagcttcgggccccctcacccgatccagatttagttcagagaaccgaggcccctccacagccgccacctttaagcacacaacctcctcaaggcccacccgaggcccagctgcagccggctccacaaccccaagtgcagcgcccgccccgaccccaaagccctactcaactgctgcaccagaatctcccacctgtgcaagcacacccttctgcacagtctttaagccagccgttgtcagcttacaacagctcatccctctcccttaattcactatcgtcaagccgctcctccacaccagccaaaactcagccagcaccaccccacattagccaccacccctcggcttcaccttttcccttaagtcttcctaaccacagcccattgcactccttcacccccactctgcagccaccagcccactcgcaccatcccaatatgttcgctccgcccactgctctccccccccccccccctctcaccagcgggagccttcaagtagcaggccaccccgcaggcagcacctattccgagcaggacattctgagacaagagcttaacaccaggttcctggcgtcacagtcggcagaccgaggcgcctccctcggtccacccccatatttgcgcaccgagtttcatcaacaccagcaccaacaccagcatactcaccagcatactcatcagcacacattcacaccatttccacacgccattccacctaccgccatcatgcctaccccagctcctcctatgtttgacaaataccctacgaaagtggacccattctatagacacagcctttttcatagctacccccctgctgtatcagggatacctccgatgatccctccaaccggcccattcgggagcctgcaaggcgcgttccagccgaaattgacagacccattcagacctatgcttaggaagccaggcaagtggtgcgcaatgcatgtgcacatcgcctggcagatttaccatcaccagcagaaggtgaagaaacagatgcagagcgatcctcacaagctggactttggattgaagcccgagtttctctcccgtccccctgggccctccctcttcggagccatccaccacccgcatgatttggcaagaccgtcaaccttgttcagcgctgccggcgctgcacatccaactggcacccccttcggtccgcccccacatcactcaaattttctcaatccggcagcgcacttggaaccgtttaaccggccctcaacctttacaggactggctgccgtcggcgggaacgcgttcggagggctgggcaacccctctgtcacccctaatagcatgttcggacacaaagacggcccatcagtgcagaacttctccaaccctcatgagccatggaaccgcctgcacagaactccaccaagctttcccacgcccccgccttggttgaaacctggagagctggaaagaagcgcctcagctgccgcgcatgatcgcgatcgcgatgtggacaagagggactctagtgtgtctaaggatgataaggaaagagagagtgtcgaaaaaaggcacagttcccaccctagcccagcacctgtgctgccggtgaatgccttaggccacacgcggagctccacggagcagatcagagcccaccttaacaccgaagcacgagagaaggacaagcccaaagaaagagagcgcgaccacagcgaatcaaggaaagacttagccgctgatgagcacaaggccaaagagggccatctgccggagaaagatggacatggccacgaaggcagagccgccggcgaagaggccaaacagctcgcaagagtgccatctccttacgtgcggacacctgtcgtggaatccgcacgaccgaattccacctcttcacgggaagcagagccgcgcaaaggcgagccagcgtacgagaatccgaagaagagctcggaagttaaggttaaagaggagcgaaaagaagaccacgatctcccaccagaggctccccaaacccaccgggcctctgaacccccacctccaaacagtagctcctctgtacacccgggaccgcttgcctcaatgccaatgactgtgggcgtaaccggaatccaccccatgaactctatcagtagcctcgatcgtacgagaatgatgacacccttcatggggatatctcctctgccaggtggcgagaggttcccttatccttctttccactgggatcccattcgcgacccgctgcgtgatccgtatagggaactggacattcatcggcgcgaccctttagggagagatttcctactccgtaacgaccctctgcaccgattgagcacgcccaggctttacgaggctgacagatccttccgagatagagaacctcatgattattcccaccaccaccaccaccaccatcatcctctcagcgtggacccgcggcgcgaacacgaaagagggggccacctcgacgaacgcgagcgactccacatgctacgcgaagattacgagcacacccgactgcactcagtacacccagcatctctggatggccatcttcctcatcctagcctcatcactcctggcctgccaagcatgcactatccgagaattagccctacagccgggaatcaaaacggactccttaataaaacaccccctaccgccgcactaagtgccccacctcctttgatatcaacgctcggtgggcgccctgtttctccacgacggactacacctctgtcagctgagattagagagcggcctccttcgcataccctcaaagatatcgaagcaagatag

SEQ ID NO: 44691 - DNA, 3708 bp, Artificial Sequence
  derived and/or modified sequence
atggatggccccacccggggccacggcctgaggaagaagaggaggagccgcagccagagggaccgggagcggcgcagccggggcggcctgggcgctggagctgctgggggcggcggggccggccgcacccgggccctgagcctggccagcagcagcggcagtgacaaggaggacaatggcaagccacccagcagcgcccccagccggccccggccccccaggaggaagagaagagagagcaccagcgctgaggaggacatcattgatggctttgccatgaccagctttgtgacctttgaggccctggagaaggatgtggccctgaagccccaggagcgggtggagaagaggcagacccccctgaccaagaagaagcgggaggccctgaccaacggcctgtccttccacagcaagaagagccggctgagccacccccaccactacagcagtgacagagaaaatgacaggaacctgtgccagcacctgggcaagaggaagaagatgcccaaggccctgcggcagctgaagccaggccagaacagctgccgggacagcgacagcgagagcgccagcggggagagcaagggcttccacaggagcagcagccgggagcggctgagtgacagcagcgcccccagcagcctgggcaccggctacttctgtgacagcgacagcgaccaggaggagaaggccagtgatgccagcagcgagaagctgttcaacacagtcatcgtgaacaaggaccctgagctgggcgtgggcaccctgcctgagcatgacagccaggatgctggccccatcgtgcccaagatcagcggcctggagaggagccaggagaagagccaggactgctgcaaggagcccatctttgagcctgtggtgctgaaggacccctgcccccaggtggcccagcccatcccccagccccagacagagccccagctgcgggcccccagcccagaccctgacctggtgcagaggacagaggccccaccccagcccccacccctgagcacccagcccccccagggccccccagaggcccagctgcagcctgccccccagccccaggtgcagaggcctccccggccccagagccccacccagctgctgcaccagaacctgccccctgtgcaggcccaccccagcgcccagagcctgagccagcccctgagcgcctacaacagcagcagcctgagcctgaacagcctgagcagcagccgcagcagcaccccagccaagacccagcctgccccaccccacatcagccaccaccccagcgccagccccttccccctgagcctgcccaaccacagccccctgcacagcttcacccccaccctgcagcccccagcccacagccaccaccccaacatgtttgccccacccacagccctgcccccacctccacccctgaccagcggcagcctgcaggtggccggccaccctgctggcagcacctacagcgagcaggacatcctgcggcaggagctgaacacccgcttcctggccagccagagcgctgacagaggagccagcctgggccccccaccctacctgaggacagagttccaccagcaccagcaccagcaccagcacacccaccagcacacccaccagcacaccttcacccccttcccccacgccatccccccaacagccatcatgcccaccccagccccacccatgtttgacaagtaccccaccaaggtggaccccttctaccgccacagcctcttccacagctaccccccagctgtgtctggcatcccccccatgatccccccaacaggccccttcggcagcctgcagggcgccttccagcccaagctgacagaccccttccggcccatgctgaggaagccaggcaagtggtgtgccatgcacgtgcacatcgcctggcagatctaccaccaccagcagaaggtgaagaagcagatgcagagcgacccccacaagctggactttggcctgaagccagagttcctgagccggcccccaggccccagcctgtttggagccatccaccacccccatgacctggcccggcccagcaccctcttctctgctgctggagctgcccaccccaccggcaccccatttggacctccaccccaccacagcaacttcctgaacccagctgcccacctggagcccttcaaccggcccagcaccttcaccggcctggccgctgtgggcggcaatgcctttggaggcctgggcaaccccagcgtgacccccaacagcatgtttggccacaaggatggccccagcgtgcagaacttcagcaacccccatgagccctggaaccggctgcacaggaccccacccagcttccccaccccaccaccctggctgaagccaggagagctggagaggtctgccagcgctgctgcccatgaccgggacagagatgtggacaagagggacagctctgtgtccaaggatgacaaggagcgggagagcgtggagaagaggcacagcagccaccccagccctgcccctgtgctgcctgtgaatgccctgggccacaccaggagcagcacagagcagatccgggcccacctgaacacagaggcccgggagaaggacaagcccaaggagcgggagcgggaccacagcgagagcaggaaggacctggccgcagatgagcacaaggccaaggagggccacctgcctgagaaggatggccacggccacgagggccgggctgctggggaggaggccaagcagctggcccgggtgcccagcccctacgtgaggacccctgtggtggagagcgcccggcccaacagcaccagcagccgggaggccgagcccaggaagggggagcccgcctatgagaaccccaagaagagcagcgaggtgaaggtgaaggaggagaggaaggaggaccatgacctgcccccagaggccccccagacccaccgggccagcgagcccccaccacccaacagcagcagctctgtgcaccctggccccctggcctccatgcccatgacagtgggcgtgacaggcatccaccccatgaacagcatcagcagcctggacaggaccaggatgatgacccccttcatgggcatcagccccctgcccggcggggagcgcttcccctaccccagcttccactgggaccccatccgggaccccctgcgggacccctaccgggagctggacatccaccggcgggaccccctgggccgggacttcctgctgagaaatgaccccctgcaccggctgagcaccccccggctgtatgaggccgaccgctccttccgggaccgggagccccatgactacagccaccaccaccaccaccaccaccaccccctgtctgtggacccccggcgggagcacgagcggggcggccacctggatgagcgggagcggctgcacatgctgcgggaggactatgagcacacccggctgcacagcgtgcacccagccagcctggatggccacctgccccaccccagcctcatcaccccaggcctgcccagcatgcactacccccgcatcagccccacagctggcaaccagaatggcctgctgaacaagaccccacccacagctgccctgagcgcccctcctcctctcatcagcaccctgggcggccggcctgtgagccccaggaggaccacccccctgtctgctgagatccgggagcggccccccagccacaccctgaaggacatcgaggccaggtag

SEQ ID NO: 44692 - DNA, 3708 bp, Artificial Sequence
  derived and/or modified sequence
atggacggccccacccggggccacggcctgcggaagaagcggcggtcacggagccaacgagatagggaacgcaggagtaggggaggcttgggggcaggcgctgcagggggggggggcgccggaaggactcgggctctgtcactcgccagctcatctggttcagacaaggaggataatggcaaaccaccatcatcagcacctagcagaccacggcccccccggcggaaacgaagagagagtacatcagctgaggaggacataatagacgggtttgctatgacgtcttttgtgaccttcgaggcgttggaaaaggacgtggccctgaaaccgcaggagcgggtcgaaaagaggcagactcctctaactaaaaaaaaacgagaggccctcacaaatggcctttccttccacagtaagaagtcaagactcagccaccctcaccactacagtagtgacagagagaacgataggaacctatgccagcacttgggaaagcggaagaaaatgcctaaagcgctgcgccagctcaagcccggacagaattcatgtcgcgacagcgattccgaatccgcctcgggggaatcaaaaggattccacagatcttcctcacgcgagaggctttccgatagttctgcaccatcctccctggggactggctacttttgtgatagcgattccgatcaagaggagaaagcctctgatgccagtagcgagaaactcttcaatacagtgattgtaaacaaggaccccgagctcggtgtgggaactctgccagaacacgattcccaggacgccggaccaattgtacccaaaatctcggggctggagagaagtcaggagaagtctcaggattgctgcaaggaacccatcttcgaaccggtggtcctcaaagatccttgtccccaagttgcacagccaattcctcaaccacagacagaaccacagttgagggcaccaagtcctgatcccgatctagtacagagaaccgaggcccctcctcagcccccccctctgagcacacagcccccacagggcccgccagaggcccagctgcagccagcgccccagccacaagtgcagagaccccccaggccacagagtccaacgcaactactacaccagaatctcccaccagtgcaggcccatccatccgcacaaagcctcagccaaccactctctgcctacaactcctcttccctgtcgctcaatagcctttcttccagccgctctagtacacctgccaaaacacagcctgcaccccctcacattagtcaccatccctctgcctcgccattccctctcagcctccccaaccatagcccactgcattccttcacccccacgctccagccgccagctcacagccaccatcccaatatgttcgccccaccaacagcactgcccccaccacctcctctcacctctggttccctgcaggtcgcgggacacccggcagggtctacctatagcgaacaggacatcctacggcaagagctcaacaccagatttctggcgtcccagagcgcagatcggggggcctccctgggacctcccccatatctacgcactgaattccatcagcaccagcaccagcaccaacacacacatcagcacactcaccagcatacatttacccccttcccccacgccattccacctacagccatcatgcctacccctgccccccctatgtttgataagtacccaactaaagtggatcccttttaccggcattccctgtttcactcttatcctcctgcggtgagcggcattcctccaatgattccccccaccggccccttcggaagcctgcagggcgcgttccaaccaaagctaacggacccatttcgtccaatgctcaggaaaccaggcaaatggtgtgccatgcacgtgcatattgcatggcaaatataccatcaccaacaaaaggtgaaaaaacagatgcagtcagacccccataaactggacttcgggctgaagcctgaattcctttctagacccccaggaccgagtcttttcggagcaatccatcaccctcatgatctggccaggccctcaactctgttctccgccgccggagcagcccatccgactgggacaccctttggcccacctccccatcatagcaacttcctcaacccagccgctcacttggagcctttcaatcggccctctacatttaccgggctagctgctgtaggaggcaatgcttttggtggcctgggcaacccgtcagtaacacccaactccatgtttggccacaaagatggcccctctgtgcaaaacttttccaacccacatgagccctggaatcgcctccatagaactcctccctctttccccaccccacctccctggttgaaacctggagagctggagaggtccgccagcgccgctgcacatgacagagaccgcgacgttgataagcgtgactcctcggtcagcaaggacgataaagaaagagaaagcgttgagaagcgccattcatcccatccgagtcccgcccctgttttaccagtaaatgctttagggcatactcgcagttcgaccgagcaaattcgcgcccatctcaacaccgaagccagggagaaggacaaaccaaaggaacgggagcgcgatcactccgagagtaggaaagatctggctgctgatgagcataaggcgaaggagggccatttaccggagaaggatggacatggccatgagggaagggcagcgggcgaggaagcaaagcaactcgcgagggtgccctcgccctatgtccgtactcccgtggttgaatccgctcgccccaactcaacttcttcacgcgaggccgaaccaagaaagggcgaacccgcgtacgaaaatcccaagaagtccagcgaagtgaaagtcaaagaagagagaaaggaggaccacgacctgccaccagaggctccccaaacccatagggcctcagaaccaccacctccaaacagctcatccagcgtgcatcccggcccactggcctcaatgccgatgactgttggagtcaccggcatccatcctatgaattctatctctagcctcgatagaacgcgaatgatgactcccttcatggggatcagtccactgcccggcggcgaacggtttccgtatccctctttccactgggaccccatcagagaccctctgagggatccctaccgggagctagatatccaccgacgcgatccactaggacgcgattttcttttgagaaacgatccgctgcataggttgtccacccccaggctgtacgaagccgatcgttccttcagggacagggaaccccatgactactcccaccaccaccatcatcaccaccaccccctgtcggtggatcctcggagggaacatgagaggggggggcacctcgatgagagagagaggcttcatatgctccgagaagattacgagcacactcggttgcatagtgttcatccggcttccctcgacgggcacctgcctcacccgtctcttattactccagggctgccaagcatgcattacccccggataagtccgacggctggtaaccagaatggcctccttaacaagaccccacctactgctgctctgagtgccccaccacccctgattagtaccctggggggaaggccagttagccctagacggaccacgccgttatctgccgagattcgcgagcgtcctcccagccacactcttaaagatatcgaagcccggtag

SEQ ID NO: 44693 - DNA, 3708 bp, Artificial Sequence
  derived and/or modified sequence
atggacggaccgacccggggtcacggactgcgcaaaaaaaggcgcagccgtagccagcgcgatcgtgaacgaagaagccgaggagggctcggggcaggggctgcaggcggagggggtgctggacgaacacgcgctctgagcctggcctcttctagcggcagtgataaagaggacaatggtaagccacccagtagcgcacccagtcgaccacgtccgcctcgacgcaagagaagagaaagtactagtgccgaggaagatatcatcgacggattcgcaatgacttccttcgtcaccttcgaggctctcgagaaagacgtggcgttgaagccccaggaaagggtcgagaagcggcaaacccccctcacaaagaagaagagggaggcattgaccaatgggcttagcttccattctaaaaaatcccgattgagtcacccgcatcactatagttctgatagggagaacgaccggaatttgtgccaacacctggggaaacggaaaaaaatgcctaaagcactgaggcagcttaaacctggacaaaatagctgtagagacagcgactccgaatcggccagcggtgagtctaaagggttccatagatcatctagtagggagcgtttgagtgactcttccgctccttccagcctgggcactgggtatttctgtgactccgactcggaccaagaggagaaggctagtgacgcaagtagtgaaaagcttttcaataccgtcatcgtcaacaaagaccccgaactgggagtcggcacccttcccgagcacgattctcaagacgcaggtcctatcgtgcccaagatcagcggtctggagaggtcgcaggaaaaaagtcaggattgttgcaaagagcctatcttcgaaccagtcgtccttaaggacccatgtccacaggttgctcagccaatccctcagccacagaccgagccacagcttcgcgcaccttccccagatcccgacctggtccagcggacagaggcccctcctcagccaccccctctgtcaacacagcccccacagggcccaccagaggctcagctccagcctgcccctcagccccaggtgcagcggcctcctaggccccagtcacccactcagctgttacaccagaacctccctccggtccaggcccacccgtcagctcagtcacttagtcagccgctgtccgcctacaacagcagtagcctcagtctgaacagtctgagctctagccgctctagcaccccagctaaaacccaacccgcaccaccacatatcagccaccatcccagcgcaagcccttttccgctgagtctcccaaatcattcccccctccattctttcactcccaccttgcagccacccgcacactcccatcatcccaacatgttcgcaccaccgactgctctgccacctccaccccctctgacctcgggaagcctacaagtggcaggtcatccagccggttcgacctactcggagcaagacatactccgacaggaattgaacacccgatttctggcttcgcagtctgccgaccggggagcatccctaggcccacccccttacctgagaacagagtttcaccagcaccagcaccagcaccagcacactcaccaacatacacaccagcatacgttcacgccctttccccacgcaatacctcccacggccatcatgcccactccagcacccccaatgtttgataaataccccacaaaggtcgacccattctataggcactcgttatttcactcctatcctccagcagtgtcaggcatccctcccatgatccctccgacaggaccttttggcagtctgcaaggggctttccagccgaagttgactgatccctttcgtcctatgctgcgcaaacccggaaaatggtgtgccatgcatgtgcatatcgcatggcagatttatcaccaccagcagaaagtgaagaaacagatgcagagcgacccacacaaacttgatttcgggcttaagccggagttcttgagccgcccacctggtccttctcttttcggggcaatccaccatcctcatgaccttgcacgcccatcgactctgttttctgccgcaggtgcagcccacccaacaggcactccctttggtcctcctccccatcattccaatttcttaaatcctgctgcccatcttgagccctttaatcggccttccactttcactgggctcgcagccgttgggggaaatgcctttgggggtttggggaacccgtctgtgacacctaattcgatgtttggacataaagatgggccatcggtccaaaatttctcaaatcctcatgagccctggaatagattgcatagaaccccaccaagctttcccacacccccaccgtggctcaagccgggagagctcgagagaagtgccagcgctgcagctcacgatcgagaccgtgatgtggataaaagggattcgtcggtgagcaaagatgataaggaacgtgagtcagtggagaaacgtcactcctcccatccgagccccgctcccgtccttcccgtcaacgccctgggccataccagatcttcaacggagcagattagagcgcatttgaacaccgaagccagagagaaggacaagcctaaggaaagggaacgagatcacagcgaatccagaaaagacctggccgcagacgagcataaggctaaggagggacatttgcctgaaaaggatggccacggccacgagggcagagccgctggagaggaggcaaagcagctggcgagggtacccagcccttacgtgcggacacccgtagtggagtcagcaagacccaattccacctcatcaagggaagccgagcctcggaagggggagcctgcttatgagaatcctaagaaaagctccgaggtgaaggtgaaagaagagcgaaaggaagatcacgacctgcctcccgaggcgcctcagactcatagggctagcgaacccccacccccaaatagcagctcttccgtacaccccggacccttggcgagtatgccaatgactgtaggtgtcaccggtattcaccctatgaacagcattagctctctcgaccgcacacgaatgatgacaccatttatgggtatctccccactgccgggaggcgagcgttttccttatccatctttccactgggatcccattagagaccctctaagagacccgtacagagagcttgatattcacaggcgagacccgttgggtcgtgatttcttgttaagaaatgatcctctgcatagactctccacaccaagactctacgaagccgacagatcattcagagaccgggagccccacgactattctcaccatcatcatcatcatcaccatccattgtccgtggaccctcgaagagaacacgaaaggggtggtcacctggatgagagggagcgattacacatgttaagggaagactatgagcacacaaggctccattcagttcatccagccagtctcgacggccatctgccccaccctagcttgataactcccggattgcccagcatgcactacccgcgaattagccccacggcaggaaatcagaacggtcttctgaataagaccccacctaccgccgctctctcggctccccctcctcttatttctacgctgggcggaaggccggtctcgccaagacgcaccacgcctctgtccgcagagatcagggaacggcctcctagtcacaccctgaaagacatagaagccagatag

SEQ ID NO: 44694 - DNA, 5950 bp, Artificial Sequence
  derived and/or modified sequence
cgctcgcagtttcgccctctcttccgctaatgattgcattattatgctcccctctctggggggtctcgcccctcttgggtcgctccggagccccggcctcccctggctgcatttcttaaaaatttgggagcctgggagtgagttttctccgaggcgtgtgtgagaggcggcgggggtgttttcctgcgcgaggggcgggtgaagttcattgcccccacttttcccgcgacctttttcggacccgattttggatcgagttgaggggggcgcgggcgttttcggggggcggggggcgcggcggagaatggccgcggggagggctccccggagcctcccagtctcttgatcaaagcattccgctattctgatttattgcttgcttggtgagttatttttttttcctctaaaggagacctgtgtgttcagccattactttgctcggcgctgctcccaggcatctccgaccctcggtgctgtggggagccccacacttgggctcctcgcctctcgccctcgctccccgtccctcctcccctctctccgccccttcccccttttctttctcctctctttcttcccctctctcccttctttcggccgccgtctcccccgcgccctcctcggggcggagggaagccgtgaagggggagggagggctcggtgtcaatttttttttgtgtggctgcggccgtagcctgtggcgggcaagcggggagaccccggcgcagcagaaccatggatggcccgacgcggggccatggactccgcaaaaagcggcggtcgcggtcgcagcgagaccgggagaggcgctcccggggcgggctgggggccggcgcggccggcggcggcggggctggccggacccgggcgctctcactcgcctcgtcgtcgggctccgacaaggaagacaatgggaagcccccgtcctccgccccgtcccggcccagacccccgcggaggaagcggagagagtccacctcggcagaagaggacatcattgatggatttgccatgaccagctttgtcacttttgaagcgctggagaaagatgtagcacttaagcctcaggaacgtgtggagaaacgccagacgcccctgaccaagaagaaacgagaagcacttaccaatggcttgtcctttcattcaaagaagagcagactcagccacccacaccactacagctcagatcgagaaaatgaccgcaatctctgccagcaccttgggaagagaaagaaaatgccgaaggcactcagacagctcaagccaggacagaacagctgcagggacagtgacagtgaaagtgccagtggagaatccaagggcttccaccggagcagctctcgggaaaggctcagtgatagttcagctccttccagcttgggaacaggctacttctgtgacagtgacagtgaccaggaagagaaggcatcagatgccagctctgaaaaactcttcaacactgttattgtaaacaaagatccggagttaggtgttggcacgctaccagaacatgacagccaggatgcagggccgattgtccccaagatatcgggtctagagagaagccaggagaagagccaggactgttgcaaagagccaatctttgagcctgtggtgcttaaagacccctgccctcaggtcgcacagccaataccccagccgcagacggagccccaactccgagctccttctccggaccctgacttggtgcagcgcacagaggccccacctcaacccccacctctgagtacacagccaccacagggccctcctgaggcccagctccagcctgccccgcagcctcaggtgcagaggccacccaggccacagtcccccacccagctgctccatcagaacctcccacctgtgcaggcccacccctctgctcagagcctctcccagccattgtcagcctacaacagcagtagcttaagcctcaacagtttaagcagcagcagaagcagcactccagcgaagactcagcccgccccacctcacatctcccaccacccctctgcctccccgttccccctctccctgcccaaccacagccccctgcacagcttcacacccaccctccagccccccgcacactcacatcaccccaatatgtttgcccctcccactgctctgcctcctccaccaccactgacatcaggaagtctgcaggtggccggacacccggccgggagcacttactcagagcaagacatcttgcgacaggaactgaacactcgttttttggcctctcagagtgctgaccgcggggcttccctgggccctccgccctacctgcggaccgagttccatcagcaccagcaccagcaccagcacacccaccagcacacgcaccagcacaccttcacgccgttcccccacgccatcccacccaccgccatcatgccgacgccagcacctcccatgtttgacaaataccctacaaaagttgacccattctaccggcacagtctcttccattcctatcctcctgcagtgtcgggcatcccccctatgatcccacccactggcccttttggttcactacaaggagcatttcagccgaagttgacagatcctttcagacctatgttaaggaaaccagggaagtggtgtgctatgcatgttcacatcgcctggcagatttaccaccaccaacagaaagtcaagaaacagatgcagtcagacccacataagctggactttggactgaaacctgagttcctgagccgccctccaggccccagtctttttggagccatccaccacccccatgacctggcacggccttcaactttgttctctgccgctggtgctgcacacccaactgggaccccttttgggccacctcctcatcacagcaacttcctcaaccctgctgcccacctagagccttttaatcggccgtctacattcacaggcctagcagcagttggtggcaatgccttcgggggacttggaaatccttccgttacacccaactcaatgttcggccacaaggatggccccagtgtgcagaactttagcaaccctcacgaaccctggaaccggctgcaccgaacgcctccgtcgttcccgacccctccgccctggctgaagccaggggagctggagcgcagcgcgtccgctgcagctcatgacagagatagagatgtagataaacgagactcatctgttagtaaagatgacaaagaaagggaaagcgtcgagaagagacactccagccacccttcaccagcacctgtcctcccggtgaatgccctgggacatacccgcagctccactgaacagatccgggctcatctgaacactgaggctcgggagaaggacaaacccaaagagagggagagagaccactcggaatcccgcaaggacctggccgccgacgagcacaaggcgaaagagggccacctgcccgagaaggacgggcacggccacgaggggcgcgccgcgggcgaagaggccaagcagctggcccgggtgccgtctccctacgtgcggaccccggtggtggagagtgccaggcccaacagcacctcgagccgggaggccgagccgcgcaagggtgagccggcctacgagaaccccaagaagagctccgaggtcaaggtgaaggaggagcggaaggaagaccatgacctgcctccagaggccccgcagacccaccgggcctcggagccgccgcctcccaactcctcgtccagcgtgcacccggggcccctggcctcgatgcccatgacggtgggggtgacgggcattcaccccatgaacagcatcagcagcctggacaggactcgcatgatgacccccttcatgggcatcagccccctcccgggcggagagcgcttcccgtacccttctttccactgggaccccatccgggaccccttgagggatccttaccgagaacttgacattcaccggagagacccgctgggcagggacttcctgctaaggaacgacccgctccaccggctctcgactccccggctgtacgaagccgaccgctccttcagggaccgggagcctcacgactacagccaccaccaccaccaccaccaccacccgctgtctgtggaccctcggcgggagcacgagcggggaggccacctggacgagcgggagcgcttgcacatgctcagagaagactacgagcacacgcggctccactccgtgcaccccgcctccctcgacggacacctcccccaccccagcctcatcaccccgggactccccagcatgcactatccccgcatcagccccaccgcgggcaaccagaacggactcctcaacaagacccctccgacagcagcgctgagcgcacctcccccgctcatctccacgctggggggccgcccggtctctcccagaaggacgactcctctgtccgcagagataagggagaggcccccttcccacacgctgaaggatatcgaggcccgataagccgagaacaggagcaagaacgaggaagaagaaaccctaggcagacaccaggccaggcttgagagacagaactcctgcatggctcacacagactgggggggaaagccccaccccttccccttgtaaaaaatgtatagactcagtgcacattttgaaatgttttgtatattatatgttgagatttttcagatcttttagcccagtcatatgttctcacgtctcctactttttgtttctcgtataaaactttttgatttgaaccaaaacagtgaagatgacaacacacaccaattggatgataattgtagcgggggcggtgggggggagaagtccacgccatccatcatgcaaaattctttcagatgaggtgggaaggccgtgtacatagttatgtaaaaagagattgcttcatgagctaatggttcatatatgcaaaagggtaagatgaaagctttactttgtacaaatgtaaatagataaagtaacataatacattaatacttcttaaaatgtgctatttgcaaacttacttaatatcagtgaacacagtcggctaaagctgtgttcccatatattgttatagacagctaaacccttcaactatgcaatgaatgttcgggcttttcacaaaagcccgcctaactcaaaggagccttttcaaatccatttacagcatacttaaggtcatattttccctgaacaagcgcttacgtgatatgactctgttttccttgcttgttttttttcaaacggagaaacatcctgttttgcaaattggaccccaggctggaacttagcatctgaagttgccgcttgtgggctctgggggaaagtgtagccccggagaggtaactgaggacatgagcaaccagtgccagggagggtgggatttgccagatgccaaaatcaggggacgggtggtggtgtctgtcagacacacacaggtcgccagtgacttcacacacacctcatgtgagaaccatgccttttttagtgtgtcctatttcatacctgtacacacttcctcgttttgtaatgagatttacttacacccaaacagatcctgaaagaaagcttcaagttttctcagatgatggatatgttttcactgtattcaataactgacggatgtaaggtgcacgtttcctgatgtgacgcactgtattccagctggtgatcaagtctgggaacagccgtaacaggtcaaccttgtggagccatcgcgagttagagggtgaaagatggcagaaaaaaaagtcttgtgtgtgagtgtgttttttgagtttgcatcaatcttaatgtctcttcataatacttttataatacattaagcctcttgtctacatatttggagagaatatgactttactagcagagaaatacaatatatcttgtctactggactgtaaaatatatgtatgaaataaaattagttccatttggtcttctagtatattaaagtgctatctgacgttgttatcctgtttttgcaaaaaaaaaaaaaaaa

SEQ ID NO: 44695 - protein, 266 aa, Artificial Sequence
  derived and/or modified sequence
MDGPTRGHGLRKKRRSRSQRDRERRSRGGLGAGAAGGGGAGRTRALSLASSSGSDKEDNGKPPSSAPSRPRPPRRKRRESTSAEEDIIDGFAMTSFVTFEALEKDVALKPQERVEKRQTPLTKKKREALTNGLSFHSKKSRLSHPHHYSSDRENDRNLCQHLGKRKKMPKALRQLKPGQNSCRDSDSESASGESKGFHRSSSRERLSDSSAPSSLGTGYFRSGKMCLGEEACLKSGNDMKRDVSNTSSWASNRESFFSLVKLLKGF

SEQ ID NO: 44696 - DNA, 801 bp, Artificial Sequence
  derived and/or modified sequence
atggacggccccaccagaggccacggcctgagaaagaagagaagaagcagaagccagagagacagagagagaagaagcagaggcggcctgggcgccggcgccgccggcggcggcggcgccggcagaaccagagccctgagcctggccagcagcagcggcagcgacaaggaggacaacggcaagccccccagcagcgcccccagcagacccagaccccccagaagaaagagaagagagagcaccagcgccgaggaggacatcatcgacggcttcgccatgaccagcttcgtgaccttcgaggccctggagaaggacgtggccctgaagccccaggagagagtggagaagagacagacccccctgaccaagaagaagagagaggccctgaccaacggcctgagcttccacagcaagaagagcagactgagccacccccaccactacagcagcgacagagagaacgacagaaacctgtgccagcacctgggcaagagaaagaagatgcccaaggccctgagacagctgaagcccggccagaacagctgcagagacagcgacagcgagagcgccagcggcgagagcaagggcttccacagaagcagcagcagagagagactgagcgacagcagcgcccccagcagcctgggcaccggctacttcagaagcggcaagatgtgcctgggcgaggaggcctgcctgaagagcggcaacgacatgaagagagacgtgagcaacaccagcagctgggccagcaacagagagagcttcttcagcctggtgaagctgctgaagggcttctag

SEQ ID NO: 44697 - DNA, 801 bp, Artificial Sequence
  derived and/or modified sequence
atggatggaccaaccagggggcatggcctgagaaagaaacggaggagtcgctcacagcgggatcgggagagaagatcgagaggcggattaggcgctggagccgcagggggcggaggtgcaggtagaacacgtgcgctctcgcttgcatcatcatccgggtcagacaaggaggacaacgggaagcccccctcatcggctcccagcagacctcggccgcccaggcgcaagcgccgtgaatccacctcggccgaagaagatatcattgatggctttgcgatgacatcctttgtaactttcgaagcattagagaaggatgtggcactaaagccacaggagcgcgtggagaaacgccagacgccattaactaagaagaagcgggaggccctgaccaacggtctgtccttccatagcaaaaagtcccggttaagccatccccaccattattcctccgacagggaaaatgataggaatctttgccagcatctggggaagaggaagaagatgcctaaggcacttaggcagctaaagcccggtcagaactcatgtcgagatagcgattccgagtcagcctccggggagagtaagggtttccacagatcctcttctagggaaagacttagtgattcatccgcccccagttcgctggggacaggttatttcagatccggaaaaatgtgtctgggcgaggaggcctgcctgaagtcaggtaatgacatgaagcgtgacgtgagtaatacctctagttgggcttccaaccgcgagagctttttcagtcttgttaagctattgaaaggcttttag

SEQ ID NO: 44698 - DNA, 801 bp, Artificial Sequence
  derived and/or modified sequence
atggatggccccacccggggccacggcctgaggaagaagaggaggagccgcagccagagggaccgggagcggcgcagccggggcggcctgggcgctggagctgctgggggcggcggggccggccgcacccgggccctgagcctggccagcagcagcggcagtgacaaggaggacaatggcaagccacccagcagcgcccccagccggccccggccccccaggaggaagagaagagagagcaccagcgctgaggaggacatcattgatggctttgccatgaccagctttgtgacctttgaggccctggagaaggatgtggccctgaagccccaggagcgggtggagaagaggcagacccccctgaccaagaagaagcgggaggccctgaccaacggcctgtccttccacagcaagaagagccggctgagccacccccaccactacagcagtgacagagaaaatgacaggaacctgtgccagcacctgggcaagaggaagaagatgcccaaggccctgcggcagctgaagccaggccagaacagctgccgggacagcgacagcgagagcgccagcggggagagcaagggcttccacaggagcagcagccgggagcggctgagtgacagcagcgcccccagcagcctgggcaccggctacttccgcagcggcaagatgtgcctgggggaggaggcctgcctgaagtctggaaatgacatgaagagagatgtgagcaacaccagctcctgggccagcaaccgggagagcttcttcagcctggtgaagctgctgaagggcttctag

SEQ ID NO: 44699 - DNA, 801 bp, Artificial Sequence
  derived and/or modified sequence
atggacggccccacccggggccacggcctgcggaagaagcggcggagccggagccagagggatagagaacggagaagccgcggtggactcggtgccggcgcagccggtggggggggcgcaggaaggacccgcgccttgagcctggcctcttctagcggatccgataaggaagataatggaaagcccccatcaagcgcccccagtcgaccacgccctcctaggaggaaacgcagggagtccaccagcgctgaggaagatatcatagacggttttgccatgacgagcttcgtcacattcgaggcactggaaaaagacgttgctctgaagccccaggagagagtggagaagcggcagactccccttaccaagaaaaaacgagaagctctgacaaacggtctttcattccacagcaaaaagtctcggttaagccacccccaccattacagtagtgatagagagaacgacaggaatctgtgtcagcaccttggtaagcgcaagaagatgcccaaggcgctgcggcagctgaagccagggcagaattcttgtagggactcagattctgagagcgcctccggcgagagcaaagggtttcaccgcagttcatctcgcgagagattgtccgatagctctgccccgtcgagcctggggaccggttacttccgttcaggaaagatgtgccttggagaggaagcctgtctgaagtctggcaacgatatgaaaagagacgtatcaaacaccagctcgtgggcctctaaccgcgagagctttttctcgttggtgaagctcctgaaagggttctag

SEQ ID NO: 44700 - DNA, 801 bp, Artificial Sequence
  derived and/or modified sequence
atggacgggcctactcgagggcatggccttcgcaagaagcgcaggtctcgcagccagcgagatcgagagagaaggtcccgtggaggattaggagccggagcagccggagggggaggagcaggtcgtaccagagctctcagcctggcttcatcctcaggatctgataaggaagacaatgggaaaccgcctagctccgctccgtcccgccctcgcccaccccgtaggaaaaggagggaatccacttccgccgaggaggacatcatcgacgggtttgcaatgaccagctttgttacctttgaggccttggaaaaggacgttgcgctgaagcctcaagaacgcgtagaaaaaagacagactccccttacaaaaaagaaacgtgaagcattgactaacggtttaagtttccacagcaaaaaaagcaggctgtcgcacccacaccattattcatccgaccgggagaatgatcggaacctgtgtcaacatctgggtaagcgtaagaaaatgccaaaggccttaaggcagctcaaacccggtcagaatagttgtcgcgactctgattctgagagcgccagtggtgaatcgaagggatttcaccgatctagcagccgagaaagattatcggattccagcgcgccatccagcctgggcaccggatattttcggtctggcaagatgtgtctcggcgaggaggcctgtctcaagtcgggaaatgacatgaagcgagatgtctcgaacactagcagctgggcgagcaacagggagagttttttctccctggtgaagctgctgaagggcttttag

SEQ ID NO: 44701 - DNA, 957 bp, Artificial Sequence
  derived and/or modified sequence
agcctgtggcgggcaagcggggagaccccggcgcagcagaaccatggatggcccgacgcggggccatggactccgcaaaaagcggcggtcgcggtcgcagcgagaccgggagaggcgctcccggggcgggctgggggccggcgcggccggcggcggcggggctggccggacccgggcgctctcactcgcctcgtcgtcgggctccgacaaggaagacaatgggaagcccccgtcctccgccccgtcccggcccagacccccgcggaggaagcggagagagtccacctcggcagaagaggacatcattgatggatttgccatgaccagctttgtcacttttgaagcgctggagaaagatgtagcacttaagcctcaggaacgtgtggagaaacgccagacgcccctgaccaagaagaaacgagaagcacttaccaatggcttgtcctttcattcaaagaagagcagactcagccacccacaccactacagctcagatcgagaaaatgaccgcaatctctgccagcaccttgggaagagaaagaaaatgccgaaggcactcagacagctcaagccaggacagaacagctgcagggacagtgacagtgaaagtgccagtggagaatccaagggcttccaccggagcagctctcgggaaaggctcagtgatagttcagctccttccagcttgggaacaggctacttcagatcagggaagatgtgccttggagaggaagcatgtcttaaatctggaaatgatatgaagagggatgtcagcaacacttcatcctgggccagtaatagggagagtttcttttctctcgtcaaattgcttaaaggattctagttccgtttggtgtggtcactcacatttgaattctaatactctatgtgatatagattctgttgactactgttagcgtgaccccaatgagaaattaaacacttccctccttttca

SEQ ID NO: 44702 - protein, 261 aa, Artificial Sequence
  derived and/or modified sequence
MKFGMGSAQACPCQVPRAASTTWVPCQICGPRERHGPRTPGGQLPGARRGPGPRRPAPLPARPPGALGSVLRPLRARPGCRPRRPHPAARCLPLRPHRPTRRHRRPGGFPLAWGSPQPAPRPAPGRSSALALAGGAAPGVARAQRPGGSGGRSHPGGPGSPRGGGTVGPGDRGPAAADGGRPQRTVRAAETRGAAAAPPLTLEGPVQSHHGTPALTQGPQSPRDGAQLGACTRPVDVRDSGGRPLPPPDTLASAGDFLCTM

SEQ ID NO: 44703 - DNA, 279 bp, Artificial Sequence
  derived and/or modified sequence
atgactaagccacaggccgaatcaggcgaggcagcccgccatccaatctttagaccggcccgaagagtgttcgggatcaaaatgacaacgctgcagccacggattaaggcgccccaagaactcacagtgctgcaggaacgctccaggcccacatccaaaaaaatggccgtctgttttcacggatctagcctgaggagcgaggccacaccaaggtatagcttagaagaagaggcccgaaacggcaggtggcagcaggccttatcttggtggcccctgtag

SEQ ID NO: 44704 - protein, 131 aa, Artificial Sequence
  derived and/or modified sequence
MKFGMGSAQACPCQVPRAASTTWVPCQICGPQPSLSLAEQHLESPVPSAPGALAGGPTQAAPGVRGEEEQWAREIGAQLRRMADDLNAQYERRRQEEQQRHRPSPWRVLYNLIMGLLPLPRGHRAPEMEPN

SEQ ID NO: 44705 - DNA, 396 bp, Artificial Sequence
  derived and/or modified sequence
atgaaatttgggatgggctcagcgcaggcatgtccctgccaggtgccaagggcagcgagtaccacatgggtgccatgccaaatctgcggaccccagccatcactctctctggcagagcagcacctagagtctcccgtgcccagcgccccaggggcccttgctgggggacctactcaggctgcaccaggcgtgcgtggcgaggaagagcagtgggcaagggagatcggagcccagttacgacggatggcagatgatctgaatgcccagtatgagcgaagacgccaagaggaacagcaaagacaccgcccatccccctggcgcgtcctttacaatttaataatgggcctgctccccctaccacgcggccaccgcgcacctgagatggagccaaattag

SEQ ID NO: 44706 - DNA, 396 bp, Artificial Sequence
  derived and/or modified sequence
atgaagtttggcatgggcagcgcccaggcctgcccctgccaggtgccccgggccgccagcaccacctgggtgccctgccagatctgtggcccccagcccagcctgagcctggccgagcagcacctggagagccctgtgcccagcgcccctggggccctggccggcggccccacccaggccgcccctggggtgcggggggaggaggagcagtgggcccgggagattggagcccagctgcggaggatggctgatgacctgaatgcccagtatgaaagaagacggcaggaggagcagcagaggcaccggcccagcccctggagggtgctgtacaacctgatcatgggcctgctgcccctgccccggggccaccgggcccctgagatggagcccaactag

SEQ ID NO: 44707 - DNA, 396 bp, Artificial Sequence
  derived and/or modified sequence
atgaagttcggcatgggcagcgcccaggcctgcccctgccaggtgccgcgggccgcttctacaacttgggttccctgccagatttgtggaccccagccaagcctgtctctggctgagcaacacctcgagagcccagttcctagcgcccccggtgctctggccggtggcccaacccaggccgcccccggcgttcgcggcgaggaggagcagtgggcacgagagatcggcgctcagctgcgtcgaatggccgatgatttgaatgcacagtacgaaaggaggagacaagaggagcagcagaggcatcgcccatctccttggcgcgtgttgtataacttaatcatgggccttttacccctgccacgaggccacagggcccctgaaatggaacccaactag

SEQ ID NO: 44708 - DNA, 396 bp, Artificial Sequence
  derived and/or modified sequence
atgaaattcggcatggggtcggcgcaggcttgtccctgccaggtaccccgagccgcatctactacatgggtcccatgccagatctgtgggcctcaaccaagcctttcccttgctgagcagcatctagagtcccctgtcccatctgctccaggggctttggcgggtggacccacccaagccgctcctggggtccgaggcgaagaggagcaatgggccagggagatcggagctcagctcagacgaatggcagatgaccttaatgctcagtatgaacgcagaaggcaggaagagcagcagaggcacaggccatctccctggagagtgctgtacaacctcatcatgggactgcttcctcttccaaggggccaccgggctcccgaaatggagccgaattag

SEQ ID NO: 44709 - DNA, 1538 bp, Artificial Sequence
  derived and/or modified sequence
gaggcgattgcgattgggtgagacccagtaaggatggaaagtgtagaggagacaggaatccacggctttggaaaaaggaaggacaaaactcaccaaaccagagcagggcaggaagtaacaatgagaaactgaaaaagaaacggaatggaaagctatgagacaggatgaaatttggcatggggtctgcccaggcatgtccatgccaggtgcccagggctgcttccacgacgtgggtcccctgccagatttgtggtcctcagccctcgctctcgctggcggagcagcacctggagtcgcccgtgcccagcgccccgggggctctggcgggcggtcccacccaggcggccccgggagtccgcggggaggaggaacagtgggcccgggagatcggggcccagctgcggcggatggcggacgacctcaacgcacagtacgagcggcggagacaagaggagcagcagcggcaccgcccctcaccctggagggtcctgtacaatctcatcatgggactcctgcccttacccaggggccacagagcccccgagatggagcccaattaggtgcctgcacccgcccggtggacgtcagggactcggggggcaggcccctcccacctcctgacaccctggccagcgcgggggactttctctgcaccatgtagcatactggactcccagccctgcctgtcccgggggcgggccggggcagccactccagccccagcccagcctggggtgcactgacggagatgcggactcctgggtccctggccaagaagccaggagagggacggctgatggactcagcatcggaaggtggcggtgaccgagggggtggggactgagccgcccgcctctgccgcccaccaccatctcaggaaaggctgttgtgctggtgcccgttccagctgcaggggtgacactgggaggggggggctctcctctcggtgctccttcactctgggcctggcctcaggcccctggtgcttccccccctcctcctgggagggggcccgtgaagagcaaatgagccaaacgtgaccactagcctcctggagccagagagtggggctcgtttgccggttgctccagcccggcgcccagccatcttccctgagccagccggcgggtggtgggcatgcctgcctcaccttcatcagggggtggccaggaggggcccagactgtgaatcctgtgctctgcccgtgaccgccccccgccccatcaatcccattgcataggtttagagagagcacgtgtgaccactggcattcatttggggggtgggagattttggctgaagccgccccagccttagtccccagggccaagcgctggggggaagacggggagtcagggagggggggaaatctcggaagagggaggagtctgggagtggggagggatggcccagcctgtaagatactgtatatgcgctgctgtagataccggaatgaattttctgtacatgtttggttaattttttttgtacatgatttttgtatgtttccttttcaataaaatcagattggaacagtg

SEQ ID NO: 44710 - DNA, 396 bp, Artificial Sequence
  derived and/or modified sequence
atgaagttcggcatgggcagcgcccaggcctgcccctgccaggtgcccagagccgccagcaccacctgggtgccctgccagatctgcggcccccagcccagcctgagcctggccgagcagcacctggagagccccgtgcccagcgcccccggcgccctggccggcggccccacccaggccgcccccggcgtgagaggcgaggaggagcagtgggccagagagatcggcgcccagctgagaagaatggccgacgacctgaacgcccagtacgagagaagaagacaggaggagcagcagagacacagacccagcccctggagagtgctgtacaacctgatcatgggcctgctgcccctgcccagaggccacagagcccccgagatggagcccaactag

SEQ ID NO: 44711 - protein, 101 aa, Artificial Sequence
  derived and/or modified sequence
MKFGMGSAQACPCQVPRAASTTWVPCQICETRGAAAAPPLTLEGPVQSHHGTPALTQGPQSPRDGAQLGACTRPVDVRDSGGRPLPPPDTLASAGDFLCTM

SEQ ID NO: 44712 - DNA, 306 bp, Artificial Sequence
  derived and/or modified sequence
atgaagttcggaatgggaagcgcacaggcgtgtccctgccaggttccaagagcagctagtactacatgggtcccgtgccaaatctgcgagaccagaggcgcagccgccgctcctccgctgactctggagggccccgttcaatcacaccatggtacacccgccctgacccagggaccacagtctcctcgcgacggcgctcagctcggagcttgcaccagacctgtggacgtgcgcgactctggcggacggcccctgccccctccggacacactggcaagtgcaggtgacttcctctgtactatgtag

SEQ ID NO: 44713 - DNA, 786 bp, Artificial Sequence
  derived and/or modified sequence
atgaaatttggcatgggctctgcccaggcatgcccgtgccaggttccaagggccgcgtccacaacttgggtcccgtgtcagatctgtggaccacgagagcgacacggacctaggacccccggagggcaactgcccggcgcgcgcagaggaccaggacccagaagaccggcccccttgcccgccaggcctccgggtgccctcggctctgtgctgcgccctctccgcgctcgtcccgggtgccgtccccgacgaccacacccggccgctaggtgccttccactgcggccccatcggccgacacgtcggcatagacgcccaggtgggttccctctggcttggggatctccacagcctgcccctcggcctgccccgggccggtcctctgctttagcactggcaggcggagcagcgcctggtgtggccagggcgcaaaggcccggcggaagtggcggccggagccatcccggaggccccggctcaccacgaggaggagggacagtagggccaggagacagagggcctgctgccgctgacggggggcgacctcagcgcacggtgcgggccgcagagacccgcggcgccgctgcggcccccccactgactcttgagggccccgtgcagtctcatcacggtacccctgcccttactcaagggccgcagagccctcgcgatggtgctcagctgggggcctgtacgcgcccagtagatgtgcgcgactctggaggtcgtcccctgccaccccccgacactctggcttctgcgggagatttcctatgcaccatgtag

SEQ ID NO: 44714 - DNA, 306 bp, Artificial Sequence
  derived and/or modified sequence
atgaagtttggcatgggcagcgcccaggcctgcccctgccaggtgccccgggccgccagcaccacctgggtgccctgccagatctgtgagaccagaggagctgctgctgccccacccctgaccctggagggccctgtgcagagccaccacggcaccccagccctgacccagggcccccagagccccagagatggagcccagctgggcgcctgcaccaggcctgtggatgtgcgggacagcggcggccggcccctgcccccaccagacaccctggccagcgctggggacttcctgtgcaccatgtag

SEQ ID NO: 44715 - DNA, 786 bp, Artificial Sequence
  derived and/or modified sequence
atgaagtttggcatgggcagcgcccaggcctgcccctgccaggtgccccgggccgccagcaccacctgggtgccctgccagatctgtggcccccgggagagacatggccccaggacccctgggggccagctgcccggggcccggcggggccctggcccccggcggcctgcccccctgcctgcccggcccccaggggccctgggctctgtgctgcggcccctgcgggcccggcccggctgccggccccggcggccccaccctgctgcccgctgcctgcccctgcggccccaccggcccaccaggaggcaccggcggcctgggggcttccccctggcctggggcagcccccagcctgcccccaggcctgcccctggccgcagcagcgccctggccctggccggcggggccgcccctggggtggcccgggcccagaggcctgggggcagcggcggccgcagccaccctgggggccctggcagcccccggggcggcggcaccgtgggccctggggaccggggccctgctgctgctgatggcggccggccccagaggacagtgcgggctgctgagaccagaggagctgctgctgccccacccctgaccctggagggccctgtgcagagccaccacggcaccccagccctgacccagggcccccagagccccagagatggagcccagctgggcgcctgcaccaggcctgtggatgtgcgggacagcggcggccggcccctgcccccaccagacaccctggccagcgctggggacttcctgtgcaccatgtag

SEQ ID NO: 44716 - DNA, 306 bp, Artificial Sequence
  derived and/or modified sequence
atgaagttcggcatgggcagcgcccaggcctgcccctgccaggtgccccgtgctgcttcaaccacctgggtgccctgccagatctgcgagactaggggcgcagcagcggccccaccactgaccctggagggacctgtccagagccaccacggcacaccggcactgactcaggggcctcagagtccacgcgatggcgctcaactcggagcctgtacccgtcctgtcgacgtcagagatagcgggggacggccactgcctccgcctgacacattggcctccgccggcgattttctctgtacgatgtag

SEQ ID NO: 44717 - DNA, 786 bp, Artificial Sequence
  derived and/or modified sequence
atgaagttcggcatgggcagcgcccaggcctgcccctgccaggtgccacgggcagccagcacaacctgggtcccgtgccagatctgcggacctcgggagcgtcacggacctagaaccccaggggggcagcttccaggagcgcgtcgcggcccagggccaagaagacctgcccctctgccagcgaggcctcccggagccctcggctcagtgctgagaccgcttcgggctcgcccggggtgtcgaccacggagaccacatcctgccgcccgctgtctgcccctgcgacctcaccgacccacacgtaggcacagacggcctggcggattccctctggcttggggatcgccccaacctgcaccccggcccgcgccagggaggagtagcgccctggccctagccggaggcgccgcacctggggtagctcgcgcccagaggcctggaggttccggcgggcggagtcaccccggaggtcccggaagccccagaggtggagggactgtcgggcctggtgacagggggcccgccgctgcggatggaggtaggccccagcggactgtccgggccgccgaaacaaggggagcggcggccgctccaccattaaccctggagggaccagttcagtcacaccatggcaccccagccctgacccagggaccacagtcccctcgggatggggcccagctcggagcgtgcaccaggcctgtggacgtcagagacagtgggggccggccattgcctcctccggatacgttggctagtgctggagacttcctttgtacgatgtag

SEQ ID NO: 44718 - DNA, 306 bp, Artificial Sequence
  derived and/or modified sequence
atgaagtttgggatgggctccgctcaggcgtgcccttgccaggttcctagggccgcttccaccacatgggtgccgtgccaaatttgcgagacaaggggcgctgcagctgccccacctttgacccttgaaggtcctgtgcagtcgcatcatgggacccctgccctgacacagggaccacaatcccctcgggatggggcacagctgggggcttgcacccgccctgtcgatgtcagggacagcggcggaagaccactacctcctcccgacaccctcgcgagcgctggagacttcctctgtaccatgtag

SEQ ID NO: 44719 - DNA, 786 bp, Artificial Sequence
  derived and/or modified sequence
atgaaattcggaatgggctcagcccaggcctgtccgtgtcaggtgcctcgtgccgctagtaccacctgggtgccgtgtcaaatttgcggcccaagggagcggcacggccctcgtactcctggcggtcagttacccggtgcacgcagagggcctggacctagacgccctgccccactgcctgccagacctccaggggctctggggtccgtgctgcgacccctacgagcgaggcccggatgtcgccctagacggcctcatcccgcagctagatgcctgcccctgagacctcatcgcccaacaaggcggcatagacgccctggaggatttcccctggcttggggaagtccgcagcccgcaccacggccagctcctggcaggagttccgcgctcgcactggcgggtggggcagcccctggagttgcccgtgcacagcggcctgggggtagtggaggtcgatctcacccaggcggtccaggctccccaaggggaggtggcaccgtggggccaggggatcgcggacccgctgccgcagacgggggacggcctcagcggaccgtgagggccgcagaaacgcgcggagccgcagccgctccccctctgacactggaaggccctgtgcagtcacaccatgggacccccgctctgacacaaggaccgcagagtccacgtgacggcgcacaattaggggcatgcacaagacccgtggatgtccgcgactccgggggtcgccctctgccgcctcctgacactctcgctagcgccggtgactttctgtgcacaatgtag

SEQ ID NO: 44720 - DNA, 1347 bp, Artificial Sequence
  derived and/or modified sequence
gaggcgattgcgattgggtgagacccagtaaggatggaaagtgtagaggagacaggaatccacggctttggaaaaaggaaggacaaaactcaccaaaccagagcagggcaggaagtaacaatgagaaactgaaaaagaaacggaatggaaagctatgagacaggatgaaatttggcatggggtctgcccaggcatgtccatgccaggtgcccagggctgcttccacgacgtgggtcccctgccagatttgtgagacaagaggagcagcagcggcaccgcccctcaccctggagggtcctgtacaatctcatcatgggactcctgcccttacccaggggccacagagcccccgagatggagcccaattaggtgcctgcacccgcccggtggacgtcagggactcggggggcaggcccctcccacctcctgacaccctggccagcgcgggggactttctctgcaccatgtagcatactggactcccagccctgcctgtcccgggggcgggccggggcagccactccagccccagcccagcctggggtgcactgacggagatgcggactcctgggtccctggccaagaagccaggagagggacggctgatggactcagcatcggaaggtggcggtgaccgagggggtggggactgagccgcccgcctctgccgcccaccaccatctcaggaaaggctgttgtgctggtgcccgttccagctgcaggggtgacactgggaggggggggctctcctctcggtgctccttcactctgggcctggcctcaggcccctggtgcttccccccctcctcctgggagggggcccgtgaagagcaaatgagccaaacgtgaccactagcctcctggagccagagagtggggctcgtttgccggttgctccagcccggcgcccagccatcttccctgagccagccggcgggtggtgggcatgcctgcctcaccttcatcagggggtggccaggaggggcccagactgtgaatcctgtgctctgcccgtgaccgccccccgccccatcaatcccattgcataggtttagagagagcacgtgtgaccactggcattcatttggggggtgggagattttggctgaagccgccccagccttagtccccagggccaagcgctggggggaagacggggagtcagggagggggggaaatctcggaagagggaggagtctgggagtggggagggatggcccagcctgtaagatactgtatatgcgctgctgtagataccggaatgaattttctgtacatgtttggttaattttttttgtacatgatttttgtatgtttccttttcaataaaatcagattggaacagtg

SEQ ID NO: 44721 - DNA, 306 bp, Artificial Sequence
  derived and/or modified sequence
atgaagttcggcatgggcagcgcccaggcctgcccctgccaggtgcccagagccgccagcaccacctgggtgccctgccagatctgcgagaccagaggcgccgccgccgccccccccctgaccctggagggccccgtgcagagccaccacggcacccccgccctgacccagggcccccagagccccagagacggcgcccagctgggcgcctgcaccagacccgtggacgtgagagacagcggcggcagacccctgcccccccccgacaccctggccagcgccggcgacttcctgtgcaccatgtag

SEQ ID NO: 44722 - DNA, 786 bp, Artificial Sequence
  derived and/or modified sequence
atgaagttcggcatgggcagcgcccaggcctgcccctgccaggtgcccagagccgccagcaccacctgggtgccctgccagatctgcggccccagagagagacacggccccagaacccccggcggccagctgcccggcgccagaagaggccccggccccagaagacccgcccccctgcccgccagaccccccggcgccctgggcagcgtgctgagacccctgagagccagacccggctgcagacccagaagaccccaccccgccgccagatgcctgcccctgagaccccacagacccaccagaagacacagaagacccggcggcttccccctggcctggggcagcccccagcccgcccccagacccgcccccggcagaagcagcgccctggccctggccggcggcgccgcccccggcgtggccagagcccagagacccggcggcagcggcggcagaagccaccccggcggccccggcagccccagaggcggcggcaccgtgggccccggcgacagaggccccgccgccgccgacggcggcagaccccagagaaccgtgagagccgccgagaccagaggcgccgccgccgccccccccctgaccctggagggccccgtgcagagccaccacggcacccccgccctgacccagggcccccagagccccagagacggcgcccagctgggcgcctgcaccagacccgtggacgtgagagacagcggcggcagacccctgcccccccccgacaccctggccagcgccggcgacttcctgtgcaccatgtag

SEQ ID NO: 44723 - protein, 831 aa, Artificial Sequence
  derived and/or modified sequence
MKVHMHTKFCLICLLTFIFHHCNHCHEEHDHGPEALHRQHRGMTELEPSKFSKQAAENEKKYYIEKLFERYGENGRLSFFGLEKLLTNLGLGERKVVEINHEDLGHDHVSHLDILAVQEGKHFHSHNHQHSHNHLNSENQTVTSVSTKRNHKCDPEKETVEVSVKSDDKHMHDHNHRLRHHHRLHHHLDHNNTHHFHNDSITPSERGEPSNEPSTETNKTQEQSDVKLPKGKRKKKGRKSNENSEVITPGFPPNHDQGEQYEHNRVHKPDRVHNPGHSHVHLPERNGHDPGRGHQDLDPDNEGELRHTRKREAPHVKNNAIISLRKDLNEDDHHHECLNVTQLLKYYGHGANSPISTDLFTYLCPALLYQIDSRLCIEHFDKLLVEDINKDKNLVPEDEANIGASAWICGIISITVISLLSLLGVILVPIINQGCFKFLLTFLVALAVGTMSGDALLHLLPHSQGGHDHSHQHAHGHGHSHGHESNKFLEEYDAVLKGLVALGGIYLLFIIEHCIRMFKHYKQQRGKQKWFMKQNTEESTIGRKLSDHKLNNTPDSDWLQLKPLAGTDDSVVSEDRLNETELTDLEGQQESPPKNYLCIEEEKIIDHSHSDGLHTIHEHDLHAAAHNHHGENKTVLRKHNHQWHHKHSHHSHGPCHSGSDLKETGIANIAWMVIMGDGIHNFSDGLAIGAAFSAGLTGGISTSIAVFCHELPHELGDFAVLLKAGMTVKQAIVYNLLSAMMAYIGMLIGTAVGQYANNITLWIFAVTAGMFLYVALVDMLPEMLHGDGDNEEHGFCPVGQFILQNLGLLFGFAIMLVIALYEDKIVFDIQF

SEQ ID NO: 44724 - protein, 38 aa, Artificial Sequence
  derived and/or modified sequence
MKVHMHTKFCLICLLTFIFHHCNHCHEEHDHGPEALHR

SEQ ID NO: 44725 - protein, 130 aa, Artificial Sequence
  derived and/or modified sequence
MKVHMHTKFCLICLLTFIFHHCNHCHEEHDHGPEALHRQHRGMTELEPSKFSKQAAENEKKYYIEKLFERYGENGRLSFFGLEKLLTNLGLGERKVVEINHEDLGHDHVSHLDILAVQEGKHFHSHNHQH

SEQ ID NO: 44726 - protein, 126 aa, Artificial Sequence
  derived and/or modified sequence
MKVHMHTKFCLICLLTFIFHHCNHCHEEHDHGPEALHRQHRGMTELEPSKFSKQAAENEKKYYIEKLFERYGENGRLSFFGLEKLLTNLGLGERKVVEINHEDLGHDHVSHLDILAVQEGKHFHSH

SEQ ID NO: 44727 - protein, 381 aa, Artificial Sequence
  derived and/or modified sequence
MSGDALLHLLPHSQGGHDHSHQHAHGHGHSHGHESNKFLEEYDAVLKGLVALGGIYLLFIIEHCIRMFKHYKQQRGKQKWFMKQNTEESTIGRKLSDHKLNNTPDSDWLQLKPLAGTDDSVVSEDRLNETELTDLEGQQESPPKNYLCIEEEKIIDHSHSDGLHTIHEHDLHAAAHNHHGENKTVLRKHNHQWHHKHSHHSHGPCHSGSDLKETGIANIAWMVIMGDGIHNFSDGLAIGAAFSAGLTGGISTSIAVFCHELPHELGDFAVLLKAGMTVKQAIVYNLLSAMMAYIGMLIGTAVGQYANNITLWIFAVTAGMFLYVALVDMLPEMLHGDGDNEEHGFCPVGQFILQNLGLLFGFAIMLVIALYEDKIVFDIQF

SEQ ID NO: 44728 - DNA, 2496 bp, Artificial Sequence
  derived and/or modified sequence
atgaaggtgcacatgcacaccaagttctgcctgatctgcctgctgaccttcatcttccaccactgcaaccactgccacgaggagcacgaccacggccccgaggccctgcacagacagcacagaggcatgaccgagctggagcccagcaagttcagcaagcaggccgccgagaacgagaagaagtactacatcgagaagctgttcgagagatacggcgagaacggcagactgagcttcttcggcctggagaagctgctgaccaacctgggcctgggcgagagaaaggtggtggagatcaaccacgaggacctgggccacgaccacgtgagccacctggacatcctggccgtgcaggagggcaagcacttccacagccacaaccaccagcacagccacaaccacctgaacagcgagaaccagaccgtgaccagcgtgagcaccaagagaaaccacaagtgcgaccccgagaaggagaccgtggaggtgagcgtgaagagcgacgacaagcacatgcacgaccacaaccacagactgagacaccaccacagactgcaccaccacctggaccacaacaacacccaccacttccacaacgacagcatcacccccagcgagagaggcgagcccagcaacgagcccagcaccgagaccaacaagacccaggagcagagcgacgtgaagctgcccaagggcaagagaaagaagaagggcagaaagagcaacgagaacagcgaggtgatcacccccggcttcccccccaaccacgaccagggcgagcagtacgagcacaacagagtgcacaagcccgacagagtgcacaaccccggccacagccacgtgcacctgcccgagagaaacggccacgaccccggcagaggccaccaggacctggaccccgacaacgagggcgagctgagacacaccagaaagagagaggccccccacgtgaagaacaacgccatcatcagcctgagaaaggacctgaacgaggacgaccaccaccacgagtgcctgaacgtgacccagctgctgaagtactacggccacggcgccaacagccccatcagcaccgacctgttcacctacctgtgccccgccctgctgtaccagatcgacagcagactgtgcatcgagcacttcgacaagctgctggtggaggacatcaacaaggacaagaacctggtgcccgaggacgaggccaacatcggcgccagcgcctggatctgcggcatcatcagcatcaccgtgatcagcctgctgagcctgctgggcgtgatcctggtgcccatcatcaaccagggctgcttcaagttcctgctgaccttcctggtggccctggccgtgggcaccatgagcggcgacgccctgctgcacctgctgccccacagccagggcggccacgaccacagccaccagcacgcccacggccacggccacagccacggccacgagagcaacaagttcctggaggagtacgacgccgtgctgaagggcctggtggccctgggcggcatctacctgctgttcatcatcgagcactgcatcagaatgttcaagcactacaagcagcagagaggcaagcagaagtggttcatgaagcagaacaccgaggagagcaccatcggcagaaagctgagcgaccacaagctgaacaacacccccgacagcgactggctgcagctgaagcccctggccggcaccgacgacagcgtggtgagcgaggacagactgaacgagaccgagctgaccgacctggagggccagcaggagagcccccccaagaactacctgtgcatcgaggaggagaagatcatcgaccacagccacagcgacggcctgcacaccatccacgagcacgacctgcacgccgccgcccacaaccaccacggcgagaacaagaccgtgctgagaaagcacaaccaccagtggcaccacaagcacagccaccacagccacggcccctgccacagcggcagcgacctgaaggagaccggcatcgccaacatcgcctggatggtgatcatgggcgacggcatccacaacttcagcgacggcctggccatcggcgccgccttcagcgccggcctgaccggcggcatcagcaccagcatcgccgtgttctgccacgagctgccccacgagctgggcgacttcgccgtgctgctgaaggccggcatgaccgtgaagcaggccatcgtgtacaacctgctgagcgccatgatggcctacatcggcatgctgatcggcaccgccgtgggccagtacgccaacaacatcaccctgtggatcttcgccgtgaccgccggcatgttcctgtacgtggccctggtggacatgctgcccgagatgctgcacggcgacggcgacaacgaggagcacggcttctgccccgtgggccagttcatcctgcagaacctgggcctgctgttcggcttcgccatcatgctggtgatcgccctgtacgaggacaagatcgtgttcgacatccagttctag

SEQ ID NO: 44729 - DNA, 117 bp, Artificial Sequence
  derived and/or modified sequence
atgaaggtgcacatgcacaccaagttctgcctgatctgcctgctgaccttcatcttccaccactgcaaccactgccacgaggagcacgaccacggccccgaggccctgcacagatag

SEQ ID NO: 44730 - DNA, 1146 bp, Artificial Sequence
  derived and/or modified sequence
atgagcggcgacgccctgctgcacctgctgccccacagccagggcggccacgaccacagccaccagcacgcccacggccacggccacagccacggccacgagagcaacaagttcctggaggagtacgacgccgtgctgaagggcctggtggccctgggcggcatctacctgctgttcatcatcgagcactgcatcagaatgttcaagcactacaagcagcagagaggcaagcagaagtggttcatgaagcagaacaccgaggagagcaccatcggcagaaagctgagcgaccacaagctgaacaacacccccgacagcgactggctgcagctgaagcccctggccggcaccgacgacagcgtggtgagcgaggacagactgaacgagaccgagctgaccgacctggagggccagcaggagagcccccccaagaactacctgtgcatcgaggaggagaagatcatcgaccacagccacagcgacggcctgcacaccatccacgagcacgacctgcacgccgccgcccacaaccaccacggcgagaacaagaccgtgctgagaaagcacaaccaccagtggcaccacaagcacagccaccacagccacggcccctgccacagcggcagcgacctgaaggagaccggcatcgccaacatcgcctggatggtgatcatgggcgacggcatccacaacttcagcgacggcctggccatcggcgccgccttcagcgccggcctgaccggcggcatcagcaccagcatcgccgtgttctgccacgagctgccccacgagctgggcgacttcgccgtgctgctgaaggccggcatgaccgtgaagcaggccatcgtgtacaacctgctgagcgccatgatggcctacatcggcatgctgatcggcaccgccgtgggccagtacgccaacaacatcaccctgtggatcttcgccgtgaccgccggcatgttcctgtacgtggccctggtggacatgctgcccgagatgctgcacggcgacggcgacaacgaggagcacggcttctgccccgtgggccagttcatcctgcagaacctgggcctgctgttcggcttcgccatcatgctggtgatcgccctgtacgaggacaagatcgtgttcgacatccagttctag

SEQ ID NO: 44731 - DNA, 2496 bp, Artificial Sequence
  derived and/or modified sequence
atgaaagtgcacatgcacacgaaattttgcctgatatgtctgcttaccttcatcttccaccattgtaatcattgccatgaggaacacgatcatgggcccgaggcccttcatcggcaacatcgaggtatgactgagctggaaccaagcaagttctcaaaacaagccgctgagaatgagaaaaaatattacattgaaaagctatttgagaggtacggcgaaaatgggagattatctttttttggattggagaagttactgacaaacttgggcctgggggagcggaaggtagtcgaaatcaatcacgaagacttaggacatgaccatgtttcacacctagatattttggccgttcaggaaggcaagcactttcacagtcataatcaccagcattctcataaccacttaaattctgagaaccaaacagttactagtgtatcaacaaaacgcaaccacaagtgtgaccccgagaaagaaaccgtggaagtgagcgtcaagtctgatgataaacatatgcacgaccacaatcatcggcttagacaccaccacagactccaccatcatttggaccacaacaacacccaccatttccacaatgacagtattaccccatcagaacggggggaaccaagcaatgaaccttccacagagacaaacaagacacaggagcagtcggatgtgaagctgccgaagggcaagcgtaaaaagaagggccgaaagtctaacgagaacagcgaggttattactcctggctttccgcccaaccatgatcagggggagcagtatgaacacaaccgcgtgcataagccagaccgagtgcataacccagggcattcacacgttcatcttccagagcgcaatggccacgatcctggccgaggacaccaagatctcgacccagacaacgagggggagctgcgtcacaccaggaagcgagaagcgccccacgtgaaaaataatgccattatctctttgagaaaggacttgaacgaagacgatcatcaccatgagtgcttgaacgttacccaactgttgaaatactatgggcacggcgccaatagccccattagcacagatttgttcacgtatttgtgccccgctttgctttaccaaattgattctcgcctgtgcatcgagcatttcgataagctgctggtggaggatataaacaaagacaagaacctggttccggaagatgaggccaatataggcgcctccgcttggatttgcggcattatctcgatcacagtgatttcgctgctgtccctgctgggggttatcctggtccccattatcaaccagggatgtttcaagttcctgcttacattcttggtggccctagctgtggggacgatgagcggagatgcactcctccatttactgccacactcccagggaggtcacgatcacagtcaccaacacgcgcatggccacggacactcacacgggcacgaaagcaataagtttttagaagaatacgacgccgttctgaagggccttgtagctctcggcggtatttacctcctttttattatcgaacactgtattagaatgtttaagcactataagcagcagagaggtaagcagaaatggttcatgaagcaaaatacggaagagagcactatcgggcgtaagcttagtgaccacaagctgaacaacacccctgacagtgactggctgcagcttaagcctctggccggtacagacgactccgtggtctctgaagatcgcttgaatgaaacagaactaacggacctcgaaggacagcaggagagccccccaaagaattatctttgcatcgaggaggagaagatcatcgaccatagccattccgatggactccacacaattcacgagcacgaccttcatgctgctgcccacaatcatcacggggagaacaaaacagtcctgcggaaacataatcaccagtggcaccacaagcactcccaccactcacatggcccctgtcattctggttcagatctgaaggagaccgggatcgccaacattgcgtggatggtgatcatgggagatggaatacacaacttctctgatggacttgcgatcggcgctgccttctctgctgggcttaccggaggaataagtacttccattgctgtattttgccacgagctccctcacgagttgggtgactttgctgttttgctcaaggcaggcatgacggttaagcaggccattgtgtataacttactgtctgctatgatggcctatatcggcatgcttataggaacagccgtgggacagtatgccaacaatattaccctttggattttcgctgtgaccgccggcatgtttctgtacgttgctctggtggatatgctgccggagatgctgcatggcgatggtgataacgaagaacatggcttctgtcccgtggggcagtttatccttcagaacctgggcttgctctttggttttgcaatcatgctcgtaatagccttatatgaggacaagatcgtcttcgatattcagttctag

SEQ ID NO: 44732 - DNA, 2496 bp, Artificial Sequence
  derived and/or modified sequence
atgaaagtgcacatgcatactaaattctgcctgatttgtctactgacatttatatttcatcactgtaaccattgtcacgaagagcatgatcatggacccgaggcactgcaccgacagcatcgcggcatgaccgagctcgaaccctcaaagttctctaagcaggcagctgaaaacgagaaaaagtactacatcgaaaaactgtttgaacgctacggtgagaacgggcggctctctttttttgggcttgaaaaattgttgacgaatctggggcttggcgagcgcaaagtcgtcgaaatcaatcacgaagatctgggccatgaccacgtgtcccatctggatattttggccgttcaggagggaaagcactttcactcccataatcatcaacattcacacaaccaccttaactctgaaaatcagacagtcacttccgtctcaaccaagcggaaccacaaatgcgaccctgaaaaggagactgtcgaggtctccgtgaagagcgacgacaagcatatgcacgaccataatcacagacttcgccatcatcaccgactgcaccatcacctcgaccacaacaatacccaccatttccataacgattctatcacccccagcgagcgcggagaaccatctaatgagccttcaaccgaaacgaataaaacccaggaacaatcagatgtgaaactcccaaaaggcaagcggaaaaagaagggccggaagagtaacgaaaacagtgaagtgatcacacccgggttccccccaaatcatgaccagggcgagcaatacgagcacaatagggttcacaagccagacagagtccataatccgggtcattcccatgtgcaccttcctgagcgcaatggccacgatccaggaagagggcatcaagacctggatccggacaatgaaggagaactgaggcacacacgaaagagagaggcccctcacgtgaaaaataacgccatcataagcctgcgcaaggaccttaacgaggatgatcatcatcacgagtgcttgaacgttacccaactgttgaagtactatggacacggcgccaactctcccatcagtacggatctcttcacatacctgtgccctgcgctcctgtaccagatagactcacgactatgtatagaacattttgacaaacttctcgtcgaggatattaacaaggataagaatttggtacccgaagatgaggcaaacatcggcgcctccgcttggatatgcggtattatctctattacagtcataagtctgctcagtcttctcggagtgattctagtacctattattaatcagggatgttttaagttccttctaacttttttagttgctttggcagtcggcaccatgtcaggcgatgcactgctacacctgctgcctcacagccagggcgggcatgaccattcacaccagcacgctcacggccacggccactcccatggccacgagtcgaataagtttctggaggagtatgatgccgttctcaaagggcttgtcgcattgggcggcatttaccttctttttatcatcgaacactgcatccgcatgttcaagcactataaacagcagaggggaaagcaaaaatggtttatgaaacaaaataccgaagagtcaaccatcgggagaaaactgagtgatcacaagcttaataatacaccagactccgattggctgcaattgaaacccttagcagggaccgacgattcagtggtctccgaggaccggcttaatgagaccgagctgacagatctggagggtcaacaagagtcgcctcccaaaaactatctgtgcattgaagaggaaaagatcatcgatcactcacatagcgatggcctgcataccatccatgagcatgacctgcatgcagctgcccataaccatcacggggagaacaagactgtcttgaggaaacacaatcaccagtggcaccacaagcacagccatcatagccatgggccatgtcactccgggagtgatcttaaggagactggaattgccaatattgcctggatggtcatcatgggcgacggaattcacaatttcagtgacgggttagccattggagcagcattctccgcagggctcactgggggaatatctactagcatagcggtgttctgccatgagctcccccacgagctgggcgatttcgctgtgttattgaaggcaggcatgacggtcaaacaggcgattgtgtacaacctcctttccgctatgatggcttatattggcatgttgattggtacagctgtgggccaatatgcaaacaatatcacattatggatcttcgctgtgactgccggaatgtttctttatgtcgctctggtagacatgttgcccgagatgctgcatggcgacggagacaatgaggaacacggattttgccctgtgggtcagttcatcctccaaaatctggggcttctgttcggctttgccattatgctggtaattgccctctacgaggataagattgtcttcgatatccagttctag

SEQ ID NO: 44733 - DNA, 117 bp, Artificial Sequence
  derived and/or modified sequence
atgaaagtccacatgcacacaaagttctgccttatctgtctgctgaccttcatctttcaccactgcaatcactgccacgaagagcatgaccatggtccagaggccttgcatcgttag

SEQ ID NO: 44734 - DNA, 1146 bp, Artificial Sequence
  derived and/or modified sequence
atgagcggagacgctctgctgcacctgctgccccactcacaaggtggtcatgatcacagtcaccagcatgcccacggacacggtcattcccacgggcacgagtcaaataaattcctcgaggagtacgatgcagtgctaaaagggctagttgccctgggaggtatctatttattgttcattattgagcactgcatcaggatgtttaagcactataaacagcagagggggaagcagaagtggttcatgaaacaaaacacagaggaaagtacaatcggcaggaagctgtccgatcataaattaaacaacacacctgacagtgactggctccaactgaaaccactagcaggtaccgacgactccgtggtctccgaggaccggctaaatgaaaccgaattgactgacctggaaggccaacaggagagcccaccaaagaactatttgtgcatagaggaagagaagataattgatcacagccactccgatggactgcacacgatccacgaacacgatctgcatgccgctgcccataatcaccacggggaaaataagaccgtcctccggaagcacaatcatcaatggcaccacaaacacagtcaccacagtcacgggccctgccactcaggctcagatttgaaggagactggaattgctaatatagcctggatggtcatcatgggcgatgggatccacaactttagtgatggcctcgcaattggagctgcattctcggcgggcctaacaggggggatttccacatctattgcagtattctgtcatgagctcccccacgagcttggggactttgcagttctgttgaaagccggcatgacagttaagcaggccatagtgtacaacctcctatcggctatgatggcttatatcgggatgttgatcggcaccgcggtcggtcagtacgccaacaacattaccctttggatctttgctgtcacagctggcatgtttctgtacgttgcgctggtagatatgctccctgagatgctgcacggtgatggtgataacgaggaacatggcttttgcccggttgggcagtttatcttgcagaatctgggtcttttattcggcttcgccataatgctcgttatcgctctgtacgaggataagattgtctttgatatccagttctag

SEQ ID NO: 44735 - DNA, 2496 bp, Artificial Sequence
  derived and/or modified sequence
atgaaggtgcacatgcacaccaagttctgcctgatctgcctgctgaccttcatcttccaccactgcaaccactgccacgaggagcatgaccacggccctgaggccctgcaccggcagcaccggggcatgacagagctggagcccagcaagttcagcaagcaggccgcagaaaatgagaagaagtactacatcgagaagctgtttgaaagatatggagaaaatggccgcctgtccttcttcggcctggagaagctgctgaccaacctgggcctgggggagaggaaggtggtggagatcaaccacgaggacctgggccatgaccacgtgagccacctggacatcctggccgtgcaggagggcaagcacttccacagccacaaccaccagcacagccacaaccacctgaacagcgagaaccagacagtgacctctgtgtccaccaagaggaaccacaagtgtgaccctgagaaggagaccgtggaggtgtctgtgaagagtgatgacaagcacatgcatgaccacaaccaccggctgcggcaccaccaccggctgcaccaccacctggaccacaacaacacccaccacttccacaatgacagcatcacccccagcgagcggggggagcccagcaatgagcccagcacagagaccaacaagacccaggagcagagtgatgtgaagctgcccaagggcaagaggaagaagaagggcaggaagagcaatgaaaacagcgaggtgatcaccccaggcttcccccccaaccacgaccagggcgagcagtatgagcacaacagagtgcacaagccagacagagtgcacaaccctggccacagccacgtgcacctgcctgagagaaatggacatgaccccggccggggccaccaggacctggaccctgacaatgaaggagagctgcggcacaccaggaagcgggaggcccctcatgtgaagaacaatgccatcatcagcctgaggaaggacctgaatgaagatgaccaccaccacgagtgcctgaatgtgacccagctgctgaagtactacggccatggagccaacagccccatcagcacagacctcttcacctacctgtgcccagccctgctgtaccagattgacagccggctgtgcatcgagcactttgacaagctgctggtggaggacatcaacaaggacaagaacctggtgcctgaagatgaggccaacatcggggccagcgcctggatctgtggcatcatcagcatcaccgtcatcagcctgctgagcctgctgggcgtcatcctggtgcccatcatcaaccagggctgcttcaagttcctgctgaccttcctggtggccctggccgtgggcaccatgtctggagatgccctgctgcacctgctgccccacagccagggcggccatgaccacagccaccagcacgcccacggccacggccacagccacggccacgagagcaacaagttcctggaggagtatgatgctgtgctgaagggcctggtggccctgggcggcatctacctgctcttcatcatcgagcactgcatccgcatgttcaagcactacaagcagcagaggggcaagcagaagtggttcatgaagcagaacacagaggagagcaccatcggcaggaagctgagtgaccacaagctgaacaacaccccagacagcgactggctgcagctgaagcccctggccggcacagatgacagcgtggtgtctgaggaccggctgaatgaaacagagctgacagacctggagggccagcaggagagcccccccaagaactacctgtgcatcgaggaggagaagatcatcgaccacagccacagtgatggcctgcacaccatccatgaacatgacctgcatgctgctgcccacaaccaccacggggagaacaagacagtgctgaggaagcacaaccaccagtggcaccacaagcacagccaccacagccacggcccctgccacagcggcagtgacctgaaggagaccggcatcgccaacatcgcctggatggtgatcatgggagatggcatccacaacttcagtgatggcctggccatcggggccgccttctctgctggcctgactggaggcatcagcaccagcattgctgtgttctgccacgagctgccccatgagctgggggactttgctgtgctgctgaaggccggcatgacagtgaagcaggccatcgtgtacaacctgctgagcgccatgatggcctacatcggcatgctgattggaacagctgtgggccagtatgccaacaacatcaccctgtggatctttgctgtgacagctggcatgttcctgtatgtggccctggtggacatgctgcctgagatgctgcatggagatggagacaatgaggagcacggcttctgccctgtgggccagttcatcctgcagaacctgggcctgctgtttggatttgccatcatgctggtgattgccctgtatgaggacaagatcgtgtttgacatccagttctag

SEQ ID NO: 44736 - DNA, 117 bp, Artificial Sequence
  derived and/or modified sequence
atgaaggtgcacatgcacaccaagttctgcctgatctgcctgctgaccttcatcttccaccactgcaaccactgccacgaggagcatgaccacggccctgaggccctgcacaggtag

SEQ ID NO: 44737 - DNA, 1146 bp, Artificial Sequence
  derived and/or modified sequence
atgtctggagatgccctgctgcacctgctgccccacagccagggcggccatgaccacagccaccagcacgcccacggccacggccacagccacggccacgagagcaacaagttcctggaggagtatgatgctgtgctgaagggcctggtggccctgggcggcatctacctgctcttcatcatcgagcactgcatccgcatgttcaagcactacaagcagcagaggggcaagcagaagtggttcatgaagcagaacacagaggagagcaccatcggcaggaagctgagtgaccacaagctgaacaacaccccagacagcgactggctgcagctgaagcccctggccggcacagatgacagcgtggtgtctgaggaccggctgaatgaaacagagctgacagacctggagggccagcaggagagcccccccaagaactacctgtgcatcgaggaggagaagatcatcgaccacagccacagtgatggcctgcacaccatccatgaacatgacctgcatgctgctgcccacaaccaccacggggagaacaagacagtgctgaggaagcacaaccaccagtggcaccacaagcacagccaccacagccacggcccctgccacagcggcagtgacctgaaggagaccggcatcgccaacatcgcctggatggtgatcatgggagatggcatccacaacttcagtgatggcctggccatcggggccgccttctctgctggcctgactggaggcatcagcaccagcattgctgtgttctgccacgagctgccccatgagctgggggactttgctgtgctgctgaaggccggcatgacagtgaagcaggccatcgtgtacaacctgctgagcgccatgatggcctacatcggcatgctgattggaacagctgtgggccagtatgccaacaacatcaccctgtggatctttgctgtgacagctggcatgttcctgtatgtggccctggtggacatgctgcctgagatgctgcatggagatggagacaatgaggagcacggcttctgccctgtgggccagttcatcctgcagaacctgggcctgctgtttggatttgccatcatgctggtgattgccctgtatgaggacaagatcgtgtttgacatccagttctag

SEQ ID NO: 44738 - DNA, 2496 bp, Artificial Sequence
  derived and/or modified sequence
atgaaggtgcacatgcacaccaagttctgcctgatctgcctgctgactttcatctttcaccattgcaatcactgtcatgaggaacacgaccacggaccagaggctttgcatcggcagcatcggggaatgactgaactagagccttcaaagtttagtaaacaagccgcagagaatgagaagaaatattacattgaaaaactttttgagcggtacggggaaaacggtagactctcattttttggactggaaaagctacttactaacctgggcctgggagagaggaaagtagtcgagatcaatcatgaggatctcggacacgaccacgtaagccacctcgatatcctggccgttcaggagggtaagcacttccactcacacaaccatcagcatagtcacaatcatttgaacagtgaaaaccagactgtcacctccgtatccaccaagcgaaaccataaatgcgaccccgagaaggagacggtggaagtatctgtcaaatcagatgacaaacatatgcacgatcacaaccaccggttgagacaccaccaccgtttgcatcatcatttagaccataacaatacgcaccactttcataatgacagcataacaccaagtgaacgaggagaaccttcgaatgagccttcaaccgagacaaacaaaacacaggaacagtctgacgttaagctgccaaaggggaaaaggaaaaaaaagggacgaaagtcaaacgaaaactctgaggtgataaccccaggattccccccgaaccacgaccagggcgagcagtatgaacacaaccgagttcacaagccggaccgggtccacaacccagggcacagtcatgttcacttgcctgagcgtaacggacacgacccaggcagaggacaccaagatctggaccctgacaatgagggggagttgaggcatacacggaagcgcgaggctccacacgtgaaaaataatgcaatcatctctctcagaaaggacttgaacgaggacgaccaccatcacgagtgtctgaacgtcacacaattgctgaagtattatggccatggagcaaattccccgatcagcacggatttatttacttacctctgcccggcactcctgtaccaaatagactcccgtctttgcatcgagcatttcgacaaattgttagtcgaagatatcaacaaagataagaacctcgtccccgaagacgaagccaatatcggggcgtctgcttggatctgcggaataatatcaattactgtgatctctctgctgtccttgctcggcgtgatcttagttccgatcatcaatcaagggtgctttaaattcctcctcacattcttggtggctctggcagtgggaaccatgtctggggatgccttgctgcaccttcttccacattcacagggaggtcatgatcattcgcatcagcacgctcatggacacggacactcccatggccacgagtccaacaagttcctggaggaatacgatgctgttctgaagggactagtagccctggggggtatttacttgctgtttatcatagaacactgtataagaatgttcaagcactataaacagcagcggggaaaacagaaatggttcatgaagcagaacacggaggagagcaccatcgggcggaagctgtcagatcataaactcaataatacccccgatagtgactggttacagctgaaacccttagccggcacggatgattcggtggtgtctgaggacagattaaacgagaccgagcttactgatctggaggggcagcaggaatcgcctcctaagaattatttgtgtatcgaagaggaaaagattatagaccacagccactctgacggtctacatacaatccacgaacacgatctccatgcagcagcccataaccaccatggcgaaaacaagacagtactccgcaagcataatcaccagtggcaccacaagcattcacaccatagccacggcccatgtcactccggttcagacctcaaggagaccggaatcgccaacattgcttggatggttattatgggcgacggaattcataattttagtgacggactcgccattggtgcagcattctcagccgggctcacgggcggcatttcaactagtatagccgtcttttgtcacgagttaccacatgaactgggcgactttgctgtcctgctgaaagctggcatgactgtaaaacaggcaatagtgtacaaccttctatctgcaatgatggcttacatcggtatgctcatcgggactgcagttggccaatatgcaaacaatattactctatggatttttgcagtgactgccggaatgttcctctatgtagcgctagttgatatgctgccggaaatgttgcatggagacggcgacaacgaggaacatggcttctgtcccgtgggacagtttatcctgcagaacctcggtctgctctttggttttgccattatgctggtgattgcactgtatgaggataagattgttttcgatatccagttctag

SEQ ID NO: 44739 - DNA, 2496 bp, Artificial Sequence
  derived and/or modified sequence
atgaaggtgcacatgcacaccaagttctgcctgatctgcctgctgactttcatctttcatcactgcaatcattgtcacgaagagcatgaccacggaccagaagccctgcatcgacaacacagaggtatgacagaactggagccttccaaattttccaagcaggcagccgagaatgaaaagaaatattatatagaaaaactgttcgagagatatggcgagaatggtcgcctgagtttctttgggctagaaaagctgttgactaacctgggactaggcgaaaggaaggtggtcgagatcaatcacgaagatctgggccacgaccatgtctcacatttggatatcttggcagtgcaggagggcaagcatttccattcccacaatcaccagcattcacacaaccacttgaactccgagaaccagactgttaccagcgtgtcaaccaagaggaatcacaagtgcgaccctgagaaagagaccgtcgaggtgtcagttaaatcggacgacaaacatatgcatgaccataaccaccgtctaaggcatcatcacaggcttcatcatcatcttgatcacaataacacacaccactttcacaacgattctattacgccgagcgagcggggcgagccctctaatgagccttctaccgagactaacaagacacaggagcagtctgatgtgaagttgcccaaagggaagaggaagaagaagggcaggaaaagcaacgagaacagtgaggtgatcactccgggcttcccaccgaaccacgatcagggagaacaatatgagcacaatcgggtgcataagccagacagagtgcacaatccaggacatagtcatgtacatctccctgaacgcaatggccacgatcctggccgcggacatcaggatctggacccagataacgaaggcgagttgaggcatactagaaagcgcgaggctcctcatgttaagaacaatgccataatctctctcagaaaggatctaaatgaagacgatcaccaccacgaatgcttgaacgtgacccagctcctcaagtattatggtcacggcgccaatagtcccattagcacagatctattcacctatctgtgcccggctctgctatatcaaatagactcccggctgtgcatcgagcattttgacaagctccttgtggaggatatcaataaagataaaaacctcgtgccggaggacgaggctaacatcggagcgagcgcttggatctgtgggatcatcagtatcaccgtgattagcctcctgtctctccttggcgtcatcctggtgccaatcatcaatcagggctgctttaagttcttactgacattcctggtagctcttgctgttgggactatgtctggagatgccttactccacctactgccccactcacagggcggtcacgaccattcacatcagcacgcacacggacacggccactcacatggacacgagagtaacaaatttctggaggagtatgatgccgtgctcaaaggattagtggcattaggtggcatttacctgctcttcatcattgaacactgcatccgcatgttcaaacattacaagcagcagcgtggtaagcagaagtggtttatgaagcagaacaccgaggaatcgacgataggtcgcaaactctccgatcataagcttaacaatactcctgattccgactggctgcagcttaagcctctggccgggacagacgactccgtggtgtccgaggaccgcctgaatgaaacagagctaacagatctggaagggcagcaggaatcccccccgaaaaactatctgtgcatcgaggaggaaaagattattgaccatagccactctgacggcctccacacgatacatgagcacgatctgcatgcagctgcccacaaccatcacggagaaaataaaacagtccttcggaaacacaaccaccagtggcatcataaacatagtcatcacagccatggaccttgtcatagcgggagcgacctgaaggaaaccgggatcgctaatattgcgtggatggtgattatgggagatggaatccacaacttttctgatggcttagctattggtgccgccttctctgcaggtctgaccgggggcatcagtaccagcattgcagtgttctgtcacgaacttccgcacgagttgggcgacttcgccgtcctgctgaaggctgggatgaccgtaaagcaggcaatagtgtacaatcttctgagtgcaatgatggcatatatcggtatgctcattggaacggccgtaggtcagtatgctaataatatcactttgtggatattcgctgtcaccgccggaatgtttctgtacgtagccctggtggacatgctgccagagatgttacacggcgatggagataacgaggagcacgggttttgccccgtaggccaatttattctccaaaacctcgggttgctgtttgggtttgcaattatgctcgttattgctctttatgaggataaaatcgtcttcgacattcagttttag

SEQ ID NO: 44740 - DNA, 117 bp, Artificial Sequence
  derived and/or modified sequence
atgaaggtgcacatgcacaccaagttctgcctgatctgcctgctgacatttattttccatcactgcaatcattgtcacgaagaacacgatcatgggccagaggccctccataggtag

SEQ ID NO: 44741 - DNA, 1146 bp, Artificial Sequence
  derived and/or modified sequence
atgagcggcgacgccctgctgcacctgctgccccacagccagggcgggcatgaccattcccatcagcatgcacatggccatggtcacagtcacggacacgagtctaataaatttctggaggagtacgacgccgttctcaaagggcttgtggcactcggaggaatctacctcttgttcattatagagcactgtatccgtatgttcaagcattacaagcagcaaaggggaaagcagaagtggtttatgaagcagaacaccgaagaatcaactattggccggaaactatctgatcacaagttgaataataccccagactcagactggcttcagctgaaacctctcgctggcacagatgatagcgtggtatccgaagaccgcctcaatgaaaccgaactgacagatctcgagggccagcaggagtctcctcccaaaaattatctttgcattgaggaagaaaaaatcatagaccactcgcactctgatggtctgcatacaatccatgagcacgacctgcacgccgcagctcacaaccatcatggggagaacaaaaccgtcctgagaaagcacaaccatcaatggcatcacaaacactctcatcacagtcatgggccctgtcattcgggtagtgacctaaaagaaacgggtatcgccaacatcgcttggatggtcataatgggtgatggtatccataactttagtgacggactagccattggggctgcattctcagctgggcttacgggaggaattagcacctcaatcgccgtgttctgtcacgagctgccacacgaactgggtgattttgctgtgctgctcaaagcaggaatgactgtgaaacaggccatcgtgtacaatctgctgtccgccatgatggcctatattggaatgctgattggcaccgcggtcggccagtacgcaaacaatattaccctgtggatctttgcagtgacagcgggaatgttcttgtacgttgctctcgtcgacatgctcccagagatgctgcatggagacggcgacaatgaagagcatgggttttgtcccgtcggacagttcatacttcagaacctgggtctccttttcggctttgcaataatgctggtgatcgccctctacgaggacaagattgtctttgatattcagttctag

SEQ ID NO: 44742 - DNA, 2496 bp, Artificial Sequence
  derived and/or modified sequence
atgaaggtccatatgcacacaaagttttgcttgatctgtctcctgacctttatattccatcattgtaatcattgtcacgaggagcacgaccatgggccagaagctctacacagacagcataggggtatgactgagttggaaccatccaagtttagtaaacaggctgcggagaacgagaaaaagtattatatagagaagttatttgaacgctatggagaaaatggccgattaagtttcttcggtctggagaagttactgacaaatctcgggctgggggagaggaaagtagtcgaaattaatcacgaggatctggggcacgatcacgtatcccacctcgatatcttggctgtgcaggagggaaagcatttccactcccataaccaccagcattcacacaatcacctcaactccgagaatcagacagtgacatctgtgtcgaccaaacgcaatcacaaatgtgatcctgaaaaggagaccgtggaggtctctgttaagtccgacgacaaacatatgcacgaccacaaccaccgtcttagacaccaccaccggcttcaccaccatctggatcacaataacacccaccatttccacaacgattcaataaccccctccgaacggggtgagccctctaacgagccctcgacagagactaacaaaacgcaggagcagagtgacgtgaagttgccaaagggcaaaagaaaaaaaaaaggacgtaaatctaatgaaaactccgaggtcatcacccctggctttccgccaaatcatgaccaaggcgagcaatacgagcacaacagggttcacaaacctgatagagtccacaaccccggtcactcccatgttcatctgcctgaacggaatggccatgatccgggacgcggacatcaagatctggaccccgacaacgagggggagttacggcacactaggaaaagggaagctccccacgtgaagaacaacgccatcatctctctccgcaaagatctaaatgaagacgaccaccaccacgagtgtctcaacgtcactcagttgctgaagtattacgggcacggggcaaacagcccaatctctaccgacttgttcacctacctgtgccctgccctcctgtaccaaatagattcacggctgtgcattgagcactttgataagcttcttgtggaggacattaacaaagataagaatcttgtgcccgaggacgaagccaatatcggtgcatccgcctggatatgcgggatcatatctattacagtgatctctctgctgagtctgcttggcgttatcctggtaccaatcattaatcagggatgcttcaagttcctgctgacattcctggtagccctggccgtcggtacaatgagtggtgatgccctacttcatcttctgccccacagccaaggcggacacgatcacagtcatcagcacgcccatgggcacggtcatagccacggtcacgagtctaacaagtttctcgaagagtatgacgccgtcctgaagggactcgttgctctgggaggcatctatctgcttttcataattgagcactgtatacgaatgttcaagcattacaaacagcaacggggaaaacaaaagtggtttatgaaacaaaatactgaagagagcaccatcggtagaaaattgagcgatcacaaactgaacaatactcccgattctgattggctgcagctgaagccactcgctggtacagacgacagtgtggtgtcagaagaccgtttgaacgagactgagctgacagacctagaaggacagcaagaatccccgccaaagaactatttgtgtattgaagaggagaaaataatagaccactcccactccgacggcctacacaccatacatgaacacgatctacacgcagcggctcacaaccaccatggggaaaacaaaacagtgttacggaagcacaatcatcagtggcaccacaaacacagccaccactctcacggcccttgtcattctggttccgacctgaaagaaaccggtattgccaacatcgcgtggatggtaatcatgggcgacggtatccacaacttttctgacggattagccattggtgcggcttttagtgcgggtctcacaggcggtataagtacaagtatcgcagtgttttgccacgagctgccccatgagctaggagactttgcagtcctccttaaagccggaatgactgtgaaacaggccatcgtgtataatctgttgtcggccatgatggcctacatcgggatgctgatcggtacagcagtcgggcaatacgccaacaacattaccctttggatcttcgccgtaaccgctggaatgtttctatatgtggctctggtggacatgctgcctgaaatgctacatggcgacggtgacaatgaggaacatggtttctgtcctgttggtcagtttatcctgcagaatctaggtctattgttcgggttcgccatcatgctggtgattgcactctacgaagacaagattgtatttgacatccagttctag

SEQ ID NO: 44743 - DNA, 2496 bp, Artificial Sequence
  derived and/or modified sequence
atgaaagtgcatatgcatacgaaattctgcctgatctgtttactgaccttcatctttcatcattgtaatcactgccatgaagagcacgaccacgggcctgaggccctgcaccgccagcacagagggatgactgagctcgagccatctaagttttcaaagcaagccgctgaaaacgagaagaagtactatattgaaaagctgtttgagcgctacggcgaaaacgggagattgagcttcttcggtctggagaagctgcttactaacctcggactgggcgagcgcaaagtggtggagatcaatcacgaagatcttggtcatgaccacgtgtcccacctggacattcttgcagtgcaggaaggaaagcacttccactcacacaaccatcagcacagccataatcacctaaacagtgagaaccagaccgttacttctgtttccaccaagcgcaaccataaatgtgatcctgagaaagagacagtagaagtgtccgtgaaaagcgatgacaaacatatgcatgaccacaaccataggctgagacaccaccatcgtctgcatcaccatctcgatcataacaatacccatcactttcacaatgattccatcactccctccgaaagaggtgagccgagcaatgagccgagcactgaaactaacaagacacaggaacagtctgatgtgaagctccccaaagggaagcggaaaaagaaggggaggaaatctaatgagaacagtgaggtgatcacaccagggttccctcctaatcacgatcagggtgagcagtacgagcacaacagagtacacaaaccagaccgtgtgcataatccagggcactcccacgtgcacctgccggagcgcaacggacacgaccccggaagggggcatcaagacttagacccagacaacgagggtgaactgcgccacacgcgaaagagggaagctccccacgtgaagaataatgcaataatttcacttaggaaggacttgaatgaagacgatcatcaccatgagtgcctcaacgttactcagctattgaaatattacgggcatggtgccaattcgccgatctcaacggacctctttacctacttatgtcctgctctgctgtaccagatagattctcgcctctgtatagaacacttcgataaactccttgttgaagatattaacaaagacaagaatctcgttccggaagatgaagcaaacattggggctagcgcatggatttgtggaataattagtataaccgttatcagtttgctctccttgctcggggtaattctggtgcctatcattaaccaaggatgcttcaagttcttgctcaccttcctcgtcgccctcgctgtcggaactatgtccggcgatgcactgctgcacttgctccctcattcacagggcggacacgaccattctcatcaacacgcccacgggcacggccacagccatggccacgaatccaataagttcttggaggagtatgatgctgtccttaagggtttggtggcattaggaggaatctacttgcttttcataattgagcattgtattcgcatgttcaaacactataaacaacagcgagggaagcaaaagtggtttatgaagcagaacacggaggagtctacaatcggacgaaaattaagcgaccataagctgaataacactccagacagtgattggttgcagctcaagcccctggctgggacagacgacagcgttgtgagcgaagatcgtctaaacgaaacagaacttaccgacctggagggtcagcaggagtccccccctaagaactacttatgtattgaggaggagaaaatcattgatcactcgcactccgacggactgcacaccatccacgaacatgacctacacgcggcagcgcacaatcaccacggcgaaaacaaaacagtgctaagaaaacacaatcatcagtggcaccacaaacactctcatcacagtcacgggccttgccatagcggctcagacctaaaggagactggaattgctaatatcgcctggatggtaatcatgggcgatggcattcataacttctctgacggactggctattggtgccgcttttagtgctggactgactggcggtatatcaacttctattgccgtcttttgccacgaacttccccatgaactgggcgattttgccgtactgctaaaggctggaatgacggtgaagcaggcaattgtgtacaatcttctgagtgctatgatggcttacattggcatgttgatcggcaccgcggttggacaatacgctaataacatcacattatggatcttcgctgtgactgccggtatgtttctgtacgtggcactcgtcgacatgctgccagaaatgctgcatggggacggagacaacgaggaacatggtttctgccccgtcggacagttcatattgcaaaatctgggcttactctttggctttgccattatgcttgtgattgcactgtacgaggataagattgtgttcgacatacagttttag

SEQ ID NO: 44744 - DNA, 117 bp, Artificial Sequence
  derived and/or modified sequence
atgaaagtccacatgcacactaagttttgtctgatctgtctgttgacatttatattccatcactgcaatcactgccacgaagagcacgaccacggcccagaggccctgcatcgttag

SEQ ID NO: 44745 - DNA, 1146 bp, Artificial Sequence
  derived and/or modified sequence
atgtccggggatgcactccttcatctgctccctcatagccaggggggacacgaccattcccaccagcacgcccacggacacggccattcacatgggcacgaaagtaacaaattccttgaggaatacgatgcagtgttgaagggtctcgtagcactgggcggaatataccttctttttatcatcgagcactgtattcggatgttcaagcattacaaacaacagcgaggaaaacagaaatggttcatgaaacagaacacagaggagtcaaccattggcagaaagctttctgatcacaagctgaataacacaccggatagcgactggctacagctgaagccactggccggtactgacgatagcgtcgtctcagaggataggctcaacgaaactgagctcacggatcttgagggccagcaagaatccccaccgaaaaattacctgtgcattgaggaggagaaaatcatcgaccacagccacagtgatggactgcacacaatacatgagcatgatttacacgccgcagcgcacaatcaccacggagagaataagaccgtacttaggaagcacaatcaccagtggcaccacaagcatagccaccactctcacggtccttgccattccggtagcgaccttaaggagactggcatcgccaatatcgcatggatggtcatcatgggcgatggaatccataatttttctgacgggttggccatcggagcggcattctccgctggtctcaccgggggaatctcaacgtcaattgcggtcttctgtcacgagttaccccatgaactgggggattttgcagttctgctcaaagctggtatgactgttaaacaggcaattgtgtacaacctcttgtccgccatgatggcttacatcggcatgctgattggcacagccgtggggcagtatgctaacaacattacactctggatcttcgcagtcaccgccggtatgttcctgtacgtagctcttgtggacatgctgccagagatgttgcacggggatggtgacaatgaggaacatggattctgtccagtcgggcagtttatcttgcagaacctgggcttattgtttgggtttgccatcatgctggtcatcgcgctgtatgaggataagattgtgttcgatatccagttttag

SEQ ID NO: 44746 - DNA, 5322 bp, Artificial Sequence
  derived and/or modified sequence
gagtggaccttgtacgccgcaagcgtagcagggtgtcagacgcgccggtttctgcgacgcagttagcgcagtctgctttggtgaatacacgatttggtgcagccggggtttggtaccgagcggagaggagatgcacacggcactcgagtgtgaggaaaaatagaaatgaaggtacatatgcacacaaaattttgcctcatttgtttgctgacatttatttttcatcattgcaaccattgccatgaagaacatgaccatggccctgaagcgcttcacagacagcatcgtggaatgacagaattggagccaagcaaattttcaaagcaagctgctgaaaatgaaaaaaaatactatattgaaaaactttttgagcgttatggtgaaaatggaagattatccttttttggtttggagaaacttttaacaaacttgggccttggagagagaaaagtagttgagattaatcatgaggatcttggccacgatcatgtttctcatttagatattttggcagttcaagagggaaagcattttcactcacataaccaccagcattcccataatcatttaaattcagaaaatcaaactgtgaccagtgtatccacaaaaagaaaccataaatgtgatccagagaaagagacagttgaagtgtctgtaaaatctgatgataaacatatgcatgaccataatcaccgcctacgtcatcaccatcgtttgcatcatcatcttgatcataacaacactcaccattttcataatgattccattactcccagtgagcgtggggagcctagcaatgaaccttcaacagagaccaataaaacccaggaacaatctgatgttaaactaccgaaaggaaagaggaagaaaaaagggaggaaaagtaatgaaaattctgaggttattacaccaggttttccccctaaccatgatcagggtgaacagtatgagcataatcgggtccacaaacctgatcgtgtacataacccaggtcattctcatgtacatcttccagaacgtaatggtcatgatcctggtcgtggacaccaagatcttgatcctgataatgaaggtgaacttcgacatactagaaagagagaagcaccacatgttaaaaataatgcaataatttctttgagaaaagatctaaatgaagatgaccatcatcatgaatgtttgaacgtcactcagttattaaaatactatggtcatggtgccaactctcccatctcaactgatttatttacatacctttgccctgcattgttatatcaaatcgacagcagactttgtattgagcattttgacaaacttttagttgaagatataaataaggataaaaacctggttcctgaagatgaggcaaatataggggcatcagcctggatttgtggtatcatttctatcactgtcattagcctgctttccttgctaggcgtgatcttggttcctatcattaaccaaggatgcttcaaattccttcttacattccttgttgcattagctgtaggaacaatgagtggagacgcccttcttcatctactgccccattctcagggtggacatgatcacagtcaccaacatgcacatgggcatggacattctcatggacatgaatctaacaagtttttggaagaatatgatgctgtattgaaaggacttgttgctctaggaggcatttacttgctatttatcattgaacactgcattagaatgtttaagcactacaaacaacaaagaggaaaacagaaatggtttatgaaacagaacacagaagaatcaactattggaagaaagctttcagatcacaagttaaacaatacaccagattctgactggcttcaactcaagcctcttgccggaactgatgactcggttgtttctgaagatcgacttaatgaaactgaactgacagatttagaaggccaacaagaatcccctcctaaaaattacctttgtatagaagaggagaaaatcatagaccattctcacagtgatggattacataccattcatgagcatgatctccatgctgctgcacataaccaccacggcgagaacaaaactgtgctgaggaagcataatcaccagtggcaccacaagcattctcatcattcccatggcccctgtcattctggatccgatctgaaagaaacaggaatagctaatatagcctggatggtgatcatgggggatggcatccacaacttcagtgatgggctcgcaattggtgcagctttcagtgctggattgacaggaggaatcagtacttctatagccgtcttctgtcatgaactgccacatgaattaggagattttgcagttcttcttaaagcaggcatgactgtaaagcaagcaattgtatacaacctcctctctgccatgatggcttacataggcatgctcataggcacagctgttggtcagtatgccaataacatcacactttggatctttgcagtcactgcaggcatgttcctctatgtagccttggtggatatgcttccagaaatgttgcatggtgatggtgacaatgaagaacatggcttttgtcctgtggggcaattcatccttcagaatttaggattgctctttggatttgccattatgctggtgattgccctctatgaagataaaattgtgtttgacatccagttttgacctttcccagtaatcactgttgattacgagaatgttaccatgcagctttgcatctgttccttgtactgtatgcacattgctcaaaggaaagtcagtggcttgcactacttacaagtttcatagatttgagcctaaccacaagaggctggtgcttagtactgttttccctgcacgtaggggtcttttaaaaatataaagcttgtgataaagagaggagaatatgggactccatgaaccagtgttgatatgtttgattaagacttttcacaaaataatcatataaaacactagtctctttattagtagaaacttctgtggctatgcagaaatagagatcgaaccaaaaaaaatcatttaaactttaaaaatattttaaatggactttggggagacattttttgtgtgttttaagaatgaattgtagtgctctttaattcagctacatatattcatgtggtgatagggatcaacttgacacaactttgaaactgcataaagtagacataggaactagaggaaagctcaggctgcattagagtatgaatttagcattgggaaaagcccttattcttgaatctagagttactatttttgtatatatttgcatagtgtttaaacctgcagcctaaactactgaaatttgtgattgtatgtttgtgtgagcttcagtttaatgaaagattcataatggttctttgtattattataatacttggtgttggggtgttctttctgttttgttttttactttaattttgttttgattttttttttttttttttggcgggggtaggtgagggtttggagcatgtggtctttttaaaaaattgtaaccctctagaaaatatcaaagaaatgaaccagacgtggtttaaatagttgattttcctattttaacagtaccaactagttaattgggaaatgtaagttctgaatgttcacattgctttaccagtttggcactggaaccaagagcacatgtcgtggctggctacaaggttgtaaagcagaaaatcgaagtttaccatgtctgtaatgtgtacatgaagtgtcaatttagaacagttactaggataaactccattattgccatggctgtcatggtacccaagtgacttggaagatgcatttaaattactcagctgaaatcacttgatcatcttgtgccaagatatgctgttggtgcctgatagggattagtcttttaggtgccctgttctcctaccataattgtgaatgatttgtgagaagtgcaagccatgtttatcctgaatttttacttaataatttgtattactagtcatatgcatgtagctttctgtttacatcctatgccacatggtcttcatttatgccaggtaaactgtatttgaactatgtgcagctagctttgttttaatctgcttggcaaccagtgtagctgctgtaacaatctatcttattgttcaaatatataagagccaaactcttttccattccatctaaaatgttttcatttagtactcttctttcctcctactctatgaacttcaaaacaaaaacaaaactttgagagcagcacatgcatccaggtatttatagattattgccagtgtcttttctgtatgctataagcaagggagcttaggtgttatttctttaatttatgcttgaatctgaaaaattatttctgacttactccatggcctccttataataagtagaagttttatatataattaattttcagcattgggcactgaattaggacagtcctcatctcattgcttggcccttcaagcaacctagctaaaaggtgctgatattttatttagtactgccaacttcaagtgatttagatatctatctatctagatttctgaaccaagatatatttatagttcacttttgggtttttatacccacggtaggattctgcattccagcattaaatctgcttcattttagaacctttataaaagcaatagctggaatatactcccagttttaaaataaatgcctgattgatttaaagcaagtaggttatgctgaagtatataaagaagttttatattctctcaaaaatggtattatctttctttatttgctagattcttacaaatcttttaagagggctgtaacagttgctgctagtattagggttccacatcattctaatgtatagtttcaagtcttaatagacaatctgaattccactacatttcttttggctccaacattccttttagcttgaccagtctaatttaaaatgtgtttgttggaggtcattaacgttacttgtacaatgctgtcactgtgtgacatccatatgaattttggtatatatcaatcaatcaatcaatcacattgcattcaatcaatcagctgtgattgattgattatgcttagaaatactatagtaactagatgcagtgtgaattttttccattaacaaacaaacaagtcagtggcttaaatgtgattatggtcctgcaaggtgattcttgctaaaatatctaaacttttgttttgttttaactgaatcattttttaacttaaaaagctggaaaatatcaaatgctgttttttttttttcattgtcaacagtggtgtgtcattttatgtatgttcctaatgcttatggaactcctccaaaataaagttactcaaagagagcaaata

SEQ ID NO: 44747 - DNA, 5432 bp, Artificial Sequence
  derived and/or modified sequence
agttgatcactctgaagctttttggctaaagcgtttgggtttagagcttccattactcattcgccttgcccaaggcctcagcaaccgacgttcgaaagccaggagaaaaggcgaatgataaagggcgctccacgcatgcgttaagaagccgccccaactcccccgcggcgttctttcttggaacaaaactagcgcggagccacggaactccgcagtttgcgtagacttgaatttcctattcctcggacgatccatgtggaatccgaaaaatagaaatgaaggtacatatgcacacaaaattttgcctcatttgtttgctgacatttatttttcatcattgcaaccattgccatgaagaacatgaccatggccctgaagcgcttcacagacagcatcgtggaatgacagaattggagccaagcaaattttcaaagcaagctgctgaaaatgaaaaaaaatactatattgaaaaactttttgagcgttatggtgaaaatggaagattatccttttttggtttggagaaacttttaacaaacttgggccttggagagagaaaagtagttgagattaatcatgaggatcttggccacgatcatgtttctcatttagatattttggcagttcaagagggaaagcattttcactcacataaccaccagcattcccataatcatttaaattcagaaaatcaaactgtgaccagtgtatccacaaaaagaaaccataaatgtgatccagagaaagagacagttgaagtgtctgtaaaatctgatgataaacatatgcatgaccataatcaccgcctacgtcatcaccatcgtttgcatcatcatcttgatcataacaacactcaccattttcataatgattccattactcccagtgagcgtggggagcctagcaatgaaccttcaacagagaccaataaaacccaggaacaatctgatgttaaactaccgaaaggaaagaggaagaaaaaagggaggaaaagtaatgaaaattctgaggttattacaccaggttttccccctaaccatgatcagggtgaacagtatgagcataatcgggtccacaaacctgatcgtgtacataacccaggtcattctcatgtacatcttccagaacgtaatggtcatgatcctggtcgtggacaccaagatcttgatcctgataatgaaggtgaacttcgacatactagaaagagagaagcaccacatgttaaaaataatgcaataatttctttgagaaaagatctaaatgaagatgaccatcatcatgaatgtttgaacgtcactcagttattaaaatactatggtcatggtgccaactctcccatctcaactgatttatttacatacctttgccctgcattgttatatcaaatcgacagcagactttgtattgagcattttgacaaacttttagttgaagatataaataaggataaaaacctggttcctgaagatgaggcaaatataggggcatcagcctggatttgtggtatcatttctatcactgtcattagcctgctttccttgctaggcgtgatcttggttcctatcattaaccaaggatgcttcaaattccttcttacattccttgttgcattagctgtaggaacaatgagtggagacgcccttcttcatctactgccccattctcagggtggacatgatcacagtcaccaacatgcacatgggcatggacattctcatggacatgaatctaacaagtttttggaagaatatgatgctgtattgaaaggacttgttgctctaggaggcatttacttgctatttatcattgaacactgcattagaatgtttaagcactacaaacaacaaagaggaaaacagaaatggtttatgaaacagaacacagaagaatcaactattggaagaaagctttcagatcacaagttaaacaatacaccagattctgactggcttcaactcaagcctcttgccggaactgatgactcggttgtttctgaagatcgacttaatgaaactgaactgacagatttagaaggccaacaagaatcccctcctaaaaattacctttgtatagaagaggagaaaatcatagaccattctcacagtgatggattacataccattcatgagcatgatctccatgctgctgcacataaccaccacggcgagaacaaaactgtgctgaggaagcataatcaccagtggcaccacaagcattctcatcattcccatggcccctgtcattctggatccgatctgaaagaaacaggaatagctaatatagcctggatggtgatcatgggggatggcatccacaacttcagtgatgggctcgcaattggtgcagctttcagtgctggattgacaggaggaatcagtacttctatagccgtcttctgtcatgaactgccacatgaattaggagattttgcagttcttcttaaagcaggcatgactgtaaagcaagcaattgtatacaacctcctctctgccatgatggcttacataggcatgctcataggcacagctgttggtcagtatgccaataacatcacactttggatctttgcagtcactgcaggcatgttcctctatgtagccttggtggatatgcttccagaaatgttgcatggtgatggtgacaatgaagaacatggcttttgtcctgtggggcaattcatccttcagaatttaggattgctctttggatttgccattatgctggtgattgccctctatgaagataaaattgtgtttgacatccagttttgacctttcccagtaatcactgttgattacgagaatgttaccatgcagctttgcatctgttccttgtactgtatgcacattgctcaaaggaaagtcagtggcttgcactacttacaagtttcatagatttgagcctaaccacaagaggctggtgcttagtactgttttccctgcacgtaggggtcttttaaaaatataaagcttgtgataaagagaggagaatatgggactccatgaaccagtgttgatatgtttgattaagacttttcacaaaataatcatataaaacactagtctctttattagtagaaacttctgtggctatgcagaaatagagatcgaaccaaaaaaaatcatttaaactttaaaaatattttaaatggactttggggagacattttttgtgtgttttaagaatgaattgtagtgctctttaattcagctacatatattcatgtggtgatagggatcaacttgacacaactttgaaactgcataaagtagacataggaactagaggaaagctcaggctgcattagagtatgaatttagcattgggaaaagcccttattcttgaatctagagttactatttttgtatatatttgcatagtgtttaaacctgcagcctaaactactgaaatttgtgattgtatgtttgtgtgagcttcagtttaatgaaagattcataatggttctttgtattattataatacttggtgttggggtgttctttctgttttgttttttactttaattttgttttgattttttttttttttttttggcgggggtaggtgagggtttggagcatgtggtctttttaaaaaattgtaaccctctagaaaatatcaaagaaatgaaccagacgtggtttaaatagttgattttcctattttaacagtaccaactagttaattgggaaatgtaagttctgaatgttcacattgctttaccagtttggcactggaaccaagagcacatgtcgtggctggctacaaggttgtaaagcagaaaatcgaagtttaccatgtctgtaatgtgtacatgaagtgtcaatttagaacagttactaggataaactccattattgccatggctgtcatggtacccaagtgacttggaagatgcatttaaattactcagctgaaatcacttgatcatcttgtgccaagatatgctgttggtgcctgatagggattagtcttttaggtgccctgttctcctaccataattgtgaatgatttgtgagaagtgcaagccatgtttatcctgaatttttacttaataatttgtattactagtcatatgcatgtagctttctgtttacatcctatgccacatggtcttcatttatgccaggtaaactgtatttgaactatgtgcagctagctttgttttaatctgcttggcaaccagtgtagctgctgtaacaatctatcttattgttcaaatatataagagccaaactcttttccattccatctaaaatgttttcatttagtactcttctttcctcctactctatgaacttcaaaacaaaaacaaaactttgagagcagcacatgcatccaggtatttatagattattgccagtgtcttttctgtatgctataagcaagggagcttaggtgttatttctttaatttatgcttgaatctgaaaaattatttctgacttactccatggcctccttataataagtagaagttttatatataattaattttcagcattgggcactgaattaggacagtcctcatctcattgcttggcccttcaagcaacctagctaaaaggtgctgatattttatttagtactgccaacttcaagtgatttagatatctatctatctagatttctgaaccaagatatatttatagttcacttttgggtttttatacccacggtaggattctgcattccagcattaaatctgcttcattttagaacctttataaaagcaatagctggaatatactcccagttttaaaataaatgcctgattgatttaaagcaagtaggttatgctgaagtatataaagaagttttatattctctcaaaaatggtattatctttctttatttgctagattcttacaaatcttttaagagggctgtaacagttgctgctagtattagggttccacatcattctaatgtatagtttcaagtcttaatagacaatctgaattccactacatttcttttggctccaacattccttttagcttgaccagtctaatttaaaatgtgtttgttggaggtcattaacgttacttgtacaatgctgtcactgtgtgacatccatatgaattttggtatatatcaatcaatcaatcaatcacattgcattcaatcaatcagctgtgattgattgattatgcttagaaatactatagtaactagatgcagtgtgaattttttccattaacaaacaaacaagtcagtggcttaaatgtgattatggtcctgcaaggtgattcttgctaaaatatctaaacttttgttttgttttaactgaatcattttttaacttaaaaagctggaaaatatcaaatgctgttttttttttttcattgtcaacagtggtgtgtcattttatgtatgttcctaatgcttatggaactcctccaaaataaagttactcaaagagagcaaata

SEQ ID NO: 44748 - DNA, 2219 bp, Artificial Sequence
  derived and/or modified sequence
agttagcgcagtctgctttggtgaatacacgatttggtgcagccggggtttggtaccgagcggagaggagatgcacacggcactcgagtgtgaggaaaaatagaaatgaagaacgtaatggtcatgatcctggtcgtggacaccaagatcttgatcctgataatgaaggtgaacttcgacatactagaaagagagaagcaccacatgttaaaaataatgcaataatttctttgagaaaagatctaaatgaagatgaccatcatcatgaatgtttgaacgtcactcagttattaaaatactatggtcatggtgccaactctcccatctcaactgatttatttacatacctttgccctgcattgttatatcaaatcgacagcagactttgtattgagcattttgacaaacttttagttgaagatataaataaggataaaaacctggttcctgaagatgaggcaaatataggggcatcagcctggatttgtggtatcatttctatcactgtcattagcctgctttccttgctaggcgtgatcttggttcctatcattaaccaaggatgcttcaaattccttcttacattccttgttgcattagctgtaggaacaatgagtggagacgcccttcttcatctactgccccattctcagggtggacatgatcacagtcaccaacatgcacatgggcatggacattctcatggacatgaatctaacaagtttttggaagaatatgatgctgtattgaaaggacttgttgctctaggaggcatttacttgctatttatcattgaacactgcattagaatgtttaagcactacaaacaacaaagaggaaaacagaaatggtttatgaaacagaacacagaagaatcaactattggaagaaagctttcagatcacaagttaaacaatacaccagattctgactggcttcaactcaagcctcttgccggaactgatgactcggttgtttctgaagatcgacttaatgaaactgaactgacagatttagaaggccaacaagaatcccctcctaaaaattacctttgtatagaagaggagaaaatcatagaccattctcacagtgatggattacataccattcatgagcatgatctccatgctgctgcacataaccaccacggcgagaacaaaactgtgctgaggaagcataatcaccagtggcaccacaagcattctcatcattcccatggcccctgtcattctggatccgatctgaaagaaacaggaatagctaatatagcctggatggtgatcatgggggatggcatccacaacttcagtgatgggctcgcaattggtgcagctttcagtgctggattgacaggaggaatcagtacttctatagccgtcttctgtcatgaactgccacatgaattaggagattttgcagttcttcttaaagcaggcatgactgtaaagcaagcaattgtatacaacctcctctctgccatgatggcttacataggcatgctcataggcacagctgttggtcagtatgccaataacatcacactttggatctttgcagtcactgcaggcatgttcctctatgtagccttggtggatatgcttccagaaatgttgcatggtgatggtgacaatgaagaacatggcttttgtcctgtggggcaattcatccttcagaatttaggattgctctttggatttgccattatgctggtgattgccctctatgaagataaaattgtgtttgacatccagttttgacctttcccagtaatcactgttgattacgagaatgttaccatgcagctttgcatctgttccttgtactgtatgcacattgctcaaaggaaagtcagtggcttgcactacttacaagtttcatagatttgagcctaaccacaagaggctggtgcttagtactgttttccctgcacgtaggggtcttttaaaaatataaagcttgtgataaagagaggagaatatgggactccatgaaccagtgttgatatgtttgattaagacttttcacaaaataatcatataaaacactagtctctttattagtagaaacttctgtggctatgcagaaatagagatcgaaccaaaaaaaatcatttaaactttaaaaatattttaaatggactttggggagacattttttgtgtgttttaagaatgaattgtagtgctctttaattcagctacatatattcatgtggtgata

SEQ ID NO: 44749 - protein, 782 aa, Artificial Sequence
  derived and/or modified sequence
MARARAGALLALWVLGAAAHPQCLDFRPPFRPTQPLRLCAQYSDFGCCDEGRDAELTRRFWALASRVDAAEWAACAGYARDLLCQECSPYAAHLYDAEDPFTPLRTVPGLCQDYCLDMWHKCRGLFRHLSTDQELWALEGNLARFCRYLSLDDTDYCFPYLLVNKNLNSNLGHVVADAKGCLQLCLEEVANGLRNPVAMVHARDGTHRFFVAEQVGLVWAYLPDRSRLGKPFLNISRVVLTSPWEGDERGFLGIAFHPSFQHNRRLYVYYSVGIRSSEWIRISEFRVSEDDENAVDHSSERIILEVKEPASNHNGGQLLFGDDGYLYIFTGDGGMAGDPFGTFGNAQNKSALLGKVLRIDVDRKERGLPYGIPPDNPFVGDPAAQPEVYALGVRNMWRCSFDRGDPSSGTGRGRLFCGDVGQNKFEEVDVVERGGNYGWRAREGFECYDRSLCANTSLNDLLPIFAYPHTVGKSVTGGYVYRGCEYPNLNGLYIFGDFMSGRLMSLQENPGTGQWQYSEICMGHGQTCEFPGLINNYYPYIISFGEDEAGELYFMSTGEPSATAPRGVVYKIIDASRRAPPGKCQIQPAQVKIRSRLIPFVPKEKFIPKTRSTPRPTARAPTRAPRRGRPTAAPPAPTPRPARPTQQPGSRRGGGRRRGRLNSASRAFRDGEVRLVRPAGLSSGSGRVEVFVGGRWGTVCDDSWNISGAAVVCRQLGFAYAVRAVKRAEFGQGGSLPILLDDVRCAGWERNLLECQHNGVGTHNCEHDEDAGVVCSHQNPDL

SEQ ID NO: 44750 - DNA, 2349 bp, Artificial Sequence
  derived and/or modified sequence
atggcgagagcccgtgccggagccctgctagccttatgggtgctaggcgctgccgctcaccctcagtgtctggactttcggcctcccttcagacccacccagcctcttcggctttgtgcacaatacagcgatttcggatgttgcgatgagggcagggacgccgagctgacccgcaggttttgggctctggcttctcgggtggatgccgctgagtgggccgcttgcgccggatacgcccgagatctcctctgtcaggaatgtagcccttacgcagcccatctttatgacgctgaggacccatttacgcctcttcgaacagtaccaggcctttgccaggattactgtctcgatatgtggcacaagtgcagaggcctgttccggcacttgagtactgatcaagaactgtgggccctcgaaggtaatctggccagattctgtaggtacttatctcttgatgacacagattactgcttcccttatctgctagtcaacaaaaatttgaactccaacctgggacatgtggtcgccgatgctaagggctgcctgcagctctgcctggaagaagtggctaacgggttgcgcaatccagttgccatggtccacgcacgcgatggaacacacagattctttgttgcggaacaggttggtctggtgtgggcttacctgcctgaccggtctcgcctgggaaaaccattccttaatatctccagagtagtgctgacctcaccgtgggagggcgatgagcgaggcttcctgggcatagccttccacccttccttccaacacaatcggagattatatgtgtactactcagtcgggattcgttcatccgaatggatccggatcagtgaatttcgagtctctgaggacgacgaaaacgccgttgaccattccagtgaacggatcatcctggaggtgaaggagcccgcatccaatcacaacggaggccagctgctcttcggagatgatggttacttgtatattttcacgggcgatgggggtatggccggtgatcctttcggtacatttgggaatgcccagaacaagagtgccttgctcgggaaagttctgcgaattgacgtggacaggaaggagcgaggattaccttacgggattccaccggacaatccatttgtgggggatccagccgcacagcctgaagtctatgccctgggcgtaaggaacatgtggcgctgctcattcgatcgtggggacccttcgtcggggactggacggggacggcttttctgtggagatgttgggcaaaacaaattcgaggaggttgacgttgtcgagcgaggcggtaactacggatggagggctagggagggatttgaatgttacgataggagtctatgtgctaacacaagcctcaacgatctcctgcccattttcgcctatccccacacggtaggaaagagcgttaccgggggttatgtctacagggggtgtgagtaccccaatctgaatggactgtacatctttggggatttcatgagcggaaggctcatgagtctgcaggaaaatcctggaaccggacaatggcagtactcggagatctgtatgggacacggacagacctgcgaatttccaggtctcattaataactactacccttatataatttctttcggtgaagacgaagctggcgaactctattttatgtccaccggcgaacccagtgcaaccgcacccaggggagtggtctacaaaattatcgatgctagcagacgcgcacctccagggaagtgtcaaattcagcccgctcaggtgaaaattcgatccagactaattccttttgtgccaaaagagaagtttattcctaagaccagatctacgcctcgacccactgccagggcccctactagggcgcctcggagaggtcgcccaacggctgctcccccagcccctacgcctcggccagcccgtcccacccagcagcccggttccaggcggggaggcggtagacgcaggggaagactgaattccgcctcacgcgcttttagggatggggaagtgagactggtgaggccagccggactctccagtggctctggcagagtcgaggtattcgtgggtgggcgatggggaaccgtgtgcgacgacagctggaatattagtggagctgccgttgtatgcagacaacttggcttcgcctatgcggtgagggctgtgaaacgggctgagttcggtcagggcggtagtctgcccatcttacttgacgacgtgcgatgtgccggatgggagagaaacttgctggagtgtcagcacaacggtgttggcacacacaactgtgaacatgatgaggatgcgggagtggtgtgctcacatcagaatccggacttgtag

SEQ ID NO: 44751 - DNA, 2349 bp, Artificial Sequence
  derived and/or modified sequence
atggcacgggcccgggcaggcgcactgttagcattgtgggtgctgggcgctgccgctcacccccagtgtctcgacttccgaccaccattccgccccacacagccattgcggctgtgtgctcagtactccgactttggctgctgtgatgagggacgcgatgccgagttgactcggaggttctgggccctggcttcccgcgtagacgccgccgagtgggcagcctgtgccggctatgcccgtgacctgctctgtcaggagtgttctccatatgctgcccacctttacgatgcggaggaccccttcaccccactccgcacagtgccagggttatgtcaggattactgcctcgacatgtggcataaatgccgaggacttttccgccacctgtccaccgatcaggaattgtgggccctggaggggaacttggcgagattttgccgatatttgagtctggacgacactgactactgcttcccttatttgctagtgaataaaaatttgaattccaatctcgggcacgtagtggctgatgccaaaggttgccttcaactctgccttgaggaggtggcaaacggcctccggaaccccgtggcaatggttcatgcaagagacgggactcacaggttcttcgtggcagagcaagtgggccttgtgtgggcctacctccccgataggtccagactcggcaagccttttttgaacattagtagagtggtgctcactagcccctgggaaggtgatgaacggggcttcctgggcattgcttttcacccctcatttcagcacaaccgacgcctatacgtttactactcggtagggatcagatcaagcgaatggatcagaatatcagaatttcgagtgagcgaggatgatgaaaatgccgtcgatcactcttcagaacggataatactagaggtgaaagagcccgcgtctaaccacaacgggggacagctgttgtttggcgatgacggttacctgtacattttcactggagatgggggaatggctggggatcccttcgggactttcggcaatgcccagaataagtcagctctgctcggcaaggtgctcaggatcgatgtggacagaaaggagcgagggctcccatatggcattccacccgataacccgtttgtgggcgaccctgccgcacaacccgaagtgtatgctctgggcgtgcgcaatatgtggcggtgcagcttcgacagaggagatccatccagcggaacaggcaggggaagattgttctgtggggatgtgggccaaaacaaattcgaagaggtcgacgtggttgaacggggggggaattacggctggagagccagagaaggtttcgagtgttacgataggtcactgtgcgccaataccagtctaaacgatctgctccccattttcgcttatccacataccgtgggaaaatcagtcaccggagggtacgtttacagagggtgcgagtacccaaacctgaatggactttacatcttcggcgatttcatgtctggacgcttaatgtcactccaagaaaaccctggaactggccaatggcagtactccgaaatttgcatgggccacgggcagacctgcgagtttcctggtctgataaacaattactacccttacattatctccttcggtgaggatgaggccggcgagctgtattttatgtccactggggagccttccgccactgccccaagaggagttgtctacaaaataatcgacgcttccagacgcgctccgcccggtaaatgccagatccaaccagctcaggttaagatacgttcaagactgattccattcgtgccaaaggagaaatttatccccaaaacgaggtccaccccccgacccacggcccgcgcgcctactagagcaccgcggaggggcaggcctactgcagccccccctgctcctaccccaaggccagccagaccgacgcagcaacctggaagcaggcgaggcgggggccgacgcagaggccgattaaacagtgcgtctagggcttttcgcgacggtgaagttcgactggtgagaccagccggcctcagtagcggatccggccgagtcgaggtcttcgtgggtggtcggtgggggacggtctgtgatgattcatggaatatttccggggccgcagtggtttgtaggcaactgggtttcgcctatgcagtccgagcagtcaaacgcgccgagtttggacagggtgggagcctgccgatcctacttgatgatgtccgctgcgcaggatgggaaaggaatctcctggagtgtcagcataacggcgtgggtacccataattgtgagcacgatgaggatgcaggagtggtatgtagccatcagaaccccgacctttag

SEQ ID NO: 44752 - DNA, 2349 bp, Artificial Sequence
  derived and/or modified sequence
atggcccgcgcgagagctggcgctttactcgcactatgggttttaggggcggcagctcacccccagtgtctggatttccgtcctccttttcgacccacccaaccgctcagactctgcgcccagtacagtgacttcggttgttgcgatgagggccgcgatgccgagctaacaagacggttctgggcccttgcgagccgagtggatgcagccgaatgggccgcctgcgcaggctacgcccgtgacctgctctgccaggaatgtagcccatatgccgctcacctctatgacgccgaagatccatttacacccttacgtacagttcccggattatgtcaagattattgcttggacatgtggcacaaatgccgcgggctctttaggcacttatccactgaccaagagttatgggccctggaagggaacttggcccggttctgtagatatctgagcctggacgacactgattattgtttcccctaccttttagtgaacaagaatctgaattccaacctaggacacgtagttgcagacgcaaagggatgtttgcagttatgcttggaagaagtcgctaacgggttgcgtaaccctgtggccatggtgcacgcacgcgacggaacccatcggttctttgtggcagaacaagtcgggctagtctgggcatatctccccgatcgcagcagactcggcaaaccttttctgaatatcagccgggtggtgctgacctcaccctgggagggcgacgagcgcgggtttttgggaattgccttccatccgtcctttcaacataaccgcagactttacgtgtactacagcgtcggaattagatcctcagagtggatccggatcagtgaatttagagtgagcgaagacgatgagaatgccgtcgaccattctagcgaaaggatcatattggaagtgaaagaacctgctagcaaccacaatggcggtcaactgttgtttggagatgatgggtatctgtatatctttaccggggacggtggtatggccggcgatccctttggtacgttcggtaacgctcagaataaatccgctctgttaggaaaagtgctcaggattgacgtggatagaaaagagcgcgggctcccttatggcatcccacctgacaaccctttcgtcggagaccccgcggcccaaccagaggtctatgcattaggagtgagaaatatgtggaggtgtagttttgatcgcggtgacccttctagcggaacgggaaggggacgtctgttctgcggagacgtgggccaaaataaatttgaggaagttgacgtggttgagcgaggcgggaattatggttggcgagcacgtgaaggatttgagtgctatgaccgctcactgtgtgccaatacatccctgaacgacctgttacctatcttcgcctatccgcatacggtgggaaaatccgtcactggaggctatgtatatagaggatgtgaatacccaaatttgaacgggctttatatttttggagatttcatgtctggccgtctaatgagtctgcaggaaaaccccggtactgggcaatggcaatattcagaaatctgtatgggacacgggcaaacctgcgaatttcccggcctaataaacaactattatccatatattatatcatttggagaagatgaagccggagaattgtactttatgagcacgggggaacccagcgcaactgcaccaagaggcgtggtctataagataatcgatgcatctagacgggccccacccggtaagtgccaaatccaacccgcccaagttaaaatcaggtctagactcattccattcgtccctaaagaaaaattcatacccaagaccaggagtacccctcgccccactgctcgagcaccgacccgcgcacctaggagagggagacccactgcagccccgcccgcccctaccccacgccctgccaggccaacacagcagcctggctcacgtcgcggaggtggccgtcgtcgaggtcggctgaactctgcatcaagggcctttcgcgatggagaggtgcgcctcgtccgcccagccggcctttcatctggatcaggtagagtcgaagtgtttgttggcggtcggtggggaacagtttgtgatgattcatggaatatttccggggccgcagtggtttgtaggcaactgggtttcgcctatgcagtccgagcagtcaaacgcgccgagtttggacagggtgggagcctgccgatcctacttgatgatgtccgctgcgcaggatgggaaaggaatctcctggagtgtcagcataacggcgtgggtacccataattgtgagcacgatgaggatgcaggagtggtatgtagccatcagaaccccgacctttag

SEQ ID NO: 44753 - DNA, 2349 bp, Artificial Sequence
  derived and/or modified sequence
atggccagagccagagccggcgccctgctggccctgtgggtgctgggcgccgccgcccacccccagtgcctggacttcagaccccccttcagacccacccagcccctgagactgtgcgcccagtacagcgacttcggctgctgcgacgagggcagagacgccgagctgaccagaagattctgggccctggccagcagagtggacgccgccgagtgggccgcctgcgccggctacgccagagacctgctgtgccaggagtgcagcccctacgccgcccacctgtacgacgccgaggaccccttcacccccctgagaaccgtgcccggcctgtgccaggactactgcctggacatgtggcacaagtgcagaggcctgttcagacacctgagcaccgaccaggagctgtgggccctggagggcaacctggccagattctgcagatacctgagcctggacgacaccgactactgcttcccctacctgctggtgaacaagaacctgaacagcaacctgggccacgtggtggccgacgccaagggctgcctgcagctgtgcctggaggaggtggccaacggcctgagaaaccccgtggccatggtgcacgccagagacggcacccacagattcttcgtggccgagcaggtgggcctggtgtgggcctacctgcccgacagaagcagactgggcaagcccttcctgaacatcagcagagtggtgctgaccagcccctgggagggcgacgagagaggcttcctgggcatcgccttccaccccagcttccagcacaacagaagactgtacgtgtactacagcgtgggcatcagaagcagcgagtggatcagaatcagcgagttcagagtgagcgaggacgacgagaacgccgtggaccacagcagcgagagaatcatcctggaggtgaaggagcccgccagcaaccacaacggcggccagctgctgttcggcgacgacggctacctgtacatcttcaccggcgacggcggcatggccggcgaccccttcggcaccttcggcaacgcccagaacaagagcgccctgctgggcaaggtgctgagaatcgacgtggacagaaaggagagaggcctgccctacggcatcccccccgacaaccccttcgtgggcgaccccgccgcccagcccgaggtgtacgccctgggcgtgagaaacatgtggagatgcagcttcgacagaggcgaccccagcagcggcaccggcagaggcagactgttctgcggcgacgtgggccagaacaagttcgaggaggtggacgtggtggagagaggcggcaactacggctggagagccagagagggcttcgagtgctacgacagaagcctgtgcgccaacaccagcctgaacgacctgctgcccatcttcgcctacccccacaccgtgggcaagagcgtgaccggcggctacgtgtacagaggctgcgagtaccccaacctgaacggcctgtacatcttcggcgacttcatgagcggcagactgatgagcctgcaggagaaccccggcaccggccagtggcagtacagcgagatctgcatgggccacggccagacctgcgagttccccggcctgatcaacaactactacccctacatcatcagcttcggcgaggacgaggccggcgagctgtacttcatgagcaccggcgagcccagcgccaccgcccccagaggcgtggtgtacaagatcatcgacgccagcagaagagccccccccggcaagtgccagatccagcccgcccaggtgaagatcagaagcagactgatccccttcgtgcccaaggagaagttcatccccaagaccagaagcacccccagacccaccgccagagcccccaccagagcccccagaagaggcagacccaccgccgccccccccgcccccacccccagacccgccagacccacccagcagcccggcagcagaagaggcggcggcagaagaagaggcagactgaacagcgccagcagagccttcagagacggcgaggtgagactggtgagacccgccggcctgagcagcggcagcggcagagtggaggtgttcgtgggcggcagatggggcaccgtgtgcgacgacagctggaacatcagcggcgccgccgtggtgtgcagacagctgggcttcgcctacgccgtgagagccgtgaagagagccgagttcggccagggcggcagcctgcccatcctgctggacgacgtgagatgcgccggctgggagagaaacctgctggagtgccagcacaacggcgtgggcacccacaactgcgagcacgacgaggacgccggcgtggtgtgcagccaccagaaccccgacctgtag

SEQ ID NO: 44754 - DNA, 7390 bp, Artificial Sequence
  derived and/or modified sequence
agggaaggggagcgcccgccccttccctgccgccgcgagcgccccgggaggggaccggggctgccgtccctccgcctcttcccccgcggggcgtagcgatggcccgggccagggccggggcgctgctggcgctttgggtgctcggggccgccgcgcatccgcagtgcctggacttcaggccgcccttccggccgacgcagccgctgcgcctctgcgcgcagtactcggacttcggctgctgcgatgaggggcgcgacgccgagctgacccgccgcttctgggccctggcgagccgcgtggacgccgccgagtgggccgcgtgcgccggctacgcgagggacctgctgtgccaggaatgctcgccgtatgcagcccacctctatgacgccgaggacccattcacgcccctgcgcacggtgcccgggctctgccaggattactgcctggacatgtggcataagtgccgggggctgttccgtcacctgtcaactgaccaggagctctgggcgctggagggcaaccttgccaggttctgccgctacctgtccctggatgacacggactactgcttcccttacctgctggtcaacaagaacctcaactcaaacctgggccacgtggtagccgatgccaagggctgcctgcagctgtgcctggaggaggtggccaacgggctgcgcaaccccgtggccatggtccatgccagggatggcacccaccgcttcttcgtggccgagcaggtggggctggtgtgggcctacctgcccgaccgctcgaggctggggaagcctttcctgaacatcagccgggtggtgctcacctcgccctgggagggtgacgagcgtggcttcctgggcattgccttccaccccagcttccagcacaaccgcaggctctacgtctactactcagtgggtatccgcagcagtgagtggatccgcatcagcgagttcagagtctccgaggatgacgagaacgccgtggaccacagctctgagaggataatcctggaggtcaaagaaccagcctcaaaccacaacgggggccagctgcttttcggggatgacgggtacctctacatcttcactggagatggcgggatggccggagacccctttgggacatttggaaatgcccaaaacaagtcggcgctgctgggcaaggtgctgcgcatcgacgtggaccgtaaggagcgcggcctgccctacggcatcccgcccgacaacccgttcgtgggcgaccccgcggcgcagcccgaggtctacgccctgggcgtgcgcaacatgtggcgctgctccttcgaccgtggcgacccctcctcgggcactggccgcgggcgcctcttctgcggcgacgtgggccagaacaagttcgaggaggtggacgtggtggagcgcggcggcaactatggctggcgcgcgcgcgaagggttcgagtgctacgaccgcagcctgtgcgccaacacctctctcaatgacttgctgccgattttcgcctacccgcacacggttggcaagtcggtcacagggggctacgtgtaccggggctgcgagtaccccaacctgaacggcctctacatttttggggatttcatgagcgggcgtctgatgtccctccaagagaacccagggacaggccagtggcagtacagtgagatctgcatgggccacggccagacctgtgagttcccaggcctcatcaacaactactacccgtacatcatctccttcggggaggacgaggccggggagctgtacttcatgtcgacaggggagccgagtgccacagctccacgcggagttgtctacaaaataattgacgcatccaggcgggcaccacctggcaaatgtcagatccagcctgctcaggtgaagatcagaagccgtctcatcccctttgtgcccaaagaaaagttcatcccgaagacacggagcaccccgcggcctacagcgcgggcgcccacgcgggcgccccgccgagggcgccccacggccgctccccccgcgccaaccccgcggccagcgcggcccacccagcagccagggagccggaggggcggcgggcggcggcgggggcggctgaactcggcgagccgggcgttccgggatggcgaggtgcgcctggtgcggcccgcgggcctgagctctggcagcgggcgcgtggaggtgttcgtgggcggacgctggggcaccgtgtgcgacgactcctggaacatcagcggcgccgccgtcgtgtgtcgccagctggggtttgcctacgccgtgcgcgccgtcaagagagccgagttcggccagggcggctcgctgcccattctgctggacgatgtgcgctgcgcgggctgggagcggaacctgctggagtgccagcacaacggcgtgggcacccacaactgcgagcacgacgaggatgcgggcgtcgtgtgcagccaccagaaccccgacctgtaggcaacacgccgctgccccaggccatcccgccggcgggggagcctggcaggggccgctccgccctgtgtgcgcccagcgggtgcacacgtgttctagagtgaagggggtgcgggtgtgtgctgtcctggggacatgtgtgaggcgctgcagtgcatgtgtgtcctctgcagacccaaggcaggagtgtgtgttgggggcggtgtgggctctggaagtgcatggtccatcatgggcgggaggagttcctttcttacctccaagcgtttcagacaccagcaggaacagcagccgggctgtgggaccctgaggagggagggcagccaggcttcgaggacggacatggcccctggctgtgctaacagaggcacagcttgcagactgagggcggtggggagaaccaggcttgtcctgcccacagctggaatggaaggtgcaagaacagccggagggtggcctgaggaatgtggcccggacagcatggcctggtgcccgcatcccccccaccccctggcagtcagaggcgctggagagaaccggaaggcatccagtggggaagggaaagccttctggaaggtgggagcagggtgagctgcaggcctggggccccactggaggggcaggctgcgtggaggagccagcacctgctcagggaggatggctgtgaggactggatgacctccaaggccgtatgctggagaagccactcagcagcatactcagtccttgtgggtgctcctgggatgggaccagcctcctccaaccctgaggcctgattctctcttgctcttggggcagaagccacccacactagctgggcagagctttcaccctggccctccagtgagtcggtgggcctccactactttcaaagctgtgtttgggccctggggccacctctgtcctttccatccccatccctgctcagtgtaaacccaggagacctgattcctccagccctacctcggggctgaccaggctgggggtccagtgaaactactgacactttttcacccagggctatgccaataatgtggctgtttacacaccactttcctgcctcctctctgacctgcacctgtgtgggagccggggtgggaaccaggagaaaggggtgaggcctcccgcttcccacctgcatcacaggtggaagctccttcactccagggatgctcggccctggctctgtgccaggccgcagaggggcacttagtatgactgcgctcagcctcggatgggagcacgggtggggggtgggtaagcagatgagtcaccaggcagtgaagacaggatgtggcccatgtcgggggttggaagaggtctgggtggggcacccaaacccaacctatgggggggctttgggagggggtgatgctgtgccaagttctgggagctggcaccaggggtggctgggcaggccttggggcaggcatgagtctggcagggtctcctagctgctagtatagggtctcctagccactagtataggatcctgggctgcagcagaaagctttaggtcactgtcttggactcctcatactctgtgctttacagaatgggaaactgaggcacacagaggttagatatcttagggcaccaagccagggaagggagaagtcaagtttgaatacagcagcttagtttagagtccccgcaccctaaccactgccctccccagctacactatgcctgcagagagcggtgtgctggggctcctgcctggtgtgggagtgccagcctggctgggaagcagctgatggagatccctgggggctcctcttgcctggcaggtgcccccgctgctggcctcatgctcctctcgggcctccagtggcccaggggaggttgagtgggcatcttcctgggatgcaggggagttctgagctctgacgccgggcgtgttaggagatagcaggccgttaatgaccatcccagccgaattcctcactgtgcagatgaggaagtgagctcagggaggctgagtgtcccaggcctgttgccagatgaggccacgctgagactggagccagggaaggtgcagcaagccttgaggccctcaagaatgcagccgagccagggccctgcttgcctggccccagaagctgttttgctcagagctggattaggagggttggcaaagggagctctgggtgcggcctcaggccctccagtacttctctgggcagttcgggctttggccttcagtcttccaggccaggcgctcttcctccccagcctccaactcatcacctctcaggccccaaaccaggcctgggctaggctgcagcctgcctcctggggactcactccacagtccccaggtcagtggtccccaacctttttggcatcatggactggtttcatgtaagacaatttttccatggatgggggttggggggatggttttgggatgaaatgtcccacctcagatcatcaggcattagattctcataaggagttcacagcctagatccctcgcatgcacagttcatagtaggtttcatgttcctatgcggatctaatgccactgctgatctggcaggaggcagagctcaggtgggaatgcttgctccccacactaccctgccccactgccactcacctcctgctgtgtggcccggttcctaacaggccacccatcagtactggtccgtggcccagggtttggagacctctgccctaggtagtaataagagtggacagctgttatatgtaaatacttgttccccgatgctggaaagaaatagcactaaaacataaatttaattctttcagcaaggcaattttactttctgcagaaagggtgctcatcgcagatggaacaatagtgagaggacacctgaacaaaggagggaagcaattgttagcccttatgcagtttgtccctgctactgtgtcctatgtccattggcagaagccagaccgcacaatctaaactaaaacccgattggctgtttaaaatttttctaaataggtaaaagtaatggaaggataaaggaaaagaggaagttgcttacgaaaggacttagaaaagtaataatattcccaaataaggaaggggtataggctgtgagctgggacatgcctgtgagcacgtccagcacagatatcttggttaaagtataaggacatagaacgtactatgtgcctgtgagcacgtctaacagttacatagaatagggcttgacaaagagttattagcataaagcaaggaggtttgaaggaagttcgtctttaaaagaaaccattatttctaacacttacgatttattctttaacaagaagggaaactttcaagaggaacttttactttctacaacagctgacctctgctgagcgcttactacatgccaagcactgctctgaaagtttaacataccattcactcatgtaatcctcatattaatgcacatttactcacgtggaagccgagttccagggcatttgtcacttaccaaatgtcacatagccaaaatttgaatttgagcccaggtagtccagctctgggaccctgctgtgggccttcctgctgggccacctcaagggcattgaaagccagccccaccccactgggacacaagttcagagaagggcagagctggctgcctgtccagtgcttctttcactccaccacctacagctggccgctgagggagcattcacatgtgactctgtccccagggactccgatcttgccttaaagtcctccagggcctctgaggatgggggcacagccttcaccctcaccccctctaatccaacctctagtcaatagccaggatcagattctcagagaggggctgccctgcccagtgccacacagcttagtgctggagcctcagggtcaatgctgcaggggtggcccagtgtccaggactgtgttcaagacatcagtcagaggtcacaacatcccaggccctagactgagcctaggggtcaccatgttgataccttagaaatgtttgggaggttcaaggaagctggaaactgggttccagtcctggctctgtgcctctctgagtctcattgcaaaatagaggtcaccagaaggattactggatgaaaaatgaggtagcattgcagacgtgcatggcacgtacactctaggttgcttcctagacagaaagctcagttcgaggctggtggcatccatgctggcagcagccaactgtctgcgacagagtgaggaggggcatgccacgtgaaggaccagcatcagaatgacatgggaagaaactctcacaatagcagaagaaagagctccttcagcctaacatgtagaactcaagtcttcttgtcgcgcttctgtcccctcgcccctcctcccccactgagaactagcttttactgagcagttattacatgccagctacctcgggtgtgtcagctcatttaatcttgacaacagctccacgagacaccctcaatatcactgtccctgttttccagatgaggggacagattcctagggtgttatgtaagtggtccccggggctttagaggcaggtttgcaccaaggcccattctcccagagccggatccttctccttccctgggatacagcacctccaccctgccaggccacccatgtaaaggcagccaattcagagccacctcttatgcctgcatctccccaacaattcctgctgggaaaccactcctcgtatggtgtcatctacaccagtgggtttcaagcttgagaagaatcaagttctacagggctgcttaaaacacaggttgctgggtcctgtctctcagagtttttgactcagtcttggttgagaattttcagttctagaagctcctgggtaatgctaatcctcctgttctaggggccatagtcattgtccatactggtgctatccaatagaaacataatgtgagccaaataggtaatttaaaatctgcttgtagccatgttaaaaaagtaaaacaggtaaaattaa

SEQ ID NO: 44755 - DNA, 2349 bp, Artificial Sequence
  derived and/or modified sequence
atggcacgggcgcgggccggcgcgttattggcattgtgggtgctgggcgcagcggctcatccccagtgtctggactttaggcctcctttcagaccaactcagccgctgcgcctctgcgctcagtactcagacttcggttgctgtgatgaggggcgcgatgcagagctgacaagacgattctgggctctcgcatcccgcgtcgacgctgctgagtgggccgcttgtgcaggttacgcgagagacctcctatgccaggagtgttccccctatgccgcccacctgtatgatgccgaggacccgtttacaccgctccgcacagttcctggcctctgtcaggattactgcctagatatgtggcataagtgtcgaggactattccggcacctgtctactgaccaggaactgtgggccctcgaagggaatctggcccgtttctgccggtacctatcactggacgacaccgactactgtttcccatacttgcttgtgaacaagaatcttaactccaatctgggacatgtagtggcagacgccaaaggatgcttgcagttgtgtttggaggaggtcgcgaatggcctgcgaaatcccgttgctatggtgcacgccagggacgggacccacagatttttcgtcgcagagcaggtgggattagtctgggcttatttacccgaccggagcagactgggcaaaccattcctcaacatctctcgggtcgtgctgacaagtccctgggagggagacgagagggggttccttgggattgccttccatccatcgtttcagcacaatcgtcggctgtacgtctactatagcgttgggattaggagttccgagtggattcgaatcagcgaatttcgtgtgagtgaggatgacgaaaatgcagtggatcactccagcgaacgaatcatactggaagtaaaagaacccgcctcaaatcacaatggcgggcagcttctttttggggatgacggatatctttacatatttaccggtgacggtggaatggctggcgaccccttcggaacctttgggaatgcccagaataagagtgcgcttctgggtaaggtcctccgaatcgacgttgaccggaaggaaaggggcctcccttatggaatcccacctgataacccttttgtgggtgatccagccgctcaacccgaggtctacgccttgggtgtccggaacatgtggaggtgtagctttgacaggggagatccatcttctggaacagggcgaggaaggcttttttgtggggacgttggacagaacaagttcgaggaggtggatgttgtggagagagggggcaactacgggtggagggccagagagggatttgagtgctacgacaggtccctgtgcgccaacaccagtttaaacgatctcttgccaatcttcgcctatccacacacggtaggaaagtccgtgactggggggtacgtctatcgcgggtgtgaataccccaaccttaatggcctgtacatcttcggagactttatgtctggaaggctgatgagcctccaagagaatccgggaaccgggcagtggcagtactctgaaatctgcatgggacatggtcagacctgtgaattccctgggctgattaacaactactatccttatatcataagttttggagaggatgaagccggcgaactatattttatgtctacgggtgagccttctgctacggctcccaggggcgtcgtgtacaagattatcgacgcaagccgccgggccccccctggcaagtgtcagatccagcctgcccaagtgaaaatccgcagccggctgattccctttgttcctaaggagaaattcataccaaagacccgctctacaccgcgccccacggcaagagccccgacaagagcacctcgaagaggacgtccgaccgccgcacctccagccccaacccctaggcctgcacggcccacacagcagcccggatcgcgccgtggaggcggcagaaggagaggtcgccttaatagtgcgtctcgggctttcagagatggagaggtgcgactggttcgtccagccggattatcttccggtagcggccgggttgaagtgttcgttggggggcgatgggggaccgtctgcgatgattcctggaacatatctggagccgcagtggtctgtcgccaactgggcttcgcttacgcggtgagagctgtcaagcgtgctgagtttggacagggaggctcattgcctattcttcttgacgatgtgcgatgtgccggctgggaacgcaacctcttggaatgtcagcataacggggtcggcactcacaattgcgaacacgacgaggacgcaggggtggtgtgcagtcatcagaaccccgatctgtag

SEQ ID NO: 44756 - DNA, 2349 bp, Artificial Sequence
  derived and/or modified sequence
atggcccgggcccgggccggggccctgctggccctgtgggtgctgggcgccgccgcccacccccagtgcctggacttccggccccccttccggcccacccagcccctgcggctgtgtgcccagtacagcgactttggctgctgtgatgagggcagagatgctgagctgacccggcgcttctgggccctggccagccgggtggatgctgctgagtgggccgcctgtgccggctacgcccgggacctgctgtgccaggagtgcagcccctatgctgcccacctgtatgatgctgaggaccccttcacccccctgaggacagtgcccggcctgtgccaggactactgcctggacatgtggcacaagtgccggggcctcttccgccacctgagcacagaccaggagctgtgggccctggagggcaacctggcccgcttctgccgctacctgagcctggatgacacagactactgcttcccctacctgctggtgaacaagaacctgaacagcaacctgggccacgtggtggctgatgccaagggctgcctgcagctgtgcctggaggaggtggccaacggcctgaggaaccctgtggccatggtgcacgccagagatggcacccaccgcttctttgtggccgagcaggtgggcctggtgtgggcctacctgcctgacaggagccggctgggcaagcccttcctgaacatcagccgggtggtgctgaccagcccctgggagggagatgagcggggcttcctgggcatcgccttccaccccagcttccagcacaacagaaggctgtatgtgtactacagcgtgggcatccgcagcagcgagtggatccgcatcagcgagttccgggtgtctgaagatgatgaaaatgctgtggaccacagcagcgagcgcatcatcctggaggtgaaggagcccgccagcaaccacaacggcggccagctgctgtttggagatgatggctacctgtacatcttcaccggagatggcggcatggccggggaccccttcggcacctttggaaatgcccagaacaagagcgccctgctgggcaaggtgctgagaattgatgtggacaggaaggagcggggcctgccctacggcatccccccagacaacccctttgtgggggaccctgctgcccagcctgaggtgtatgccctgggcgtgaggaacatgtggcgctgcagctttgacagaggagaccccagcagcggcaccggccggggccgcctcttctgtggagatgtgggccagaacaagtttgaggaggtggatgtggtggagcggggcggcaactacggctggagggcccgggagggctttgagtgctatgacaggagcctgtgtgccaacaccagcctgaatgacctgctgcccatctttgcctacccccacacagtgggcaagtctgtgactggaggctacgtgtaccggggctgtgagtaccccaacctgaatggcctgtacatctttggagacttcatgagcggccgcctgatgagcctgcaggagaaccctggcaccggccagtggcagtacagcgagatctgcatgggccacggccagacctgtgagttccctggcctcatcaacaactactacccctacatcatcagctttggagaagatgaagctggggagctgtacttcatgagcactggagagcccagcgccacagccccccggggcgtggtgtacaagatcattgatgccagcagaagagcccctcctgggaagtgccagatccagcctgcccaggtgaagatccgcagccgcctcatcccctttgtgcccaaggagaagttcatccccaagaccaggagcaccccccggcccacagcccgggcccccacccgggccccccggcggggccggcccacagctgcccccccagcccccacccccaggcctgcccggcccacccagcagcccggcagcagaagaggaggcggcagaagaagaggccgcctgaacagcgccagccgggccttcagagatggagaggtgcggctggtgcggcctgctggcctgagcagcggcagcggccgggtggaggtgtttgtgggcggccgctggggcaccgtgtgtgatgacagctggaacatctctggagctgctgtggtgtgccggcagctgggctttgcctatgctgtgcgggctgtgaagagagctgagtttggccagggcggcagcctgcccatcctgctggatgatgtgcgctgtgccggctgggagaggaacctgctggagtgccagcacaacggggtgggcacccacaactgtgaacatgatgaagatgctggggtggtgtgcagccaccagaacccagacctgtag

SEQ ID NO: 44757 - DNA, 2349 bp, Artificial Sequence
  derived and/or modified sequence
atggcccgggcccgggccggcgccctgctggccctgtgggtgctgggcgcagcagcccaccctcagtgtttggactttagacctccatttcgcccaacccagccactgcgcctgtgcgcccagtattctgacttcggctgttgtgatgaaggccgcgatgccgaattaactcgaaggttctgggcactcgccagccgcgtggacgccgccgagtgggccgcgtgtgcaggctacgctcgggacctgttatgtcaggaatgctccccctacgctgcccatctttacgacgcagaggatccattcacacctcttagaacggtccctggactatgtcaggactactgccttgacatgtggcacaaatgtcgcggtctatttcggcacctaagcaccgaccaggagctctgggcactagagggtaaccttgccagattttgtcgatatctttcgctggacgacactgattactgtttcccttatcttctcgtaaataagaatctgaattccaacctggggcatgtcgttgccgatgccaagggctgtttgcaactctgcctggaggaggtggctaatggtctcagaaaccccgtcgccatggtacacgccagggacggcacccatagattttttgtcgctgagcaggtaggactggtctgggcttacctccccgatcgtagcagattgggaaagccattcctgaacatatctagagtggtactcacctcgccctgggaaggggacgagcgcggattcctcggcatcgctttccatccctcttttcagcataaccgaaggctgtatgtttactattctgtcggaattagaagctccgagtggattcgaatcagcgagtttcgggtctcagaagacgacgagaatgccgtagaccacagctcagagcggattatcctagaagtgaaggagcctgctagcaatcataacggggggcagctgctatttggagacgatgggtacctgtatatcttcaccggcgatggggggatggccggggacccgtttggtactttcggcaacgctcagaataagtcagccctcctcggaaaagtgctgcgtatcgacgtagaccgcaaagaacggggtctgccttatgggattccaccagacaaccccttcgttggggacccagccgcccaacctgaggtttacgcactgggcgtccgcaatatgtggagatgtagcttcgatcgcggcgatccgtcaagcggaaccggcaggggacgcctcttttgcggcgatgtcgggcagaataagttcgaggaggtcgacgtggtggagaggggtggcaactacggctggagggcaagggagggctttgagtgttacgaccgaagcctgtgcgcgaatacttcattgaatgacttgctacctatatttgcttacccccatactgtgggaaaaagcgtaactggaggatatgtgtaccgggggtgtgaataccccaacctcaacggcctttacattttcggagatttcatgtcagggagactgatgtctctgcaggaaaatcccggtaccggtcagtggcagtattccgaaatctgtatgggacatggccagacatgtgagttccccggactcattaacaactattacccttatattatcagcttcggcgaagatgaggcgggagagctgtattttatgtcaacgggcgagccatccgccacggccccccgtggtgtggtttacaaaattatagacgcgtcccgcagggcaccccctggtaaatgtcagatccagcccgcccaggtgaagatccggtctcggctcattccctttgtgcccaaggagaagtttatacccaaaaccaggtccaccccgcggcccacagcgagggcccctacccgcgctcccagacgtggccggcccacagccgcgcccccagcgcccacaccaaggcctgctcggccgacccaacaacctggatcgcgtcgcgggggcggaaggcgccggggcaggctcaatagtgcatctagagctttcagggatggcgaagtgcggctcgtgcgacccgctggactgagttctggcagtggacgggtcgaggtctttgtcggaggaaggtggggaacagtgtgcgatgactcctggaatatatccggggccgctgtagtgtgccgccaactgggatttgcttatgccgtgcgggcagtgaagagagcggaatttggacagggcggcagccttcctatactgctggatgacgtgcggtgtgcagggtgggaaaggaatttgttagagtgtcagcacaatggggtggggacacacaactgtgaacatgacgaagatgccggggtggtgtgctctcaccagaaccctgatctgtag

SEQ ID NO: 44758 - RNA, 2349 nt, Artificial Sequence
  derived and/or modified sequence
auggcacgggcccgggcaggcgcacuguuagcauugugggugcugggcgcugccgcucacccccagugucucgacuuccgaccaccauuccgccccacacagccauugcggcugugugcucaguacuccgacuuuggcugcugugaugagggacgcgaugccgaguugacucggagguucugggcccuggcuucccgcguagacgccgccgagugggcagccugugccggcuaugcccgugaccugcucugucaggaguguucuccauaugcugcccaccuuuacgaugcggaggaccccuucaccccacuccgcacagugccaggguuaugucaggauuacugccucgacauguggcauaaaugccgaggacuuuuccgccaccuguccaccgaucaggaauugugggcccuggaggggaacuuggcgagauuuugccgauauuugagucuggacgacacugacuacugcuucccuuauuugcuagugaauaaaaauuugaauuccaaucucgggcacguaguggcugaugccaaagguugccuucaacucugccuugaggagguggcaaacggccuccggaaccccguggcaaugguucaugcaagagacgggacucacagguucuucguggcagagcaagugggccuugugugggccuaccuccccgauagguccagacucggcaagccuuuuuugaacauuaguagaguggugcucacuagccccugggaaggugaugaacggggcuuccugggcauugcuuuucaccccucauuucagcacaaccgacgccuauacguuuacuacucgguagggaucagaucaagcgaauggaucagaauaucagaauuucgagugagcgaggaugaugaaaaugccgucgaucacucuucagaacggauaauacuagaggugaaagagcccgcgucuaaccacaacgggggacagcuguuguuuggcgaugacgguuaccuguacauuuucacuggagaugggggaauggcuggggaucccuucgggacuuucggcaaugcccagaauaagucagcucugcucggcaaggugcucaggaucgauguggacagaaaggagcgagggcucccauauggcauuccacccgauaacccguuugugggcgacccugccgcacaacccgaaguguaugcucugggcgugcgcaauauguggcggugcagcuucgacagaggagauccauccagcggaacaggcaggggaagauuguucuguggggaugugggccaaaacaaauucgaagaggucgacgugguugaacggggggggaauuacggcuggagagccagagaagguuucgaguguuacgauaggucacugugcgccaauaccagucuaaacgaucugcuccccauuuucgcuuauccacauaccgugggaaaaucagucaccggaggguacguuuacagagggugcgaguacccaaaccugaauggacuuuacaucuucggcgauuucaugucuggacgcuuaaugucacuccaagaaaacccuggaacuggccaauggcaguacuccgaaauuugcaugggccacgggcagaccugcgaguuuccuggucugauaaacaauuacuacccuuacauuaucuccuucggugaggaugaggccggcgagcuguauuuuauguccacuggggagccuuccgccacugccccaagaggaguugucuacaaaauaaucgacgcuuccagacgcgcuccgcccgguaaaugccagauccaaccagcucagguuaagauacguucaagacugauuccauucgugccaaaggagaaauuuauccccaaaacgagguccaccccccgacccacggcccgcgcgccuacuagagcaccgcggaggggcaggccuacugcagcccccccugcuccuaccccaaggccagccagaccgacgcagcaaccuggaagcaggcgaggcgggggccgacgcagaggccgauuaaacagugcgucuagggcuuuucgcgacggugaaguucgacuggugagaccagccggccucaguagcggauccggccgagucgaggucuucguggguggucggugggggacggucugugaugauucauggaauauuuccggggccgcagugguuuguaggcaacuggguuucgccuaugcaguccgagcagucaaacgcgccgaguuuggacagggugggagccugccgauccuacuugaugauguccgcugcgcaggaugggaaaggaaucuccuggagugucagcauaacggcguggguacccauaauugugagcacgaugaggaugcaggagugguauguagccaucagaaccccgaccuuuag

SEQ ID NO: 44759 - RNA, 2349 nt, Artificial Sequence
  derived and/or modified sequence
auggcccgcgcgagagcuggcgcuuuacucgcacuauggguuuuaggggcggcagcucacccccagugucuggauuuccguccuccuuuucgacccacccaaccgcucagacucugcgcccaguacagugacuucgguuguugcgaugagggccgcgaugccgagcuaacaagacgguucugggcccuugcgagccgaguggaugcagccgaaugggccgccugcgcaggcuacgcccgugaccugcucugccaggaauguagcccauaugccgcucaccucuaugacgccgaagauccauuuacacccuuacguacaguucccggauuaugucaagauuauugcuuggacauguggcacaaaugccgcgggcucuuuaggcacuuauccacugaccaagaguuaugggcccuggaagggaacuuggcccgguucuguagauaucugagccuggacgacacugauuauuguuuccccuaccuuuuagugaacaagaaucugaauuccaaccuaggacacguaguugcagacgcaaagggauguuugcaguuaugcuuggaagaagucgcuaacggguugcguaacccuguggccauggugcacgcacgcgacggaacccaucgguucuuuguggcagaacaagucgggcuagucugggcauaucuccccgaucgcagcagacucggcaaaccuuuucugaauaucagccggguggugcugaccucacccugggagggcgacgagcgcggguuuuugggaauugccuuccauccguccuuucaacauaaccgcagacuuuacguguacuacagcgucggaauuagauccucagaguggauccggaucagugaauuuagagugagcgaagacgaugagaaugccgucgaccauucuagcgaaaggaucauauuggaagugaaagaaccugcuagcaaccacaauggcggucaacuguuguuuggagaugauggguaucuguauaucuuuaccggggacggugguauggccggcgaucccuuugguacguucgguaacgcucagaauaaauccgcucuguuaggaaaagugcucaggauugacguggauagaaaagagcgcgggcucccuuauggcaucccaccugacaacccuuucgucggagaccccgcggcccaaccagaggucuaugcauuaggagugagaaauauguggagguguaguuuugaucgcggugacccuucuagcggaacgggaaggggacgucuguucugcggagacgugggccaaaauaaauuugaggaaguugacgugguugagcgaggcgggaauuaugguuggcgagcacgugaaggauuugagugcuaugaccgcucacugugugccaauacaucccugaacgaccuguuaccuaucuucgccuauccgcauacggugggaaaauccgucacuggaggcuauguauauagaggaugugaauacccaaauuugaacgggcuuuauauuuuuggagauuucaugucuggccgucuaaugagucugcaggaaaaccccgguacugggcaauggcaauauucagaaaucuguaugggacacgggcaaaccugcgaauuucccggccuaauaaacaacuauuauccauauauuauaucauuuggagaagaugaagccggagaauuguacuuuaugagcacgggggaacccagcgcaacugcaccaagaggcguggucuauaagauaaucgaugcaucuagacgggccccacccgguaagugccaaauccaacccgcccaaguuaaaaucaggucuagacucauuccauucgucccuaaagaaaaauucauacccaagaccaggaguaccccucgccccacugcucgagcaccgacccgcgcaccuaggagagggagacccacugcagccccgcccgccccuaccccacgcccugccaggccaacacagcagccuggcucacgucgcggagguggccgucgucgaggucggcugaacucugcaucaagggccuuucgcgauggagaggugcgccucguccgcccagccggccuuucaucuggaucagguagagucgaaguguuuguuggcggucgguggggaacaguuugugaugauucauggaauauuuccggggccgcagugguuuguaggcaacuggguuucgccuaugcaguccgagcagucaaacgcgccgaguuuggacagggugggagccugccgauccuacuugaugauguccgcugcgcaggaugggaaaggaaucuccuggagugucagcauaacggcguggguacccauaauugugagcacgaugaggaugcaggagugguauguagccaucagaaccccgaccuuuag

SEQ ID NO: 44760 - protein, 191 aa, Artificial Sequence
  derived and/or modified sequence
MGKKTKRTADSSSSEDEEEYVVEKVLDRRVVKGQVEYLLKWKGFSEEHNTWEPEKNLDCPELISEFMKKYKKMKEGENNKPREKSESNKRKSNFSNSADDIKSKKKREQSNDIARGFERGLEPEKIIGATDSCGDLMFLMKWKDTDEADLVLAKEANVKCPQIVIAFYEERLTWHAYPEDAENKEKETAKS

SEQ ID NO: 44761 - protein, 91 aa, Artificial Sequence
  derived and/or modified sequence
MGKKTKRTADSSSSEDEEEYVVEKVLDRRVVKGQVEYLLKWKGFSEEHNTWEPEKNLDCPELISEFMKKYKKMKEGENNKPREKSESNKRK

SEQ ID NO: 44762 - DNA, 11571 bp, Artificial Sequence
  derived and/or modified sequence
gaaggatccgttttggcgggcggttggcgttgcgcagaaggcggcggcggtggtggcttgtggtgcggcctcaccatacaggaacagggcagacgttagcgtgagtgatcactctcaatcccggggacctggtggccttagtctttcaggtggaacggtgtgcgacatgggaaagaaaaccaagcggacagctgacagttcttcttcagaggatgaggaggagtatgttgtggagaaggtgctagacaggcgcgtggttaagggacaagtggaatatctactgaagtggaaaggcttttctgaggagcacaatacttgggaacctgagaaaaacttggattgccctgagctaatttctgaatttatgaaaaagtataagaagatgaaggagggtgaaaataataaacccagggagaagtcagaaagtaacaagaggaaatccaatttctcaaacagtgccgatgacatcaaatctaaaaaaaagagagagcagagcaatgatatcgctcggggctttgagagaggactggaaccagaaaagatcattggggcaacagattcctgtggtgatttaatgttcctaatgaaatggaaagacacagatgaagctgacctggttcttgcaaaagaagctaatgtgaaatgtccacaaattgtgatagcattttatgaagagagactgacatggcatgcatatcctgaggatgcggaaaacaaagagaaagaaacagcaaagagctaaaggaggggatggtctctgtcatttctctttgtacataatacattcacctccctgcctcctctcctttctacccacccctttctatcctaaacacatccataaaaaatgtgcttatcactgtgctccacaggagaaatgttggtattggttctcttgtaacataactgatggtctgattaatgataagtgtctctctgtgaagaccaggcatttacatactgagtgtaatacccacaatttttttttcctttgccctgatctcttccttctgcttccctgtgacctcaagatgagtttcaactttttaatcaccttagagtcttgatcttttcagggttggtcgctttttaggttgggggattttgttacaatgatgttgaattttggtttcttgctttggttcttagaacatgttgctgactagctggcctttgttctgacatgttgagatggaaaggatgttgcccatctgttaaaaagccaatagcaactgcctacctgttggggctttcccaaccttgttcagctctacccaggagaatacagggtttctggtgtggtcttctgggccaccctctgttgttcatcctcactcatcctcccagaattactccatcctttggaagatttgaaattttacactgaaatctgtcaagacactctttttagccccaggactttcggtattgcttttagcactccccacttctgcttctgtaaagtgatatcaatttgtgataaaatgacaagattattaactgtgcagatttgtagctatagtacatgaggatgatggggtagggtacaattgtctttattatcatatatggtatgtatgtatgatttctttccattcctcatatttagactgtatatttatgtaggtgtgagtgattgcctggtgcttgcttgtgccaaggtgctaggcaccctccaaccctgccaacttttgtggcctcccaaagcattcctgttaccaaagaggcttcaaacctgaccctcacttctcagtggacccgagtttcccttccatgccattattttcagtggggaagttttagaggtgagctgttggccacaatatcaattttaagtgttcatagcagttatgtctcctgcattcttggctcctggatttaccaccaagagtccccaaaatattaatgctcttccctttttctaccctcaaacttatagttgtatcttattttttaaaatgaattttcatggccaggcacagtggctaccgcctgtaatcccagcactttgggaggctgaggcaggagaattgcttgaagccagaagtttgagaccagcctgggcaatgtagtgagaccccctgtctctaaaaaatataaataaaaataaaggcatgttcctgaaagactgtcaccttggaaagtgacaggccctggcattagcatgttgacacacccttttcttcttactcagcaaaatacttcgttttggtttcttcttgtgttgctattgagaaatttgtctgatcatatccttctgcctttgtcccccaagaaatgccctactttatccttttctttttgtagttgaggagggctagagaatcacaattaaaagtaaggaaatagcagggttttgaggatccttgtcccagccccaaagctgaggaaataagaataaatgcttaatatagccttaattctagagcgcaccagccatgaggctgcttttcttgttgtttttgatttttaaaacatacagctgtctggccaggagcatctaccatttctagattattcagagtaatgaggggaatggatggattgctccagtccacagatgagccacataatatgcaaatcatatacccattcatagcatttgttaacattgcttccctgctcagctgctgattgaattctgtgtgcttatataaattatgtcaaaaattatactgcataattgaggtgacagctgttgctgcagtgacatgacagactggaacaatgaagcttttggtttaagtcagccaggaaaatccttctgaatggtaatgtgattgggcaagagctcataaaccatacctcaagtgggtgggagttttatctctatattccttctctctctgaaggaattaaaggcctagatcaagtgctggataattgacaattgcttgtacttaatctgatcggtatctaaaagaaggaaaggatggtcaggaaacatttatcataaatgtagccaaggatatcaattagggtagacaagaataggacaaaaataggccagagctcctgaggaggtgatatgggtctcttgatttgcagaaaatgacagcctatccaagtggcccagtgtatgcctcccagtagcagtgggcatgtaaactgcagcgaccttatttttaaaaccaaaaacctagtatgtggacaaagaacatgacaatatttggtactgagattggttctgagaaacctggggcatgtggctgctgtggttataggtaatatttaagacattcataaaaatctgatattcttttaccgaaataaccccagtatcatctactacttaccatctgttaatagactttactctgtcttttttgtcttcggtttattgtactgagtgccgccaaaacaacttttgttctcttcctgcctacctgcagctggttctataggaatgtagggagccagaggccagtattgatttcagcccttagcacaaaggaaatcagatgcctgcttccagcatttgttagtgttgagtagatgttcttgccctagaagaattacagcctcaaacagaaacctgtttcatggagctttctcccctcagaagagttaatagttaagagctaagcactcttaaacacctaagtctcaaatgctaaaaatttatttttcttgtgtttagtcctctttcaagacatctttctaagcctttcagtaatcaacattaaaagatctccctttcttcagagttatagcacagctttgcccagtagaggctaccaaggacagcttagcagccctttgattgctgggctgggcagatggccttcaagttaagatcaaatgccgggaaaatcagcctacatgggagcacccattttaaacctggagagaaccatgatgttttcttcttcaaataacaatctagttttttttcccccagtactaaaattgtattgtctttcagacaatataatttttatttaaaattggaacatactatcttcatgctttctaagctaaatcttcatttagatttcactcctcagtagatcccagagaagaagctatataggatccagattcaaatttaacagtgtcttctacttttttagttatgttttctatcaactcctgctgccttttcaaatacggatatttttcaggagactcttctacttgtccactgactgtattttttcctttttgatccgtagccctggttaaatggctgacatccttccgtggatgattcttggaggtagtctcagaattccaaagtgattgtctgtcttcttcttgtcttgatcctaatgcagacattcacctctattatttatttattttttttagacagagtctcgctctgtcaccaggctggagtgcagtggcacaatcttggcttactgtaccctccacctcctgggttcaagcgattctcctgcctcagcctctcgagtagctgggactacaggtgtgtgccaccatgcccagctaatttttgtatttttggtagagatggggttttaccatgtttgccaggatggtctcgatttcctgaccttgtgatctgcccaccttggcctcccaaagtgctggaattacaggcatgagccaccgtgcctggccacctctattaaatttttgtggacaaaaataaaattgtcattatttgtttgctctcatggagcactttcagtaatacaattttttttaaattccagttgccctctttgttgctctgtcctctgtaatacctgactttgctaaagacttgaggggtggtttcagaggagggtcaggtgatgggaaggcaggatgagaaaagccctggacttgcatgtttgagaaggcttccaaccacatcttcactcagactcttggaattcctgtccccaaaacaagcttctgttttttgctcacaatgctatatttctaaatttttcctgaattactgagaagcagtcattagctttgttaagtttggtttggggacattgttggtatcaaaaatcgaagtcttattcatttgatgtaggccatgaatcatcaataactggttgctggaaagcttgactaccatccactggggtgctattttgagaaggatttttgggtatctttatagtctgcaattagttgatgattgctttctagtttatcaactgcatttatatttgcttttctgttcatggaaaatcctttatttgctggggttttttgtttgtttgtttgtttttcccacttacagcaagtaaaagtggtctgaggttatccttgtttttcttcgcggtttgccatgtgtgaaagtagatttcctgctattgatatattctcattatagacagaatagtggagaacagtgttgccatggacaaaatccagttttggtccactctggggagcatttggacctgtggtgcttctaacaattaaaagtctagatggtccttgactgtcccccagccatactgcatactactttgtgcattctactttgtgtcattaatgaaagattggttctgtccctgtaacttaggcatttattattcttaactcttcattcctgttctgtagccacccagcagtccattttccctatgttcaggccaaaccacagggcattggggaaggtttttgggattttcttattgagattttgttgaatctgtagtttaccccagctttcctaaggtacagtgaggggttggagggatctgtgtttggcccggggagcaattgtctctaccttaaggttcagttttgagggcataaaatactactttgcaatgtcatgagaacaccgttagatctgaaatgtggaaatggtttctcacaatttaaaggaaaaacccactttgcacccatgatcccatcattttggttgagattttagaataaaaaatatagtgttgagatccgtacttttgtaatcagaccaccaagcatgcctgtggcaaggcagagaggaaaggtctggagccagtgtattgcagtttcatgctacctttacctgctaatcataaaaattatgttttcaaaagtagatgatactagccttacacccaaaaacatgttctgaattagatgccccctcacccaatttttattaagctttctaaattccagccacattgctgtacatcaacattggtttcattcaacagacatttttttggcctgaagatacaaggttcagaaagaggccatccctgccctcaaataactttcatactggtgtatgatgaactgaccattaatagtttaagtgcttacaagctatgtttctgttcaaaaaaaaaatagtttggtataataaatgctataaaccaatacacatttctgacttgggggcagagacagactggctgatgttgtatagtttgtagccctggagtaagaagttgacattaatttcggcctatatgtggaaaagacctataacattgggtgaactgagccagctggccatagaacacaagaacatattccaggaaataaatatagctggagggttggaaatgctgttattactgagagagaaaacaggtgagttgggattgagaactcctgattttcatccctggtttagattcttggccaaagtagtggtagagttaatctttgcttgtggaaagcattaactatgttgcagattcagttgtgttacattattgtgggttctataacaacatattcctcatggacactttaccagagttgctcacacctttttcaatttctcatcccttttggaggaatgaacatgagacttaactgcctttaagcctaaaacggacatgctttccaatgacaagagattttctaaagagaagtcttggagcacatctgttaatacctgagcatctactctgagcagtgcagttttattcaatactggagagagggtgatttctttttttttgagacggagtcttgctctgtctcccaggctggagtgcagtggcgcaatctcggctcactgcaagctccacctcccgggttcacgccattctcctgcctcagcctcccgaggagctgggactacaggcgccggccaccacgcccggctaattttttgtatttttagtagagacggggtttcaccttgttagccaggatggtctcaatctcctgacctcatgatccacccacctcggcctcccagagtgctgggattacaggcgtgagccaccgccgggccgagagggtgatttctaagcagagaattgtatcagttatgtggaaacctttgccagaaatacatataccttgtatattaaatctgagtctcagatttaatcatcgaagcgtagctgggttaagaaacagtctgatcgtaaggatgttgtcgattctgacccatggatgaccacaagaaaaagatatttatttctgcctggataattgagagttgactaactttggaagtcagaattcccaggaattagagtaactgctctggaaagttaaagtgtgaagttttttagatagtttcataaaaacaattctggtttctttttgcttgtgctgactttcttggattttaatctacctcatcttgtctttttagagttacttcaacttgtcactttaacattgtgcttgactttggttgttttctaagatggaatttttcctgttcattgacagcttgttctcttgccttttcattctgatcctcatttcatctaacatcatctcatattgctcctctgtcaagagaaatgttttaaaatagtttaaagtcttgttttatgggaagaaagtgatcctccaatgctatttgtttctgaggtcagtaagagaaggagttaaaacaaggcagtggggaagggaatgaatcctgcactggaggcaaaagctgacaaggaaagagccattaattaagacaatttcaaagtcaactgattgtgatcattaatgtcacaatagatcaaaacctaattatcacagcctaggtaagagccatcagtattaatcggaaaatctaataggaaactattatcaagaaattaggccaaattgaatgcagtgaactttttatcttggcattctctatttttttgtgatgtcccctggcattggcaggtgtgaccctaacagtcgattcaaggccaagtggtcagtttgtcagccttttttaagggatttctttttatttttaggaattccaaacagagttaacctaaactgtcattgccaaaagatcagtcttaaactttcttagcacctgtacctgtttaatgtgatcagctatcagtgaggaaaaaaaaaaaaatctatttaggtcttggaatggttcctgtacctagagtatccatattgaaccttttttttttttttttttttttttttttgagatggaaacttgctcttttgcccaggctggagtgcagtggcgtgatcttggctcactgcaacctccgcctcccgggttcaagcagttctctgcctcagcctcctgagcagctgggattataggcgcctgccaccatgcccggctaatttttgtatttttagtagagacagggttcaccatcttggccgtgctggtcttgaactcctgaccttgtgatccgcctgcctcggccactcaaagtgctgggattgcaggcgtgagccagcacccggccacagtatctttattacagctcactgcagcctcaatctcctgggctcaaatgatcctcctgcctcagcctcccaagcagctgggactacaggcgcacaccacggtgtctggctaattttattatttaaaaaatgttttgtagagacagtctccctgtgttgcccaggctggtctccaactcgtgagctcaagtgatccacgtgcctcagcctcccaaagtgctgggattacaagcataagccaccgcacccggcccctagtgaacattttactgtatgtgttgataaatcatcttttgagtttctgttgtatgtggggacttcctacactggctgctgtgaagaggtatggaagaaaggagaggctttctgcctagaaattctttgagaacacctgaaaagacagtttaatcatgtcacaacactcttaaggctcaagtcagtgttctggtttccggtagctttaggattggattctaaacgagggctggtggtgagtttggtgtttgtctcgtgtcaccctcacccctcacctcctcagtttaggataagagacataatgatttctaccagaatccaaagtaaatccaaagggggagaaaagacataactgttttttcttctaccttttttttgttaaagagttacatctctcacaggaggaaagaattcaagagtctatatgattagttacagagaatattttcatcccctctccctgaatagaaaagcaggggtcaccatttgtatccttacccttgaggtgtttttgaagatgctgtaactcttgaagttgagctgaggcagaaaggttggaaaaatgcagccctctgggtattgtggggagggatgtgatgtagtaagagggtgttttgtggtgctaggattcccacgccaccaacttgcagctttataagagcgctaccaagaaccaccactggggaaaaggttcttattcattgtttctgttggaatgtgatcttgctttctggattttaggaattcaggttactcagtataaaactctgagaaatcagtgtgacttagtccttcacctcctaagataaagtgaatatttctttacaaaataattcatgtccttaatgttaaagatgtaattttattttcaaaacatctataacatgactttcagaagcagttcatttttccaagattcctcacattatactagataaataataggccctcagttaatacccttcagttattgaattaatctagtttgtggaatgaggtgtatcctgccaacttccctctgctcccaagtacactctgagaggtaaaatgctctgggaaatggaacaagaatcgagtggatgctgactctgtgtgcccacctcctcaactgattgataatggttgaccttgggcaagtcacttctttcaatgcctcagttccccatctgtcaaatggggttaataatactgacctacctcacaggggtgttgttgtgaggcattgtaaatcaaagttaatagaatacttcagggtcctctgtggaggatgtcttgagccagagtttaagcctgacacacaggctttggtcctcactgagctgtctccaagactggaactacttagtgactcggcaaattttctgccccccacccctcatcaaagctgctagttcagatgttgacagtgttttcatgaatgttggaatcttactagtccagacttacttaggatgttgttggggaaggcacttgggattttctgtgtcttgcattcacagagggaggccatttcagattcaagagcattggattagggaatcgtgaggcagggatgctactgcgtatttctctctgcaggttggggattaaagttcctttccccatgggtttgaagcagactcagactgtctcaggatcaaagcaaccctcaatggttttgatttatgtcattgcttaccactccccaaccaatcccaggacagctgggtcactgtacccctttgtggtatctgtacctgggcctctccttcctcatagggaccagctgattgaataaatgtgaccaccttatttccaccccccacccccaaaagctacattggaattatttttcctagaaatgtgtataacactcagaattgggcattgatccttaaagcttcatcccattcaccgtattcaacatctgtcatctcttagtgtctgcagtctgaacctaaccttgaccttttttccctctggtttgagaaaactttggacactatttctacttggccaggtgtgggctcaagagccttactctttccatctcagtttaggggcgcagccagctcctcttcccaatagggctctttctgctttccctctccttggccctagatttgtaatccatgaaaaagcacaaggtcctggctccttgcggtcacattctggttctctgtgttttgtggactctgctctcactgttcacccagcactagcagtaccagatggttctgtggagtcctggggaatggagagagcacagtctgactccctgccaagtagccaggagttgacttgcccatggtccgctggctttcccaccacttcctacaggatgggatctaagagactcaagagctgggtttctttcagcactctgtactgtcccaaatagcaaacaaatcactttgtagccagatttctgaatggaaatgagaaattgaattctccatggacttttaggtttatgggggagttttagctgtgtttcttggttttatttcagccaaacatgtctgcttttgattttttttttaaagtataagtggtctatatatatgttcaccttttaaatgtaaatgtttaaaaagtaagcatttatgtgtttccataactgacatctgatgcagacctcattctctccccctcttctaccctcctcttttcccccttttcatactcttgtattggttctaataaatggttgcttttcaaaaaaaaaaaaaaaaaaaaaaa

SEQ ID NO: 44763 - DNA, 276 bp, Artificial Sequence
  derived and/or modified sequence
atgggcaagaagaccaagagaaccgccgacagcagcagcagcgaggacgaggaggagtacgtggtggagaaggtgctggacagaagagtggtgaagggccaggtggagtacctgctgaagtggaagggcttcagcgaggagcacaacacctgggagcccgagaagaacctggactgccccgagctgatcagcgagttcatgaagaagtacaagaagatgaaggagggcgagaacaacaagcccagagagaagagcgagagcaacaagagaaagtag

SEQ ID NO: 44764 - DNA, 576 bp, Artificial Sequence
  derived and/or modified sequence
atgggaaagaaaacgaagaggactgccgatagcagctcgtcagaagatgaagaggaatatgttgtcgagaaggtgctcgacaggcgggtcgtgaaaggccaggtggagtatcttctgaagtggaagggcttctcggaagaacacaacacgtgggagccagagaagaatctagattgccctgagctcatatccgaattcatgaaaaaatataaaaagatgaaggagggagaaaacaataaacctcgtgagaaatccgaaagcaataaaaggaagagcaacttctccaactccgcagacgacatcaagtcgaagaagaaacgtgagcaatcgaatgacatcgcaaggggcttcgagcggggcctcgaacccgagaaaatcatcggggctacggacagctgtggcgacttaatgtttctaatgaaatggaaggacacagacgaggcggacctggtcctggcaaaggaagcgaatgtcaagtgccctcagatcgtaattgctttttatgaagagcggctgacatggcacgcttatcctgaggacgcggaaaacaaggaaaaagagaccgccaaatcctag

SEQ ID NO: 44765 - DNA, 576 bp, Artificial Sequence
  derived and/or modified sequence
atgggcaagaagaccaagagaacggctgactcctctagctccgaggatgaagaggaatatgtcgtcgaaaaagtattagatagacgcgttgtgaagggccaggtagaatacctattaaaatggaaggggttcagtgaggagcacaatacctgggagccggagaaaaatctcgattgtcctgagttaatctcggaattcatgaagaaatataaaaagatgaaggaaggtgagaacaataagccccgggagaaatccgaaagcaataagagaaaaagcaatttttcaaactcagctgatgacatcaagagtaagaaaaaacgggaacaatcaaatgacatcgctaggggtttcgagcgagggctggagcccgaaaaaatcataggggccactgacagctgtggggacctgatgtttttgatgaaatggaaagacacggatgaagccgacttggtcttggccaaagaggccaacgttaagtgcccgcaaattgtaattgctttttatgaagagagactgacctggcatgcctatccggaggatgccgaaaacaaagagaaagaaaccgcaaaatcatag

SEQ ID NO: 44766 - DNA, 11528 bp, Artificial Sequence
  derived and/or modified sequence
ttgcgcagaaggcggcggcggtggtggcttgtggtgcggcctcaccatacaggaacagggcagacgttagcgtgagtgatcactctcaatcccggggacctggtggccttagtctttcaggtggaacggtgtgcgacatgggaaagaaaaccaagcggacagctgacagttcttcttcagaggatgaggaggagtatgttgtggagaaggtgctagacaggcgcgtggttaagggacaagtggaatatctactgaagtggaaaggcttttctgaggagcacaatacttgggaacctgagaaaaacttggattgccctgagctaatttctgaatttatgaaaaagtataagaagatgaaggagggtgaaaataataaacccagggagaagtcagaaagtaacaagaggaaatccaatttctcaaacagtgccgatgacatcaaatctaaaaaaaagagagagcagagcaatgatatcgctcggggctttgagagaggactggaaccagaaaagatcattggggcaacagattcctgtggtgatttaatgttcctaatgaaatggaaagacacagatgaagctgacctggttcttgcaaaagaagctaatgtgaaatgtccacaaattgtgatagcattttatgaagagagactgacatggcatgcatatcctgaggatgcggaaaacaaagagaaagaaacagcaaagagctaaaggaggggatggtctctgtcatttctctttgtacataatacattcacctccctgcctcctctcctttctacccacccctttctatcctaaacacatccataaaaaatgtgcttatcactgtgctccacaggagaaatgttggtattggttctcttgtaacataactgatggtctgattaatgataagtgtctctctgtgaagaccaggcatttacatactgagtgtaatacccacaatttttttttcctttgccctgatctcttccttctgcttccctgtgacctcaagatgagtttcaactttttaatcaccttagagtcttgatcttttcagggttggtcgctttttaggttgggggattttgttacaatgatgttgaattttggtttcttgctttggttcttagaacatgttgctgactagctggcctttgttctgacatgttgagatggaaaggatgttgcccatctgttaaaaagccaatagcaactgcctacctgttggggctttcccaaccttgttcagctctacccaggagaatacagggtttctggtgtggtcttctgggccaccctctgttgttcatcctcactcatcctcccagaattactccatcctttggaagatttgaaattttacactgaaatctgtcaagacactctttttagccccaggactttcggtattgcttttagcactccccacttctgcttctgtaaagtgatatcaatttgtgataaaatgacaagattattaactgtgcagatttgtagctatagtacatgaggatgatggggtagggtacaattgtctttattatcatatatggtatgtatgtatgatttctttccattcctcatatttagactgtatatttatgtaggtgtgagtgattgcctggtgcttgcttgtgccaaggtgctaggcaccctccaaccctgccaacttttgtggcctcccaaagcattcctgttaccaaagaggcttcaaacctgaccctcacttctcagtggacccgagtttcccttccatgccattattttcagtggggaagttttagaggtgagctgttggccacaatatcaattttaagtgttcatagcagttatgtctcctgcattcttggctcctggatttaccaccaagagtccccaaaatattaatgctcttccctttttctaccctcaaacttatagttgtatcttattttttaaaatgaattttcatggccaggcacagtggctaccgcctgtaatcccagcactttgggaggctgaggcaggagaattgcttgaagccagaagtttgagaccagcctgggcaatgtagtgagaccccctgtctctaaaaaatataaataaaaataaaggcatgttcctgaaagactgtcaccttggaaagtgacaggccctggcattagcatgttgacacacccttttcttcttactcagcaaaatacttcgttttggtttcttcttgtgttgctattgagaaatttgtctgatcatatccttctgcctttgtcccccaagaaatgccctactttatccttttctttttgtagttgaggagggctagagaatcacaattaaaagtaaggaaatagcagggttttgaggatccttgtcccagccccaaagctgaggaaataagaataaatgcttaatatagccttaattctagagcgcaccagccatgaggctgcttttcttgttgtttttgatttttaaaacatacagctgtctggccaggagcatctaccatttctagattattcagagtaatgaggggaatggatggattgctccagtccacagatgagccacataatatgcaaatcatatacccattcatagcatttgttaacattgcttccctgctcagctgctgattgaattctgtgtgcttatataaattatgtcaaaaattatactgcataattgaggtgacagctgttgctgcagtgacatgacagactggaacaatgaagcttttggtttaagtcagccaggaaaatccttctgaatggtaatgtgattgggcaagagctcataaaccatacctcaagtgggtgggagttttatctctatattccttctctctctgaaggaattaaaggcctagatcaagtgctggataattgacaattgcttgtacttaatctgatcggtatctaaaagaaggaaaggatggtcaggaaacatttatcataaatgtagccaaggatatcaattagggtagacaagaataggacaaaaataggccagagctcctgaggaggtgatatgggtctcttgatttgcagaaaatgacagcctatccaagtggcccagtgtatgcctcccagtagcagtgggcatgtaaactgcagcgaccttatttttaaaaccaaaaacctagtatgtggacaaagaacatgacaatatttggtactgagattggttctgagaaacctggggcatgtggctgctgtggttataggtaatatttaagacattcataaaaatctgatattcttttaccgaaataaccccagtatcatctactacttaccatctgttaatagactttactctgtcttttttgtcttcggtttattgtactgagtgccgccaaaacaacttttgttctcttcctgcctacctgcagctggttctataggaatgtagggagccagaggccagtattgatttcagcccttagcacaaaggaaatcagatgcctgcttccagcatttgttagtgttgagtagatgttcttgccctagaagaattacagcctcaaacagaaacctgtttcatggagctttctcccctcagaagagttaatagttaagagctaagcactcttaaacacctaagtctcaaatgctaaaaatttatttttcttgtgtttagtcctctttcaagacatctttctaagcctttcagtaatcaacattaaaagatctccctttcttcagagttatagcacagctttgcccagtagaggctaccaaggacagcttagcagccctttgattgctgggctgggcagatggccttcaagttaagatcaaatgccgggaaaatcagcctacatgggagcacccattttaaacctggagagaaccatgatgttttcttcttcaaataacaatctagttttttttcccccagtactaaaattgtattgtctttcagacaatataatttttatttaaaattggaacatactatcttcatgctttctaagctaaatcttcatttagatttcactcctcagtagatcccagagaagaagctatataggatccagattcaaatttaacagtgtcttctacttttttagttatgttttctatcaactcctgctgccttttcaaatacggatatttttcaggagactcttctacttgtccactgactgtattttttcctttttgatccgtagccctggttaaatggctgacatccttccgtggatgattcttggaggtagtctcagaattccaaagtgattgtctgtcttcttcttgtcttgatcctaatgcagacattcacctctattatttatttattttttttagacagagtctcgctctgtcaccaggctggagtgcagtggcacaatcttggcttactgtaccctccacctcctgggttcaagcgattctcctgcctcagcctctcgagtagctgggactacaggtgtgtgccaccatgcccagctaatttttgtatttttggtagagatggggttttaccatgtttgccaggatggtctcgatttcctgaccttgtgatctgcccaccttggcctcccaaagtgctggaattacaggcatgagccaccgtgcctggccacctctattaaatttttgtggacaaaaataaaattgtcattatttgtttgctctcatggagcactttcagtaatacaattttttttaaattccagttgccctctttgttgctctgtcctctgtaatacctgactttgctaaagacttgaggggtggtttcagaggagggtcaggtgatgggaaggcaggatgagaaaagccctggacttgcatgtttgagaaggcttccaaccacatcttcactcagactcttggaattcctgtccccaaaacaagcttctgttttttgctcacaatgctatatttctaaatttttcctgaattactgagaagcagtcattagctttgttaagtttggtttggggacattgttggtatcaaaaatcgaagtcttattcatttgatgtaggccatgaatcatcaataactggttgctggaaagcttgactaccatccactggggtgctattttgagaaggatttttgggtatctttatagtctgcaattagttgatgattgctttctagtttatcaactgcatttatatttgcttttctgttcatggaaaatcctttatttgctggggttttttgtttgtttgtttgtttttcccacttacagcaagtaaaagtggtctgaggttatccttgtttttcttcgcggtttgccatgtgtgaaagtagatttcctgctattgatatattctcattatagacagaatagtggagaacagtgttgccatggacaaaatccagttttggtccactctggggagcatttggacctgtggtgcttctaacaattaaaagtctagatggtccttgactgtcccccagccatactgcatactactttgtgcattctactttgtgtcattaatgaaagattggttctgtccctgtaacttaggcatttattattcttaactcttcattcctgttctgtagccacccagcagtccattttccctatgttcaggccaaaccacagggcattggggaaggtttttgggattttcttattgagattttgttgaatctgtagtttaccccagctttcctaaggtacagtgaggggttggagggatctgtgtttggcccggggagcaattgtctctaccttaaggttcagttttgagggcataaaatactactttgcaatgtcatgagaacaccgttagatctgaaatgtggaaatggtttctcacaatttaaaggaaaaacccactttgcacccatgatcccatcattttggttgagattttagaataaaaaatatagtgttgagatccgtacttttgtaatcagaccaccaagcatgcctgtggcaaggcagagaggaaaggtctggagccagtgtattgcagtttcatgctacctttacctgctaatcataaaaattatgttttcaaaagtagatgatactagccttacacccaaaaacatgttctgaattagatgccccctcacccaatttttattaagctttctaaattccagccacattgctgtacatcaacattggtttcattcaacagacatttttttggcctgaagatacaaggttcagaaagaggccatccctgccctcaaataactttcatactggtgtatgatgaactgaccattaatagtttaagtgcttacaagctatgtttctgttcaaaaaaaaaatagtttggtataataaatgctataaaccaatacacatttctgacttgggggcagagacagactggctgatgttgtatagtttgtagccctggagtaagaagttgacattaatttcggcctatatgtggaaaagacctataacattgggtgaactgagccagctggccatagaacacaagaacatattccaggaaataaatatagctggagggttggaaatgctgttattactgagagagaaaacaggtgagttgggattgagaactcctgattttcatccctggtttagattcttggccaaagtagtggtagagttaatctttgcttgtggaaagcattaactatgttgcagattcagttgtgttacattattgtgggttctataacaacatattcctcatggacactttaccagagttgctcacacctttttcaatttctcatcccttttggaggaatgaacatgagacttaactgcctttaagcctaaaacggacatgctttccaatgacaagagattttctaaagagaagtcttggagcacatctgttaatacctgagcatctactctgagcagtgcagttttattcaatactggagagagggtgatttctttttttttgagacggagtcttgctctgtctcccaggctggagtgcagtggcgcaatctcggctcactgcaagctccacctcccgggttcacgccattctcctgcctcagcctcccgaggagctgggactacaggcgccggccaccacgcccggctaattttttgtatttttagtagagacggggtttcaccttgttagccaggatggtctcaatctcctgacctcatgatccacccacctcggcctcccagagtgctgggattacaggcgtgagccaccgccgggccgagagggtgatttctaagcagagaattgtatcagttatgtggaaacctttgccagaaatacatataccttgtatattaaatctgagtctcagatttaatcatcgaagcgtagctgggttaagaaacagtctgatcgtaaggatgttgtcgattctgacccatggatgaccacaagaaaaagatatttatttctgcctggataattgagagttgactaactttggaagtcagaattcccaggaattagagtaactgctctggaaagttaaagtgtgaagttttttagatagtttcataaaaacaattctggtttctttttgcttgtgctgactttcttggattttaatctacctcatcttgtctttttagagttacttcaacttgtcactttaacattgtgcttgactttggttgttttctaagatggaatttttcctgttcattgacagcttgttctcttgccttttcattctgatcctcatttcatctaacatcatctcatattgctcctctgtcaagagaaatgttttaaaatagtttaaagtcttgttttatgggaagaaagtgatcctccaatgctatttgtttctgaggtcagtaagagaaggagttaaaacaaggcagtggggaagggaatgaatcctgcactggaggcaaaagctgacaaggaaagagccattaattaagacaatttcaaagtcaactgattgtgatcattaatgtcacaatagatcaaaacctaattatcacagcctaggtaagagccatcagtattaatcggaaaatctaataggaaactattatcaagaaattaggccaaattgaatgcagtgaactttttatcttggcattctctatttttttgtgatgtcccctggcattggcaggtgtgaccctaacagtcgattcaaggccaagtggtcagtttgtcagccttttttaagggatttctttttatttttaggaattccaaacagagttaacctaaactgtcattgccaaaagatcagtcttaaactttcttagcacctgtacctgtttaatgtgatcagctatcagtgaggaaaaaaaaaaaaatctatttaggtcttggaatggttcctgtacctagagtatccatattgaaccttttttttttttttttttttttttttttgagatggaaacttgctcttttgcccaggctggagtgcagtggcgtgatcttggctcactgcaacctccgcctcccgggttcaagcagttctctgcctcagcctcctgagcagctgggattataggcgcctgccaccatgcccggctaatttttgtatttttagtagagacagggttcaccatcttggccgtgctggtcttgaactcctgaccttgtgatccgcctgcctcggccactcaaagtgctgggattgcaggcgtgagccagcacccggccacagtatctttattacagctcactgcagcctcaatctcctgggctcaaatgatcctcctgcctcagcctcccaagcagctgggactacaggcgcacaccacggtgtctggctaattttattatttaaaaaatgttttgtagagacagtctccctgtgttgcccaggctggtctccaactcgtgagctcaagtgatccacgtgcctcagcctcccaaagtgctgggattacaagcataagccaccgcacccggcccctagtgaacattttactgtatgtgttgataaatcatcttttgagtttctgttgtatgtggggacttcctacactggctgctgtgaagaggtatggaagaaaggagaggctttctgcctagaaattctttgagaacacctgaaaagacagtttaatcatgtcacaacactcttaaggctcaagtcagtgttctggtttccggtagctttaggattggattctaaacgagggctggtggtgagtttggtgtttgtctcgtgtcaccctcacccctcacctcctcagtttaggataagagacataatgatttctaccagaatccaaagtaaatccaaagggggagaaaagacataactgttttttcttctaccttttttttgttaaagagttacatctctcacaggaggaaagaattcaagagtctatatgattagttacagagaatattttcatcccctctccctgaatagaaaagcaggggtcaccatttgtatccttacccttgaggtgtttttgaagatgctgtaactcttgaagttgagctgaggcagaaaggttggaaaaatgcagccctctgggtattgtggggagggatgtgatgtagtaagagggtgttttgtggtgctaggattcccacgccaccaacttgcagctttataagagcgctaccaagaaccaccactggggaaaaggttcttattcattgtttctgttggaatgtgatcttgctttctggattttaggaattcaggttactcagtataaaactctgagaaatcagtgtgacttagtccttcacctcctaagataaagtgaatatttctttacaaaataattcatgtccttaatgttaaagatgtaattttattttcaaaacatctataacatgactttcagaagcagttcatttttccaagattcctcacattatactagataaataataggccctcagttaatacccttcagttattgaattaatctagtttgtggaatgaggtgtatcctgccaacttccctctgctcccaagtacactctgagaggtaaaatgctctgggaaatggaacaagaatcgagtggatgctgactctgtgtgcccacctcctcaactgattgataatggttgaccttgggcaagtcacttctttcaatgcctcagttccccatctgtcaaatggggttaataatactgacctacctcacaggggtgttgttgtgaggcattgtaaatcaaagttaatagaatacttcagggtcctctgtggaggatgtcttgagccagagtttaagcctgacacacaggctttggtcctcactgagctgtctccaagactggaactacttagtgactcggcaaattttctgccccccacccctcatcaaagctgctagttcagatgttgacagtgttttcatgaatgttggaatcttactagtccagacttacttaggatgttgttggggaaggcacttgggattttctgtgtcttgcattcacagagggaggccatttcagattcaagagcattggattagggaatcgtgaggcagggatgctactgcgtatttctctctgcaggttggggattaaagttcctttccccatgggtttgaagcagactcagactgtctcaggatcaaagcaaccctcaatggttttgatttatgtcattgcttaccactccccaaccaatcccaggacagctgggtcactgtacccctttgtggtatctgtacctgggcctctccttcctcatagggaccagctgattgaataaatgtgaccaccttatttccaccccccacccccaaaagctacattggaattatttttcctagaaatgtgtataacactcagaattgggcattgatccttaaagcttcatcccattcaccgtattcaacatctgtcatctcttagtgtctgcagtctgaacctaaccttgaccttttttccctctggtttgagaaaactttggacactatttctacttggccaggtgtgggctcaagagccttactctttccatctcagtttaggggcgcagccagctcctcttcccaatagggctctttctgctttccctctccttggccctagatttgtaatccatgaaaaagcacaaggtcctggctccttgcggtcacattctggttctctgtgttttgtggactctgctctcactgttcacccagcactagcagtaccagatggttctgtggagtcctggggaatggagagagcacagtctgactccctgccaagtagccaggagttgacttgcccatggtccgctggctttcccaccacttcctacaggatgggatctaagagactcaagagctgggtttctttcagcactctgtactgtcccaaatagcaaacaaatcactttgtagccagatttctgaatggaaatgagaaattgaattctccatggacttttaggtttatgggggagttttagctgtgtttcttggttttatttcagccaaacatgtctgcttttgattttttttttaaagtataagtggtctatatatatgttcaccttttaaatgtaaatgtttaaaaagtaagcatttatgtgtttccataactgacatctgatgcagacctcattctctccccctcttctaccctcctcttttcccccttttcatactcttgtattggttctaataaatggttgcttttcaaatatgga

SEQ ID NO: 44767 - DNA, 576 bp, Artificial Sequence
  derived and/or modified sequence
atgggtaaaaagacaaaacggacagctgatagctcgagctctgaagacgaagaggaatacgtggtcgaaaaggtcctggaccggagagttgtgaaggggcaggtggaatatcttctgaagtggaaaggtttctcagaagagcataatacatgggagccagagaagaacctggattgccccgagctcatcagcgaattcatgaagaagtataaaaaaatgaaggagggcgagaataacaaacctagggaaaagagcgagtcaaacaagcgtaagtctaacttttctaacagtgcggatgacatcaagagtaagaagaagcgggaacagagcaatgatatcgcaagaggtttcgagcgcggtttggaaccagagaagattatcggcgccacagattcctgtggtgatctcatgttcctgatgaaatggaaggataccgacgaggcggacttagtgcttgcaaaagaggccaacgtgaaatgcccccagatcgtgatcgccttctatgaagagcgtctcacctggcatgcttacccggaggatgctgaaaacaaggaaaaagaaacagccaaatcctag

SEQ ID NO: 44768 - DNA, 276 bp, Artificial Sequence
  derived and/or modified sequence
atgggcaagaagacgaagaggaccgctgatagctcctctagcgaggacgaggaggaatacgttgtcgaaaaagtgctcgaccgccgggtggttaagggacaggtcgagtatctgttaaagtggaaggggtttagcgaggaacataacacctgggagccggaaaagaacctcgactgtcctgagctcatttccgagtttatgaaaaaatacaaaaagatgaaggaaggcgaaaataataagcctcgcgaaaagagtgagtctaacaaaaggaaatag

SEQ ID NO: 44769 - DNA, 576 bp, Artificial Sequence
  derived and/or modified sequence
atgggcaagaagaccaagaggacagctgacagcagcagcagtgaagatgaggaggagtatgtggtggagaaggtgctggaccggcgggtggtgaagggccaggtggagtacctgctgaagtggaagggcttcagcgaggagcacaacacctgggagcctgagaagaacctggactgcccagagctgatcagcgagttcatgaagaagtacaagaagatgaaggagggggagaacaacaagccccgggagaagtctgagagcaacaagaggaagagcaacttcagcaacagcgcagatgacatcaagagcaagaagaagcgggagcagagcaatgacatcgcccggggctttgagcggggcctggagcctgagaagatcattggagccacagacagctgtggggacctgatgttcctgatgaagtggaaggacacagatgaggccgacctggtgctggccaaggaggccaacgtgaagtgcccccagatcgtgattgccttctatgaggagcggctgacctggcacgcctacccagaagatgctgagaacaaggagaaggagacagccaagagctag

SEQ ID NO: 44770 - DNA, 276 bp, Artificial Sequence
  derived and/or modified sequence
atgggcaagaagaccaagaggacagctgacagcagcagcagtgaagatgaggaggagtatgtggtggagaaggtgctggaccggcgggtggtgaagggccaggtggagtacctgctgaagtggaagggcttcagcgaggagcacaacacctgggagcctgagaagaacctggactgcccagagctgatcagcgagttcatgaagaagtacaagaagatgaaggagggggagaacaacaagccccgggagaagtctgagagcaacaagaggaagtag

SEQ ID NO: 44771 - DNA, 576 bp, Artificial Sequence
  derived and/or modified sequence
atgggcaagaagaccaagcggaccgccgacagcagcagcagcgaggatgaagaggaatacgtcgttgaaaaagtgttggatcgtagggttgtaaaaggccaggtggaatacctgctgaagtggaaaggcttctccgaagaacacaacacttgggagcctgagaagaatttagattgtccagagctgataagcgaatttatgaagaaatacaagaagatgaaagagggcgagaacaataagccccgtgaaaaaagtgaatctaacaagaggaagtctaactttagcaactctgccgatgatatcaagtctaagaaaaaaagagagcagagcaacgacatcgctaggggcttcgaaagagggctggaacccgagaaaattatcggcgccaccgacagctgcggcgacctgatgtttttgatgaagtggaaagataccgacgaggctgatctggtgcttgctaaagaagctaacgttaagtgcccacagattgtcatagccttctatgaggaaagactgacctggcacgcttatcccgaggatgccgagaacaaagaaaaggagacagctaagtcatag

SEQ ID NO: 44772 - DNA, 576 bp, Artificial Sequence
  derived and/or modified sequence
atgggcaagaagaccaagcggaccgccgacagcagcagcagcgaggacgaagaggaatatgtcgttgagaaagtgttggaccgacgcgtcgtgaagggccaggtggaatacctcctgaaatggaagggattcagcgaagagcataatacatgggagccggaaaagaacctcgactgtccggagctaatttccgagttcatgaagaagtacaagaaaatgaaggaaggggaaaataataagcctcgcgagaagagtgagtccaataagcgcaaatctaatttcagcaactccgctgatgacattaaatcgaagaagaagagggaacaaagtaatgatatcgcccgcgggttcgagcggggactggagcccgagaagataattggcgccacggacagctgtggtgatctgatgttcttgatgaaatggaaagacaccgacgaagctgatcttgtactggcaaaagaggctaacgtgaagtgcccccagattgtgattgcattctatgaggaacgactgacctggcacgcttatcctgaagacgctgaaaataaggaaaaggaaaccgctaagtcctag

SEQ ID NO: 44773 - DNA, 576 bp, Artificial Sequence
  derived and/or modified sequence
atgggcaagaagaccaagcggaccgccgacagcagcagcagcgaggatgaggaggaatatgttgtcgagaaggtgctcgaccgcagagtggtgaaagggcaagtcgaatatcttctcaagtggaaagggttctcagaggaacataacacatgggaacccgaaaagaacctggattgccctgaattaattagcgagtttatgaagaagtataagaagatgaaagagggggagaataataaaccacgcgagaaatccgagtcaaacaaacgcaagtcaaacttttccaactctgcagacgacattaagagtaagaagaaaagagaacagtccaacgatatcgcccgcggcttcgaaagaggcctggaacccgagaaaattataggagccaccgatagctgcggcgatctgatgttcctcatgaagtggaaagacaccgacgaagcagatctcgtcctggccaaggaagcgaacgtgaagtgcccccagattgtcatcgcgttttatgaagaacgcctaacgtggcatgcgtatcctgaggatgcagagaacaaagaaaaagagactgcaaaatcctag

SEQ ID NO: 44774 - DNA, 276 bp, Artificial Sequence
  derived and/or modified sequence
atgggcaagaagaccaagcggaccgccgacagcagcagcagcgaggatgaggaagagtacgtggttgaaaaagtactggataggagagtggtcaaggggcaagtggagtatctcctcaagtggaaggggttctccgaagagcacaacacctgggaacccgagaagaacttggattgtccagaactgatttccgaatttatgaagaaatataaaaagatgaaggaaggcgagaacaataagccacgggagaagtctgaaagcaataaacggaagtag

SEQ ID NO: 44775 - DNA, 576 bp, Artificial Sequence
  derived and/or modified sequence
atggggaaaaagacaaaacgcaccgccgacagctcttcttcagaagacgaggaggagtatgtggtggagaaggtgctggatagacgggttgtcaaggggcaggtggaatacttgctcaaatggaaggggtttagcgaagagcacaacacatgggaacccgagaagaatcttgattgtccagagttgatcagtgaatttatgaagaaatataagaaaatgaaggagggtgagaacaacaagccacgggaaaagtccgaatcaaacaagagaaaatccaacttttcaaacagcgctgatgacattaaaagtaaaaagaagagggaacagtccaacgatatcgctaggggatttgagaggggcctggagcccgagaagatcattggagcaacggattcttgtggcgaccttatgtttttaatgaaatggaaggacacagatgaagcagatctggtcttggccaaggaagcaaacgtgaaatgtcctcagatagtcatagccttttacgaagaacgcctgacatggcacgcctatcctgaggatgcagaaaataaagagaaagaaacagcgaagtcatag

SEQ ID NO: 44776 - DNA, 576 bp, Artificial Sequence
  derived and/or modified sequence
atggggaagaaaaccaagagaaccgcagattctagctcctctgaagacgaggaggagtatgttgtcgaaaaggtgctggatagaagggttgtaaagggacaggtggagtatctcttgaagtggaaggggtttagcgaggagcacaacacgtgggagccagaaaaaaatctagattgccccgaactgatttcagagtttatgaaaaagtataaaaaaatgaaggagggcgaaaacaacaagcccagagagaagagtgaatcaaataaaagaaaatcaaactttagcaacagtgctgacgatatcaagtccaaaaaaaagcgggagcagagcaatgacatcgcaagaggcttcgagcgcggacttgagcctgagaaaattataggcgctaccgattcatgcggcgatctgatgtttctgatgaagtggaaagatacagacgaagccgatcttgtgctggccaaggaagctaacgtgaaatgcccgcaaatagtgatcgctttttacgaggaacgactgacttggcacgcttatccggaggacgcagaaaacaaagagaaggaaaccgctaagtcatag

SEQ ID NO: 44777 - DNA, 576 bp, Artificial Sequence
  derived and/or modified sequence
atggggaagaaaaccaagaggacagccgattccagcagtagcgaggatgaggaagaatatgtggtcgagaaggtgctggaccgcagggtggtgaaggggcaggtcgaatacctgctcaaatggaagggcttttcagaggagcataacacctgggaacctgagaagaacctggactgtccggaactcatctcagagtttatgaaaaagtacaagaaaatgaaagagggagagaacaataaaccccgtgaaaagtccgaaagcaataaaaggaaaagtaatttctctaacagcgccgatgacatcaaatctaaaaaaaaaagagaacagagcaatgatattgctcgtggctttgagcgtggattggagcccgagaaaattatcggtgccactgattcctgtggtgacctgatgtttctaatgaagtggaaagatacagatgaggcagatctggtcctagccaaagaagcgaacgtgaagtgccctcagatagtgattgccttctacgaggaacggctcacgtggcatgcgtaccctgaagacgccgagaacaaagagaaggagacagcgaagtcttag

SEQ ID NO: 44778 - DNA, 276 bp, Artificial Sequence
  derived and/or modified sequence
atgggcaagaagaccaaaaggaccgctgattccagctcctcagaggacgaggaggagtatgtcgtggagaaggtcctagataggcgcgttgttaaggggcaagtcgagtatcttctgaagtggaagggattctccgaagaacataatacatgggagcctgagaagaacctggactgccccgagctcatctctgagttcatgaagaagtataaaaaaatgaaggagggagaaaataacaagcccagagagaagagtgaaagtaataaacggaaatag

SEQ ID NO: 44779 - DNA, 1832 bp, Artificial Sequence
  derived and/or modified sequence
agctgccagcccgccaagacccagacctgggaggggaggcccctcctgttagcccagagggaaagaaagaactggggcgatccgggacctggtggccttagtctttcaggtggaacggtgtgcgacatgggaaagaaaaccaagcggacagctgacagttcttcttcagaggatgaggaggagtatgttgtggagaaggtgctagacaggcgcgtggttaagggacaagtggaatatctactgaagtggaaaggcttttctgaggagcacaatacttgggaacctgagaaaaacttggattgccctgagctaatttctgaatttatgaaaaagtataagaagatgaaggagggtgaaaataataaacccagggagaagtcagaaagtaacaagaggaaatccaatttctcaaacagtgccgatgacatcaaatctaaaaaaaagagagagcagagcaatgatatcgctcggggctttgagagaggactggaaccagaaaagatcattggggcaacagattcctgtggtgatttaatgttcctaatgaaatggaaagacacagatgaagctgacctggttcttgcaaaagaagctaatgtgaaatgtccacaaattgtgatagcattttatgaagagagactgacatggcatgcatatcctgaggatgcggaaaacaaagagaaagaaacagcaaagagctaaaggaggggatggtctctgtcatttctctttgtacataatacattcacctccctgcctcctctcctttctacccacccctttctatcctaaacacatccataaaaaatgtgcttatcactgtgctccacaggagaaatgttggtattggttctcttgtaacataactgatggtctgattaatgataagtgtctctctgtgaagaccaggcatttacatactgagtgtaatacccacaatttttttttcctttgccctgatctcttccttctgcttccctgtgacctcaagatgagtttcaactttttaatcaccttagagtcttgatcttttcagggttggtcgctttttaggttgggggattttgttacaatgatgttgaattttggtttcttgctttggttcttagaacatgttgctgactagctggcctttgttctgacatgttgagatggaaaggatgttgcccatctgttaaaaagccaatagcaactgcctacctgttggggctttcccaaccttgttcagctctacccaggagaatacagggtttctggtgtggtcttctgggccaccctctgttgttcatcctcactcatcctcccagaattactccatcctttggaagatttgaaattttacactgaaatctgtcaagacactctttttagccccaggactttcggtattgcttttagcactccccacttctgcttctgtaaagtgatatcaatttgtgataaaatgacaagattattaactgtgcagatttgtagctatagtacatgaggatgatggggtagggtacaattgtctttattatcatatatggtatgtatgtatgatttctttccattcctcatatttagactgtatatttatgtaggtgtgagtgattgcctggtgcttgcttgtgccaaggtgctaggcaccctccaaccctgccaacttttgtggcctcccaaagcattcctgttaccaaagaggcttcaaacctgaccctcacttctcagtggacccgagtttcccttccatgccattattttcagtggggaagttttagaggtgagctgttggccacaatatcaattttaagtgttcatagcagttatgtctcctgcattcttggctc

SEQ ID NO: 44780 - DNA, 894 bp, Artificial Sequence
  derived and/or modified sequence
gttagcccagagggaaagaaagaactggggcgatccggtaggtaaaggagggaacccccattcattttctacctttggggctcctcttctgcatgaaggtataaagggagattttccttgtctctccctcaaaatgaagaacacatgtaaatccttgtttttcctggtgaggcaggggaggccatagccacaatgcttaactgcatgcatctaacatggggctggttttaaccccagcgctctgacctaaactgctcagctcccggaaattccaagggacctggtggccttagtctttcaggtggaacggtgtgcgacatgggaaagaaaaccaagcggacagctgacagttcttcttcagaggatgaggaggagtatgttgtggagaaggtgctagacaggcgcgtggttaagggacaagtggaatatctactgaagtggaaaggcttttctgaggagcacaatacttgggaacctgagaaaaacttggattgccctgagctaatttctgaatttatgaaaaagtataagaagatgaaggagggtgaaaataataaacccagggagaagtcagaaagtaacaagaggaaatccaatttctcaaacagtgccgatgacatcaaatctaaaaaaaagagagagcagagcaatgatatcgctcggggctttgagagaggactggaaccagaaaagatcattggggcaacagattcctgtggtgatttaatgttcctaatgaaatggaaagacacagatgaagctgacctggttcttgcaaaagaagctaatgtgaaatgtccacaaattgtgatagcattttatgaagagagactgacatggcatgcatatcctgaggatgcggaaaacaaagagaaagaaacagcaaagagctaa

SEQ ID NO: 44781 - DNA, 675 bp, Artificial Sequence
  derived and/or modified sequence
agttgcatcttgggaattactgaataatctagtgactaattttgaattttaggactgaaaaattttttctcctttctgcctccctcccatccccaaattagctttctaaaaaggaagattagtgtgtttgagatgtcagccttgcttttgtgagctgatggatgctctgaagggacaagctcaatttgtttaagggaaatgtaccaagtcactgaaaatgtggtgaaaggtgcctaagcaagccttttttgtgtgctgctaagagactgggcaagatgctcagagcacagaaaactcatattttagtggcttttcttttttcatttttataaagacgcttattcaccttggagaaaaagggacctggtggccttagtctttcaggtggaacggtgtgcgacatgggaaagaaaaccaagcggacagctgacagttcttcttcagaggatgaggaggagtatgttgtggagaaggtgctagacaggcgcgtggttaagggacaagtggaatatctactgaagtggaaaggcttttctgaggagcacaatacttgggaacctgagaaaaacttggattgccctgagctaatttctgaatttatgaaaaagtataagaagatgaaggagggtgaaaataataaacccagggagaagtcagaaagtaacaagaggaaat

SEQ ID NO: 44782 - DNA, 576 bp, Artificial Sequence
  derived and/or modified sequence
atgggcaagaagaccaagagaaccgccgacagcagcagcagcgaggacgaggaggagtacgtggtggagaaggtgctggacagaagagtggtgaagggccaggtggagtacctgctgaagtggaagggcttcagcgaggagcacaacacctgggagcccgagaagaacctggactgccccgagctgatcagcgagttcatgaagaagtacaagaagatgaaggagggcgagaacaacaagcccagagagaagagcgagagcaacaagagaaagagcaacttcagcaacagcgccgacgacatcaagagcaagaagaagagagagcagagcaacgacatcgccagaggcttcgagagaggcctggagcccgagaagatcatcggcgccaccgacagctgcggcgacctgatgttcctgatgaagtggaaggacaccgacgaggccgacctggtgctggccaaggaggccaacgtgaagtgcccccagatcgtgatcgccttctacgaggagagactgacctggcacgcctaccccgaggacgccgagaacaaggagaaggagaccgccaagagctag

SEQ ID NO: 44783 - protein, 695 aa, Artificial Sequence
  derived and/or modified sequence
MASKVTDAIVWYQKKIGAYDQQIWEKSVEQREIKGLRNKPKKTAHVKPDLIDVDLVRGSAFAKAKPESPWTSLTRKGIVRVVFFPFFFRWWLQVTSKVIFFWLLVLYLLQVAAIVLFCSTSSPHSIPLTEVIGPIWLMLLLGTVHCQIVSTRTPKPPLSTGGKRRRKLRKAAHLEVHREGDGSSTTDNTQEGAVQNHGTSTSHSVGTVFRDLWHAAFFLSGSKKAKNSIDKSTETDNGYVSLDGKKTVKSGEDGIQNHEPQCETIRPEETAWNTGTLRNGPSKDTQRTITNVSDEVSSEEGPETGYSLRRHVDRTSEGVLRNRKSHHYKKHYPNEDAPKSGTSCSSRCSSSRQDSESARPESETEDVLWEDLLHCAECHSSCTSETDVENHQINPCVKKEYRDDPFHQSHLPWLHSSHPGLEKISAIVWEGNDCKKADMSVLEISGMIMNRVNSHIPGIGYQIFGNAVSLILGLTPFVFRLSQATDLEQLTAHSASELYVIAFGSNEDVIVLSMVIISFVVRVSLVWIFFFLLCVAERTYKQRLLFAKLFGHLTSARRARKSEVPHFRLKKVQNIKMWLSLRSYLKRRGPQRSVDVIVSSAFLLTISVVFICCAQINLYLKMEKKPNKKEELTLVNNVLKLATKLLKELDSPFRLYGLTMNPLLYNITQVVILSAVSGVISDLLGFNLKLWKIKS

SEQ ID NO: 44784 - protein, 747 aa, Artificial Sequence
  derived and/or modified sequence
MASKVTDAIVWYQKKIGAYDQQIWEKSVEQREIKGLRNKPKKTAHVKPDLIDVDLVRGSAFAKAKPESPWTSLTRKGIVRVVFFPFFFRWWLQVTSKVIFFWLLVLYLLQVAAIVLFCSTSSPHSIPLTEVIGPIWLMLLLGTVHCQIVSTRTPKPPLSTGGKRRRKLRKAAHLEVHREGDGSSTTDNTQEGAVQNHGTSTSHSVGTVFRDLWHAAFFLSGSKKAKNSIDKSTETDNGYVSLDGKKTVKSGEDGIQNHEPQCETIRPEETAWNTGTLRNGPSKDTQRTITNVSDEVSSEEGPETGYSLRRHVDRTSEGVLRNRKSHHYKKHYPNEDAPKSGTSCSSRCSSSRQDSESARPESETEDVLWEDLLHCAECHSSCTSETDVENHQINPCVKKEYRDDPFHQSHLPWLHSSHPGLEKISAIVWEGNDCKKADMSVLEISGMIMNRVNSHIPGIGYQIFGNAVSLILGLTPFVFRLSQATDLEQLTAHSASELYVIAFGSNEDVIVLSMVIISFVVRVSLVWIFFFLLCVAERTYKQRLLFAKLFGHLTSARRARKSEVPHFRLKKVQNIKMWLSLRSYLKRRGPQRSVDVIVSSAFLLTISVVFICCAQLLHVHEIFLDCHYNWELVIWCISLTLFLLRFVTLGSETSKKYSNTSILLTEQINLYLKMEKKPNKKEELTLVNNVLKLATKLLKELDSPFRLYGLTMNPLLYNITQVVILSAVSGVISDLLGFNLKLWKIKS

SEQ ID NO: 44785 - DNA, 2088 bp, Artificial Sequence
  derived and/or modified sequence
atggccagcaaggtgaccgacgccatcgtgtggtaccagaagaagatcggcgcctacgaccagcagatctgggagaagagcgtggagcagagagagatcaagggcctgagaaacaagcccaagaagaccgcccacgtgaagcccgacctgatcgacgtggacctggtgagaggcagcgccttcgccaaggccaagcccgagagcccctggaccagcctgaccagaaagggcatcgtgagagtggtgttcttccccttcttcttcagatggtggctgcaggtgaccagcaaggtgatcttcttctggctgctggtgctgtacctgctgcaggtggccgccatcgtgctgttctgcagcaccagcagcccccacagcatccccctgaccgaggtgatcggccccatctggctgatgctgctgctgggcaccgtgcactgccagatcgtgagcaccagaacccccaagccccccctgagcaccggcggcaagagaagaagaaagctgagaaaggccgcccacctggaggtgcacagagagggcgacggcagcagcaccaccgacaacacccaggagggcgccgtgcagaaccacggcaccagcaccagccacagcgtgggcaccgtgttcagagacctgtggcacgccgccttcttcctgagcggcagcaagaaggccaagaacagcatcgacaagagcaccgagaccgacaacggctacgtgagcctggacggcaagaagaccgtgaagagcggcgaggacggcatccagaaccacgagccccagtgcgagaccatcagacccgaggagaccgcctggaacaccggcaccctgagaaacggccccagcaaggacacccagagaaccatcaccaacgtgagcgacgaggtgagcagcgaggagggccccgagaccggctacagcctgagaagacacgtggacagaaccagcgagggcgtgctgagaaacagaaagagccaccactacaagaagcactaccccaacgaggacgcccccaagagcggcaccagctgcagcagcagatgcagcagcagcagacaggacagcgagagcgccagacccgagagcgagaccgaggacgtgctgtgggaggacctgctgcactgcgccgagtgccacagcagctgcaccagcgagaccgacgtggagaaccaccagatcaacccctgcgtgaagaaggagtacagagacgaccccttccaccagagccacctgccctggctgcacagcagccaccccggcctggagaagatcagcgccatcgtgtgggagggcaacgactgcaagaaggccgacatgagcgtgctggagatcagcggcatgatcatgaacagagtgaacagccacatccccggcatcggctaccagatcttcggcaacgccgtgagcctgatcctgggcctgacccccttcgtgttcagactgagccaggccaccgacctggagcagctgaccgcccacagcgccagcgagctgtacgtgatcgccttcggcagcaacgaggacgtgatcgtgctgagcatggtgatcatcagcttcgtggtgagagtgagcctggtgtggatcttcttcttcctgctgtgcgtggccgagagaacctacaagcagagactgctgttcgccaagctgttcggccacctgaccagcgccagaagagccagaaagagcgaggtgccccacttcagactgaagaaggtgcagaacatcaagatgtggctgagcctgagaagctacctgaagagaagaggcccccagagaagcgtggacgtgatcgtgagcagcgccttcctgctgaccatcagcgtggtgttcatctgctgcgcccagatcaacctgtacctgaagatggagaagaagcccaacaagaaggaggagctgaccctggtgaacaacgtgctgaagctggccaccaagctgctgaaggagctggacagccccttcagactgtacggcctgaccatgaaccccctgctgtacaacatcacccaggtggtgatcctgagcgccgtgagcggcgtgatcagcgacctgctgggcttcaacctgaagctgtggaagatcaagagctag

SEQ ID NO: 44786 - DNA, 2244 bp, Artificial Sequence
  derived and/or modified sequence
atggccagcaaggtgaccgacgccatcgtgtggtaccagaagaagatcggcgcctacgaccagcagatctgggagaagagcgtggagcagagagagatcaagggcctgagaaacaagcccaagaagaccgcccacgtgaagcccgacctgatcgacgtggacctggtgagaggcagcgccttcgccaaggccaagcccgagagcccctggaccagcctgaccagaaagggcatcgtgagagtggtgttcttccccttcttcttcagatggtggctgcaggtgaccagcaaggtgatcttcttctggctgctggtgctgtacctgctgcaggtggccgccatcgtgctgttctgcagcaccagcagcccccacagcatccccctgaccgaggtgatcggccccatctggctgatgctgctgctgggcaccgtgcactgccagatcgtgagcaccagaacccccaagccccccctgagcaccggcggcaagagaagaagaaagctgagaaaggccgcccacctggaggtgcacagagagggcgacggcagcagcaccaccgacaacacccaggagggcgccgtgcagaaccacggcaccagcaccagccacagcgtgggcaccgtgttcagagacctgtggcacgccgccttcttcctgagcggcagcaagaaggccaagaacagcatcgacaagagcaccgagaccgacaacggctacgtgagcctggacggcaagaagaccgtgaagagcggcgaggacggcatccagaaccacgagccccagtgcgagaccatcagacccgaggagaccgcctggaacaccggcaccctgagaaacggccccagcaaggacacccagagaaccatcaccaacgtgagcgacgaggtgagcagcgaggagggccccgagaccggctacagcctgagaagacacgtggacagaaccagcgagggcgtgctgagaaacagaaagagccaccactacaagaagcactaccccaacgaggacgcccccaagagcggcaccagctgcagcagcagatgcagcagcagcagacaggacagcgagagcgccagacccgagagcgagaccgaggacgtgctgtgggaggacctgctgcactgcgccgagtgccacagcagctgcaccagcgagaccgacgtggagaaccaccagatcaacccctgcgtgaagaaggagtacagagacgaccccttccaccagagccacctgccctggctgcacagcagccaccccggcctggagaagatcagcgccatcgtgtgggagggcaacgactgcaagaaggccgacatgagcgtgctggagatcagcggcatgatcatgaacagagtgaacagccacatccccggcatcggctaccagatcttcggcaacgccgtgagcctgatcctgggcctgacccccttcgtgttcagactgagccaggccaccgacctggagcagctgaccgcccacagcgccagcgagctgtacgtgatcgccttcggcagcaacgaggacgtgatcgtgctgagcatggtgatcatcagcttcgtggtgagagtgagcctggtgtggatcttcttcttcctgctgtgcgtggccgagagaacctacaagcagagactgctgttcgccaagctgttcggccacctgaccagcgccagaagagccagaaagagcgaggtgccccacttcagactgaagaaggtgcagaacatcaagatgtggctgagcctgagaagctacctgaagagaagaggcccccagagaagcgtggacgtgatcgtgagcagcgccttcctgctgaccatcagcgtggtgttcatctgctgcgcccagctgctgcacgtgcacgagatcttcctggactgccactacaactgggagctggtgatctggtgcatcagcctgaccctgttcctgctgagattcgtgaccctgggcagcgagaccagcaagaagtacagcaacaccagcatcctgctgaccgagcagatcaacctgtacctgaagatggagaagaagcccaacaagaaggaggagctgaccctggtgaacaacgtgctgaagctggccaccaagctgctgaaggagctggacagccccttcagactgtacggcctgaccatgaaccccctgctgtacaacatcacccaggtggtgatcctgagcgccgtgagcggcgtgatcagcgacctgctgggcttcaacctgaagctgtggaagatcaagagctag

SEQ ID NO: 44787 - DNA, 2088 bp, Artificial Sequence
  derived and/or modified sequence
atggcttcaaaagtgacagatgcaattgtctggtaccagaagaaaattggggcgtacgaccagcaaatttgggaaaagagtgttgagcaaagagaaattaagggccttcgaaataagcctaagaaaacggcccacgtcaaaccagacctgatagacgtagatttggtccgcggaagcgcttttgccaaggctaaaccagagtccccgtggacatccctgactcgtaaggggattgtgcgtgtcgtcttctttcccttttttttccggtggtggctgcaggtcacaagcaaagtgatcttcttctggcttctcgttttgtacttgctacaagtggccgcgatcgttcttttttgcagtactagctcgccgcactcaatcccactaaccgaggtcattgggccaatctggttaatgctactgctaggtacagtacactgccaaatcgtgtcaacaaggaccccgaaaccacccctaagtacaggaggcaaacggaggagaaagctgcgcaaggccgcccatcttgaagtgcatcgagaaggtgacgggtcatccacaaccgataatactcaagagggcgccgtccagaatcacggaacaagcacgtcacatagcgtaggaaccgtattcagagatctgtggcacgccgctttctttctgagcggttcaaagaaggctaaaaacagcatagacaaatcaacagagaccgacaacgggtacgtaagcctggatggcaaaaagacagttaagtctggtgaagatgggatacaaaatcatgagccacagtgcgaaacaataagacctgaggagacagcctggaacaccggcaccttgagaaatgggcccagcaaagatacgcagcgtaccattactaacgtgagtgatgaggtgagcagtgaagagggaccagagacggggtacagtctgcgcagacacgtcgacaggacgtccgaaggagtgttaagaaacaggaagtctcaccactataagaagcactaccctaatgaagatgcccctaaatcagggactagttgttctagccggtgctcctcctctagacaggactccgaatcagctaggccagagtcagagaccgaagatgtcctgtgggaggatctgctgcactgcgcagagtgtcactccagctgtactagcgagacagacgttgaaaaccatcagataaacccctgcgtaaagaaggaatatcgagacgacccatttcatcagtctcatctcccatggctccactcatcacatcccggcctggaaaaaatcagcgccattgtgtgggagggcaacgactgcaagaaagcggacatgagtgtccttgagatcagtggaatgattatgaatcgggtgaactcccacattcctggaattggttatcagatcttcggcaatgccgtatcactcatcctcggtttgactccatttgtctttcggttatcccaggctaccgacctggaacagctaactgcccactccgcttccgagctctacgtgatagcttttgggagcaatgaggacgtgattgtcctctctatggtcatcatttcgtttgtggtgcgagtcagcctagtgtggatcttcttttttttgttgtgtgtggctgagagaacttataagcagcgcctactgttcgctaaactctttggtcacctcaccagcgccagacgggctagaaaatccgaggtcccacacttccgcctcaaaaaggttcagaatatcaagatgtggctgtccctacgctcatacctgaagagaagaggaccacaaagatccgtggacgtgattgtgagtagtgccttcttgctgacaatttccgttgtgttcatttgctgtgctcaaatcaacctgtatttaaagatggagaaaaagcctaataagaaggaggaactcaccttagtgaacaacgtgctgaagctcgccaccaaactcctaaaggaactcgacagccccttccggctgtatggactgacaatgaaccccctgctctataacatcacacaggtcgtcatccttagcgctgtctctggcgtgatcagtgacctgctgggatttaatctcaagttatggaagattaaaagctag

SEQ ID NO: 44788 - DNA, 2244 bp, Artificial Sequence
  derived and/or modified sequence
atggcctcaaaggtgactgacgccatcgtgtggtatcagaagaagatcggtgcttatgatcagcagatctgggagaagtcagttgagcaacgagaaattaagggactcaggaacaaacccaagaaaaccgctcacgtaaaacctgatttgattgacgtggatctggtccgcggcagcgcgtttgccaaggcaaagcccgagagtccctggaccagcctgacgcgcaaagggatcgtacgagtggttttcttcccgttctttttccgctggtggctacaggttacatctaaggtaattttcttttggctgcttgtgctgtatctcctgcaggttgccgcaatagtgctcttctgttcaacctcatctccccactccatccccctgacagaagtcattggcccgatttggctgatgcttctcctcggaaccgtccactgtcagatagtcagcactagaacaccaaaacctccattgtctaccggcggtaaaagacgccggaaactcagaaaggcggctcatttggaggtgcaccgggaaggcgacgggagctccaccaccgataacacacaggaaggcgcagtgcagaaccacggaacctcaacaagccatagtgttggtactgtgtttagagatctgtggcacgcagctttttttctatccggatctaaaaaggctaaaaattccatagacaagagcacagagactgacaatggatacgtgagcttggacggcaaaaagacggttaaatccggggaagatggtatccaaaatcatgagcctcaatgcgagaccatcaggccagaggaaacagcttggaatacggggacattgcgcaatggcccttcaaaagatacccaacgcaccataactaacgtttctgacgaggtctcaagtgaagaagggcctgaaacaggttacagcctcaggaggcatgtcgacagaacttctgaaggcgtgttacggaatcgcaaatctcaccattataagaaacactaccccaacgaagatgcccctaagtctggaacgagctgttctagccgctgtagctcttctcgccaagactcagaatctgctaggccggagtccgagaccgaagacgtgctgtgggaagatctcctgcattgtgctgaatgccattcaagttgtactagcgaaacagacgtcgagaaccaccagatcaacccttgcgtcaagaaggagtatcgagacgatcccttccatcagtctcacttaccctggttgcactcttcccatcccggcctagagaagataagcgccatcgtgtgggaagggaatgattgtaaaaaagccgacatgtccgtgctggagataagcggaatgattatgaatagagttaactcacacattcccggaattggttatcagatattcggcaatgcagtatctttaatcctgggcttgacaccattcgtcttccggctgtcccaggctaccgatttagaacaactgactgcccattctgcgagcgaactctatgtgattgcgttcggctctaatgaagatgtaatcgtgttgtctatggtaatcatcagctttgtagtcagggtgtctttagtgtggatctttttcttcctgctctgtgtggcagagcggacctacaaacagcgtttgctgtttgcaaaattgttcggccacctgactagcgctcgcagagcacgtaaaagcgaagtgccccactttcgcctcaaaaaggtgcagaacatcaagatgtggctcagcctgcgcagttaccttaaaagaagagggccccagcgcagcgtcgacgttatcgtgagcagtgcttttctcctaacaatctcagttgtgtttatctgttgcgcccaactgcttcatgtgcacgaaatcttccttgactgccattataattgggaactggtaatttggtgcatttcactgactctgttcctgctacggttcgtaactctaggctctgaaacctctaagaaatacagcaataccagtatcctgctaacggagcagataaatctctacctaaaaatggagaagaagcctaacaagaaggaggagttgaccctagtgaataacgtgcttaagttggctaccaagctgttaaaagaactggacagcccatttagattgtatgggcttactatgaatccactgctgtataatattactcaagtagtgattctgtccgctgtatctggcgtgatttcagatctcctaggtttcaacttgaagctttggaagattaagtcatag

SEQ ID NO: 44789 - DNA, 2088 bp, Artificial Sequence
  derived and/or modified sequence
atggccagcaaggtgacagatgccatcgtgtggtaccagaagaagatcggggcctatgaccagcagatctgggagaagtctgtggagcagcgggagatcaagggcctgaggaacaagcccaagaagacagcccacgtgaagccagacctgattgatgtggacctggtgcggggcagcgcctttgccaaggccaagccagagagcccctggaccagcctgaccaggaagggcatcgtgcgggtggtgttcttccccttcttcttccgctggtggctgcaggtgaccagcaaggtgatcttcttctggctgctggtgctgtacctgctgcaggtggccgccatcgtgctcttctgcagcaccagcagcccccacagcatccccctgacagaggtgattggccccatctggctgatgctgctgctgggcaccgtgcactgccagatcgtgtccaccaggacccccaagccacccctgagcactggaggcaagagaagaaggaagctgaggaaggccgcccacctggaggtgcaccgggagggagatggcagcagcaccacagacaacacccaggagggcgctgtgcagaaccacggcaccagcaccagccacagcgtgggcaccgtcttccgggacctgtggcatgctgccttcttcctgagcggcagcaagaaggccaagaacagcattgacaagagcacagaaacagacaatggctacgtgtccctggatggcaagaagacagtgaagagcggggaggatggcatccagaaccacgagccccagtgtgagaccatccggcctgaggagacagcctggaacacaggcaccctgagaaatggccccagcaaggacacccagaggaccatcaccaacgtgtctgatgaggtgagcagcgaggagggccctgagaccggctacagcctgcggagacatgtggacaggaccagcgagggcgtgctgaggaacaggaagagccaccactacaagaagcactacccaaatgaagatgcccccaagagcggcaccagctgcagcagccgctgcagcagcagccggcaggacagcgagagcgcccggcctgagagcgagacagaagatgtgctgtgggaggacctgctgcactgtgccgagtgccacagcagctgcaccagcgagacagatgtggagaaccaccagatcaacccctgtgtgaagaaggagtacagagatgaccccttccaccagagccacctgccctggctgcacagcagccaccctggcctggagaagatcagcgccatcgtgtgggagggcaatgactgcaagaaggctgacatgtctgtgctggagatcagcggcatgatcatgaacagagtgaacagccacatccctggcatcggctaccagatctttggaaatgctgtgtccctcatcctgggcctgaccccatttgtgttccggctgagccaggccacagacctggagcagctgacagcccacagcgccagcgagctgtatgtgattgccttcggcagcaatgaagatgtgattgtgctgtccatggtgatcatcagctttgtggtgcgggtgtccctggtgtggatcttcttcttcctgctgtgtgtggccgagaggacctacaagcagaggctgctgtttgccaagctgtttggccacctgaccagcgcccggcgggccaggaagtctgaggtgccccacttccggctgaagaaggtgcagaacatcaagatgtggctgagcctgcggagctacctgaagagaagaggcccccagaggtctgtggatgtgattgtgagcagcgccttcctgctgaccatctctgtggtgttcatctgctgtgcccagatcaacctgtacctgaagatggagaagaagcccaacaagaaggaggagctgaccctggtgaacaacgtgctgaagctggccaccaagctgctgaaggagctggacagccccttccggctgtatggcctgaccatgaaccccctgctgtacaacatcacccaggtggtgatcctgtctgctgtgtctggagtcatcagtgacctgctgggcttcaacctgaagctgtggaagatcaagagctag

SEQ ID NO: 44790 - DNA, 2244 bp, Artificial Sequence
  derived and/or modified sequence
atggccagcaaggtgacagatgccatcgtgtggtaccagaagaagatcggggcctatgaccagcagatctgggagaagtctgtggagcagcgggagatcaagggcctgaggaacaagcccaagaagacagcccacgtgaagccagacctgattgatgtggacctggtgcggggcagcgcctttgccaaggccaagccagagagcccctggaccagcctgaccaggaagggcatcgtgcgggtggtgttcttccccttcttcttccgctggtggctgcaggtgaccagcaaggtgatcttcttctggctgctggtgctgtacctgctgcaggtggccgccatcgtgctcttctgcagcaccagcagcccccacagcatccccctgacagaggtgattggccccatctggctgatgctgctgctgggcaccgtgcactgccagatcgtgtccaccaggacccccaagccacccctgagcactggaggcaagagaagaaggaagctgaggaaggccgcccacctggaggtgcaccgggagggagatggcagcagcaccacagacaacacccaggagggcgctgtgcagaaccacggcaccagcaccagccacagcgtgggcaccgtcttccgggacctgtggcatgctgccttcttcctgagcggcagcaagaaggccaagaacagcattgacaagagcacagaaacagacaatggctacgtgtccctggatggcaagaagacagtgaagagcggggaggatggcatccagaaccacgagccccagtgtgagaccatccggcctgaggagacagcctggaacacaggcaccctgagaaatggccccagcaaggacacccagaggaccatcaccaacgtgtctgatgaggtgagcagcgaggagggccctgagaccggctacagcctgcggagacatgtggacaggaccagcgagggcgtgctgaggaacaggaagagccaccactacaagaagcactacccaaatgaagatgcccccaagagcggcaccagctgcagcagccgctgcagcagcagccggcaggacagcgagagcgcccggcctgagagcgagacagaagatgtgctgtgggaggacctgctgcactgtgccgagtgccacagcagctgcaccagcgagacagatgtggagaaccaccagatcaacccctgtgtgaagaaggagtacagagatgaccccttccaccagagccacctgccctggctgcacagcagccaccctggcctggagaagatcagcgccatcgtgtgggagggcaatgactgcaagaaggctgacatgtctgtgctggagatcagcggcatgatcatgaacagagtgaacagccacatccctggcatcggctaccagatctttggaaatgctgtgtccctcatcctgggcctgaccccatttgtgttccggctgagccaggccacagacctggagcagctgacagcccacagcgccagcgagctgtatgtgattgccttcggcagcaatgaagatgtgattgtgctgtccatggtgatcatcagctttgtggtgcgggtgtccctggtgtggatcttcttcttcctgctgtgtgtggccgagaggacctacaagcagaggctgctgtttgccaagctgtttggccacctgaccagcgcccggcgggccaggaagtctgaggtgccccacttccggctgaagaaggtgcagaacatcaagatgtggctgagcctgcggagctacctgaagagaagaggcccccagaggtctgtggatgtgattgtgagcagcgccttcctgctgaccatctctgtggtgttcatctgctgtgcccagctgctgcacgtgcatgagatcttcctggactgccactacaactgggagctggtgatctggtgcatcagcctgaccctcttcctgctgcgctttgtgaccctgggcagcgagaccagcaagaagtacagcaacaccagcatcctgctgacagagcagatcaacctgtacctgaagatggagaagaagcccaacaagaaggaggagctgaccctggtgaacaacgtgctgaagctggccaccaagctgctgaaggagctggacagccccttccggctgtatggcctgaccatgaaccccctgctgtacaacatcacccaggtggtgatcctgtctgctgtgtctggagtcatcagtgacctgctgggcttcaacctgaagctgtggaagatcaagagctag

SEQ ID NO: 44791 - DNA, 2088 bp, Artificial Sequence
  derived and/or modified sequence
atggccagcaaggtgaccgacgccatcgtgtggtaccagaagaagataggggcgtatgaccaacagatctgggagaagagcgtggaacagcgcgagatcaaaggattgcgtaacaagcccaagaagaccgctcacgttaaacctgatttgattgacgtggatctcgtgcgtgggagtgcctttgccaaggctaagcctgagtccccgtggacgtctctcacgagaaagggcattgtgcgcgttgtgttctttcccttcttcttccgctggtggctgcaggtcacttccaaggtgatttttttctggctgctggtgctgtaccttttacaggtggcggctattgtgctcttttgctccaccagttccccacactcaatcccacttaccgaggtgattgggcccatttggctaatgttgctgttgggtaccgtccattgccaaattgtttccaccaggactccaaaacccccattaagcacaggcggaaagagaagacgaaaactgagaaaagcagcacacctagaggtgcatagagagggagacggaagctcaaccacggataatactcaggagggagccgtccaaaaccacgggacaagcacgagccactctgtggggacagtatttagggatctgtggcatgctgccttcttcctcagtggttcgaaaaaagctaaaaactcaatcgataagagtacagagacggacaatggatatgtgtctctagatggaaaaaagacggtcaaaagtggggaagacggcatccagaatcatgagccccaatgtgagaccatccgtcccgaggaaacggcctggaacacaggaacgctacgcaatggtccaagtaaggatacccaacgcaccatcactaatgtttccgacgaggtctcatcagaggagggaccagagacaggatattcactgaggcggcacgttgaccggacaagcgagggcgtcttgcggaacagaaaaagccatcactataagaaacactacccaaatgaggacgctccaaaatccggtacgtcatgtagttctcgatgtagctcctctcgccaggactccgagagcgctagacctgaaagtgagacggaagacgtgttgtgggaagatcttctgcattgcgccgagtgccactcaagttgcacctcggaaacggatgtggaaaaccaccagatcaatccttgtgtcaagaaagagtacagagacgatccctttcatcagtcccacctgccctggctccactccagccaccctgggctggaaaagatttccgctatcgtctgggagggcaacgactgcaaaaaggctgacatgtcagtgctggaaattagtggtatgatcatgaatcgggtcaactcacacatccctggcatcggctaccagatcttcgggaatgctgtgagtttgatcctggggctgactcccttcgttttcaggctgtcgcaggcaactgatctggaacaacttacggctcacagcgcttctgagctgtacgtgatagcttttggtagtaatgaggacgtgatagtattgtccatggtgataattagttttgtcgtccgcgtctctctagtttggatatttttctttctgttgtgcgtagccgagcgtacttacaaacagcgtttacttttcgcaaagctgtttggccaccttacctctgctaggcgggccagaaagagcgaggtccctcattttcgtctgaagaaggtgcagaacataaagatgtggctgagtcttcgaagttacctaaagagacgtggcccacagcggtccgttgatgtgattgtatcaagtgccttcctgctcaccatcagtgtggtctttatttgctgcgctcaaattaatctgtacctgaaaatggagaaaaaacctaataaaaaggaggagcttactctggtgaacaatgttctaaagctggctactaagctcctgaaagaactagactctccttttcgcctctacggcctcactatgaatcccctgctctataacatcacccaggtagttatcttgtctgcagtgtctggggtgatttctgatctactgggatttaacctgaaactgtggaaaatcaaatcttag

SEQ ID NO: 44792 - DNA, 2244 bp, Artificial Sequence
  derived and/or modified sequence
atggccagcaaggtgaccgacgccatcgtgtggtaccagaagaagatcggcgcttatgatcagcagatttgggaaaagtccgtagaacagcgggaaattaaagggttgcggaacaaacccaagaaaactgcgcacgttaagccagatcttattgatgtggacctggtccgcggtagcgcatttgcaaaggccaaacctgagtccccctggacctctttaacaagaaagggaattgtcagggtcgtgtttttccccttttttttcagatggtggcttcaggtaacaagcaaagttattttcttttggttgctagtgctctaccttcttcaggtggccgcgatagtgctattttgctccactagttccccacattctattcccctcaccgaagtaattggtccaatctggcttatgcttctccttgggaccgtccattgccaaatcgtctcgacccgaacccctaaaccccccctgtctactggcgggaagagaaggcgtaaactgcgtaaagccgctcatttagaagtgcatagggagggagatggcagctcaactaccgacaatactcaagaaggtgccgtgcagaatcacggaactagcacctcccacagcgtaggtaccgttttcagggacctatggcacgccgcgttctttctgagcggatccaagaaggccaagaattctatcgataaatctactgagacagacaacggctacgtgagcttagatggcaaaaagacagtcaaatccggagaggacggcattcagaatcacgaacctcagtgcgagacaatccggccggaggagaccgcttggaatacaggtaccttgcggaacggcccctctaaagatactcaacgaacaatcacaaacgtgagcgatgaagtgagttctgaggaagggcctgagacaggatactccctgcgtaggcacgtcgaccgtactagcgaaggagttctgcgcaatagaaagagtcatcattacaagaagcactacccaaatgaggatgctcccaaaagcggcacttcctgttcttctaggtgctctagctcccggcaggattcagagtcagctcggccagaatccgaaacagaagacgtattgtgggaggatttgttgcattgcgcagagtgccacagttcctgtacatcagaaacagatgtggagaatcatcagataaatccatgcgtgaagaaggagtacagggatgacccgttccaccagtctcacctgccctggctgcacagctcccaccccggacttgaaaagattagtgccatcgtctgggaaggcaatgactgcaagaaagcggatatgtcagtgctggagatttcaggaatgattatgaatcgggttaatagtcatatcccaggtatcggttaccagatcttcggcaatgccgtgtctctgatcctgggattaacaccattcgttttccgcctgtcacaggccacagacctcgaacagctgaccgctcattccgctagcgaactctacgtcattgcttttggcagcaatgaggacgttatcgtgctgtccatggttatcatttcctttgtggtgagggtttccctcgtctggatcttcttctttctgctgtgtgttgcagaacgcacctacaaacagcgcctgctatttgcaaaactatttgggcatctcaccagcgctagacgggcgcggaagagtgaagtcccccatttccggctcaaaaaggtacagaacatcaagatgtggttgagcctacgtagctacctgaagcggcgcggcccccagagatccgtggacgtaattgtgtctagcgcttttctgcttacaatcagcgttgtcttcatatgctgcgcccaactccttcacgtgcacgaaatctttctggactgtcattacaattgggaactggtcatttggtgtatttccttaaccctattccttctgcgatttgtgactcttggttcagagacaagcaaaaaatatagcaatacctctatactgttgactgaacagattaatctgtatcttaagatggaaaaaaagcctaacaagaaggaagagcttacactcgttaacaacgttctgaaactggctaccaagctcctgaaagaattagatagtcctttccgactgtatgggctgaccatgaacccattattatacaacatcactcaggttgttatcctatcagccgtctccggggtgatttctgacctgcttggttttaacctcaagctgtggaagattaaatcatag

SEQ ID NO: 44793 - DNA, 2088 bp, Artificial Sequence
  derived and/or modified sequence
atggcctctaaggtgacagacgcaatcgtctggtatcaaaaaaagatcggggcatatgaccagcaaatttgggaaaagagcgtggaacaaagagagatcaaaggcctgcggaataagcctaagaagaccgctcatgtaaaaccagacctaatagatgtggacctggtccggggaagcgcattcgccaaagctaagcccgagtctccttggacgagtctaacccggaagggaattgtgcgtgttgtgtttttcccctttttcttccgctggtggctacaggtgacttccaaagtgatttttttctggctgcttgtgctctaccttctgcaggtcgctgccattgtgctgttctgcagcacaagctccccacactccattcccctcacagaagttattggacccatttggctaatgttactccttgggacagtgcattgccagatcgtcagtaccaggacccctaaaccgcctctttctactggagggaaacgtcggagaaaactaaggaaagcagcgcatctggaggtgcaccgcgaaggtgacggcagttctacgaccgataatacccaggagggggcagttcaaaaccacggcacaagcacttcccactccgttggtacggtctttagagacttgtggcacgccgcattttttctgagcggaagtaagaaggcaaagaacagcatcgacaagtctacggagaccgataacggatatgtgagtctggacggcaaaaagaccgtcaagtccggggaggatggtattcaaaaccacgagccacaatgtgagacaatcagacctgaagagaccgcctggaatacagggacgctgcgtaacgggcctagtaaggacactcagaggactattacaaatgtctctgacgaggtatcaagcgaggagggtcctgagaccggctattctttaaggagacacgtagaccgtacctccgagggagttctgcgcaataggaagtctcatcactacaaaaagcactatcccaatgaagacgcccctaagtccggaacctcctgctcgagccgttgcagtagctcgcgtcaagattcagaatccgcccgaccagagtctgaaactgaggatgtgctatgggaagatctactgcactgcgcagaatgccatagctcctgcaccagtgaaacggatgttgagaaccaccaaattaatccttgcgtgaagaaggagtaccgcgacgacccctttcatcagtcacatttgccttggctccatagctcccaccccggtctggaaaagatctccgcaatcgtatgggaaggaaacgactgcaaaaaggctgacatgagcgtgctggagatctccggaatgattatgaaccgggtcaactctcacattccagggattggttatcagatatttggaaatgcggtcagcctcatcctggggcttaccccttttgtgttcaggctttctcaagctacagatttagaacaactgactgcgcactctgcgtcggagctatacgttattgcctttgggagcaatgaagatgtgatcgtcctcagtatggtgatcatctccttcgtggtacgcgtcagtctagtatggatcttttttttcctgctatgcgttgccgagcgtacatataaacagcgcctgttgttcgccaaactgtttggccatctgactagcgctcgtcgggcaaggaaaagtgaagtgccccactttaggttaaagaaggttcagaacatcaagatgtggttgtctctacgaagttacctgaaaagaagagggcctcagcgatccgtggatgtgattgtttcatcggcctttctcttaaccatctccgtcgtctttatttgttgcgcgcaaattaacctttacttgaaaatggagaagaagcctaacaaaaaggaggagttgactttggtgaataatgttctcaagcttgccacaaaactcttaaaggagctcgacagtccgtttcggctgtacgggctgacaatgaatcccctgctttacaatattactcaagtggttatattaagcgccgtttcaggcgttatatccgacctccttggcttcaacctcaagctgtggaaaatcaagtcatag

SEQ ID NO: 44794 - DNA, 2244 bp, Artificial Sequence
  derived and/or modified sequence
atggcttcgaaggtcaccgacgcgatcgtgtggtatcagaaaaaaataggcgcatacgaccagcaaatttgggagaagagcgtagaacagcgggagatcaaaggtttacgtaataagcccaagaagactgcccacgtgaagccagacctgatagacgtcgaccttgttcgcggtagtgccttcgccaaggccaagccggaatccccgtggaccagtctcactcggaagggcattgtgagggtcgtctttttccccttcttctttaggtggtggcttcaggtgacatccaaggtaatttttttctggctccttgtcctgtatttgttgcaggttgctgccatcgtattattctgcagcacaagtagccctcactccattcctctgacagaagtgattggcccaatctggctgatgttactgctgggtaccgtgcattgtcaaatcgttagcacacgaacccctaaacctcctctgtctaccgggggaaaacggcgaaggaaactaaggaaggcggcacacttggaggtccatagggaaggcgacggttcttcgactactgataatactcaggaaggtgctgtgcagaaccacggaacgtctacgagtcacagcgtggggacagtgtttcgggatctgtggcatgctgcctttttcctttcaggttctaagaaggccaaaaacagcatcgataaatccactgaaactgacaatggatatgtgtccctggacggtaaaaaaaccgtgaagtcaggtgaggacgggatccagaatcatgagccacaatgcgagaccatccggcctgaggagacagcctggaataccggtacactgcgaaacggtcccagtaaggacacacagcgcactattacaaacgtctcagatgaggtctcctcggaagaaggccctgaaacagggtatagcctccgaagacatgtcgatcgcaccagcgagggggtgctgcgcaaccgcaagagccatcattacaagaagcattaccccaacgaagacgcccctaaatcaggcacttcttgcagcagccgctgcagctccagccgccaggacagtgagtccgctagacctgagtctgaaaccgaggacgtgctgtgggaggatctcctccactgtgccgagtgccattcctcctgcacatctgaaactgacgtagagaaccaccagatcaatccatgtgtcaaaaaggagtaccgtgatgacccatttcatcagagccatttaccatggttgcactccagccatcccggactggagaaaataagcgctattgtgtgggagggaaatgactgcaaaaaagctgacatgtccgttttggagatttcagggatgatcatgaacagagtgaacagccatattcctggcatcggctaccagatctttgggaatgctgtgtctctgatcctggggttgacaccgttcgttttccgcttaagccaagctaccgacctggagcagctgactgcccatagtgcctcagaactgtatgtgatagcattcggttcgaatgaagatgttattgttctgtcaatggttatcatttcatttgttgtaagggtgtcccttgtctggatattcttctttttactgtgcgtggcagagcgaacctacaagcagaggctgctgtttgcaaaacttttcggccacctcacatctgcccgacgagcccgaaaatcagaagtcccccattttagactgaagaaggtccagaacattaaaatgtggctctcgttgcggagttacctgaagcgaaggggacctcagaggagcgtggatgtgatcgtatctagcgctttcctgctaactatttctgttgtttttatctgttgcgcgcagctgcttcatgttcatgagatctttctggactgtcactacaactgggagcttgtgatatggtgcatctccctcaccctcttcctcctgaggtttgtaacgctcggctctgagacaagtaagaaatactccaacaccagcatactgctcactgaacagataaatctttacctaaagatggagaaaaagccgaacaagaaggaggaactgaccttggtgaataacgtattgaagctggccacaaaattactcaaagaattagacagtccatttcgtttgtacggcctcactatgaacccactcctgtataacattacccaggtggtaatcctgtcagccgtgagcggcgtcatcagtgacctgttaggtttcaacctaaagctgtggaagattaagtcatag

SEQ ID NO: 44795 - DNA, 4541 bp, Artificial Sequence
  derived and/or modified sequence
ggcggcgctagcttcggagtctcccgcgcgcacctcagccgcctcctagcggcgcggcgctcgctcctacgcctaaaatgaccaatgtgtgatttcagtggaataaatggcgtccaaagtcacagatgctatagtctggtatcaaaagaagattggagcatatgatcaacaaatatgggaaaaatctgttgaacagagagaaatcaaggggctaaggaataaaccaaagaaaacagcacatgtgaaaccagacctcatagatgttgatcttgtaagagggtctgcatttgcaaaggcaaagcctgaaagtccttggacttctctgaccagaaagggaattgttcgagttgtatttttcccctttttcttccggtggtggttacaagtaacatcaaaggtcatctttttctggcttcttgtcctttatcttcttcaagttgctgcaatagtattattctgctccacttctagcccacacagcatacctctgacagaggtgattgggccgatatggctgatgctgctcctgggaactgtgcattgccagattgtttccacaagaacacccaaacctcctctaagtacagggggtaaaagaagaaggaaattaagaaaagcagcccatttggaagtacatagggaaggagatggttctagtaccacagataacacacaagagggagcagttcagaaccacggtacaagcacctctcacagcgttggcactgtcttcagagatctctggcatgctgctttctttttatcaggatcaaagaaagcaaagaattcaattgataaatcaactgaaactgacaatggctatgtatcccttgatgggaagaagactgttaaaagcggtgaagatggaatacaaaaccatgaacctcagtgtgaaactattcgaccagaagagacagcctggaacacaggaacactgaggaatggtcctagcaaagatacccaaaggacaataacaaatgtctctgatgaagtctccagtgaggaaggtcctgaaacaggatactcattacgtcgtcatgtggacaggacttctgaaggtgttcttcggaatagaaagtcacaccattataagaaacattaccctaatgaggacgcccctaaatcgggtactagttgcagctctcgctgttcaagttccagacaggattctgagagtgcaaggccagaatctgaaacagaagatgtgttatgggaagacttgttacattgtgcagaatgccattcatcttgtaccagtgagacagatgtggaaaatcatcagattaatccatgtgtgaaaaaagaatatagagatgacccttttcatcagagtcatttgccctggctccatagttcccacccaggattagaaaaaataagtgctatagtatgggaaggtaatgattgtaagaaagcagacatgtctgtacttgaaatcagtggaatgataatgaacagagtgaacagccatataccaggaataggataccagatttttggaaatgcagtctctctcatactgggtttaactccatttgttttccgactttctcaagctacagacttggaacaactcacagcacattctgcttcagaactttatgtgattgcatttggttctaatgaagatgtcatagttctttctatggttataataagttttgtggttcgcgtgtctcttgtgtggattttcttttttttgctctgtgtagcagaaagaacttataaacagcgattactttttgcaaaactctttggacatttaacatctgcaaggagggctcgaaaatctgaggttcctcatttccggttgaagaaagtacagaatataaaaatgtggctatctctccgttcctatcttaagcgtcgaggtcctcagcgatcagttgatgtaatagtttcatctgctttcttattgactatctcagttgtatttatctgttgtgcccagataaacctctacttgaaaatggagaaaaaacctaacaaaaaggaggaactgacactagtgaataatgttttaaaactggctactaaactgctaaaggagttggacagtccttttagattatatgggcttacaatgaatccgctgctttataacatcacccaggttgttatcctgtcagctgtttctggtgttatcagtgacttgcttggatttaatttaaagctatggaagattaagtcatgacaattcaaagaaaagaagatgtagcctcttttccagaataagagtactgactaagctgcctgaaagcttgtcactgattctttgcttcaggagtctcagctagggagttgaagtgtttacatcagactgtcttgtgcaattcttatatttattttactggttcacttttttttacatttattttagtctttatatttttatttttaagcattgatgtacttagttgttgaaagggtgatgaaactgatatccagatacttgagatcctggtaattggtcataaataattggcaaaataacaaattgtgaaaatagaagccattgctcagcaccgtttctccatcaatgccgtgaacttgccttacttgaggaaaaattctttaactttggaatattgcattgaactcagctatacacataaaacattttctttggtaaatcaagatccagtcagggtttctcttgaattattttggaacaatgccaggatccaaactgattaagttacagtttaagcacccttcagtattaatatatacggtattatataacaggtcaacaagtgctctttgatgataaaacttgtaatagagcaataattgtaaatggttaccatactgtaagatattttgataaaaattaactagtaatacttgtatttatttgaaacactgggctgtttgcacagctccaactgtgcatgctcaaaatgtgcactttttaaaattgttacttttaatgcgtatctttatatgggatctgttatagtatactagggcatgatatggtatccttttgagtgaggtatatactcatctcacaagtgaagtgcctactgatattactaaagtacattatgtttactcaagtaaataattttctccccatggtacactctagtgtaggctattcataccacactgaaatgaacaactgaagaataaggctaagaaccaataaaatatttctctaattgctagttgtaaaactgtatccaaattttcagaaaagacagcttcagcttgcaaattctatcctctaaacttatctggtgcattctccccaccccacccccattatataagggctattttagatgcttttaacctccccaacaaataatttgccaagtgtccaatgagaacttatcatgttggtgtgttaggtaaatcgggcaaatatgatagtgtcttacattgggccttgattttaagttgttatatttgtacaatcgagtattttagaaattacatgaaacatgaaacagtttttgcaattttttttaaactgggcatctggtttctaaaaatttatttgaaacaatctagaattttcttggtgcaaagtgtatcatgtggaatatcctcatatttttaccatattttaagaactttaagacgattaattgtaaataatttatttgattggtgcagttctaatccctaaatcataatcttaaaatcaggaatgtgtggagaacagagccatgtcatatcactttgctcttaccattccttttgatcagcctcaattcagcctcattgtgtagtatgttttttctttctatgaaaaacaacagaaagcatttcattttatttgcctatgttcaaatatgtttaataatgaccaaagtgcattctgagttttttcaaggaatgtaatactggagctttaagaacatacttagtttctcatgtgaaaacttaggctttgtctgatgtttttccttcctctattgtctaatgttgaggttgtttttaggaattatgttttataaactttttcaatataaggtacatgcctatacagaacttaacattttgcacagaatatatcaaatatattttgagaaaaaaagtacggcatgagttctgttaggaataaaagatgaaactattgtatctcacaaaaaatcttatttcagaatggaaatatttttgagaaaagtagctgagtatactggtttaagaaaatgcttgttttagattgaggttaacttagagttgggagttgatttattaagtacagtatacctctcaacagtttataaataatatgttgaattatgtcagtgtgggcagcagtagaatactaaaaggaaaatgtcatgttaagcaatttcagaacattaactgaactattttcaaagcagaaaaattgacattgctgcctttaagaataccatgaatgtaagaaattgaaagaaattgtaaaatatcacataatatagaaatggcagttcaaagagaattgtggcagatgttgtgtgtgaactgttgtttctttgccacatgtgttgtatttgaaagttttacagtaagtttaaaataaaacattctgtgactga

SEQ ID NO: 44796 - DNA, 4793 bp, Artificial Sequence
  derived and/or modified sequence
tccggcgcaaaatcctgcgggagagggggtggggcaaccctctggaggcagcgcgcccgcgggcagcctcgttgtggctccttgggctctgttggcggcggcgctagcttcggagtctcccgcgcgcacctcagccgcctcctagcggcgcggcgctcgctcctacgcctaaaatgaccaatgtgtgatttcagtggaataaatggcgtccaaagtcacagatgctatagtctggtatcaaaagaagattggagcatatgatcaacaaatatgggaaaaatctgttgaacagagagaaatcaaggggctaaggaataaaccaaagaaaacagcacatgtgaaaccagacctcatagatgttgatcttgtaagagggtctgcatttgcaaaggcaaagcctgaaagtccttggacttctctgaccagaaagggaattgttcgagttgtatttttcccctttttcttccggtggtggttacaagtaacatcaaaggtcatctttttctggcttcttgtcctttatcttcttcaagttgctgcaatagtattattctgctccacttctagcccacacagcatacctctgacagaggtgattgggccgatatggctgatgctgctcctgggaactgtgcattgccagattgtttccacaagaacacccaaacctcctctaagtacagggggtaaaagaagaaggaaattaagaaaagcagcccatttggaagtacatagggaaggagatggttctagtaccacagataacacacaagagggagcagttcagaaccacggtacaagcacctctcacagcgttggcactgtcttcagagatctctggcatgctgctttctttttatcaggatcaaagaaagcaaagaattcaattgataaatcaactgaaactgacaatggctatgtatcccttgatgggaagaagactgttaaaagcggtgaagatggaatacaaaaccatgaacctcagtgtgaaactattcgaccagaagagacagcctggaacacaggaacactgaggaatggtcctagcaaagatacccaaaggacaataacaaatgtctctgatgaagtctccagtgaggaaggtcctgaaacaggatactcattacgtcgtcatgtggacaggacttctgaaggtgttcttcggaatagaaagtcacaccattataagaaacattaccctaatgaggacgcccctaaatcgggtactagttgcagctctcgctgttcaagttccagacaggattctgagagtgcaaggccagaatctgaaacagaagatgtgttatgggaagacttgttacattgtgcagaatgccattcatcttgtaccagtgagacagatgtggaaaatcatcagattaatccatgtgtgaaaaaagaatatagagatgacccttttcatcagagtcatttgccctggctccatagttcccacccaggattagaaaaaataagtgctatagtatgggaaggtaatgattgtaagaaagcagacatgtctgtacttgaaatcagtggaatgataatgaacagagtgaacagccatataccaggaataggataccagatttttggaaatgcagtctctctcatactgggtttaactccatttgttttccgactttctcaagctacagacttggaacaactcacagcacattctgcttcagaactttatgtgattgcatttggttctaatgaagatgtcatagttctttctatggttataataagttttgtggttcgcgtgtctcttgtgtggattttcttttttttgctctgtgtagcagaaagaacttataaacagcgattactttttgcaaaactctttggacatttaacatctgcaaggagggctcgaaaatctgaggttcctcatttccggttgaagaaagtacagaatataaaaatgtggctatctctccgttcctatcttaagcgtcgaggtcctcagcgatcagttgatgtaatagtttcatctgctttcttattgactatctcagttgtatttatctgttgtgcccagctacttcatgtacacgagatcttccttgattgtcactacaattgggaattggtaatctggtgcatctcgttaacactttttctcctaagatttgttacccttggatcagaaacaagtaaaaaatatagtaatacctcaatattacttactgaacagataaacctctacttgaaaatggagaaaaaacctaacaaaaaggaggaactgacactagtgaataatgttttaaaactggctactaaactgctaaaggagttggacagtccttttagattatatgggcttacaatgaatccgctgctttataacatcacccaggttgttatcctgtcagctgtttctggtgttatcagtgacttgcttggatttaatttaaagctatggaagattaagtcatgacaattcaaagaaaagaagatgtagcctcttttccagaataagagtactgactaagctgcctgaaagcttgtcactgattctttgcttcaggagtctcagctagggagttgaagtgtttacatcagactgtcttgtgcaattcttatatttattttactggttcacttttttttacatttattttagtctttatatttttatttttaagcattgatgtacttagttgttgaaagggtgatgaaactgatatccagatacttgagatcctggtaattggtcataaataattggcaaaataacaaattgtgaaaatagaagccattgctcagcaccgtttctccatcaatgccgtgaacttgccttacttgaggaaaaattctttaactttggaatattgcattgaactcagctatacacataaaacattttctttggtaaatcaagatccagtcagggtttctcttgaattattttggaacaatgccaggatccaaactgattaagttacagtttaagcacccttcagtattaatatatacggtattatataacaggtcaacaagtgctctttgatgataaaacttgtaatagagcaataattgtaaatggttaccatactgtaagatattttgataaaaattaactagtaatacttgtatttatttgaaacactgggctgtttgcacagctccaactgtgcatgctcaaaatgtgcactttttaaaattgttacttttaatgcgtatctttatatgggatctgttatagtatactagggcatgatatggtatccttttgagtgaggtatatactcatctcacaagtgaagtgcctactgatattactaaagtacattatgtttactcaagtaaataattttctccccatggtacactctagtgtaggctattcataccacactgaaatgaacaactgaagaataaggctaagaaccaataaaatatttctctaattgctagttgtaaaactgtatccaaattttcagaaaagacagcttcagcttgcaaattctatcctctaaacttatctggtgcattctccccaccccacccccattatataagggctattttagatgcttttaacctccccaacaaataatttgccaagtgtccaatgagaacttatcatgttggtgtgttaggtaaatcgggcaaatatgatagtgtcttacattgggccttgattttaagttgttatatttgtacaatcgagtattttagaaattacatgaaacatgaaacagtttttgcaattttttttaaactgggcatctggtttctaaaaatttatttgaaacaatctagaattttcttggtgcaaagtgtatcatgtggaatatcctcatatttttaccatattttaagaactttaagacgattaattgtaaataatttatttgattggtgcagttctaatccctaaatcataatcttaaaatcaggaatgtgtggagaacagagccatgtcatatcactttgctcttaccattccttttgatcagcctcaattcagcctcattgtgtagtatgttttttctttctatgaaaaacaacagaaagcatttcattttatttgcctatgttcaaatatgtttaataatgaccaaagtgcattctgagttttttcaaggaatgtaatactggagctttaagaacatacttagtttctcatgtgaaaacttaggctttgtctgatgtttttccttcctctattgtctaatgttgaggttgtttttaggaattatgttttataaactttttcaatataaggtacatgcctatacagaacttaacattttgcacagaatatatcaaatatattttgagaaaaaaagtacggcatgagttctgttaggaataaaagatgaaactattgtatctcacaaaaaatcttatttcagaatggaaatatttttgagaaaagtagctgagtatactggtttaagaaaatgcttgttttagattgaggttaacttagagttgggagttgatttattaagtacagtatacctctcaacagtttataaataatatgttgaattatgtcagtgtgggcagcagtagaatactaaaaggaaaatgtcatgttaagcaatttcagaacattaactgaactattttcaaagcagaaaaattgacattgctgcctttaagaataccatgaatgtaagaaattgaaagaaattgtaaaatatcacataatatagaaatggcagttcaaagagaattgtggcagatgttgtgtgtgaactgttgtttctttgccacatgtgttgtatttgaaagttttacagtaagtttaaaataaaacattctgtgactga

SEQ ID NO: 44797 - protein, 356 aa, Artificial Sequence
  derived and/or modified sequence
MASKVTDAIVWYQKKIGAYDQQIWEKSVEQREIKFIKLGLRNKPKKTAHVKPDLIDVDLVRGSAFAKAKPESPWTSLTRKGIVRVVFFPFFFRWWLQVTSKVIFFWLLVLYLLQVAAIVLFCSTSSPHSIPLTEVIGPIWLMLLLGTVHCQIVSTRTPKPPLSTGGKRRRKLRKAAHLEVHREGDGSSTTDNTQEGAVQNHGTSTSHSVGTVFRDLWHAAFFLSGSKKAKNSIDKSTETDNGYVSLDGKKTVKSGEDGIQNHEPQCETIRPEETAWNTGTLRNGPSKDTQRTITNVSDEVSSEEGPETGYSLRRHVDRTSEGVLRNRKSHHYKKHYPNEVYTLSLSVYIRIYFICY

SEQ ID NO: 44798 - DNA, 1071 bp, Artificial Sequence
  derived and/or modified sequence
atggccagcaaggtgaccgacgccatcgtgtggtaccagaagaagatcggcgcctacgaccagcagatctgggagaagagcgtggagcagagagagatcaagttcatcaagctgggcctgagaaacaagcccaagaagaccgcccacgtgaagcccgacctgatcgacgtggacctggtgagaggcagcgccttcgccaaggccaagcccgagagcccctggaccagcctgaccagaaagggcatcgtgagagtggtgttcttccccttcttcttcagatggtggctgcaggtgaccagcaaggtgatcttcttctggctgctggtgctgtacctgctgcaggtggccgccatcgtgctgttctgcagcaccagcagcccccacagcatccccctgaccgaggtgatcggccccatctggctgatgctgctgctgggcaccgtgcactgccagatcgtgagcaccagaacccccaagccccccctgagcaccggcggcaagagaagaagaaagctgagaaaggccgcccacctggaggtgcacagagagggcgacggcagcagcaccaccgacaacacccaggagggcgccgtgcagaaccacggcaccagcaccagccacagcgtgggcaccgtgttcagagacctgtggcacgccgccttcttcctgagcggcagcaagaaggccaagaacagcatcgacaagagcaccgagaccgacaacggctacgtgagcctggacggcaagaagaccgtgaagagcggcgaggacggcatccagaaccacgagccccagtgcgagaccatcagacccgaggagaccgcctggaacaccggcaccctgagaaacggccccagcaaggacacccagagaaccatcaccaacgtgagcgacgaggtgagcagcgaggagggccccgagaccggctacagcctgagaagacacgtggacagaaccagcgagggcgtgctgagaaacagaaagagccaccactacaagaagcactaccccaacgaggtgtacaccctgagcctgagcgtgtacatcagaatctacttcatctgctactag

SEQ ID NO: 44799 - DNA, 1071 bp, Artificial Sequence
  derived and/or modified sequence
atggccagcaaggttaccgatgctatcgtgtggtatcagaagaagattggtgcttacgaccaacaaatttgggagaagtctgtggagcaacgagaaattaaatttatcaagttgggtctgcgtaacaagccaaaaaagaccgcgcatgtgaagcctgatttgatcgacgtggacctggttaggggctccgcattcgcgaaggcaaaacccgagtcaccctggacaagcctgacacgaaaaggcatagttagggtggtatttttccccttcttcttcaggtggtggctccaggtcacgagcaaggtgatatttttttggttgctcgtgctgtatttgctccaggtcgccgctatcgtgttgttttgctccacctcctcaccacacagcataccactgacagaagtaatcggaccaatttggttaatgctgctcctgggcactgtccattgccagattgtgtcaactcgcactcccaaaccacccctgtctaccggcggaaagaggaggcgcaagttgcgcaaggccgcacacctggaggtgcaccgagagggggacggaagttccacgactgacaatacacaggaaggcgcagtacagaatcatggtacctctaccagccatagtgtggggaccgtcttcagagacctgtggcacgccgcattctttctgtctggttctaagaaggctaagaattctatagacaagagtaccgagactgataatggttacgtgtctctagatggtaaaaaaactgtcaagagcggggaggacggaattcaaaaccatgaaccccagtgtgagaccattaggccagaggagacagcctggaataccgggaccctgcgcaacggcccatcaaaggacacccagagaacaattacaaatgtttcagacgaggtaagcagcgaggaagggcctgaaacaggatatagcctgcgaaggcatgtagaccgcacctccgaaggcgtcctcagaaacagaaaaagccaccattataagaagcattaccctaacgaggtctacacattaagtctgtctgtctatatccgaatttacttcatttgctactag

SEQ ID NO: 44800 - DNA, 1071 bp, Artificial Sequence
  derived and/or modified sequence
atggccagcaaggtgacagatgccatcgtgtggtaccagaagaagatcggggcctatgaccagcagatctgggagaagtctgtggagcagcgggagatcaagttcatcaagctgggcctgaggaacaagcccaagaagacagcccacgtgaagccagacctgattgatgtggacctggtgcggggcagcgcctttgccaaggccaagccagagagcccctggaccagcctgaccaggaagggcatcgtgcgggtggtgttcttccccttcttcttccgctggtggctgcaggtgaccagcaaggtgatcttcttctggctgctggtgctgtacctgctgcaggtggccgccatcgtgctcttctgcagcaccagcagcccccacagcatccccctgacagaggtgattggccccatctggctgatgctgctgctgggcaccgtgcactgccagatcgtgtccaccaggacccccaagccacccctgagcactggaggcaagagaagaaggaagctgaggaaggccgcccacctggaggtgcaccgggagggagatggcagcagcaccacagacaacacccaggagggcgctgtgcagaaccacggcaccagcaccagccacagcgtgggcaccgtcttccgggacctgtggcatgctgccttcttcctgagcggcagcaagaaggccaagaacagcattgacaagagcacagaaacagacaatggctacgtgtccctggatggcaagaagacagtgaagagcggggaggatggcatccagaaccacgagccccagtgtgagaccatccggcctgaggagacagcctggaacacaggcaccctgagaaatggccccagcaaggacacccagaggaccatcaccaacgtgtctgatgaggtgagcagcgaggagggccctgagaccggctacagcctgcggagacatgtggacaggaccagcgagggcgtgctgaggaacaggaagagccaccactacaagaagcactacccaaatgaggtgtacaccctgagcctgtctgtgtacatccgcatctacttcatctgctactag

SEQ ID NO: 44801 - DNA, 1071 bp, Artificial Sequence
  derived and/or modified sequence
atggccagcaaggtgaccgacgccatcgtgtggtaccagaagaagatcggggcgtacgatcagcaaatttgggaaaagtccgtggaacagcgggagattaaatttatcaagctgggcttacgtaataaaccgaaaaagactgcccacgtaaaacctgatctgatcgatgtcgacctggtaagaggctcagcctttgccaaggctaagccagagtccccttggacatcactgacacgtaagggtattgtcagagtggtatttttcccattttttttccgctggtggctgcaggttacgtcaaaggtcatattcttctggctgctggtgttgtacctgttgcaagtggctgctattgtgcttttctgcagtacgagcagtccccatagcatccccctcaccgaggtcatcggaccaatttggctaatgttgctgttaggcactgtgcactgtcaaatcgtaagtacaaggacaccaaaacccccactcagcaccggcggaaaaaggcgccgcaaactgcggaaggctgctcatctagaggtgcaccgcgagggcgacggaagctccactacggataacacccaagaaggagcagtacagaaccatggcaccagcacgtctcattccgtcggcacggtctttcgcgacctgtggcacgccgcattcttcttgagtggcagcaaaaaggccaagaacagtattgacaaatccacggagaccgacaatggttacgtgtccctggatggcaaaaaaacagtgaagtcaggtgaggatggcattcagaatcacgagccacagtgtgaaacaatacggcccgaagagactgcatggaacactgggactttgagaaatggccctagtaaagatactcagcgcacgataactaacgtgtcagacgaggtgtcctccgaagagggtccagaaacagggtactctttgagacgccatgtggaccggacatccgagggtgttctccggaaccgcaagtctcaccattacaaaaagcactaccctaatgaggtctacactcttagcttgagtgtctatattcggatctattttatatgctactag

SEQ ID NO: 44802 - DNA, 1071 bp, Artificial Sequence
  derived and/or modified sequence
atggcctcaaaggtgactgacgcgatcgtgtggtaccagaagaaaataggtgcctatgatcaacagatctgggagaagtcagtagaacagagggaaattaaattcattaaactcggactacgtaacaagcccaaaaaaactgcgcacgtgaagccagacctcatcgatgtcgatttggtgagaggatccgcattcgctaaggctaaacctgaatctccctggactagccttacacggaaaggcattgtacgcgtcgtgttcttccctttcttttttcggtggtggctgcaagtgacttcaaaagtgatcttcttttggctcttggtgctgtacttactccaggtggccgcaattgtgttgttctgcagtactagctccccacatagcatccctctcaccgaagtaattgggccaatttggcttatgctcctcctgggtaccgtgcattgtcaaattgtctccacaagaacaccaaaaccacccctctccactgggggaaaacggcgtcgaaagctcaggaaagcagcgcacttagaggtccatagggagggggatggctctagtaccacagacaacacgcaggagggcgctgtgcagaatcacgggaccagtacatcacacagcgtcggaaccgtcttccgagacctatggcacgccgcttttttcttgtctggcagcaagaaggccaaaaatagcatcgacaagagcacggagaccgacaacggctacgtgtccctggatggaaaaaagaccgtgaagagcggggaagatggtatccagaatcacgaaccccagtgcgagacgatccgccctgaagaaacagcgtggaataccgggactttaaggaacggcccatcaaaagacacgcagagaactatcacaaacgtatccgacgaagtgagttcagaggaggggcctgagactgggtattcactacggaggcatgtcgatcgcacatctgagggggtgttgcgtaaccgcaaatctcaccactacaagaagcactaccccaacgaagtatacaccctgagcttgtccgtctacattcggatctatttcatctgttattag

SEQ ID NO: 44803 - DNA, 2516 bp, Artificial Sequence
  derived and/or modified sequence
aagtaaccagagtgctatgtctgcatgctgttcagtctccttttggaaggtgggaaataaagtcatttgtatgtttttctctcttgcacagcctaaaatgaccaatgtgtgatttcagtggaataaatggcgtccaaagtcacagatgctatagtctggtatcaaaagaagattggagcatatgatcaacaaatatgggaaaaatctgttgaacagagagaaatcaagtttattaaactggggctaaggaataaaccaaagaaaacagcacatgtgaaaccagacctcatagatgttgatcttgtaagagggtctgcatttgcaaaggcaaagcctgaaagtccttggacttctctgaccagaaagggaattgttcgagttgtatttttcccctttttcttccggtggtggttacaagtaacatcaaaggtcatctttttctggcttcttgtcctttatcttcttcaagttgctgcaatagtattattctgctccacttctagcccacacagcatacctctgacagaggtgattgggccgatatggctgatgctgctcctgggaactgtgcattgccagattgtttccacaagaacacccaaacctcctctaagtacagggggtaaaagaagaaggaaattaagaaaagcagcccatttggaagtacatagggaaggagatggttctagtaccacagataacacacaagagggagcagttcagaaccacggtacaagcacctctcacagcgttggcactgtcttcagagatctctggcatgctgctttctttttatcaggatcaaagaaagcaaagaattcaattgataaatcaactgaaactgacaatggctatgtatcccttgatgggaagaagactgttaaaagcggtgaagatggaatacaaaaccatgaacctcagtgtgaaactattcgaccagaagagacagcctggaacacaggaacactgaggaatggtcctagcaaagatacccaaaggacaataacaaatgtctctgatgaagtctccagtgaggaaggtcctgaaacaggatactcattacgtcgtcatgtggacaggacttctgaaggtgttcttcggaatagaaagtcacaccattataagaaacattaccctaatgaggtatatactttgtccttaagtgtatacatacgtatctattttatatgttactaatttataacttctttcaacaattaaaaattgttgaaataaatatttcacattattatcaatatttattattgttgtatgatctggatttataaaatagcagttttaggtttacgtattgcacatgtattgatagatagccacacatttgagctcattttatgcattatctttgaagactcatacattgtttgttgtttgcttttaaagaagaacattctggagagagaatctgcaaactcctgtgttcactttttccacaatttgaaaggctttatacatttgatcatagcaaagttattttaagtaacttccttcatattgctgtcaccagttattaagtccccatacttcaaaattcagttcttttttctttgtttctatttttccttattaatctttattttctctaaacccttttcaactatatcatatctcttgagcttcaaattgtttaaataaagaatttcattcaattgtattttcagtttctaatctaagggtagaacatttggctttaaggcaaataaattacactgtttatcacttttttataaacattaccttctactctttttgagctatgttagtaattttttccttgatggttttgggttaaacttgtaaaacaaacacatgttacgctgtgctggaatatgattgccttcagagtattaagattagaagagttactattctttgcacactcttctttgtggttgtgtctctggttaatctttctggtgattgtggttttgtttcttttcccagtggttgccatacagacactaatgccagtgtgtctgctctattgcctcttcacccatgtcatttgatgtagtgtttcttgttcctaagccagataaccaagcttgtaaaattttgtcttactgtatgtactgttagaagtcagttggtgctggaagggagacggagggctgtttgacccctctcccagaataaattatttagcagtagcagtatttttctcactccatgatcttggcttttgttggtttgcaactgtattttaaacgattgagtttcttgaagcgcagaacattattctacctattaacttttaaattaaaaggttgtttaaaatcttgatttccagctaagtaaggctgatagtaagcattgatttacatcttttttaatgatataagaaattacataaatataaaatatggctataaaattcttcgtctataaagtgaagaatgtagactaggtgatattttaaaagctgcattcagttctcaaaaatttttactcttaaaccagctttaaagggcgtttctaaaaaaaagcaaaataaa

SEQ ID NO: 44804 - protein, 352 aa, Artificial Sequence
  derived and/or modified sequence
MASKVTDAIVWYQKKIGAYDQQIWEKSVEQREIKGLRNKPKKTAHVKPDLIDVDLVRGSAFAKAKPESPWTSLTRKGIVRVVFFPFFFRWWLQVTSKVIFFWLLVLYLLQVAAIVLFCSTSSPHSIPLTEVIGPIWLMLLLGTVHCQIVSTRTPKPPLSTGGKRRRKLRKAAHLEVHREGDGSSTTDNTQEGAVQNHGTSTSHSVGTVFRDLWHAAFFLSGSKKAKNSIDKSTETDNGYVSLDGKKTVKSGEDGIQNHEPQCETIRPEETAWNTGTLRNGPSKDTQRTITNVSDEVSSEEGPETGYSLRRHVDRTSEGVLRNRKSHHYKKHYPNEVYTLSLSVYIRIYFICY

SEQ ID NO: 44805 - DNA, 1059 bp, Artificial Sequence
  derived and/or modified sequence
atggccagcaaggtgaccgacgccatcgtgtggtaccagaagaagatcggcgcctacgaccagcagatctgggagaagagcgtggagcagagagagatcaagggcctgagaaacaagcccaagaagaccgcccacgtgaagcccgacctgatcgacgtggacctggtgagaggcagcgccttcgccaaggccaagcccgagagcccctggaccagcctgaccagaaagggcatcgtgagagtggtgttcttccccttcttcttcagatggtggctgcaggtgaccagcaaggtgatcttcttctggctgctggtgctgtacctgctgcaggtggccgccatcgtgctgttctgcagcaccagcagcccccacagcatccccctgaccgaggtgatcggccccatctggctgatgctgctgctgggcaccgtgcactgccagatcgtgagcaccagaacccccaagccccccctgagcaccggcggcaagagaagaagaaagctgagaaaggccgcccacctggaggtgcacagagagggcgacggcagcagcaccaccgacaacacccaggagggcgccgtgcagaaccacggcaccagcaccagccacagcgtgggcaccgtgttcagagacctgtggcacgccgccttcttcctgagcggcagcaagaaggccaagaacagcatcgacaagagcaccgagaccgacaacggctacgtgagcctggacggcaagaagaccgtgaagagcggcgaggacggcatccagaaccacgagccccagtgcgagaccatcagacccgaggagaccgcctggaacaccggcaccctgagaaacggccccagcaaggacacccagagaaccatcaccaacgtgagcgacgaggtgagcagcgaggagggccccgagaccggctacagcctgagaagacacgtggacagaaccagcgagggcgtgctgagaaacagaaagagccaccactacaagaagcactaccccaacgaggtgtacaccctgagcctgagcgtgtacatcagaatctacttcatctgctactag

SEQ ID NO: 44806 - DNA, 1059 bp, Artificial Sequence
  derived and/or modified sequence
atggcctcaaaagttacagatgcaattgtgtggtaccagaagaagatcggggcttatgaccagcaaatttgggaaaaaagtgtggagcagagagaaatcaagggtctgcggaataaaccaaagaagacagcccatgtgaagcctgaccttattgacgtcgatctagttagaggctcagcgttcgctaaggcaaagccggaatcaccttggacatcactgactcggaagggcatcgttagagtcgtgttcttcccttttttctttcgatggtggctgcaggtcacctctaaagtcatcttcttttggctgctagtgctatacttgttgcaggtggccgccatcgtgctcttttgcagcacatcctctccccactctatcccattaaccgaagtaatagggccaatttggcttatgcttctgctcggaacggtgcattgtcagatagtgtccacacgaacgcctaaacctcccttgagtacaggaggcaaaaggaggaggaagctgagaaaggccgcacatctcgaggtgcatcgcgaaggagacgggtcgtcaaccactgacaatacccaagagggagctgttcagaaccatggaacctccacctcccactctgttggcacagtttttcgcgatttgtggcacgctgcctttttcctcagcggatccaagaaagctaaaaattctatcgataaatccactgaaaccgataacggatatgtatcgctcgacggcaaaaaaactgtgaagagcggtgaagatggcattcagaatcatgagccacagtgtgagacgataaggccagaagagaccgcttggaacacagggacactgagaaatgggcctagcaaagacacgcagcggactattaccaacgtcagcgatgaggttagctcagaggaggggcccgaaaccgggtacagcttgcggagacacgtggatcgcacttcagagggagtgctaagaaataggaagtcccaccactataaaaagcactatccaaatgaagtctacacactgtccctgtcagtctacataagaatttactttatttgctactag

SEQ ID NO: 44807 - DNA, 1059 bp, Artificial Sequence
  derived and/or modified sequence
atggccagcaaggtgacagatgccatcgtgtggtaccagaagaagatcggggcctatgaccagcagatctgggagaagtctgtggagcagcgggagatcaagggcctgaggaacaagcccaagaagacagcccacgtgaagccagacctgattgatgtggacctggtgcggggcagcgcctttgccaaggccaagccagagagcccctggaccagcctgaccaggaagggcatcgtgcgggtggtgttcttccccttcttcttccgctggtggctgcaggtgaccagcaaggtgatcttcttctggctgctggtgctgtacctgctgcaggtggccgccatcgtgctcttctgcagcaccagcagcccccacagcatccccctgacagaggtgattggccccatctggctgatgctgctgctgggcaccgtgcactgccagatcgtgtccaccaggacccccaagccacccctgagcactggaggcaagagaagaaggaagctgaggaaggccgcccacctggaggtgcaccgggagggagatggcagcagcaccacagacaacacccaggagggcgctgtgcagaaccacggcaccagcaccagccacagcgtgggcaccgtcttccgggacctgtggcatgctgccttcttcctgagcggcagcaagaaggccaagaacagcattgacaagagcacagaaacagacaatggctacgtgtccctggatggcaagaagacagtgaagagcggggaggatggcatccagaaccacgagccccagtgtgagaccatccggcctgaggagacagcctggaacacaggcaccctgagaaatggccccagcaaggacacccagaggaccatcaccaacgtgtctgatgaggtgagcagcgaggagggccctgagaccggctacagcctgcggagacatgtggacaggaccagcgagggcgtgctgaggaacaggaagagccaccactacaagaagcactacccaaatgaggtgtacaccctgagcctgtctgtgtacatccgcatctacttcatctgctactag

SEQ ID NO: 44808 - DNA, 1059 bp, Artificial Sequence
  derived and/or modified sequence
atggccagcaaggtgaccgacgccatcgtgtggtaccagaagaagattggtgcatacgatcagcagatctgggagaagagtgtagaacaacgcgagattaaggggcttcgaaacaagcccaagaaaacagcacacgtgaaacctgacctaatagatgtggacctcgtaagagggagcgctttcgctaaagccaagccggagagcccatggacttccctcacaaggaagggcatcgtgagagtcgtgttcttcccattttttttccgctggtggctgcaagtcacatcaaaggtgatatttttctggctgctggtcttgtacctgctacaagttgctgccatcgtcttgttttgctcgaccagcagtcctcattctattcccctgacagaagtgatcggaccaatttggttgatgttgcttcttggtactgtgcattgtcagattgtgtctacccggacacccaagccacccctgtccaccggagggaaaaggcgacggaagctccgcaaggccgcgcaccttgaggttcatagggagggggacgggagttccaccactgacaatacccaggaaggagccgtccagaaccacgggacatctacttcccatagcgtgggtacagtgtttcgggacttatggcacgcagccttcttcctctcaggtagcaaaaaggcaaagaactccatcgataaatccaccgaaaccgacaacggatacgtgagtctagacggcaagaaaacagtaaagtcaggcgaagacggcatccagaatcacgaaccacagtgcgaaactattaggccagaggagactgcctggaacacagggactctgcgaaacgggccaagtaaagacacacagcgaactattaccaatgtaagcgacgaggtctcaagcgaggagggacctgagaccggctactcgctccgacgccacgtcgacaggaccagcgagggcgttctacgaaatcggaagagtcaccactataaaaagcactatcccaatgaagtgtacaccctgagtttaagtgtgtacatcaggatctacttcatatgctactag

SEQ ID NO: 44809 - DNA, 1059 bp, Artificial Sequence
  derived and/or modified sequence
atggctagcaaggtgactgacgctatcgtgtggtatcaaaaaaaaattggggcttacgatcagcagatctgggagaagtccgtggaacagcgcgaaattaaaggattgagaaataaacccaagaagaccgcccatgtgaagcccgacttgatcgatgttgacttggtgcgcggatctgctttcgcgaaggcaaaacctgagtcgccgtggacatctctcacacgcaagggaatcgtgcgggtcgtgtttttccccttcttttttcgatggtggctgcaggtgacatcgaaagtcatcttcttttggctgttggtgttgtacctgctccaggtagcagcaatcgtgcttttttgctcgacatcttctccgcactccattcccctaacggaggttatcggtcctatttggctcatgcttttactgggcactgttcactgtcagatcgtgtccaccagaacccctaaacccccactgtctacaggcggtaagcggcgtaggaaactgagaaaagccgcacacttagaggtgcatcgggagggtgacggcagctccaccaccgacaatactcaggagggtgccgtccagaaccatggaactagcaccagtcatagtgtgggcactgtctttcgtgatctgtggcacgcagctttttttctctccgggagtaaaaaggccaagaacagtatcgataagtcgactgagaccgataatggctacgtctcactggatgggaagaaaaccgtgaagtccggcgaagacggtatacaaaatcacgagcctcagtgtgaaacaattagacctgaggagacagcttggaacaccggtaccctccgaaatgggcctagcaaagatacgcaaagaactatcacaaacgtgtccgatgaggtctcttccgaagaaggccctgagactgggtattccctgcggcgtcatgtcgatcgcacttccgagggcgtgcttaggaacagaaaatcacatcactacaagaagcactaccctaatgaggtgtacactctcagcctctccgtttatatcagaatctatttcatttgttattag

SEQ ID NO: 44810 - DNA, 1738 bp, Artificial Sequence
  derived and/or modified sequence
gggctctgttggcggcggcgctagcttcggagtctcccgcgcgcacctcagccgcctcctagcggcgcggcgctcgctcctacgcctaaaatgaccaatgtgtgatttcagtggaataaatggcgtccaaagtcacagatgctatagtctggtatcaaaagaagattggagcatatgatcaacaaatatgggaaaaatctgttgaacagagagaaatcaaggggctaaggaataaaccaaagaaaacagcacatgtgaaaccagacctcatagatgttgatcttgtaagagggtctgcatttgcaaaggcaaagcctgaaagtccttggacttctctgaccagaaagggaattgttcgagttgtatttttcccctttttcttccggtggtggttacaagtaacatcaaaggtcatctttttctggcttcttgtcctttatcttcttcaagttgctgcaatagtattattctgctccacttctagcccacacagcatacctctgacagaggtgattgggccgatatggctgatgctgctcctgggaactgtgcattgccagattgtttccacaagaacacccaaacctcctctaagtacagggggtaaaagaagaaggaaattaagaaaagcagcccatttggaagtacatagggaaggagatggttctagtaccacagataacacacaagagggagcagttcagaaccacggtacaagcacctctcacagcgttggcactgtcttcagagatctctggcatgctgctttctttttatcaggatcaaagaaagcaaagaattcaattgataaatcaactgaaactgacaatggctatgtatcccttgatgggaagaagactgttaaaagcggtgaagatggaatacaaaaccatgaacctcagtgtgaaactattcgaccagaagagacagcctggaacacaggaacactgaggaatggtcctagcaaagatacccaaaggacaataacaaatgtctctgatgaagtctccagtgaggaaggtcctgaaacaggatactcattacgtcgtcatgtggacaggacttctgaaggtgttcttcggaatagaaagtcacaccattataagaaacattaccctaatgaggtatatactttgtccttaagtgtatacatacgtatctattttatatgttactaatttataacttctttcaacaattaaaaattgttgaaataaatatttcacattattatcaatatttattattgttgtatgatctggatttataaaatagcagttttaggtttacgtattgcacatgtattgatagatagccacacatttgagctcattttatgcattatctttgaagactcatacattgtttgttgtttgcttttaaagaagaacattctggagagagaatctgcaaactcctgtgttcactttttccacaatttgaaaggctttatacatttgatcatagcaaagttattttaagtaacttccttcatattgctgtcaccagttattaagtccccatacttcaaaattcagttcttttttctttgtttctatttttccttattaatctttattttctctaaacccttttcaactatatcatatctcttgagcttcaaattgtttaaataaagaatttcattcaattgtattttcagtttctaatctaagggtagaacatttggctttaaggcaaataaattacactgtttatcacttttttataaacatta

SEQ ID NO: 44811 - protein, 483 aa, Artificial Sequence
  derived and/or modified sequence
MATIEEIAHQIIEQQMGEIVTEQQTGQKIQIVTALDHNTQGKQFILTNHDGSTPSKVILARQDSTPGKVFLTTPDAAGVNQLFFTTPDLSAQHLQLLTDNSPDQGPNKVFDLCVVCGDKASGRHYGAVTCEGCKGFFKRSIRKNLVYSCRGSKDCIINKHHRNRCQYCRLQRCIAFGMKQDSVQCERKPIEVSREKSSNCAASTEKIYIRKDLRSPLTATPTFVTDSESTRSTGLLDSGMFMNIHPSGVKTESAVLMTSDKAESCQGDLSTLANVVTSLANLGKTKDLSQNSNEMSMIESLSNDDTSLCEFQEMQTNGDVSRAFDTLAKALNPGESTACQSSVAGMEGSVHLITGDSSINYTEKEGPLLSDSHVAFRLTMPSPMPEYLNVHYIGESASRLLFLSMHWALSIPSFQALGQENSISLVKAYWNELFTLGLAQCWQVMNVATILATFVNCLHNSLQQDAKVIAALIHFTRRAITDL

SEQ ID NO: 44812 - DNA, 1452 bp, Artificial Sequence
  derived and/or modified sequence
atggcaactattgaggagatcgcacatcagatcatagagcagcagatgggagagatcgttacagagcagcagacagggcagaagatccagattgtgacggctttggatcacaacacgcagggtaaacaatttattttgaccaaccacgacgggagcacaccgtcaaaggtcattcttgcaaggcaggattctaccccaggtaaggtatttcttactacccctgatgccgccggagtgaatcaactgtttttcacaaccccagacctttccgcccagcacctgcagttgctgacggataatagccccgatcagggtccaaataaggtcttcgatctttgtgtagtatgcggtgacaaagcctccggccgccactatggagccgtgacttgtgagggatgcaagggtttcttcaagcgtagtatccggaagaatctcgtctactcatgtaggggcagcaaagactgcataatcaacaagcatcaccgaaatcgttgtcaatactgccgcctgcagcgctgtatcgcattcggtatgaagcaggatagtgtgcagtgcgaaagaaagcctattgaggtctctagggaaaaatcctcaaattgtgcagcatcgacggagaaaatttatataagaaaagatctgaggtctcccctgacggcgactccgaccttcgttaccgatagcgaaagcaccagatctaccggacttctcgacagcggcatgttcatgaatatccacccaagtggcgtcaaaaccgagtccgccgtgctaatgacaagcgacaaagctgaaagttgccagggagacctttcaaccctggccaatgtggtgacatctctcgccaacctggggaaaactaaggacttgtctcagaattccaacgaaatgtcaatgattgaatcgttgagtaacgatgacactagcctgtgtgaatttcaagaaatgcagaccaacggcgacgtgtccagggctttcgacacactggccaaagcattgaatccaggagaatccactgcttgccagagctccgtcgcgggaatggaaggatcagtgcacctcatcactggcgacagttctatcaactacaccgaaaaggagggccctctgctgtccgacagtcacgtagcctttaggcttacgatgccttcacccatgcccgagtacctcaatgtgcactacattggggaaagcgctagccgactgctctttctatccatgcattgggccttgagtattccttcgttccaggccctgggccaagagaacagtatctcactggttaaagcctattggaacgagctcttcacactgggtctcgcacagtgttggcaagtgatgaacgtggctaccattctcgccactttcgtcaattgcctgcacaattccctccagcaggatgccaaggtgatcgctgcactgatccacttcacccggcgcgccattaccgatctatag

SEQ ID NO: 44813 - DNA, 2014 bp, Artificial Sequence
  derived and/or modified sequence
ccaaacacagaaagctctctccgccgtgaatctcgatcccacatcccgtcggctttcttcaacctctcttcccggagcgccccccaatccacgagtggcagccgcgggactgtcgcgtcggcgcccgacgccggagtcagcagggcgcaaaagcgccggtagatcatggcaaccatagaagaaattgcacatcaaattattgaacaacagatgggagagattgttacagagcagcaaactgggcagaaaatccagattgtgacagcacttgatcataatacccaaggcaagcagttcattctgacaaatcacgacggctctactccaagcaaagtcattctggccaggcaagattccactccgggaaaagttttccttacaactccagatgcagcaggtgtcaaccagttattttttaccactcctgatctgtctgcacaacacctgcagctcctaacagataattctccagaccaaggaccaaataaggtttttgatctttgcgtagtatgtggagacaaagcatcaggacgtcattatggagcagtaacttgtgaaggctgcaaaggattttttaaaagaagcatccgaaaaaatttagtatattcatgtcgaggatcaaaggattgtattattaataagcaccaccgaaaccgctgtcaatactgcaggttacagagatgtattgcgtttggaatgaagcaagactctgtccaatgtgaaagaaaacccattgaagtatcacgagaaaaatcttccaactgtgccgcttcaacagaaaaaatctatatccgaaaggaccttcgtagcccattaactgcaactccaacttttgtaacagatagtgaaagtacaaggtcaacaggactgttagattcaggaatgttcatgaatattcatccatctggagtaaaaactgagtcagctgtgctgatgacatcagataaggctgaatcatgtcagggagatttaagtacattggccaatgtggttacatcattagcgaatcttggaaaaactaaagatctttctcaaaatagtaatgaaatgtctatgattgaaagcttaagcaatgatgatacctctttgtgtgaatttcaagaaatgcagaccaacggtgatgtttcaagggcatttgacactcttgcaaaagcattgaatcctggagagagcacagcctgccagagctcagtagcgggcatggaaggaagtgtacacctaatcactggagattcaagcataaattacaccgaaaaagaggggccacttctcagcgattcacatgtagctttcaggctcaccatgccttctcctatgcctgagtacctgaatgtgcactacattggggagtctgcctccagactgctgttcttatcaatgcactgggcactttcgattccttctttccaggctctagggcaagaaaacagcatatcactggtgaaagcttactggaatgaactttttactcttggtcttgcccagtgctggcaagtgatgaatgtagcaactatattagcaacatttgtcaattgtcttcacaatagtcttcaacaagatgccaaggtaattgcagccctcattcatttcacaagacgagcaatcactgatttataaatgcttaactatagaatggcttatgactacccaaaacagtgccccatcaacaaatggggaaaattgccttttgagctcaggaataatttataaattggggactaccttttagttctttagcatattctatttcttattgttttatataatttttaaatcatttgcttcctccttatgtttaacagcagaggggtaatcaccttaaaatgtcatcaaaaatagatctactagaaggcagcatcacattcccatcttacttatggactcctacccctggttcatgtcttatatgcctgtaatggttataaagcctaccttcaggaaagctatggttgactaattactaatggatgggttttaaacatgtccctctacaataaattaaaatctttattgt

SEQ ID NO: 44814 - DNA, 1452 bp, Artificial Sequence
  derived and/or modified sequence
atggccaccatcgaggagatcgcccaccagatcatcgagcagcagatgggagaaattgtgacagagcagcagacaggccagaagatccagatcgtgacagccctggaccacaacacccagggcaagcagttcatcctgaccaaccatgatggcagcacccccagcaaggtgatcctggcccggcaggacagcacccctgggaaggtgttcctgaccaccccagatgctgctggggtgaaccagctgttcttcaccaccccagacctgagcgcccagcacctgcagctgctgacagacaacagcccagaccagggccccaacaaggtgtttgacctgtgtgtggtgtgtggggacaaggccagcggccgccactatggagctgtgacctgtgagggctgcaagggcttcttcaagaggagcatcaggaagaacctggtgtacagctgccggggcagcaaggactgcatcatcaacaagcaccacaggaaccgctgccagtactgccgcctgcagcgctgcatcgccttcggcatgaagcaggacagcgtgcagtgtgagaggaagcccatcgaggtgtcccgggagaagagcagcaactgtgccgccagcacagagaagatctacatcaggaaggacctgcggagccccctgacagccacccccacctttgtgacagattctgagagcaccaggagcacaggcctgctggacagcggcatgttcatgaacatccaccccagcggcgtgaagacagaatctgctgtgctgatgaccagtgacaaggccgagagctgccagggcgacctgagcaccctggccaacgtggtgaccagcctggccaacctgggcaagaccaaggacctgagccagaacagcaatgagatgtccatgattgagagcctgagcaatgatgacaccagcctgtgtgagttccaggagatgcagaccaatggagatgtgtcccgggcctttgacaccctggccaaggccctgaaccctggagagagcacagcctgccagagctctgtggccggcatggagggctctgtgcacctgatcaccggggacagcagcatcaactacacagagaaggagggccccctgctgagtgacagccacgtggccttccggctgaccatgcccagccccatgcctgagtacctgaatgtgcactacatcggggagagcgccagccggctgctcttcctgtccatgcactgggccctgagcatccccagcttccaggccctgggccaggagaacagcatcagcctggtgaaggcctactggaatgaactcttcaccctgggcctggcccagtgctggcaggtgatgaatgtggccaccatcctggccacctttgtgaactgcctgcacaacagcctgcagcaggatgccaaggtgattgctgccctgatccacttcacccggcgggccatcacagacctgtag

SEQ ID NO: 44815 - DNA, 1452 bp, Artificial Sequence
  derived and/or modified sequence
atggccaccatcgaggagatcgcccaccagatcatcgagcagcagatgggcgagattgtaaccgagcaacagacgggacagaaaatccagattgtgactgcgctagaccataacacacagggcaagcagtttatccttaccaatcatgacggcagcacgccatcgaaggtcatcttagcccgtcaagactcaaccccgggaaaagtctttctgacaacccctgacgctgctggggtcaatcagctgtttttcacaacaccagacctgagcgctcagcacctacagctgctcactgacaactctcctgatcaggggcccaacaaagttttcgatctatgcgtggtctgtggtgacaaggctagtggaaggcattacggcgccgtaacatgcgaaggatgcaagggtttctttaaacgatctatcagaaagaatctagtgtactcatgtagaggatctaaggactgtatcattaacaaacatcataggaatcggtgccagtactgccgtctccagaggtgcatagccttcggaatgaaacaggactccgtccaatgtgagagaaagccaattgaggtttcacgggagaaatcttcgaactgtgccgcatctactgagaagatctacattaggaaagatctgcggtctccattaacggccactcctacattcgtgaccgattctgaatctactcggtcaacagggctgctggattcaggcatgttcatgaacatacatccctcaggcgtcaagacagaaagtgccgtgttgatgacatctgacaaagctgagagctgtcagggagaccttagcactctggcaaatgtggtgacgagtttagccaacctggggaagacgaaggacctgagccagaacagcaatgagatgagcatgatcgagagcctgtccaatgatgacacatcactgtgcgagttccaggagatgcagactaacggcgatgtcagtagggcctttgatacactcgccaaagctcttaatcctggggagagtaccgcctgccaatcttccgtcgcggggatggagggatctgttcacttgattaccggagattctagcatcaactatacggaaaaggaaggtcccctgttgagcgattctcacgttgctttcagactgaccatgccatctcctatgccggagtatctcaatgtccattacatcggggagtccgcatctaggctactttttctgtctatgcactgggcacttagcataccctcttttcaagctcttgggcaggagaatagcatctctttggtcaaggcttactggaatgagttgtttactctcggactcgcccagtgctggcaagtaatgaacgtggccaccatcctcgctaccttcgtaaattgcctgcacaatagccttcagcaggatgctaaagtgattgccgccctgatccattttacgaggcgtgccatcacggacctgtag

SEQ ID NO: 44816 - DNA, 1452 bp, Artificial Sequence
  derived and/or modified sequence
atggccactatcgaagagatcgcccatcagattatcgaacagcagatgggcgaaatcgtgactgagcaacaaaccgggcagaagatccagatcgttacagcactggatcataatacccagggaaaacaatttatactaaccaaccacgatggatcaacaccctcgaaagtaatcctggctcggcaggatagtactcctggaaaagtgtttctgaccacaccagatgcagcaggcgtgaaccaactttttttcaccactcccgatctttctgcccagcacttacagctgcttacggacaattcccccgaccagggacccaacaaagtgttcgacttgtgtgttgtttgcggtgataaagcttctggcagacactacggggcagtaacttgtgaggggtgcaaaggcttttttaaacggtccatccggaaaaatctggtctacagttgtcggggatcaaaagattgtataataaataagcaccacagaaaccgatgtcagtactgtcgtttgcagaggtgtattgcatttggcatgaagcaagacagtgtacaatgcgaacgcaaaccaattgaggtgtctcgagagaagtcatccaactgtgccgcatccacagagaaaatctatatccgcaaagatttaagatccccactcacagccactcctaccttcgtcacggatagcgaatcaactaggagtactggtttgcttgatagtggaatgttcatgaatatccatccttctggagtgaagaccgagagcgcagtgttaatgacgagcgacaaggccgagagctgccagggtgacctatctacacttgccaacgtcgttacctctcttgctaatcttggaaagactaaagacttgtctcagaacagtaacgaaatgtcaatgattgagagtttgagcaacgacgacacaagcctctgcgaattccaagagatgcaaaccaacggcgacgtgagcagggcctttgacacacttgccaaggctttgaatccgggtgaaagcacagcatgtcagagcagcgtggctggaatggaaggctctgtccatctgatcacaggagactcaagcataaactatacagagaaggagggacccttactgtcagacagccatgtcgcatttcggctcacaatgccctcacccatgcccgaatatcttaacgttcactatatcggcgagtccgctagcaggttgctatttcttagtatgcattgggctctaagcattccctctttccaggctttggggcaggagaactctatcagtctcgtgaaagcatattggaacgagctgttcactcttggcctggcccagtgttggcaggtcatgaacgtggctactatcctcgctaccttcgtcaactgtctccataactctttgcagcaggatgcaaaggtgattgctgctttgattcatttcacgaggcgcgctattaccgatttgtag

SEQ ID NO: 44817 - DNA, 1452 bp, Artificial Sequence
  derived and/or modified sequence
atggccaccatcgaggagatcgcccaccagatcatcgagcagcagatgggcgagatcgtgaccgagcagcagaccggccagaagatccagatcgtgaccgccctggaccacaacacccagggcaagcagttcatcctgaccaaccacgacggcagcacccccagcaaggtgatcctggccagacaggacagcacccccggcaaggtgttcctgaccacccccgacgccgccggcgtgaaccagctgttcttcaccacccccgacctgagcgcccagcacctgcagctgctgaccgacaacagccccgaccagggccccaacaaggtgttcgacctgtgcgtggtgtgcggcgacaaggccagcggcagacactacggcgccgtgacctgcgagggctgcaagggcttcttcaagagaagcatcagaaagaacctggtgtacagctgcagaggcagcaaggactgcatcatcaacaagcaccacagaaacagatgccagtactgcagactgcagagatgcatcgccttcggcatgaagcaggacagcgtgcagtgcgagagaaagcccatcgaggtgagcagagagaagagcagcaactgcgccgccagcaccgagaagatctacatcagaaaggacctgagaagccccctgaccgccacccccaccttcgtgaccgacagcgagagcaccagaagcaccggcctgctggacagcggcatgttcatgaacatccaccccagcggcgtgaagaccgagagcgccgtgctgatgaccagcgacaaggccgagagctgccagggcgacctgagcaccctggccaacgtggtgaccagcctggccaacctgggcaagaccaaggacctgagccagaacagcaacgagatgagcatgatcgagagcctgagcaacgacgacaccagcctgtgcgagttccaggagatgcagaccaacggcgacgtgagcagagccttcgacaccctggccaaggccctgaaccccggcgagagcaccgcctgccagagcagcgtggccggcatggagggcagcgtgcacctgatcaccggcgacagcagcatcaactacaccgagaaggagggccccctgctgagcgacagccacgtggccttcagactgaccatgcccagccccatgcccgagtacctgaacgtgcactacatcggcgagagcgccagcagactgctgttcctgagcatgcactgggccctgagcatccccagcttccaggccctgggccaggagaacagcatcagcctggtgaaggcctactggaacgagctgttcaccctgggcctggcccagtgctggcaggtgatgaacgtggccaccatcctggccaccttcgtgaactgcctgcacaacagcctgcagcaggacgccaaggtgatcgccgccctgatccacttcaccagaagagccatcaccgacctgtag

SEQ ID NO: 44818 - protein, 483 aa, Artificial Sequence
  derived and/or modified sequence
MTTLAGAVPRMMRPGPGQNYPRSGFPLEVSTPLGQGRVNQLGGVFINGRPLPNHIRHKIVEMAHHGIRPCVISRQLRVSHGCVSKILCRYQETGSIRPGAIGGSKPKVTTPDVEKKIEEYKRENPGMFSWEIRDKLLKDAVCDRNTVPSVSSISRILRSKFGKGEEEEADLERKEAEESEKKAKHSIDGILSERASAPQSDEGSDIDSEPDLPLKRKQRRSRTTFTAEQLEELERAFERTHYPDIYTREELAQRAKLTEARVQVWFSNRRARWRKQAGANQLMAFNHLIPGGFPPTAMPTLPTYQLSETSYQPTSIPQAVSDPSSTVHRPQPLPPSTVHQSTIPSNPDSSSAYCLPSTRHGFSSYTDSFVPPSGPSNPMNPTIGNGLSPQVMGLLTNHGGVPHQPQTDYALSPLTGGLEPTTTVSASCSQRLDHMKSLDSLPTSQSYCPPTYSTTGYSMDPVTGYQYGQYGQSAFHYLKPDIA

SEQ ID NO: 44819 - DNA, 1452 bp, Artificial Sequence
  derived and/or modified sequence
atgacaaccttagccggagcggtgccaagaatgatgagacccggcccaggccagaactaccccaggagtggtttccctcttgaggtgtcgactccactgggacagggtcgagtcaatcagctgggtggcgtcttcatcaacggccgaccgctgcctaaccatatccgacataagattgtcgaaatggcacatcacggcatccgcccttgcgtgatttccaggcagctgagagtatcacacgggtgtgtttcaaaaatcctgtgtcgttaccaagagacaggttcgatacgccccggggctattggtggtagtaagccaaaagtcactacacctgatgtagaaaaaaagatcgaggagtataagcgcgaaaatccaggcatgttttcttgggagatcagagacaagttacttaaagatgcagtgtgcgacaggaatacagttccctccgtatcaagcatatcgcgcatcctgcgaagtaagttcggcaagggcgaagaggaagaggctgatctcgagcgcaaagaagcagaggagtctgaaaagaaagccaagcactccatcgatggcattctgagtgagagagcttccgcacctcagtcggacgaaggatccgatatcgatagcgaaccagacctcccactgaagagaaagcagaggaggtccagaaccaccttcacagccgaacagttggaagaactggagcgtgcgtttgagaggactcactacccagacatctatacccgagaggaacttgcgcagagagcgaaactcacggaagcaagggtgcaagtgtggttctccaatcgcagagcgcggtggaggaagcaagccggcgccaaccaactaatggcctttaaccacctgatccctggtggctttccaccaaccgccatgccaactctacctacctaccagctcagcgaaacatcatatcagccaaccagcataccacaagccgtgagcgacccatcctccacagtccatcgccctcagcctcttcctccaagtaccgtgcatcagagtacaataccgtctaatccggatagctcatccgcttattgtctcccctctactaggcatggtttctcatcatacacagattcttttgttcccccttcaggtcctagcaatcccatgaaccccaccatcggaaatggcctttctccacaagtgatggggcttctcaccaaccacggtggggtacctcatcagcctcagaccgattacgccttatccccgttgactgggggcctagagccgacaacaactgtttccgcaagctgttcccagcgactggaccatatgaagagtctggacagcctccctacctcccaaagctattgccccccaacgtactcaactacaggttactctatggaccctgtgacagggtatcagtacggccaatatgggcaatcagcttttcactacctgaagcctgatattgcctag

SEQ ID NO: 44820 - DNA, 1452 bp, Artificial Sequence
  derived and/or modified sequence
atgaccaccctggccggggctgtgcccaggatgatgaggcctggccctggccagaactaccccaggagcggcttccccctggaggtgtccacccccctgggccagggccgggtgaaccagctgggcggcgtcttcatcaatggccggcccctgcccaaccacatccgccacaagatcgtggagatggcccaccacggcatccggccctgcgtcatcagccggcagctgcgggtgagccacggctgtgtgtccaagatcctgtgccgctaccaggagaccggcagcatccggcctggggccatcggcggcagcaagcccaaggtgaccaccccagatgtggagaagaagattgaggagtacaagagagaaaatcctggcatgttctcctgggagatccgggacaagctgctgaaggatgctgtgtgtgacaggaacacagtgcccagcgtgagcagcatcagccgcatcctgcggagcaagtttggaaaaggagaggaggaggaggccgacctggagaggaaggaggccgaggagagcgagaagaaggccaagcacagcattgatggcatcctgtctgagcgggccagcgccccccagagtgatgagggcagtgacatcgacagcgagccagacctgcccctgaagaggaagcagaggaggagcaggaccaccttcaccgctgagcagctggaggagctggagcgggcctttgagaggacccactacccagacatctacacccgggaggagctggcccagagggccaagctgacagaggcccgggtgcaggtgtggttcagcaacagaagagcccgctggaggaagcaggccggggccaaccagctgatggccttcaaccacctgatccctgggggcttccccccaacagccatgcccaccctgcccacctaccagctgtctgagaccagctaccagcccaccagcatcccccaggccgtgtctgaccccagcagcacagtgcaccggccccagcccctgccccccagcacagtgcaccagagcaccatccccagcaacccagacagcagcagcgcctactgcctgcccagcaccaggcatggcttcagcagctacacagacagctttgtgcccccatctggccccagcaaccccatgaaccccaccatcggaaatggcctgagcccccaggtgatgggcctgctgaccaaccacggcggcgtgccccaccagccccagacagattatgccctgagccccctgactggaggcctggagcccaccaccaccgtgtctgccagctgcagccagaggctggaccacatgaagagcctggacagcctgcccaccagccagagctactgcccccccacctacagcaccaccggctacagcatggaccctgtgacaggctaccagtatggccagtatggccagagcgccttccactacctgaagccagacatcgcctag

SEQ ID NO: 44821 - DNA, 1452 bp, Artificial Sequence
  derived and/or modified sequence
atgaccaccctggccggcgccgtgccccggatgatgcggcccggccccggacaaaattatccacgctccggcttccccttggaagtgtccacccccctgggtcagggacgggtgaaccagttggggggagtcttcattaacggccgccccctacccaaccacatcagacataagattgtcgagatggctcaccatgggatcagaccatgtgttatttcccggcaacttagagtcagtcatggttgcgtgtcaaaaatactgtgcagataccaggagacaggatcaataaggccaggcgctatcggcgggtcgaaacctaaagtcactacccctgatgtcgaaaaaaaaatcgaggagtacaaacgggagaaccccggcatgttctcttgggagatcagagacaaattgctgaaagacgccgtgtgcgatcgcaacaccgtgccctccgtctctagtatcagtcggatacttaggtctaagtttggaaagggcgaggaggaggaggccgacctggaaaggaaagaagctgaggaaagcgaaaagaaagcgaagcattcaattgacggtatattgagtgagcgggcatccgcccctcagagcgatgagggttccgatattgattcagagcccgatctcccccttaagcggaagcagcggagaagtagaactacgttcactgcagagcaattggaggagctggaacgtgcgtttgagagaactcattaccctgacatatatacaagagaagaactggcccaaagggccaagttgacagaagccagggtccaggtgtggttcagtaaccgacgggcccggtggcgcaaacaagccggcgctaaccagcttatggcttttaatcacttgatcccaggcggatttccacccacggctatgcctacactgcctacttaccagctcagtgagacatcctatcagcctacctccatacctcaggccgtctccgatccctcttctaccgttcatagacctcagccactcccaccctccaccgtccaccaaagcaccattccatccaaccccgacagctcttcagcttactgtttgcccagcactaggcacggattctcctcatacactgattctttcgtgcctcctagcgggcctagcaatccaatgaacccaacaataggaaacggccttagtccacaggtcatgggactcctgacaaaccacggcggtgtgcctcaccaaccccagacagactacgcactgtctcctctgaccggaggtctggaacctaccactaccgtgtccgcatcttgttcacaacgcctggatcatatgaaatccctcgactccctcccaacatcccagtcttactgccccccaacatattctaccacagggtatagtatggaccccgtgaccgggtatcaatatggtcagtatgggcaatctgcgtttcattacctcaagcccgatattgcatag

SEQ ID NO: 44822 - DNA, 1782 bp, Artificial Sequence
  derived and/or modified sequence
agtcgctggaacatttgcccagactcgtaccaaacttttccgccctgggctcgggatcctggactccggggcctccccgtcctcccctttcccgggttccagctccggcctctggactaggaaccgacagcccccctccccgcgtccctccctctctctccagccgttttggggaggggctctccacgctccggatagttcccgagggtcatccgcgccgcactcgcctttccgtttcgccttcacctggatataatttccgagcgaagctgcccccaggatgaccacgctggccggcgctgtgcccaggatgatgcggccgggcccggggcagaactacccgcgtagcgggttcccgctggaagtgtccactcccctcggccagggccgcgtcaaccagctcggcggtgtttttatcaacggcaggccgctgcccaaccacatccgccacaagatcgtggagatggcccaccacggcatccggccctgcgtcatctcgcgccagctgcgcgtgtcccacggctgcgtctccaagatcctgtgcaggtaccaggagactggctccatacgtcctggtgccatcggcggcagcaagcccaaggtgacaacgcctgacgtggagaagaaaattgaggaatacaaaagagagaacccgggcatgttcagctgggaaatccgagacaaattactcaaggacgcggtctgtgatcgaaacaccgtgccgtcagtgagttccatcagccgcatcctgagaagtaaattcgggaaaggtgaagaggaggaggccgacttggagaggaaggaggcagaggaaagcgagaagaaggccaaacacagcatcgacggcatcctgagcgagcgagcctcagcaccccaatcagatgaaggctctgatattgactctgaaccagatttaccactaaagaggaaacagcgcagaagccgaaccaccttcacagcagaacagctggaggaactggagcgtgcttttgagagaactcattaccctgacatttatactagggaggaactggcccagagggcgaagctcaccgaggcccgagtacaggtctggtttagcaaccgccgtgcaagatggaggaagcaagctggggccaatcaactgatggctttcaaccatctcattcccggggggttccctcccactgccatgccgaccttgccaacgtaccagctgtcggagacctcttaccagcccacatctattccacaagctgtgtcagatcccagcagcaccgttcacagacctcaaccgcttcctccaagcactgtacaccaaagcacgattccttccaacccagacagcagctctgcctactgcctccccagcaccaggcatggattttccagctatacagacagctttgtgcctccgtcggggccctccaaccccatgaaccccaccattggcaatggcctctcacctcaggtaatgggactcctgaccaaccacggtggggtacctcatcagccccagactgattacgcgctctcccctctcaccgggggtctggaacctaccaccacggtgtcggccagctgcagtcagagactagaccatatgaagagcttggacagtctgccaacatctcagtcctactgtccacccacctatagcaccacaggctacagtatggaccctgtcacaggctaccaatatgggcagtatggacaaagtgcctttcattatctcaagccagatatcgcgtaagtgaactgtccacttggagctaaaactggccctgtttctggtcttcgcag

SEQ ID NO: 44823 - DNA, 1452 bp, Artificial Sequence
  derived and/or modified sequence
atgacaactctggcaggagctgttccgaggatgatgcgccctggtccaggccaaaactaccctaggagcggattcccacttgaagtctccacaccgttggggcagggcagagttaaccagctgggaggggtttttatcaatggaaggccactgccaaaccacattcgacacaagatcgtagagatggcacaccacggtatccgaccttgcgtgatcagcagacagcttagggtcagtcatgggtgcgtgagcaaaattctatgcagatatcaggaaactggctctatacggcctggggcaatcggtggctctaagcccaaggtgacaacccccgacgtggagaagaaaatcgaggagtacaaacgagagaatccgggtatgttctcctgggagatacgcgataaactgttaaaggacgctgtgtgcgacaggaatacagtacccagtgtgagcagcatctcccgcatactgaggagcaagttcggcaaaggagaggaggaggaggcagacctggaacggaaggaggctgaggagtccgaaaagaaggccaaacatagtatagatggcattctcagtgagagagcgtctgcgccacagtcagatgagggcagcgacatcgacagcgagcccgacttgcctttgaaacggaagcagcgcaggtctcgaacgactttcaccgctgagcagctggaagaacttgagagggccttcgagaggacccattaccccgatatctacacacgggaagaactcgcccagcgcgctaaactgactgaagcgagagtgcaggtctggttttctaatcggagggctcgctggcgtaagcaggcaggcgcaaaccagcttatggcgtttaatcacctcatacccggaggctttcccccaactgctatgccaaccctgcctacataccagttaagtgaaacatcgtatcagcccacctcaatcccacaggccgtctccgacccatccagcaccgtgcatcgcccacaacccctccctccaagcactgtgcatcagtccaccattcctagcaatccagattctagctctgcctactgccttcccagtacccgccacggattctcttcctataccgattcatttgtgccaccttcaggtccctccaacccaatgaatcctacaattggtaacggattgtcgcctcaggtcatgggtctgctcaccaatcatggcggtgttccacatcagcctcagaccgattacgccctctcccccctgacggggggactggaaccaaccaccactgtgtcagcctcctgcagccagcggctagatcatatgaagtcactggatagtcttcctacaagtcaatcttattgtcctccgacctactctacgaccggatacagcatggaccccgtgactggttaccagtacgggcagtatgggcagtctgctttccattacctgaagcctgacatagcgtag

SEQ ID NO: 44824 - DNA, 1452 bp, Artificial Sequence
  derived and/or modified sequence
atgaccaccctggccggcgccgtgcccagaatgatgagacccggccccggccagaactaccccagaagcggcttccccctggaggtgagcacccccctgggccagggcagagtgaaccagctgggcggcgtgttcatcaacggcagacccctgcccaaccacatcagacacaagatcgtggagatggcccaccacggcatcagaccctgcgtgatcagcagacagctgagagtgagccacggctgcgtgagcaagatcctgtgcagataccaggagaccggcagcatcagacccggcgccatcggcggcagcaagcccaaggtgaccacccccgacgtggagaagaagatcgaggagtacaagagagagaaccccggcatgttcagctgggagatcagagacaagctgctgaaggacgccgtgtgcgacagaaacaccgtgcccagcgtgagcagcatcagcagaatcctgagaagcaagttcggcaagggcgaggaggaggaggccgacctggagagaaaggaggccgaggagagcgagaagaaggccaagcacagcatcgacggcatcctgagcgagagagccagcgccccccagagcgacgagggcagcgacatcgacagcgagcccgacctgcccctgaagagaaagcagagaagaagcagaaccaccttcaccgccgagcagctggaggagctggagagagccttcgagagaacccactaccccgacatctacaccagagaggagctggcccagagagccaagctgaccgaggccagagtgcaggtgtggttcagcaacagaagagccagatggagaaagcaggccggcgccaaccagctgatggccttcaaccacctgatccccggcggcttcccccccaccgccatgcccaccctgcccacctaccagctgagcgagaccagctaccagcccaccagcatcccccaggccgtgagcgaccccagcagcaccgtgcacagaccccagcccctgccccccagcaccgtgcaccagagcaccatccccagcaaccccgacagcagcagcgcctactgcctgcccagcaccagacacggcttcagcagctacaccgacagcttcgtgccccccagcggccccagcaaccccatgaaccccaccatcggcaacggcctgagcccccaggtgatgggcctgctgaccaaccacggcggcgtgccccaccagccccagaccgactacgccctgagccccctgaccggcggcctggagcccaccaccaccgtgagcgccagctgcagccagagactggaccacatgaagagcctggacagcctgcccaccagccagagctactgcccccccacctacagcaccaccggctacagcatggaccccgtgaccggctaccagtacggccagtacggccagagcgccttccactacctgaagcccgacatcgcctag

SEQ ID NO: 44825 - protein, 420 aa, Artificial Sequence
  derived and/or modified sequence
METLSSEESCDSFDSLESGKQQDVRFHSKYFTEELRRIFIEDTDSETEDFAGFTQSDLNGKTNPEVMVVESDLSDDGKASLVSEEEEDEEEDKATPRRSRSRRSSIGLRVAFQFPTKKLANKPDKNSSSEQLFSSARLQNEKKTILERKKDCRQVIQREDSTSESEDDSRDESQESSDALLKRTMNIKENKAMLAQLLAELNSMPDFFPVRTPTSASRKKTVRRAFSEGQITRRMNPTRSARPPEKFALENFTVSAAKFAEEFYSFRRRKTIGGKCREYRRRHRISSFRPVEDITEEDLENVAITVRDKIYDKVLGNTCHQCRQKTIDTKTVCRNQGCCGVRGQFCGPCLRNRYGEDVRSALLDPDWVCPPCRGICNCSYCRKRDGRCATGILIHLAKFYGYDNVKEYLESLQKELVEDN

SEQ ID NO: 44826 - protein, 96 aa, Artificial Sequence
  derived and/or modified sequence
METLSSEESCDSFDSLESGKQQDVRFHSKYFTEELRRIFIEDTDSETEDFAGFTQSDLNGKTNPEVMVVESDLSDDGKASLVSEEEEDEEEDKATP

SEQ ID NO: 44827 - DNA, 1263 bp, Artificial Sequence
  derived and/or modified sequence
atggaaactttgagttccgaggaaagctgcgacagttttgactcactcgagtctggcaagcagcaagatgtgcgattccatagcaaatacttcactgaagagttgcggcggatttttattgaggataccgattcagaaacggaggattttgccggattcacacagagcgaccttaatggcaaaactaacccagaggtcatggtggtcgagtccgacctgtcagatgacgggaaagcctctctcgtctccgaagaggaggaggacgaagaggaagataaggcgaccccgcgaaggtcccggtccaggcgctcgtctatcggcctaagggtggcctttcagtttccaactaaaaaactcgcaaacaagcctgacaaaaactcttcctccgagcagcttttctcctcagcccgattgcaaaacgaaaaaaaaacaatcctggaaaggaagaaggattgtcggcaagtgatacagagagaagacagtacgtctgagtctgaagatgactcccgggacgaaagtcaggagagctcagacgcattgctgaagcgaacgatgaatatcaaagagaataaagccatgttggctcagttattggctgagttaaactccatgcccgacttttttcccgtgcgtactcccacatccgcatctcgaaaaaaaaccgtgcgcagagccttctccgagggtcagattacacgccgcatgaatcctacccgatcagcacggcctcccgaaaagttcgcccttgagaactttactgtgtctgccgccaaattcgctgaggaattctacagctttcgccgcaggaaaaccatcggtggcaaatgtcgcgagtacagaaggcgacacagaatctcatcctttagacccgtcgaagatatcaccgaggaggacctggagaacgtcgcgatcacagtgagggacaaaatctatgataaagtactcggcaatacttgtcaccagtgccgtcaaaaaacaattgacacaaaaaccgtttgtaggaatcaggggtgttgtggcgtgagaggacagttctgcggaccgtgcttgaggaaccgttacggcgaggatgtccgatccgccttactggaccctgactgggtgtgcccaccttgcaggggcatctgcaattgtagttattgtcgcaagagagacggcagatgcgccacggggatcttgattcatctagccaaattctatggctacgacaatgtgaaggaatacctggaaagtctccagaaagaactagtcgaggataactag

SEQ ID NO: 44828 - DNA, 291 bp, Artificial Sequence
  derived and/or modified sequence
atggagaccttatcttccgaggaatcttgtgacagcttcgactccctagagtcaggtaagcagcaggacgtccgctttcactctaagtactttactgaggagctccgacggatttttatcgaggataccgattccgaaacagaggatttcgcgggtttcacccagtcagatttaaacgggaagactaatcccgaggtgatggttgtggagagcgacttaagtgacgatgggaaggcttcgcttgtctcagaagaagaggaggacgaagaagaagataaagcaactccctag

SEQ ID NO: 44829 - DNA, 1263 bp, Artificial Sequence
  derived and/or modified sequence
atggagaccctgagcagcgaggagagctgtgacagctttgacagcctggagagcggcaagcagcaggatgtgcgcttccacagcaagtacttcacagaggagctgcggcgcatcttcatcgaggacacagattctgaaacagaggactttgctggcttcacccagagcgacctgaatggcaagaccaaccctgaggtgatggtggtggagagtgacctgagtgatgatggcaaggccagcctggtgtctgaggaggaggaggatgaggaggaggacaaggccaccccaagaagaagccgcagccgccgcagcagcatcggcctgcgggtggccttccagttccccaccaagaagctggccaacaagccagacaagaacagcagcagcgagcagctgttcagcagcgcccggctgcagaatgagaagaagaccatcctggagaggaagaaggactgccggcaggtgatccagcgggaggacagcaccagcgagagtgaagatgacagcagagatgagagccaggagagcagtgatgccctgctgaagaggaccatgaacatcaaggagaacaaggccatgctggcccagctgctggccgagctgaacagcatgccagacttcttccctgtgaggacccccaccagcgccagcaggaagaagacagtgagaagagccttcagcgagggccagatcaccaggaggatgaaccccaccaggtctgcccggcccccagagaagtttgccctggagaacttcaccgtgtctgctgccaagtttgctgaggagttctacagcttcagaagaaggaagaccatcggcggcaaatgtcgggagtacagaagaagacaccgcatcagcagcttccggcctgtggaggacatcacagaggaggacctggagaatgtggccatcaccgtgcgggacaagatctatgacaaggtgctgggcaacacctgccaccagtgccggcagaagaccatcgacaccaagacagtgtgcaggaaccagggctgctgcggcgtgcggggccagttctgtggcccctgcctgaggaaccgctacggggaggatgtgcgcagcgccctgctggaccctgactgggtgtgccccccctgccggggcatctgcaactgcagctactgcaggaagagagatggccgctgtgccaccggcatcctgatccacctggccaagttctacggctatgacaacgtgaaggagtacctggagagcctgcagaaggagctggtggaggacaactag

SEQ ID NO: 44830 - DNA, 291 bp, Artificial Sequence
  derived and/or modified sequence
atggagaccctgagcagcgaggagagctgtgacagctttgacagcctggagagcggcaagcagcaggatgtgcgcttccacagcaagtacttcacagaggagctgcggcgcatcttcatcgaggacacagattctgaaacagaggactttgctggcttcacccagagcgacctgaatggcaagaccaaccctgaggtgatggtggtggagagtgacctgagtgatgatggcaaggccagcctggtgtctgaggaggaggaggatgaggaggaggacaaggccaccccctag

SEQ ID NO: 44831 - DNA, 1263 bp, Artificial Sequence
  derived and/or modified sequence
atggagaccctgagcagcgaggagagctgcgacagcttcgacagcctagagagcgggaaacagcaggacgtaaggtttcatagtaagtattttaccgaagaactgcgtagaatatttatcgaggacacggatagcgaaacggaagactttgctgggttcacccaatcagaccttaacggcaagacaaacccagaagttatggttgtggaaagcgacctgtcggacgacggcaaagcaagtttggtgtctgaggaagaggaagacgaagaggaagataaggccactcctcgcagatcccgatcaagacgcagctccatagggcttcgtgtggcttttcagtttcccacaaagaagctcgcgaataaacctgataagaattctagtagcgaacaacttttttcatccgcacgtttacaaaacgagaagaagacaatacttgagaggaaaaaagactgtagacaggtgattcagcgcgaggattctacaagtgaatccgaagacgattctagagatgaaagtcaggagagctcagatgccttgctgaagcggaccatgaacattaaagaaaataaagccatgctcgcccaactgttagccgagttaaacagcatgcccgattttttccccgtgaggacgcctaccagtgcctctagaaagaagaccgtgagaagagcctttagtgagggccaaattacccgtaggatgaaccccacacgaagtgccagaccgcccgaaaaattcgctcttgaaaactttacagtgtcagccgcaaagttcgctgaggaattctactctttcaggcgccgcaaaacgatcggaggaaagtgcagggagtatcggcgaagacacagaatatcctctttccggccagtggaagacatcaccgaagaagatctggaaaacgttgccatcaccgtgagggataaaatctatgataaggtcctgggcaacacgtgccaccagtgcaggcagaagaccatagatactaaaaccgtctgtcgcaaccagggctgctgtggcgtccggggccaattttgcgggccctgcctccgcaatcgctacggagaggatgtgagatcagctctgctggaccccgattgggtgtgcccgccttgtcgcggcatttgcaactgttcgtactgtagaaagcgtgacgggcgttgcgccactggcattctgatccatcttgcaaagttctatggctatgataacgtcaaggaatacctggagagcctacagaaggaactggttgaagataactag

SEQ ID NO: 44832 - DNA, 291 bp, Artificial Sequence
  derived and/or modified sequence
atggagaccctgagcagcgaggagagctgcgacagcttcgacagcctggaatctggaaagcaacaggacgtgcgcttccatagcaagtatttcacagaggaattgaggagaatttttatcgaagatacagactctgaaacagaagattttgccggtttcacccagtccgacttgaacggaaagaccaaccccgaagtgatggtggtggagagcgacttaagcgatgacggcaaggcatcgctggtgagtgaggaagaagaggacgaagaagaggataaggccacgccatag

SEQ ID NO: 44833 - DNA, 1263 bp, Artificial Sequence
  derived and/or modified sequence
atggaaaccttgtctagtgaggaatcgtgcgattcatttgattctttagaatcaggcaaacaacaggatgtgaggtttcacagtaaatactttactgaggagctcagacgcatattcatcgaggataccgactccgagactgaggattttgccggtttcacacaatcggacctaaatgggaaaactaatcctgaggtgatggtagtggaaagcgatctttccgatgatgggaaagcatctcttgtgtcagaagaagaggaggacgaggaggaagataaggcgaccccgcgaagaagtcggagccgcagatcctccatcggcctaagggtggcctttcagtttccaactaaaaagttagccaacaagccagacaaaaatagcagttccgaacagttattttcctcggcaagactgcagaatgagaagaaaacaatcctggagagaaagaaagactgtagacaagtgattcagcgggaagacagcacctctgaatccgaagacgattcaagagatgaaagccaggaaagctctgacgccctgctgaaaagaactatgaatattaaggaaaacaaagctatgttagcccaactgcttgcagaactgaattctatgcccgatttttttccagtaagaacccctacgagtgcttctcgtaaaaagactgtccgccgtgcttttagtgaaggccagatcacccggaggatgaatcctacacgatccgccagacccccagaaaaattcgctctggaaaactttaccgtgtctgccgctaaattcgctgaagaattctatagcttcagaaggcgcaagacaattggaggcaagtgccgcgaatatcggagacggcaccgcatctcaagctttcgccctgtggaagatatcacggaggaagatctcgagaatgtggcaatcaccgtccgcgacaaaatttatgataaggttctgggcaatacttgtcatcagtgcagacagaagaccatcgatacaaaaacagtgtgccgcaaccagggctgttgcggcgttagaggccagttctgcggtccctgtttgcgcaatagatacggagaggatgtcaggtcagctctcttggaccctgattgggtgtgtcccccttgccgtggcatctgtaattgcagttattgtcggaagagggacgggagatgtgcgacgggcatcctcatccacctggccaaattctatgggtacgacaacgtcaaggaatatttagaaagtctacagaaggaattggtcgaagacaattag

SEQ ID NO: 44834 - DNA, 291 bp, Artificial Sequence
  derived and/or modified sequence
atggaaaccctgagttctgaagagtcctgcgacagcttcgattccctagaaagtgggaagcagcaggacgtgcgctttcattccaagtatttcaccgaggagctccgccgaatttttatagaagacaccgacagcgagacggaagatttcgccggtttcactcagtcagacttaaatggaaaaacaaatcccgaggtgatggttgtcgagtctgatttgtccgacgacggcaaggcatccttggtctccgaggaggaagaggacgaggaggaggacaaagccacaccctag

SEQ ID NO: 44835 - DNA, 1263 bp, Artificial Sequence
  derived and/or modified sequence
atggagaccctgagcagcgaggagagctgcgacagcttcgacagcctggagagcggcaagcagcaggacgtgagattccacagcaagtacttcaccgaggagctgagaagaatcttcatcgaggacaccgacagcgagaccgaggacttcgccggcttcacccagagcgacctgaacggcaagaccaaccccgaggtgatggtggtggagagcgacctgagcgacgacggcaaggccagcctggtgagcgaggaggaggaggacgaggaggaggacaaggccacccccagaagaagcagaagcagaagaagcagcatcggcctgagagtggccttccagttccccaccaagaagctggccaacaagcccgacaagaacagcagcagcgagcagctgttcagcagcgccagactgcagaacgagaagaagaccatcctggagagaaagaaggactgcagacaggtgatccagagagaggacagcaccagcgagagcgaggacgacagcagagacgagagccaggagagcagcgacgccctgctgaagagaaccatgaacatcaaggagaacaaggccatgctggcccagctgctggccgagctgaacagcatgcccgacttcttccccgtgagaacccccaccagcgccagcagaaagaagaccgtgagaagagccttcagcgagggccagatcaccagaagaatgaaccccaccagaagcgccagaccccccgagaagttcgccctggagaacttcaccgtgagcgccgccaagttcgccgaggagttctacagcttcagaagaagaaagaccatcggcggcaagtgcagagagtacagaagaagacacagaatcagcagcttcagacccgtggaggacatcaccgaggaggacctggagaacgtggccatcaccgtgagagacaagatctacgacaaggtgctgggcaacacctgccaccagtgcagacagaagaccatcgacaccaagaccgtgtgcagaaaccagggctgctgcggcgtgagaggccagttctgcggcccctgcctgagaaacagatacggcgaggacgtgagaagcgccctgctggaccccgactgggtgtgccccccctgcagaggcatctgcaactgcagctactgcagaaagagagacggcagatgcgccaccggcatcctgatccacctggccaagttctacggctacgacaacgtgaaggagtacctggagagcctgcagaaggagctggtggaggacaactag

SEQ ID NO: 44836 - DNA, 291 bp, Artificial Sequence
  derived and/or modified sequence
atggagaccctgagcagcgaggagagctgcgacagcttcgacagcctggagagcggcaagcagcaggacgtgagattccacagcaagtacttcaccgaggagctgagaagaatcttcatcgaggacaccgacagcgagaccgaggacttcgccggcttcacccagagcgacctgaacggcaagaccaaccccgaggtgatggtggtggagagcgacctgagcgacgacggcaaggccagcctggtgagcgaggaggaggaggacgaggaggaggacaaggccaccccctag

SEQ ID NO: 44837 - protein, 408 aa, Artificial Sequence
  derived and/or modified sequence
MELATRYQIPKEVADIFNAPSDDEEFVGFRDDVPMETLSSEESCDSFDSLESGKQVVESDLSDDGKASLVSEEEEDEEEDKATPRRSRSRRSSIGLRVAFQFPTKKLANKPDKNSSSEQLFSSARLQNEKKTILERKKDCRQVIQREDSTSESEDDSRDESQESSDALLKRTMNIKENKAMLAQLLAELNSMPDFFPVRTPTSASRKKTVRRAFSEGQITRRMNPTRSARPPEKFALENFTVSAAKFAEEFYSFRRRKTIGGKCREYRRRHRISSFRPVEDITEEDLENVAITVRDKIYDKVLGNTCHQCRQKTIDTKTVCRNQGCCGVRGQFCGPCLRNRYGEDVRSALLDPDWVCPPCRGICNCSYCRKRDGRCATGILIHLAKFYGYDNVKEYLESLQKELVEDN

SEQ ID NO: 44838 - DNA, 1227 bp, Artificial Sequence
  derived and/or modified sequence
atggagctggccacccgatatcagattcccaaagaggttgcggatatctttaacgctccatcagacgatgaagaatttgttggctttagggatgacgtgccaatggagacactcagttcggaagagagttgtgactcttttgacagcctggagtccggtaagcaggtggttgagagtgacctaagcgatgacggaaaagcgtctttggtcagcgaggaagaggaggatgaagaagaagacaaggccacccctagacgatcccgtagccgccgcagctcaatcgggctccgggtggcatttcagttccctactaagaaactagccaacaagccagataagaactcttcttctgagcaactctttagttcagctaggctgcagaacgagaagaagactattctggaaaggaagaaggattgccggcaggtcattcagcgtgaagactctacctctgagagcgaggacgattcccgagacgaaagccaggaatcctcggatgcactactgaaacggacgatgaacataaaagagaacaaagctatgcttgctcagctgctggcagaactcaactctatgccagattttttcccagtccgcacccctaccagcgcaagccgcaaaaagacagtaagacgtgcctttagcgagggacagattacacgccggatgaacccaacaagaagtgccagaccacctgaaaaattcgccctcgaaaatttcacagtcagcgctgccaagttcgcagaagagttttactcctttcgccggcgcaagaccattgggggcaagtgcagggaatacagaagaaggcaccgtatttcctcttttaggcccgtcgaagacataaccgaggaggacctggaaaatgttgctattaccgtccgggataagatctacgataaggtcctgggtaacacatgtcatcagtgtcgccagaaaaccatagatacaaagaccgtgtgccgaaatcagggctgctgcggagtaaggggccagttttgcggtccgtgtctgagaaatcgctatggggaggatgtgcggagcgcactcctggatcccgactgggtctgtccaccctgccgggggatttgtaattgcagttactgccgaaagagggatggcaggtgtgccaccggaattcttatccacttggctaagttctacgggtacgacaatgtgaaggaatatctggaatcattgcagaaggagctcgtggaagataactag

SEQ ID NO: 44839 - DNA, 1227 bp, Artificial Sequence
  derived and/or modified sequence
atggagctggccacccgctaccagatccccaaggaggtggccgacatcttcaatgcccccagtgatgatgaggagtttgtgggcttcagagatgatgtgcccatggagaccctgagcagcgaggagagctgtgacagctttgacagcctggagagcggcaagcaggtggtggagagtgacctgagtgatgatggcaaggccagcctggtgtctgaggaggaggaggatgaggaggaggacaaggccaccccaagaagaagccgcagccgccgcagcagcatcggcctgcgggtggccttccagttccccaccaagaagctggccaacaagccagacaagaacagcagcagcgagcagctgttcagcagcgcccggctgcagaatgagaagaagaccatcctggagaggaagaaggactgccggcaggtgatccagcgggaggacagcaccagcgagagtgaagatgacagcagagatgagagccaggagagcagtgatgccctgctgaagaggaccatgaacatcaaggagaacaaggccatgctggcccagctgctggccgagctgaacagcatgccagacttcttccctgtgaggacccccaccagcgccagcaggaagaagacagtgagaagagccttcagcgagggccagatcaccaggaggatgaaccccaccaggtctgcccggcccccagagaagtttgccctggagaacttcaccgtgtctgctgccaagtttgctgaggagttctacagcttcagaagaaggaagaccatcggcggcaaatgtcgggagtacagaagaagacaccgcatcagcagcttccggcctgtggaggacatcacagaggaggacctggagaatgtggccatcaccgtgcgggacaagatctatgacaaggtgctgggcaacacctgccaccagtgccggcagaagaccatcgacaccaagacagtgtgcaggaaccagggctgctgcggcgtgcggggccagttctgtggcccctgcctgaggaaccgctacggggaggatgtgcgcagcgccctgctggaccctgactgggtgtgccccccctgccggggcatctgcaactgcagctactgcaggaagagagatggccgctgtgccaccggcatcctgatccacctggccaagttctacggctatgacaacgtgaaggagtacctggagagcctgcagaaggagctggtggaggacaactag

SEQ ID NO: 44840 - DNA, 1227 bp, Artificial Sequence
  derived and/or modified sequence
atggagctggccacccggtaccagatccccaaggaggtggccgacatttttaacgcaccatctgatgacgaggaattcgtaggcttcagggatgacgtacctatggaaacattgagcagtgaggaatcctgtgactcttttgatagtttggagtctgggaagcaggttgttgaaagcgatttgagcgatgacggaaaggcgagtctggtgtccgaagaggaagaggacgaagaggaagataaagccactcctcgacggagccgttctagaagaagctctatcgggctacgggtggcatttcaattcccaactaaaaaattagctaacaagcccgacaaaaatagttcctcggagcaactcttcagtagcgctcgactccaaaacgaaaagaaaaccattctggagcggaagaaggactgcaggcaagttatccagagggaagattccacttctgaaagcgaggatgattctagggatgagtctcaagagagctctgacgcactgcttaagaggactatgaatatcaaagaaaataaggcaatgctggcccagctcttggccgaattaaacagtatgccggatttttttcctgtgaggacacccacatcagccagccggaagaaaacagtgaggagagcgttttccgagggacagatcactcggagaatgaacccaacccgaagcgcccgaccgcccgagaagtttgccctcgagaacttcaccgtctcagcagctaaatttgcagaggagttctactcgttccggagaagaaaaaccataggggggaagtgtcgggagtataggcggaggcatcggatttcatcgttcagacccgttgaggatattactgaggaagatctcgagaatgtggcaataactgttagggacaaaatctatgacaaggtgctgggcaacacttgccatcagtgccgtcaaaagacgattgacaccaaaaccgtctgcagaaaccagggctgttgcggagtgaggggccaattttgtggcccctgcctcaggaatcgctatggggaggacgtgcggagtgcacttctggaccccgattgggtttgccctccttgtaggggaatctgtaactgtagctactgtaggaaacgtgacggcagatgtgccactgggattctgatccatctggctaaattctacgggtacgataatgttaaggagtacctggaatccttacagaaggagctggtcgaggacaattag

SEQ ID NO: 44841 - DNA, 1227 bp, Artificial Sequence
  derived and/or modified sequence
atggagttggcaacccgctatcagattcctaaggaagtggctgacatttttaatgccccaagcgacgatgaagagttcgtcggatttagagacgacgtcccaatggaaaccctgtcatcagaagaatcttgtgattccttcgattcccttgaatctggcaagcaagtcgtcgagtccgatctatcagacgacggaaaagcaagtcttgttagcgaggaagaagaggacgaggaggaggacaaagccacccccaggcggagtaggtcccggagaagtagcataggcttgcgggttgctttccagtttcccactaagaagctggcgaacaagcccgataagaatagctctagcgagcaactcttctcgtctgcacgtctgcaaaatgaaaaaaaaaccatcctcgagcgaaaaaaagattgcagacaggttattcagagggaagatagcacctccgaaagcgaagacgacagcagagacgagtctcaggagtcgtcagacgctttgctaaagaggacaatgaatatcaaagaaaacaaggcgatgctggcccaacttctggcggagctgaatagtatgcctgactttttcccggtgcgcacgcccaccagtgcttcaaggaaaaaaaccgttagacgcgcatttagcgagggtcagattacacggcgtatgaatcccacacggagcgccagacccccagagaaattcgccctggagaactttacagtctccgccgctaaattcgccgaagaattctattcttttcgacgacggaagacaataggcggtaagtgtagggaatacaggcggagacatcggattagttcctttcgccctgttgaggacataacagaagaggatctggaaaacgtcgccataacagtgcgggacaagatctatgacaaggttctgggaaacacatgccaccaatgcagacagaagactattgatactaaaacagtatgtaggaaccaaggttgttgcggtgtgcggggacagttttgcggcccatgcttaagaaaccgatacggcgaggatgtgagaagtgcgctactcgatcctgattgggtgtgccccccatgtcgcggaatctgcaactgttcttactgcagaaagcgggatggcaggtgtgccaccggaatactaattcacctggctaagttttacggatacgacaacgtcaaggagtatcttgagagccttcaaaaagaactcgtagaggacaattag

SEQ ID NO: 44842 - DNA, 1830 bp, Artificial Sequence
  derived and/or modified sequence
gttcttggtgcgccgggccgtggtgagtccgggctcccgtggccgcgtgctgggaggagactggagcccggttaggaagaatggagttggcgactcgctaccagatccctaaagaagtggctgacatctttaacgcccccagtgatgatgaagagtttgttggcttccgagatgatgttcccatggaaaccctctcgtcagaggagagctgcgatagttttgactcactagagtcagggaaacaggtcgtggagtcagatttgagtgatgatggcaaagcatctttggtgagcgaggaagaggaagatgaagaagaagataaggctacccctagaagaagcaggtctagaagaagtagtattggtcttcgagtagcctttcagttccccaccaagaagctggccaacaaaccagataaaaacagttcttccgagcagttgttttctagcgcacgcttacagaatgagaaaaaaacaattcttgaaagaaagaaagactgtagacaggtgatacaaagggaagattctacctctgagtctgaggatgactctcgggatgagagccaggagagttcagatgctttgctgaaaaggaccatgaacatcaaggagaacaaagccatgcttgcccagttattggcggaattgaactcgatgccagatttcttcccagtacgaaccccaacctcagcttctaggaagaagacagtgaggcgggccttctcggagggacagatcacgcggcgtatgaacccaacccggagtgcgcggcctcctgagaagtttgctctagagaacttcactgtctcagccgctaaatttgcggaagagttttacagcttccgaagaaggaagacaattggggggaaatgccgggagtacagacgacgtcaccgtatatcttcttttcggccagtggaggatatcaccgaagaggacttagaaaatgttgccataactgttcgagataaaatctatgataaagttctgggtaacacgtgccatcagtgtcgacaaaagaccatcgacaccaagacagtgtgtcggaaccagggttgctgtggtgtgcgaggacagttctgtggaccatgcctgcggaaccgctatggggaggatgtcagatcggcattgctggacccggattgggtgtgtcccccctgtcgtgggatctgcaattgcagctactgtcggaagcgtgacggccgctgtgccacaggaatcctcattcatctggccaagttttatggttatgacaatgttaaggaatatctggagagcttacaaaaggagctggtagaagacaattaagaggaaaacaaacagaaccagccacctcaccatagagtactccaacaagacatgcataccattggtgcctaagaaagatttttttacagttgtgtttttatacagaaattctttgtagaaattactattttttgttaaagattgtttatatgcttacaaagatttctcaggaagacagcagagcagaggaatctatatagatgtatgcacagacctgtctgtatgctgaactttgttaaaaatatctgccagttattaaaaagcacagtttaaatggggtggggttaaagttcaggtaagtaagttagagagaaaacattgtatgatcagctcctgcacttgatctatctatctttggcttcccaaacagtaactcactccaggccaagtgtgccttagcacgagtgaccacagtttaatagaccacacacatcgtttaacctgctcttggtcattggaaatttacactgaacaaagtgcaattaactgtagaacagttttatttttattaaaacttgactga

SEQ ID NO: 44843 - DNA, 1227 bp, Artificial Sequence
  derived and/or modified sequence
atggagctggccaccagataccagatccccaaggaggtggccgacatcttcaacgcccccagcgacgacgaggagttcgtgggcttcagagacgacgtgcccatggagaccctgagcagcgaggagagctgcgacagcttcgacagcctggagagcggcaagcaggtggtggagagcgacctgagcgacgacggcaaggccagcctggtgagcgaggaggaggaggacgaggaggaggacaaggccacccccagaagaagcagaagcagaagaagcagcatcggcctgagagtggccttccagttccccaccaagaagctggccaacaagcccgacaagaacagcagcagcgagcagctgttcagcagcgccagactgcagaacgagaagaagaccatcctggagagaaagaaggactgcagacaggtgatccagagagaggacagcaccagcgagagcgaggacgacagcagagacgagagccaggagagcagcgacgccctgctgaagagaaccatgaacatcaaggagaacaaggccatgctggcccagctgctggccgagctgaacagcatgcccgacttcttccccgtgagaacccccaccagcgccagcagaaagaagaccgtgagaagagccttcagcgagggccagatcaccagaagaatgaaccccaccagaagcgccagaccccccgagaagttcgccctggagaacttcaccgtgagcgccgccaagttcgccgaggagttctacagcttcagaagaagaaagaccatcggcggcaagtgcagagagtacagaagaagacacagaatcagcagcttcagacccgtggaggacatcaccgaggaggacctggagaacgtggccatcaccgtgagagacaagatctacgacaaggtgctgggcaacacctgccaccagtgcagacagaagaccatcgacaccaagaccgtgtgcagaaaccagggctgctgcggcgtgagaggccagttctgcggcccctgcctgagaaacagatacggcgaggacgtgagaagcgccctgctggaccccgactgggtgtgccccccctgcagaggcatctgcaactgcagctactgcagaaagagagacggcagatgcgccaccggcatcctgatccacctggccaagttctacggctacgacaacgtgaaggagtacctggagagcctgcagaaggagctggtggaggacaactag

SEQ ID NO: 44844 - protein, 83 aa, Artificial Sequence
  derived and/or modified sequence
MKLLTGLVFCSLVLSVSSRSFFSFLGEAFDGARDMWRAYSDMREANYIGSDKYFHARGNYDAAKRGPGGAWAAEVISLFSAEL

SEQ ID NO: 44845 - DNA, 252 bp, Artificial Sequence
  derived and/or modified sequence
atgaaactgctcaccgggctggtgttttgctcgctcgtcttgtctgtgagctcacgctcctttttcagcttccttggcgaggcgtttgacggtgcccgtgatatgtggcgggcctactctgatatgagggaagctaattatatcggctccgacaagtatttccatgcaaggggaaattatgatgcggcaaagagaggcccaggaggcgcttgggccgccgaggtcatcagtctgttttcagctgaactttag

SEQ ID NO: 44846 - DNA, 252 bp, Artificial Sequence
  derived and/or modified sequence
atgaagctgctgaccggcctggtgttctgcagcctggtgctgtctgtgagcagccgctccttcttctccttcctgggggaggcctttgatggagcccgggacatgtggagggcctacagcgacatgagggaggccaactacatcggcagtgacaagtacttccacgcccggggcaactatgatgctgccaagaggggccctggaggagcctgggccgctgaggtgatcagcctcttctctgctgagctgtag

SEQ ID NO: 44847 - DNA, 252 bp, Artificial Sequence
  derived and/or modified sequence
atgaagctgctgaccggcctggtgttctgcagcctggtgctgagcgtttcttcaaggtctttcttttctttcctgggggaagcttttgatggagcaagggatatgtggagggcatattcagatatgcgtgaggcaaattatatcggcagcgacaaatacttccacgcaagaggaaactatgacgctgccaagaggggcccaggcggggcctgggcagcagaagtgattagcttgttttccgccgagttgtag

SEQ ID NO: 44848 - DNA, 252 bp, Artificial Sequence
  derived and/or modified sequence
atgaagttgctgaccgggttggtgttttgctccctcgttctctctgtcagcagccggtctttcttttcttttttgggagaagcgtttgacggcgctcgggacatgtggagagcctactccgatatgagggaggccaattatatcggttcagataaatacttccacgccagaggtaattacgatgccgctaaacgcggtcctggaggagcttgggcagccgaggttattagtctgttcagcgctgagctgtag

SEQ ID NO: 44849 - DNA, 1022 bp, Artificial Sequence
  derived and/or modified sequence
tggcagacagggacccgcagctcagctacagcacagatcagcaccatgaagcttctcacgggcctggttttctgctccttggtcctgagtgtcagcagccgaagcttcttttcgttccttggcgaggcttttgatggggctcgggacatgtggagagcctactctgacatgagagaagccaattacatcggctcagacaaatacttccatgctcgggggaactatgatgctgccaaaaggggacctgggggtgcctgggctgcagaagtgatcagtttattttcagctgaactgtagagagtgaaggaagaagccttttttcttcactcctacatgacccaggcattgatccaggcaatgaagattcagtgtaaataaccaccactaacaagaccatggcctttggaacctgtgctaagaggcatggatgagctccctcagcatgtggatggagactgaagagaggtctgaaggctcagtgtggtgtctccattctctaagaagtttggaggagaagctggatacagcaaaacagactgagaaggagcagctgttgggaaaggaggaaaactaggaaagcatggtgttccagaatccctgatggagatattgattagtagtatcagattctgcttagcagttgaggagttcacctttggcttaagcaacatggagtcattgactatctcgtgaaggtggttgcaggagaaggtctggagaactaaatggagcagtgataagagagaatgggagatggtatgataggactcctggacaccccagacatcaatcaaaacaccacagacaagaaggtgtggatacaaaaactagcagttagaagaaataatagaaaatgaactccaactacttctgaaaaaaaagtaatgagggcaattaatacattgaagaaagcctcaataagtacaacagtgtagtactgacttatatatagaaaaaacctgatcagtggaaccaaatcctcagaattagacataagtgcatatgagaattttgtatgtgat

SEQ ID NO: 44850 - DNA, 252 bp, Artificial Sequence
  derived and/or modified sequence
atgaagctgctgaccggcctggtgttctgcagcctggtgctgagcgtgagcagcagaagcttcttcagcttcctgggcgaggccttcgacggcgccagagacatgtggagagcctacagcgacatgagagaggccaactacatcggcagcgacaagtacttccacgccagaggcaactacgacgccgccaagagaggccccggcggcgcctgggccgccgaggtgatcagcctgttcagcgccgagctgtag

SEQ ID NO: 44851 - protein, 157 aa, Artificial Sequence
  derived and/or modified sequence
MAMEGYWRFLALLGSALLVGFLSVIFALVWVLHYREGLGWDGSALEFNWHPVLMVTGFVFIQGIASFRFFSLSASMGSAFSPSISHAHTCLFWNCHLWNSDCNSTYGIDRETDFFPERSCIQYIPARRCFRKYAWPSDPGVRGPHFLDSHQTAMETS

SEQ ID NO: 44852 - DNA, 3540 bp, Artificial Sequence
  derived and/or modified sequence
actacccagagggctgccgccgcctctccaagttcttgtggcccccgcggtgcggagtatggggcgctgatggccatggagggctactggcgcttcctggcgctgctggggtcggcactgctcgtcggcttcctgtcggtgatcttcgccctcgtctgggtcctccactaccgagaggggcttggctgggatgggagcgcactagagtttaactggcacccagtgctcatggtcaccggcttcgtcttcatccagggcatcgcttctttcaggtttttcagtctttctgcttccatgggctccgctttctctccgagcatttctcatgcccatacatgtttattctggaattgtcatctttggaacagtgattgcaacagcacttatgggattgacagagaaactgattttttccctgagagatcctgcatacagtacattcccgccagaaggtgttttcgtaaatacgcttggccttctgatcctggtgttcggggccctcattttttggatagtcaccagaccgcaatggaaacgtcctaaggagccaaattctaccattcttcatccaaatggaggcactgaacagggagcaagaggttccatgccagcctactctggcaacaacatggacaaatcagattcagagttaaacagtgaagtagcagcaaggaaaagaaacttagctctggatgaggctgggcagagatctaccatgtaaaatgttgtagagatagagccatataacgtcacgtttcaaaactagctctacagttttgcttctcctattagccatatgataattgggctatgtagtatcaatatttactttaatcacaaaggatggtttcttgaaataatttgtattgattgaggcctatgaactgacctgaattggaaaggatgtgattaatataaataatagcagatataaattgtggttatgttacctttatcttgttgaggaccacaacattagcacggtgccttgtgcagaatagatactcaatatgtgaatatgtgtctactagtagttaattggataaactggcagcatccctggcctgttgtcatgcagtcatttcctgttaattctgggagacaatgatttcacaactagcgggaagcagtcctaaaagtttaaaatccgataaggaatatctgggacagggtttagatcatgactctacacagataccatgatgagagtatattaaagaaatttaggaaagcacctggttcctttctccccatgcctgccttctgctccctccccagctggtttgggctcaaattgtccctggagactagggtttatgttagggtattgatagattagagcaggtggttgaagagatcttctctggtcagacttggaagaatttccaaaactgaagttagccccaagacttccctagggttgatgtactttatgatccagatgctaaacttcttagaatgaaaatatgcttcaacacttaagtagcatacactgccctacaaacctcagagagcacttttccccaagttcttgtttttatttttgaaagtactcacacagcacttactatgctccaaacactcctctaagcactttacacatattagctcattcagtccccagacagacgggatgaagtaggtattgttactgttcccattttacaggtgagagatttgaagcctggggaggctagtaactcaccccaaggtcacacggctcatacatggtgggactgagactcagatgcaggcagtctggcacctcagtctggattctaaccatttcactaagctatttttgtcttgtactactttgacccacccctgaataaacctcaattgctggagtggggtgtagttattaaagggatgctttttaccttttgctgtttgctgtggcagattccccagataaccaaggaaaaggggccacccatacctggaaataggccatagggcccctactactgccaacaagccatggcctaccttgacacttgtttgatcttaaaattgtgtcttggtaacaaaagatttggacaggcatatctgtagctttcaagttaattaattgcaatatttttttcttcaggattttagctgctgaacaactttcagtttggagctaaaagagacctgtctcatggtctgcccttccctggggcaatagctagggtctttcctgatttttatggaattttaggggatattttgagctttgggttctcagtagtgaattgagacttggaggtgacttttcatgtttggagtatcatctctgtctgggatctgggctgacaaattaaaacctagagtagtgcttatgctgaaatgatacttttcattttttggttgatttttttgccttcccttcaattttaaactgaagcattttaatatgggtagaaactctacaccaaatacactaaacattttggtgcttagtggatttctttttaggtaactggtacttacttccaaagactgaatacaagccacactccatcatatcccttaaacttcatgaaaaaccattcaagatccccttgctgcaacactgttctcttcttctctactaaattctatttccaaaattggtaatagagccagaaggatccccagtacccagccctctgcctggcacaaagtggtagcacaattaaattcagtatgggtggagcatggtacagtcttggtgccatagaaggagtagttgcatagtcacacatcatttgataagttggatgttccattacatagaggaacacaaaattccagggtttttggaggaagggattagatagtgactaagccgccagaattgaggtggccattcctttttgtataggctaagaaacaggttatcagtgaaaagttaattatggctttggcactagaatagcactgttgcaaagtatttaagcaccccccatctcagccctttattttatctttcatgtgggctaatgtgaggataatcttacagatattataggaatttcttttctatctttatgaaaacaacgtatataaaatatatctagaaaacctttgtttgagactcttatttaatgggcttttgattctaatgataattgtacctttatctttcaaaagctgatatttcctacctaagcatctcccgagaaaaatatctcattaaaaagcccataaataataggggagaagaaagccttaggtatcaattccaaaacagtgattgaaatttcccaaaataattatggcttctgtcatctccagagataatctggcttggtttaccccataatctaatttcagaaaagaaagctttattttaacactcatctgaatcaacattaaagccttttctctcaaagcgtttattgagaaactcaaatgaatatactttttgaattactgtcatcaaaagtgtacggcttcctgtgctgcttgtgtcaaatggaacctgccctctaaagcactttctttcctttacttgcgtggtttcatgtaagctgtgctgtttagaaacaacatctcagactttacaaagaa

SEQ ID NO: 44853 - DNA, 474 bp, Artificial Sequence
  derived and/or modified sequence
atggccatggagggctactggagattcctggccctgctgggcagcgccctgctggtgggcttcctgagcgtgatcttcgccctggtgtgggtgctgcactacagagagggcctgggctgggacggcagcgccctggagttcaactggcaccccgtgctgatggtgaccggcttcgtgttcatccagggcatcgccagcttcagattcttcagcctgagcgccagcatgggcagcgccttcagccccagcatcagccacgcccacacctgcctgttctggaactgccacctgtggaacagcgactgcaacagcacctacggcatcgacagagagaccgacttcttccccgagagaagctgcatccagtacatccccgccagaagatgcttcagaaagtacgcctggcccagcgaccccggcgtgagaggcccccacttcctggacagccaccagaccgccatggagaccagctag

SEQ ID NO: 44854 - DNA, 474 bp, Artificial Sequence
  derived and/or modified sequence
atggcaatggaaggatactggcgattcctggctttacttggaagcgctctgctggtcggatttctgagtgttatctttgctctggtttgggtactacactatcgggagggcttaggctgggatggctcagcactggagttcaattggcacccagtcctgatggtgacgggattcgtcttcatccaaggcatcgcctcctttaggttcttttccctttctgcctctatgggcagcgctttctcgcccagcattagccacgcgcacacctgtctgttttggaattgtcacctgtggaactccgactgcaactccacttatggcatcgacagggaaaccgacttttttcccgaacgcagttgcatccagtacattcccgcacgccgatgttttagaaaatacgcctggccatctgaccctggtgtgaggggcccccattttctggattctcatcaaaccgcgatggagacttcctag

SEQ ID NO: 44855 - DNA, 474 bp, Artificial Sequence
  derived and/or modified sequence
atggccatggagggctactggaggttcctggccctgctgggcagcgccctgctggtgggcttcctgagcgtcatctttgccctggtgtgggtgctgcactaccgggagggcctgggctgggatggcagcgccctggagttcaactggcaccctgtgctgatggtgacaggctttgtgttcatccagggcatcgccagcttccgcttcttcagcctgagcgcctccatgggcagcgccttcagccccagcatcagccacgcccacacctgcctcttctggaactgccacctgtggaacagcgactgcaacagcacctacggcatcgaccgggagacagacttcttccctgagaggagctgcatccagtacatcccagcccggcgctgcttcagaaaatatgcctggcccagcgaccccggggtgcggggcccccacttcctggacagccaccagacagccatggagaccagctag

SEQ ID NO: 44856 - DNA, 474 bp, Artificial Sequence
  derived and/or modified sequence
atggccatggagggctactggcggttcctggccctgctgggcagcgcccttctggtcggtttcttgtccgtaatcttcgctcttgtgtgggtgctccattacagggagggcttgggctgggacggaagcgcgctggaatttaattggcatcccgtcctgatggttacagggtttgtgttcatccaggggatagcctctttcagatttttctcactctctgcaagcatgggatcagcattcagcccttctattagccatgctcatacatgcttgttctggaactgtcatctgtggaattctgattgcaactctacttacggcatcgatagagagaccgacttttttcccgaaagaagctgcatacagtacatccccgctcgccgttgctttcggaaatatgcctggccctccgatcccggagtcaggggtcctcacttcctggacagccaccagaccgctatggagaccagttag

SEQ ID NO: 44857 - DNA, 474 bp, Artificial Sequence
  derived and/or modified sequence
atggcaatggaaggctattggcgctttttggctctgctggggtccgcccttttggtgggatttctgtccgtgattttcgcgctagtctgggtgctccattacagggagggcctgggctgggacggtagcgccctcgaattcaactggcaccccgtcctcatggtgaccggatttgtttttatccagggcattgcctcatttaggttcttctccctgtcggccagcatgggctcggccttcagtccatctatctcacacgcgcatacttgtctgttctggaactgtcatctgtggaacagtgattgtaatagcacatacggcattgatagagagaccgactttttccccgagagatcttgcatccagtacatacctgcccgacgatgtttccgtaagtatgcctggccctcagatccgggtgttcgaggcccacatttcctagatagtcatcagacggccatggagactagctag

SEQ ID NO: 44858 - protein, 422 aa, Artificial Sequence
  derived and/or modified sequence
MYPNPLIYCTCWDPWNLGPRKLIKTPQLPRKNSTGSSKLTPLVPAPKNHNYLQPTKPVVSPKMKIHSARQEETNKSFYEVINVSPGYQLVRNREQISVTLGDEMFDRKKRWESEIPDKGRFSRTNIISDLEEQISELTAIIEQMNRDHQSAQKLLSSEMDLRCAEMKQNFENKNRELKEAHEAELSELENNYKAALKAEKLAAQEKLEEMGKEYKYLKNMFRTYQDSIYDEMEEKWSKQKAKWKKDEKFERENILLQQKKKMTKKFEMESGEEDKKINESCSAVFENFIQEKEELLKQHQSDTLQLEELRKTKEVMQEELHAQALILESLNTNLYYTQLELQKEKAIVGNLEKMLQTKFAETEEKYKHTIQILTEENIHLKQKIISKNEEICEGCSGRLASITVSKDDSDTVQDGSKKGQES

SEQ ID NO: 44859 - DNA, 1269 bp, Artificial Sequence
  derived and/or modified sequence
atgtaccccaaccccctgatctactgcacctgctgggacccctggaacctgggccccagaaagctgatcaagaccccccagctgcccagaaagaacagcaccggcagcagcaagctgacccccctggtgcccgcccccaagaaccacaactacctgcagcccaccaagcccgtggtgagccccaagatgaagatccacagcgccagacaggaggagaccaacaagagcttctacgaggtgatcaacgtgagccccggctaccagctggtgagaaacagagagcagatcagcgtgaccctgggcgacgagatgttcgacagaaagaagagatgggagagcgagatccccgacaagggcagattcagcagaaccaacatcatcagcgacctggaggagcagatcagcgagctgaccgccatcatcgagcagatgaacagagaccaccagagcgcccagaagctgctgagcagcgagatggacctgagatgcgccgagatgaagcagaacttcgagaacaagaacagagagctgaaggaggcccacgaggccgagctgagcgagctggagaacaactacaaggccgccctgaaggccgagaagctggccgcccaggagaagctggaggagatgggcaaggagtacaagtacctgaagaacatgttcagaacctaccaggacagcatctacgacgagatggaggagaagtggagcaagcagaaggccaagtggaagaaggacgagaagttcgagagagagaacatcctgctgcagcagaagaagaagatgaccaagaagttcgagatggagagcggcgaggaggacaagaagatcaacgagagctgcagcgccgtgttcgagaacttcatccaggagaaggaggagctgctgaagcagcaccagagcgacaccctgcagctggaggagctgagaaagaccaaggaggtgatgcaggaggagctgcacgcccaggccctgatcctggagagcctgaacaccaacctgtactacacccagctggagctgcagaaggagaaggccatcgtgggcaacctggagaagatgctgcagaccaagttcgccgagaccgaggagaagtacaagcacaccatccagatcctgaccgaggagaacatccacctgaagcagaagatcatcagcaagaacgaggagatctgcgagggctgcagcggcagactggccagcatcaccgtgagcaaggacgacagcgacaccgtgcaggacggcagcaagaagggccaggagagctag

SEQ ID NO: 44860 - DNA, 1269 bp, Artificial Sequence
  derived and/or modified sequence
atgtaccccaatcctctaatttactgtacctgttgggacccctggaacctcggtcctcgcaagctgatcaagactcctcagttgccacgtaaaaattctactggttcttctaaattgactcccctggttccagcccccaaaaatcacaactacctccaacccacgaaacctgtcgtatccccaaagatgaagattcattctgccaggcaggaggaaacaaataagtccttctatgaggttataaatgtgtccccagggtatcagctggtgaggaacagagagcaaatctccgtcacactcggggatgaaatgtttgatcgaaaaaaaaggtgggaaagcgagatccccgacaaagggaggttcagtaggactaatataattagtgatctggaggaacaaatctctgagctgactgccatcatcgagcagatgaatcgagaccaccagtcagcccagaaactgctcagctcagaaatggatctgcgatgcgctgaaatgaaacaaaacttcgaaaataagaatagggaactcaaggaggcccacgaagcagagttgagcgagctggaaaacaattacaaggccgcattaaaagcagagaaattggcagcccaggaaaaactggaggagatggggaaagagtacaagtacctaaagaatatgttcaggacctatcaagacagtatctatgacgagatggaagaaaaatggagcaagcagaaggctaagtggaagaaagacgagaagttcgaacgagagaacatcctgcttcagcagaaaaagaagatgacaaaaaagtttgagatggaaagcggggaggaggataagaaaataaacgaatcttgtagcgccgtttttgaaaatttcatacaggaaaaggaggaattgctgaaacagcaccaaagcgacacactgcaactggaagaactgcggaaaactaaggaagtgatgcaggaagagttgcacgcccaagccctgattttggaaagcctaaacaccaacctgtactatacgcagctggagctgcaaaaggagaaggccatcgtcggtaacctggaaaaaatgctccagacaaagttcgctgagactgaggagaagtataagcatactattcagatccttacagaagaaaatatccatctgaagcaaaagatcatctccaagaatgaagagatctgtgaaggttgtagtggccgacttgcttctatcaccgtcagcaaagatgactccgatacagtgcaggacggtagcaaaaagggacaggaatcctag

SEQ ID NO: 44861 - DNA, 1269 bp, Artificial Sequence
  derived and/or modified sequence
atgtaccccaaccccctcatctactgcacctgctgggacccctggaacctgggccccaggaagctgatcaagaccccccagctgcccaggaagaacagcacaggcagcagcaagctgacccccctggtgcctgcccccaagaaccacaactacctgcagcccaccaagcctgtggtgagccccaagatgaagatccacagcgcccggcaggaggagaccaacaagagcttctatgaggtgatcaacgtgtccccaggctaccagctggtgaggaaccgggagcagatctctgtgaccctgggagatgagatgtttgacaggaagaagcgctgggagagcgagatcccagacaagggccgcttcagcaggaccaacatcatcagtgacctggaggagcagatcagcgagctgacagccatcatcgagcagatgaacagagaccaccagagcgcccagaagctgctgagcagcgagatggacctgcgctgtgccgagatgaagcagaactttgagaacaagaaccgggagctgaaggaggcccatgaagctgagctgtctgagctggagaacaactacaaggccgccctgaaggccgagaagctggccgcccaggagaagctggaggagatgggcaaggagtacaagtacctgaagaacatgttccgcacctaccaggacagcatctatgatgagatggaggagaagtggagcaagcagaaggccaagtggaagaaggatgagaagtttgagcgggagaacatcctgctgcagcagaagaagaagatgaccaagaagtttgagatggagagcggggaggaggacaagaagatcaatgaaagctgcagcgctgtgtttgagaacttcatccaggagaaggaggagctgctgaagcagcaccagagcgacaccctgcagctggaggagctgaggaagaccaaggaggtgatgcaggaggagctgcacgcccaggccctgatcctggagagcctgaacaccaacctgtactacacccagctggagctgcagaaggagaaggccatcgtgggcaacctggagaagatgctgcagaccaagtttgctgagacagaggagaagtacaagcacaccatccagatcctgacagaggagaacatccacctgaagcagaagatcatcagcaagaatgaggagatctgtgagggctgcagcggccgcctggccagcatcaccgtgtccaaggatgacagcgacacagtgcaggacggcagcaagaagggccaggagagctag

SEQ ID NO: 44862 - DNA, 1943 bp, Artificial Sequence
  derived and/or modified sequence
ctttggcctgccatctcccaagggcaaacctcacaactcaggcccaagtcacaggaatctgaatggtggggtgaccttctcctctagtttaatttcattgcaatactgagaaacttcaactgttttgtctttagaagggaaattcatgtttgtgccaggccagcctttgtaaaagcctttgattggattcactagaagtctgtcttcccgcagtacatatactgtgaattttctccttcggcatttcaaccacttggaatggccactaaagtggcttttgatctaaagtaaactctgattctgtgttgatggggaaccatttctctctaacatggtggtttctttaagatgtttgacttgggccacatgagaataacagatctttgggcagtccaagcaagagcctcctgatctagcagccaagactccccctgacctttggccatgtaccccaaccctctcatctactgcacctgctgggacccctggaacttgggaccacggaagctaatcaagacccctcaactaccacgcaagaactccacagggagttccaagctaactcctcttgtaccagctccaaaaaatcacaattacctccaaccaacaaaacctgttgtttccccaaaaatgaaaatccattcagcaaggcaagaagagactaataaatcattttatgaagtgatcaacgtgtcacctggctatcaacttgttcggaatcgggaacagatttctgtcaccttaggggatgagatgtttgataggaaaaagcggtgggaatcggagatcccggacaaaggcagattttccaggaccaacatcatttctgacctagaagagcaaatctcagagctgacagcaataattgaacaaatgaacagagaccaccagtctgcccagaaattgctctccagtgaaatggatctccgctgtgctgagatgaaacagaactttgaaaacaagaacagggagctcaaagaggcccatgaagcagaactcagtgagttggagaacaactacaaagcagccttgaaggcagagaagttggctgcccaagagaagctagaggagatgggaaaagaatacaagtatttgaagaatatgtttcgtacgtatcaggacagtatttatgatgaaatggaagagaagtggtcaaaacagaaggcgaaatggaagaaggatgagaagttcgagcgagaaaatatcctgctacagcaaaaaaaaaagatgaccaaaaaattcgaaatggagtcaggagaagaagataagaaaataaatgaatcctgcagtgctgtctttgagaacttcattcaagagaaggaggagctcttgaaacaacatcaaagtgacaccttgcaattagaagagctgagaaaaaccaaagaggtcatgcaggaagaattgcatgcacaagcccttatcctagagtcactgaacacaaacctctactatacccagttggaactccagaaagagaaagctatagtgggaaatctggagaaaatgcttcaaaccaagtttgctgaaactgaagaaaagtataagcacaccatacagatcctgacggaagagaacattcatctgaagcaaaagataatttctaagaatgaagaaatttgtgaaggatgttctgggagattggcctctattactgtttctaaggatgattctgacactgtgcaagatggtagcaagaaaggacaagaatcataaacaaaaagttgctctgcattgttgaagatggttggcacaccatttctgtaggcccaggaaactcctgggagggttttcttgagaaaatgcatataatgagtttagttcttgggttgctctgactctctgaatgtctgaaaatgtttgaattcgcatctgaatttcacagcttatcacggactcttcactgaaaaatgatgctctccatactgggagctgagctttctctg

SEQ ID NO: 44863 - DNA, 1269 bp, Artificial Sequence
  derived and/or modified sequence
atgtaccccaaccccctgatctactgcacctgctgggacccctggaatctggggccaagaaagcttattaaaacaccgcaattgcctcgaaaaaattccactggctcttccaagctcacacccctggtgccagcacccaagaaccacaattaccttcagcctaccaaaccagtggtcagtcctaagatgaaaatccatagtgcaaggcaggaggagaccaataagagcttttatgaagtaatcaatgtaagccctggataccagctagttcgaaaccgcgagcagatatctgtgactttaggtgatgaaatgttcgatcggaagaagaggtgggaatctgaaattcctgacaaaggtaggttctcaagaaccaacatcatctctgacctggaagaacaaatctctgagctcacggctattattgagcaaatgaatagagaccaccaaagtgctcagaagcttctgtcgtctgagatggacctccgctgtgcagagatgaaacagaactttgaaaataagaaccgtgagcttaaggaagcacacgaagcagagctgtcagaactcgaaaacaattacaaagccgctctcaaagccgaaaagttggccgctcaggaaaagctggaggaaatgggtaaggagtataaatacctgaaaaacatgtttcggacataccaggatagcatctacgacgaaatggaagagaaatggtctaagcagaaagccaaatggaaaaaggatgagaaattcgagagggagaatatcctgctacagcagaaaaagaagatgactaaaaagttcgagatggaatccggtgaggaggataagaagatcaacgaatcttgttcggcggtgttcgaaaattttatccaggaaaaggaggagttgctgaaacaacaccagtcagatactctgcagttagaagagcttcgaaagactaaggaggttatgcaggaagaattgcatgcccaagctttaatcctggaaagcctcaacaccaatttgtactatacacagctagagttgcagaaagagaaggccattgtgggcaacttagagaaaatgctgcagacgaaatttgccgagactgaggaaaagtacaaacataccatacagattttgactgaggaaaacattcatctgaaacaaaagataattagcaaaaatgaggaaatttgtgagggatgttccggcaggctggcctcaattacagtttccaaagacgactctgataccgttcaggacggttcaaaaaagggccaggagagctag

SEQ ID NO: 44864 - DNA, 1269 bp, Artificial Sequence
  derived and/or modified sequence
atgtatccaaaccctctgatttactgcacctgctgggatccgtggaatctggggcctaggaagcttattaagacccctcagttgcccaggaaaaattcaactggatcatctaagttgactcccctggtgccagctcctaagaaccacaattacttgcagcccacaaagccagtagtatctcccaagatgaagatccacagtgcgaggcaggaggaaactaacaagtcgttttacgaggtcatcaatgtgtcaccaggctaccaactggtgaggaaccgggaacagatttcagtgacacttggtgatgaaatgtttgatcgtaagaagcgatgggaatcagaaatccccgataaaggtagattctcacgcactaacatcatatcggatttggaagagcagatatcagaattaaccgcgatcatcgaacagatgaaccgggatcaccaatctgcacagaaattgctgagctccgagatggacctccgttgtgccgaaatgaaacaaaatttcgagaacaaaaaccgcgagctgaaagaggctcatgaagctgagttatctgagctggaaaataattacaaagcagctctcaaggccgagaagttggccgcacaggaaaagctggaagagatgggcaaggagtacaagtaccttaagaacatgttcagaacctatcaggacagtatctatgatgagatggaggagaagtggagcaagcagaaagcaaaatggaagaaggatgagaagttcgaacgagaaaacatcctgttacagcaaaagaagaagatgacaaagaagttcgaaatggaaagtggtgaggaggataagaaaatcaacgagtcctgctcggcagtcttcgagaacttcatccaggagaaagaggagctcctcaaacagcaccagtctgatactctgcagctggaagagctgcggaagactaaagaagtgatgcaggaggagctccatgcccaagcactcatcctggaatccctgaacactaacctgtactatacgcagctcgagctccagaaggaaaaggccattgtaggcaatcttgagaagatgcttcagaccaagttcgctgagaccgaagaaaagtataaacatacaatccagattttaaccgaggagaacatccacctcaagcagaagataatttctaagaatgaagagatctgtgagggctgcagcggacggctggcttccattaccgtatccaaggatgattctgataccgtgcaagacggaagtaaaaaaggtcaagagagttag

SEQ ID NO: 44865 - protein, 1151 aa, Artificial Sequence
  derived and/or modified sequence
MEVVDETEALQRFFEGHDINGALEPSNIDTSILEEYISKEDASDLCFPDISAPASSASYSHGQPAMPGSSGVHHLSPPGGGPSPGRHGPLPPPGYGTPLNCNNNNGMGAAPKPFPGGTGPPIKAEPKAPYAPGTLPDSPPDSGSEAYSPQQVNEPHLLRTITPETLCHVGVPSRLEHPPPPPAHLPGPPPPPPPPPHYPVLQRDLYMKAEPPIPHYAAMGQGLVPTDLHHTQQSQMLHQLLQQHGAELPTHPSKKRKHSESPPSTLNAQMLNGMIKQEPGTVTALPLHPTRAPSPPWPPQGPLSPGPGSLPLSIARVQTPPWHPPGAPSPGLLQDSDSLSGSYLDPNYQSIKWQPHQQNKWATLYDANYKELPMLTYRVDADKGFNFSVGDDAFVCQKKNHFQVTVYIGMLGEPKYVKTPEGLKPLDCFYLKLHGVKLEALNQSINIEQSQSDRSKRPFNPVTVNLPPEQVTKVTVGRLHFSETTANNMRKKGKPNPDQRYFMLVVALQAHAQNQNYTLAAQISERIIVRASNPGQFESDSDVLWQRAQVPDTVFHHGRVGINTDRPDEALVVHGNVKVMGSLMHPSDLRAKEHVQEVDTTEQLKRISRMRLVHYRYKPEFAASAGIEATAPETGVIAQEVKEILPEAVKDTGDMVFANGKTIENFLVVNKERIFMENVGAVKELCKLTDNLETRIDELERWSHKLAKLRRLDSLKSTGSSGAFSHAGSQFSRAGSVPHKKRPPKVASKSSSVVPDQACISQRFLQGTIIALVVVMAFSVVSMSTLYVLSLRTEEDLVDTDGSFAVSTSCLLALLRPQPPGGSEALCPWSSQSFGTTQLRQSPLTTGLPGIQPSLLLVTTSLTSSAPGSAVRTLDMCSSHPCPVICCSSPTTNPTTGPSLGPSFNPGHVLSPSPSPSTNRSGPSQMALLPVTNIRAKSWGLSVNGIGHSKHHKSLEPLASPAVPFPGGQGKAKNSPSLGFHGRARRGALQSSVGPAEPTWAQGQSASLLAEPVPSLTSIQVLENSMSITSQYCAPGDACRPGNFTYHIPVSSGTPLHLSLTLQMNSSSPVSVVLCSLRSKEEPCEEGSLPQSLHTHQDTQGTSHRWPITILSFREFTYHFRVALLGQANCSSEALAQPATDYHFHFYRLCD

SEQ ID NO: 44866 - DNA, 3456 bp, Artificial Sequence
  derived and/or modified sequence
atggaagtagttgacgaaactgaagcattgcagagattcttcgaaggtcatgatattaatggcgctcttgaaccaagcaatattgacacgtctattctcgaagaatatatttccaaagaggacgcaagtgacctgtgttttcctgacatatccgcaccagcaagctcggcaagctacagtcacgggcagccagcaatgccagggagctctggagtgcaccacctttccccacctggtggtggaccctcacccggtcgccacggccccctgcctcccccagggtatgggacccccctgaattgcaataataacaacggcatgggcgccgccccaaaaccatttcccggaggtaccggcccaccaatcaaggccgaacctaaggccccatacgctcctggtaccctgccggactctccgcctgacagtggttccgaagcatatagcccgcagcaggtcaatgaaccccatctgctcaggacaattactcccgaaacactgtgccatgtgggggtcccaagtagactggagcatcctccaccccctcctgctcaccttcccggcccccctccgccacccccccctccacctcactaccctgtgttgcaacgcgatctctacatgaaagccgagccgccaataccacactatgctgcgatgggccagggactcgtacccactgacctgcaccatacccagcagtcccagatgttgcaccagttgctgcaacagcacggcgcggaactccctacacacccttcgaagaagagaaagcacagtgaaagcccaccctccaccttaaacgctcaaatgttgaatggcatgatcaaacaggagccaggaacagttaccgcgctgcccctgcatccgacccgggctccttccccgccctggcctccacagggtcccctatcacccggccccgggagcttgcctttgtccatcgcccgtgtccagacccccccgtggcacccccctggggcccccagccctggcctgctacaggacagcgattccctgtcgggcagctatctggatccaaactatcagagcatcaaatggcaaccacaccagcagaacaaatgggccaccctttacgacgcgaattacaaggaattgcctatgttgacatacagggtcgacgctgataaaggttttaacttcagcgtgggagatgacgccttcgtgtgccaaaagaaaaaccattttcaggtcaccgtgtacatcgggatgcttggtgaacctaagtacgtgaaaacccccgaaggactgaagccgctggattgtttttatttgaagttgcacggcgtgaaactggaggctctgaatcagtccattaacattgagcagagccagagtgatagaagtaaaaggccgtttaatcccgtcaccgtgaatctgccccccgaacaggtgacaaaggtgaccgtgggtcgactccacttcagtgagactaccgccaataatatgcggaagaaggggaaacctaaccctgatcagagatactttatgctcgtggtagctctgcaggcacacgcccagaaccagaactatacactagcagcccagattagtgaacgcatcattgtgagggcaagcaatccaggacaattcgagtctgactccgatgtactctggcaacgagcccaagtgcccgatacagttttccatcacggacgcgttggaattaacactgaccgccccgacgaggccctggtagtgcacggtaacgtgaaagtgatggggagtctgatgcacccctccgacctgcgtgccaaagagcacgttcaggaggtggacactactgagcagctgaaaaggattagcagaatgaggctggtgcattataggtacaagcctgaattcgccgcttcagcaggcatcgaagccaccgctccagagacaggagtaatcgcacaggaagtgaaagaaattctgccagaggcagtgaaggacactggtgatatggtctttgccaacgggaagaccatagagaacttcctcgttgtaaataaagaacgcatctttatggaaaacgtcggagccgtgaaagagctgtgcaagttaacggataatttggaaacccgcatagacgaactcgaacgatggtcacataagctggccaaattgcgccggttagattcgctgaaatccaccggttcctcaggcgctttttcacatgcgggatcccagttttcgcgcgctggatccgtaccgcacaagaaaagacccccgaaggtagctagtaaatcctctagcgtggtgccagatcaggcttgcatcagccaacggttcctccagggcacaatcatcgctctagtggttgtgatggctttttccgtggtgtctatgagcactctgtatgtgttgagtctgcgcactgaagaagatctggtggacacagacggcagcttcgctgtttccacatcttgcctgcttgcactgcttcgaccccagccacctggtggatccgaggctctttgcccctggtccagccagtccttcggaactactcagttacgacagtctcctctgacgaccggattacccggcatccagcccagcctgctgctggtgaccacttcacttacctcatcagctccaggtagtgctgtgcgcactcttgatatgtgttcctctcacccttgcccggtgatctgttgctccagtcctaccactaatcctactactggcccatcactgggaccaagtttcaatcccggccacgttctcagccctagtccatctccatctacgaaccgctcaggcccttcacagatggccctgctgcccgtgaccaacatcagagcaaagtcctgggggctgtcagtgaatgggattggccatagcaaacaccacaagagcttagaaccattggcaagcccagcagtacccttcccgggtgggcagggcaaagctaaaaacagcccatcactgggatttcatggtagggccaggcggggggcattacaatcttccgtagggcccgcggaaccaacttgggcccagggccagagcgctagtctgctggctgaacctgttccgagcctgactagcatccaggtgttggaaaattctatgagcattacatctcagtattgcgctcccggagacgcttgccgacctgggaatttcacttaccatatccctgtgtctagcggcacccctcttcacctcagtcttacgctccaaatgaattcttcatcccccgtgtctgtagtcctctgctctctgaggtccaaagaagagccctgtgaagagggatccctgccccaaagcttgcatacacatcaagacactcaaggcacatcacaccggtggcccataaccatactaagcttcagagaatttacctaccatttcagggtcgccttgctgggccaggctaattgtagctccgaggcactagcccagccagctaccgattaccatttccacttttacaggctgtgcgactag

SEQ ID NO: 44867 - DNA, 3456 bp, Artificial Sequence
  derived and/or modified sequence
atggaggtggtggatgaaacagaggccctgcagcgcttctttgagggccatgacatcaacggggccctggagcccagcaacatcgacaccagcatcctggaggagtacatcagcaaggaggatgccagtgacctgtgcttcccagacatcagcgccccagccagcagcgccagctacagccacggccagcctgccatgcctggcagcagcggcgtgcaccacctgagccccccaggcggcggccccagccctggaagacatggccccctgcccccacctggctacggcacccccctgaactgcaacaacaacaacggcatgggcgccgcccccaagcccttccctgggggcaccggcccccccatcaaggccgagcccaaggccccctatgcccctggcaccctgcctgacagccccccagacagcggcagcgaggcctacagcccccagcaggtgaatgagccccacctgctgcggaccatcaccccagagaccctgtgccacgtgggcgtgcccagccggctggagcaccccccacctcctccagcccacctgcccggccccccacctcctcctcctcctccaccccactaccctgtgctgcagagggacctgtacatgaaggccgagccccccatcccccactatgctgccatgggccagggcctggtgcccacagacctgcaccacacccagcagagccagatgctgcaccagctgctgcagcagcacggggctgagctgcccacccaccccagcaagaagaggaagcacagcgagagcccccccagcaccctgaatgcccagatgctgaatggcatgatcaagcaggagcccggcaccgtgacagccctgcccctgcaccccacccgggcccccagccccccctggccaccccagggccccctgagccctggccctggcagcctgcccctgagcatcgcccgggtgcagaccccaccctggcaccccccaggggcccccagccctggcctgctgcaggacagcgacagcctgagcggcagctacctggaccccaactaccagagcatcaagtggcagccccaccagcagaacaagtgggccaccctgtatgatgccaactacaaggagctgcccatgctgacctacagagtggatgctgacaagggcttcaacttctctgtgggagatgatgcctttgtgtgccagaagaagaaccacttccaggtgacagtgtacatcggcatgctgggggagcccaagtatgtgaagaccccagagggcctgaagcccctggactgcttctacctgaagctgcacggcgtgaagctggaggccctgaaccagagcatcaacatcgagcagagccagagcgacaggagcaagaggcccttcaaccctgtgacagtgaacctgcccccagagcaggtgaccaaggtgacagtgggccgcctgcacttcagcgagaccacagccaacaacatgaggaagaagggcaagcccaacccagaccagcgctacttcatgctggtggtggccctgcaggcccacgcccagaaccagaactacaccctggccgcccagatcagcgagcgcatcatcgtgcgggccagcaaccctggccagtttgaaagtgacagtgatgtgctgtggcagagggcccaggtgcctgacacagtgttccaccacggccgggtgggcatcaacacagacagaccagatgaggccctggtggtgcacggcaatgtgaaggtgatgggcagcctgatgcaccccagcgacctgcgggccaaggagcacgtgcaggaggtggacaccacagagcagctgaagaggatcagcaggatgaggctggtgcactaccgctacaagccagagtttgctgccagcgctggcatcgaggccacagcccctgagaccggggtgattgcccaggaggtgaaggagatcctgcctgaggccgtgaaggacaccggggacatggtgtttgccaacgggaagaccatcgagaacttcctggtggtgaacaaggagcgcatcttcatggagaatgtgggcgctgtgaaggagctgtgcaagctgacagacaacctggagaccagaattgatgagctggagcgctggagccacaagctggccaagctgcggcggctggacagcctgaagagcacaggcagcagcggggccttcagccatgctggcagccagttcagccgggccggctctgtgccccacaagaagaggcctcccaaggtggccagcaagagcagctctgtggtgcctgaccaggcctgcatcagccagcgcttcctgcagggcaccatcatcgccctggtggtggtgatggccttctctgtggtgtccatgagcaccctgtatgtgctgagcctgaggacagaggaggacctggtggacacagatggcagctttgctgtgtccaccagctgcctgctggccctgctgcggccccagcccccaggcggcagcgaggccctgtgcccctggagcagccagagctttggcaccacccagctgcggcagagccccctgaccaccggcctgcccggcatccagcccagcctgctgctggtgaccaccagcctgaccagcagcgcccctggcagcgctgtgaggaccctggacatgtgcagcagccacccctgccctgtgatctgctgcagcagccccaccaccaaccccaccaccggccccagcctgggccccagcttcaaccctggccacgtgctgagccccagccccagccccagcaccaacagaagtggccccagccagatggccctgctgcctgtgaccaacatccgggccaagtcctggggcctgtctgtgaatggcatcggccacagcaagcaccacaagagcctggagcccctggccagccctgctgtgcccttccctgggggccagggcaaggccaagaacagccccagcctgggcttccacggccgggccaggagaggagccctgcagagctctgtgggccctgctgagcccacctgggcccagggccagagcgccagcctgctggccgagcctgtgcccagcctgaccagcatccaggtgctggagaacagcatgagcatcaccagccagtactgtgcccctggagatgcctgcaggcctggcaacttcacctaccacatccctgtgagcagcggcacccccctgcacctgagcctgaccctgcagatgaacagcagcagccctgtgtctgtggtgctgtgcagcctgcggagcaaggaggagccctgtgaggagggcagcctgccccagagcctgcacacccaccaggacacccagggcaccagccaccgctggcccatcaccatcctgtccttccgggagttcacctaccacttccgggtggccctgctgggccaggccaactgcagcagcgaggccctggcccagcctgccacagactaccacttccacttctaccgcctgtgtgactag

SEQ ID NO: 44868 - DNA, 3456 bp, Artificial Sequence
  derived and/or modified sequence
atggaggtggtggacgagaccgaggccctgcagcggttcttcgaggggcacgacatcaacggcgcgctggagccttcgaacattgataccagcatactcgaagaatacatctccaaggaggacgccagcgatttgtgctttccagatatttctgcaccggccagcagcgccagttattcccatgggcaaccagcaatgccagggtcctccggagttcaccatctgagccccccaggtggaggcccatctccgggtcgccatggcccattgcccccacccggctatggaactccattgaattgcaacaataacaacggcatgggagccgcacccaagcctttcccagggggcaccggtcctccaatcaaggctgaaccaaaagcaccttacgcaccaggtaccttgcccgattcccccccagacagtggttccgaggcctactctcctcagcaggttaacgagccccatttgctcaggactataacacctgagacactttgccatgtaggcgtccccagcaggctggaacacccaccccctcctcccgcgcatcttcctgggcccccacctccccccccccctcccccacactacccagtgctgcagcgcgatctctacatgaaggctgaaccgcccattccacattatgctgctatgggccaagggctggtacccaccgatctacaccacacacagcagtcccagatgctccatcaactgcttcagcagcacggcgccgaattgcctacccatccttcaaaaaagcggaaacacagcgaatcacccccatctacgttaaatgcccaaatgctaaatgggatgattaagcaggagcctggaactgtcacagctttgccattgcaccccacccgtgcacctagccccccgtggcctccacaaggcccgctgagtcccggcccaggctctctgcctctatccatagccagggttcagacaccaccgtggcatccgcccggagccccctcgcctggtctattgcaggattcagatagcctctctggttcctacctggatccaaactatcagtcgataaaatggcaaccccaccaacagaataagtgggctacactgtacgacgccaattataaagaactgcccatgctcacatacagggtcgatgccgacaaaggctttaacttctcagttggcgacgacgcttttgtgtgtcagaagaagaaccatttccaggtgacagtctacattggcatgctgggcgagccgaagtatgtcaagactcctgagggattgaagcccctagactgcttttacctgaagctccacggggtcaaattggaggccttaaaccaatccatcaacattgaacaaagtcaatccgaccgaagtaagcggcccttcaatccggtgactgtgaacctgccacctgagcaggtcaccaaagtgactgttggacgccttcatttctccgagacaacagccaacaatatgcggaagaagggcaagcctaatcccgaccagagatatttcatgctcgtggtggctttgcaggcacatgctcagaaccagaactatacgctggcagctcagatcagcgaacgaataatcgtgagagcgagtaatcctggacagttcgagagcgatagcgatgtcctatggcagcgtgcccaggtgcccgacacagtctttcaccatggccgggttggtattaacaccgatcgtcccgacgaagccctcgtggtccacgggaatgtaaaagtaatgggctccttaatgcacccttccgacttgagggcaaaagaacacgtccaagaggttgacaccaccgagcaattgaaaagaattagccgcatgaggctggtacactataggtataaacctgaatttgctgcatccgccggcattgaggccactgcccccgagactggagtgatcgctcaggaagtgaaagagattcttcccgaggcggtgaaggataccggggatatggtgttcgccaatgggaaaaccattgaaaacttcctcgtggtgaacaaagagcgtatttttatggaaaacgtgggcgcagtcaaagagctctgcaagctgaccgataacctggagacacgcattgatgagctggaaaggtggtcccacaaacttgccaaactacgccgtctggatagcctgaagtctaccgggagtagcggagcattctcccacgcagggtcccaattcagcagagctgggtctgtgccccataagaagagaccacctaaagtcgcctcaaagtccagcagcgtggtcccggaccaagcatgtattagccaaaggttccttcaaggcaccatcattgcgctggtggttgtgatggcctttagtgtcgtgtcaatgtctactctgtacgtgttgtctctgagaacagaggaagatctcgtggatactgatggatctttcgcagtgagcacatcctgcttgctggcattgcttagaccacagcccccaggcggctccgaggctctatgtccttggagcagccaatcattcggtactacacagctccgccagagtcccctgacgactgggctcccagggatccaaccaagcctattactcgtcacgactagcttgacttcgtctgcccctggtagcgctgttagaaccctcgatatgtgttctagccatccgtgccctgtcatctgttgttcctcgccaaccaccaacccgacaaccggccccagcctgggaccgtcatttaacccagggcacgttcttagcccttcgccaagtccctccacaaaccgaagtgggccatcccagatggcccttctgcccgttacaaacattcgtgctaaatcctgggggctgagtgtgaatggaattggccattcgaaacatcataaatctctggaacctctggcttcgccagctgtacccttccccggggggcagggcaaggcgaagaattctcccagtctgggttttcatggccgggccaggcgcggagcactgcagtcttcggtgggacccgctgagccgacatgggcacaggggcagtcagcctccctgcttgcggaacccgtcccatccctgactagtattcaggtcctagaaaacagcatgagtatcacttcgcagtactgtgcgccgggtgacgcctgccggcccggtaactttacctatcatatccccgtaagctctggaacccccctccacctttccctgacgttgcagatgaactcttcaagccccgtgagtgtcgtcctgtgctccttgcgcagtaaagaggagccgtgtgaggaggggagcctaccacaatccctgcacacacaccaggacacccaggggacgtctcatcggtggccaattactattctaagcttccgcgagttcacttaccacttcagagtagccctactgggccaagccaactgttccagtgaggccttggctcagccagctacagattaccattttcatttttacagactatgcgactag

SEQ ID NO: 44869 - DNA, 3456 bp, Artificial Sequence
  derived and/or modified sequence
atggaggtggttgatgagacagaagcattgcagagatttttcgaaggccacgatatcaatggagccctggagccttcaaacatcgacacaagcattttagaggaatacatcagtaaagaggatgcctcagacctctgttttcccgatatatctgccccagcctcatcagctagttactctcatgggcaaccagctatgccagggtccagcggagttcaccacctgtcccctcctggaggcggtccaagtccgggaagacacggacccctgcctccccctggttatggcacccctcttaattgtaataataacaatggaatgggggctgcccctaaacctttcccagggggaaccggacccccaatcaaagccgagcccaaggccccatatgctcctggcaccctccctgacagccccccagatagcggaagcgaggcgtatagtccccagcaggtgaacgagccacatctgctgcgcaccatcacacctgagactctatgccatgtgggagtgcccagtagactggaacaccccccacctccacctgcccacctccccggacctccgccacctcctcctccaccccctcattatcctgtactgcaacgagatctgtacatgaaagccgagcccccaattccacactatgccgctatgggacaaggcttggtgcccaccgaccttcaccatacccagcagagccagatgctccatcaactgctgcagcagcatggcgcagagttacccactcatccatcaaaaaaaaggaaacatagcgaaagcccaccatcaaccttgaatgcccagatgttgaatggcatgataaaacaggaacccggtacagttaccgctcttccccttcacccaacccgggctccgagcccaccctggccaccccagggtcctcttagcccaggaccagggagcctgccactctccatcgcccgtgtgcaaacccctccttggcaccccccaggagccccatcccctggcctgcttcaggacagtgacagcttatccgggtcatacctcgaccccaactaccagtctatcaaatggcaaccacaccagcagaacaagtgggctaccctgtacgatgccaattataaggagctgccaatgctgacgtatagagtggatgcagacaaaggatttaattttagcgtgggcgacgacgcctttgtgtgtcagaaaaaaaatcatttccaggtgaccgtctacatcggaatgctgggcgaacccaaatacgtcaagacaccagaggggctgaagcccctggattgcttttacctcaagcttcacggggtaaagttggaagcactgaaccagtcaataaacattgagcaatcacagagtgacaggtcaaaacgaccttttaacccagtgaccgtgaaccttccgcctgagcaagtgactaaagtaacagtagggaggcttcattttagtgagacaaccgccaataatatgaggaagaaaggcaagcctaaccccgaccagagatacttcatgttggtagttgcgctccaggctcacgcccagaaccagaattacacactggcagcccagatttccgaacgaatcatcgtgagagccagcaacccaggtcaattcgagtccgattccgatgttctatggcagcgagctcaggtgccggatactgtctttcaccacggacgtgtcggaatcaacaccgatcgacctgacgaggccctcgtggtccacgggaatgttaaggtgatgggaagccttatgcacccatctgacctgcgggcaaaggagcacgtgcaagaggtggacacgacagagcagcttaaaagaatttctcgtatgaggctggtacattataggtacaaacctgagtttgccgcatccgcaggtattgaagccaccgctccagagactggagtgatcgcacaagaagtcaaagagattctgccggaggccgtgaaggatacgggcgacatggtctttgccaatggcaagaccatagaaaacttcctggtcgtgaataaagaacgaatatttatggagaacgtcggtgccgtgaaagaactatgcaagctgaccgacaatctagagactcgcattgacgagttagagcggtggagccacaagctggccaagttgcgaaggctggactccctaaagtctactggctcatcgggcgctttctcccatgctggcagtcagtttagccgcgctgggtctgtaccccataaaaaacgccctccaaaggtggcttccaaatcatctagtgtggtgcccgaccaggcttgcatctctcaaagattccttcagggtactatcatagcactcgtggtggtcatggccttttccgtagtgagcatgtctactctatatgttctcagccttcgtactgaggaagacctcgtagatacagacgggagtttcgctgtgagcactagctgcctgctggccctcctgcggcctcagcccccaggaggatccgaggcgctctgcccatggtcttcacaatcatttgggactacacagctccgtcagtcccccctgacaaccggcctccctgggatccaaccaagtcttttactggtgacaacatccctaacctcatctgcccctggttcagcggtgcgcacccttgacatgtgttcctcccatccttgtccagttatatgctgctctagtcctacaacaaaccccacaactggaccaagtctcggcccttcgttcaacccagggcacgttctcagccctagtccatccccaagcacgaaccgctcaggacctagtcaaatggcactgttacccgtcactaacataagagcgaaatcgtggggcctaagcgttaatggcataggtcattcaaaacatcacaagtctttggagcccctcgccagtccagctgtgccttttcccggtggacagggcaaagccaagaacagcccctcactgggcttccatggaagagcaaggagaggggctctgcagagcagcgtcggccctgcggaacccacgtgggctcagggccaaagcgcctccctactggccgagccagtacctagtctgactagcattcaagtgttagagaattccatgtctatcacgtctcaatattgtgcccctggcgatgcatgtaggcccggtaacttcacatatcacattcctgtgtccagcggcacccccctccatctttcacttaccttgcaaatgaactcatcatcccctgtgagcgtggtgctttgctctctgcggagcaaggaagagccatgtgaggaaggctccctccctcaaagtctccacacccaccaggacactcaggggacaagccatcgctggcctattacgattctcagtttcagggaatttacctatcatttccgggtcgcgcttctgggacaggcaaattgcagcagcgaagctctcgctcagccagcaactgactaccactttcatttctacaggttgtgtgattag

SEQ ID NO: 44870 - DNA, 5927 bp, Artificial Sequence
  derived and/or modified sequence
agccgggactgtcgcgcgggccgcgccggcgatgccgcgcccccgggccgggctgtagcggggccgcggctggagtgtgcgccgggcaggcgggacatggaggtggtggacgagacggaggcgctgcagcgcttcttcgaaggccacgacatcaacggtgccctggagccctccaacatagacaccagcatcctggaggagtacatcagcaaggaggatgcctccgacctctgcttccctgacatctctgctccagccagctcggcctcctactcccacgggcagcctgcgatgcctggctccagcggggtccaccacctgagcccccctgggggtggaccctccccggggcgccatggtcccctcccacccccgggctacggcaccccgctgaactgcaacaacaacaacggcatgggcgctgcccccaagcccttcccggggggcaccgggccccccatcaaggctgagcccaaggctccctatgccccaggcacactgccggactctcccccagactcgggctccgaggcctactccccccagcaggtgaatgagccccacctcctgcgcacgataacccctgagacactgtgccacgtgggagtgccctcccgcctggagcatccgcccccacctccagcccacttgccaggccccccgccacccccaccacccccacctcactaccctgtcctgcagcgggatctgtacatgaaggccgagcccccgatcccccactacgctgccatggggcaggggctggtgcccactgatcttcaccacacccagcagtcccagatgctgcaccagctcctgcagcagcacggagctgagctccctacacacccctccaagaagaggaagcactctgaatccccccccagcaccctcaatgcccagatgctgaatggaatgatcaaacaggagcctgggaccgtgacagccctgcctctgcaccccactcgagccccatcgccaccctggcctccccagggtccgctctccccgggccctggttccttgcctctcagcattgcccgtgtccagacaccgccttggcacccgccaggtgccccctccccaggcctcctgcaggacagtgacagcctcagtggctcctacctggaccccaactaccagtccatcaagtggcagcctcatcagcagaacaagtgggcgaccctgtacgatgctaactacaaggagctgcccatgctcacctaccgcgtggatgcggacaagggcttcaacttttcggtgggcgacgacgcctttgtgtgccagaagaagaaccacttccaggtgacagtgtacatcggcatgctgggcgagcccaagtacgtcaagacgcccgagggcctcaagcccctcgactgcttctatctgaagctgcacggagtgaagctggaggccctgaaccagtccattaacatcgagcagtcccagtcagaccggagcaagcggcccttcaacccggtcacggtcaatctgccccctgagcaggtcacgaaggtgactgtggggcggctgcacttcagcgagaccaccgctaacaacatgcgtaagaagggcaagcccaacccggaccagaggtacttcatgctggtggtggccctccaggctcatgcacagaaccagaactacacgctggccgcccagatctcagagcgcatcattgtgcgggcctccaacccaggccagttcgagagcgacagcgatgtgttgtggcagcgggcacaggtgcccgacaccgtcttccaccacggccgcgtgggcatcaacacagaccggccggatgaggcgctggttgtgcacgggaatgtcaaggtcatgggctcgcttatgcacccctccgacctgcgcgccaaggaacacgtgcaggaggtggacaccaccgagcaattgaagaggatctcgcgcatgcggctggtgcactacagatacaagcccgagttcgccgccagcgcgggcatcgaggccaccgcgccagagacaggtgtcatcgctcaggaggtgaaggagatcttgcctgaggctgtgaaagacaccggagacatggtctttgccaatgggaaaaccatagagaacttcctggtggtgaacaaggagcgcatcttcatggagaacgtaggggccgtgaaggagctgtgcaagctgacagacaacctggagacgcgcattgatgagctggagcgctggagccacaagctggccaagctgcggcggctcgacagcctcaagtccaccggcagctcgggcgccttcagccatgcagggagccagttcagtcgggcgggcagcgtcccccacaagaagaggccccccaaggtggccagcaagtcatcgtccgtggttccggaccaggcctgcatcagccagcgcttcctgcagggaaccatcattgccctggtggtggtcatggccttcagcgtggtgtccatgtccacactgtacgtgctgagcctgcgcacagaggaggacctggtagacactgatggctcttttgccgtgtccacttcctgtctcctggccctgctccggccccagccccctggggggagtgaggccttgtgcccatggtccagccagagctttgggaccacgcagctccgacagtcccccttgaccacggggctaccaggcatacagccctctttgctgctggtgaccaccagcctcaccagctcggccccaggttctgctgtccgcaccttggacatgtgttccagccacccctgccctgtcatctgctgttcctcacccactaccaaccctaccactggtcctagtcttggccccagctttaaccctggccatgttctcagcccaagtcccagccccagcaccaaccgctcaggccccagccagatggcccttctgccagtcaccaacatcagagccaagtcctggggtctttcagtcaatggcattggccactccaagcatcacaagagtctggagcctctggccagccctgcagtccccttccctggggggcagggcaaagccaagaacagtcccagccttggtttccatggccgggcccgccgaggggccctccagtccagcgtgggccctgctgagcccacctgggcccagggccagtcagcctctctccttgcagagccagtgccctccctgacctccatccaggtgctggagaattcgatgtccatcacctcccagtactgtgctccaggggatgcctgcaggcctgggaacttcacctaccacatccctgtcagtagtggcaccccactgcacctcagcctgactctgcagatgaactcctcctcccccgtgtctgtggtgctgtgcagcctgaggtcaaaggaggaaccatgtgaggaggggagccttccacagagtctccacacccaccaggacacccagggcacctctcaccggtggccaataaccatcctgtccttccgtgaattcacctaccacttccgggtggcactgctgggtcaggccaactgcagttcagaggctctcgcccagccagccacagactaccacttccacttctaccgcctgtgtgactgagctgccctcctgaggcagcaccacaccagggaccaggggtgcccaggcaccccccaacactggatgcaatggtgttacactggagcccgctgcaggccagctctgctgttcactggccctacccgagactggtgaaactggaagtcttcacactggagttgctgttccagctggtcgcccctcacggcacagagggaacctgagagccagagacttcttgggccttcctgcctgccaccccctaggggccaggacaggaccagtttacctctttccagatatggtggttggagggctggttcaggtgccctggagggaaggggaagcctgtggccctgatttgttcagagcccattctcccttgcctccccttttgagactggagccaacccttttggagagaggacctgcccacctttgagatcagcagggggctcggatccagccctaagagacttgggtggacccccatgagtcaatggagggcagacggctctcccccttaaagctgttccctgggggatggcttggtagtggactttctggggtttgcctgttacgccagactcggacttctaagctttaagtgtggcccaggaggtttcttctccctgggagggcttggctcccaagaagtcccagggcagccgaggccagccctgcctgggttggagaaactgactttgtgccttaagtctactcagtgcctggtgaagccaccctcagcccttcacaggcctgaaccagtaggggccagtgggccaggtaagccctagagccttgaaccaggaatatccaggaagaggaaattccctttgagcccccagatggtattgcagcttcactgcctgcgttcctgggagcgtctggagctcacagtgatcagtgaccacatcattctctctgagcagaggagcaggaatccctcaagcagcagcctggtcttggctggtgggcagatgcaaatagcttttgctgttattaatgaagtaattactaaatgcacttaaaccagggcaggaaggaatggaaggatggagctagaaagctcagagtgggccagagcaggggtgtgacacttgcaaagacagggctctgactctgatccctcccagggagcctccgacacccatcccactcccaaccaccaagaccctgggttagggaagaagttgtatcttaagtgccaccttcaagtttcttagtggtgcctggtgcattccgaggctacatccaggctcatggaaggagtgtagtattcatttagccatgtctgccatgggtccagaaatgggaaagggaattgctgtccttgccctgtggtatgctgccacctctttgggaagcaggccttgcccctgtcccaccactcattctcagctttgaatgggaggcctttctatagtggaggcctttccttgaagcctatgaactgcaggcccccttttgccattgatctcaaagcacttgtcctcaggatagggaagagcagggggatgcaggaatagcagggatagcttgctcccagccccctccccaatttggttccgttgacataggaattttacgattcccaaaccatgcaggggctgagccttccttatgatgactttgttctccctcccactgggggaatcctccctatgccttaaaactgccgagccccactccatgtaataggattcctgggcttcctcaatgggggttcatgttcttggactgcgggccctcagtccttaactggaaagtgaccgtccactgccccatggagcccatctggacacagcacagccccaaaaccgttagcagctggctctgtttccaagcctggggaggggttcctcagtgcaggagttggggacaggctggggatccaagctgcttgagggggtcaaccttggaccaaagttgccttaagcctgtggtaaaagggcttcagggaaggtaagtgggccacctgctggaagctgccagctgcccggctggcaatggtgtgagtgtcttggccctgtccctgccctggggtccagcaggtcatccctcccttcttctctctcctttggcgtttgttcctgtagtcactgggctaatctccccctagcttcaagctgtacatagggcctcccagtgcaaatcctcctgcccataccgtgcacccttagaagcctgcgtgtgcatagagcgccccctacttcccagttaactcccagttcttctccctgagcttggtatttgtcatgtgccaactctgactctgaggtgggcagtgagggaagcagccccgggcctgcttgcttcctgtccccgaaatgttcgtttcttctgaagtaaatatacatatataaataaatgtataaatactgctttgtatctga

SEQ ID NO: 44871 - DNA, 3456 bp, Artificial Sequence
  derived and/or modified sequence
atggaggtggtggacgagaccgaggccctgcagagattcttcgagggccacgacatcaacggcgccctggagcccagcaacatcgacaccagcatcctggaggagtacatcagcaaggaggacgccagcgacctgtgcttccccgacatcagcgcccccgccagcagcgccagctacagccacggccagcccgccatgcccggcagcagcggcgtgcaccacctgagcccccccggcggcggccccagccccggcagacacggccccctgcccccccccggctacggcacccccctgaactgcaacaacaacaacggcatgggcgccgcccccaagcccttccccggcggcaccggcccccccatcaaggccgagcccaaggccccctacgcccccggcaccctgcccgacagcccccccgacagcggcagcgaggcctacagcccccagcaggtgaacgagccccacctgctgagaaccatcacccccgagaccctgtgccacgtgggcgtgcccagcagactggagcaccccccccccccccccgcccacctgcccggcccccccccccccccccccccccccccccactaccccgtgctgcagagagacctgtacatgaaggccgagccccccatcccccactacgccgccatgggccagggcctggtgcccaccgacctgcaccacacccagcagagccagatgctgcaccagctgctgcagcagcacggcgccgagctgcccacccaccccagcaagaagagaaagcacagcgagagcccccccagcaccctgaacgcccagatgctgaacggcatgatcaagcaggagcccggcaccgtgaccgccctgcccctgcaccccaccagagcccccagccccccctggcccccccagggccccctgagccccggccccggcagcctgcccctgagcatcgccagagtgcagacccccccctggcacccccccggcgcccccagccccggcctgctgcaggacagcgacagcctgagcggcagctacctggaccccaactaccagagcatcaagtggcagccccaccagcagaacaagtgggccaccctgtacgacgccaactacaaggagctgcccatgctgacctacagagtggacgccgacaagggcttcaacttcagcgtgggcgacgacgccttcgtgtgccagaagaagaaccacttccaggtgaccgtgtacatcggcatgctgggcgagcccaagtacgtgaagacccccgagggcctgaagcccctggactgcttctacctgaagctgcacggcgtgaagctggaggccctgaaccagagcatcaacatcgagcagagccagagcgacagaagcaagagacccttcaaccccgtgaccgtgaacctgccccccgagcaggtgaccaaggtgaccgtgggcagactgcacttcagcgagaccaccgccaacaacatgagaaagaagggcaagcccaaccccgaccagagatacttcatgctggtggtggccctgcaggcccacgcccagaaccagaactacaccctggccgcccagatcagcgagagaatcatcgtgagagccagcaaccccggccagttcgagagcgacagcgacgtgctgtggcagagagcccaggtgcccgacaccgtgttccaccacggcagagtgggcatcaacaccgacagacccgacgaggccctggtggtgcacggcaacgtgaaggtgatgggcagcctgatgcaccccagcgacctgagagccaaggagcacgtgcaggaggtggacaccaccgagcagctgaagagaatcagcagaatgagactggtgcactacagatacaagcccgagttcgccgccagcgccggcatcgaggccaccgcccccgagaccggcgtgatcgcccaggaggtgaaggagatcctgcccgaggccgtgaaggacaccggcgacatggtgttcgccaacggcaagaccatcgagaacttcctggtggtgaacaaggagagaatcttcatggagaacgtgggcgccgtgaaggagctgtgcaagctgaccgacaacctggagaccagaatcgacgagctggagagatggagccacaagctggccaagctgagaagactggacagcctgaagagcaccggcagcagcggcgccttcagccacgccggcagccagttcagcagagccggcagcgtgccccacaagaagagaccccccaaggtggccagcaagagcagcagcgtggtgcccgaccaggcctgcatcagccagagattcctgcagggcaccatcatcgccctggtggtggtgatggccttcagcgtggtgagcatgagcaccctgtacgtgctgagcctgagaaccgaggaggacctggtggacaccgacggcagcttcgccgtgagcaccagctgcctgctggccctgctgagaccccagccccccggcggcagcgaggccctgtgcccctggagcagccagagcttcggcaccacccagctgagacagagccccctgaccaccggcctgcccggcatccagcccagcctgctgctggtgaccaccagcctgaccagcagcgcccccggcagcgccgtgagaaccctggacatgtgcagcagccacccctgccccgtgatctgctgcagcagccccaccaccaaccccaccaccggccccagcctgggccccagcttcaaccccggccacgtgctgagccccagccccagccccagcaccaacagaagcggccccagccagatggccctgctgcccgtgaccaacatcagagccaagagctggggcctgagcgtgaacggcatcggccacagcaagcaccacaagagcctggagcccctggccagccccgccgtgcccttccccggcggccagggcaaggccaagaacagccccagcctgggcttccacggcagagccagaagaggcgccctgcagagcagcgtgggccccgccgagcccacctgggcccagggccagagcgccagcctgctggccgagcccgtgcccagcctgaccagcatccaggtgctggagaacagcatgagcatcaccagccagtactgcgcccccggcgacgcctgcagacccggcaacttcacctaccacatccccgtgagcagcggcacccccctgcacctgagcctgaccctgcagatgaacagcagcagccccgtgagcgtggtgctgtgcagcctgagaagcaaggaggagccctgcgaggagggcagcctgccccagagcctgcacacccaccaggacacccagggcaccagccacagatggcccatcaccatcctgagcttcagagagttcacctaccacttcagagtggccctgctgggccaggccaactgcagcagcgaggccctggcccagcccgccaccgactaccacttccacttctacagactgtgcgactag

SEQ ID NO: 44872 - protein, 590 aa, Artificial Sequence
  derived and/or modified sequence
MAPSGLKAVVGEKILSGVIRSVKKDGEWKVLIMDHPSMRILSSCCKMSDILAEGITIVEDINKRREPIPSLEAIYLLSPTEKALIKDFQGTPTFTYKAAHIFFTDTCPEPLFSELGRSRLAKVVKTLKEIHLAFLPYEAQVFSLDAPHSTYNLYCPFRAEERTRQLEVLAQQIATLCATLQEYPAIRYRKGPEDTAQLAHAVLAKLNAFKADTPSLGEGPEKTRSQLLIMDRAADPVSPLLHELTFQAMAYDLLDIEQDTYRYETTGLSEAREKAVLLDEDDDLWVELRHMHIADVSKKVTELLRTFCESKRLTTDKANIKDLSQILKKMPQYQKELNKYSTHLHLADDCMKHFKGSVEKLCSVEQDLAMGSDAEGEKIKDSMKLIVPVLLDAAVPAYDKIRVLLLYILLRNGVSEENLAKLIQHANVQAHSSLIRNLEQLGGTVTNPGGSGTSSRLEPRERMEPTYQLSRWTPVIKDVMEDAVEDRLDRNLWPFVSDPAPTASSQAAVSARFGHWHKNKAGIEARAGPRLIVYVMGGVAMSEMRAAYEVTRATEGKWEVLIGSSHILTPTRFLDDLKALDKKLEDIALP

SEQ ID NO: 44873 - DNA, 1773 bp, Artificial Sequence
  derived and/or modified sequence
atggcccccagcggcctgaaggccgtggtgggcgagaagatcctgagcggcgtgatcagaagcgtgaagaaggacggcgagtggaaggtgctgatcatggaccaccccagcatgagaatcctgagcagctgctgcaagatgagcgacatcctggccgagggcatcaccatcgtggaggacatcaacaagagaagagagcccatccccagcctggaggccatctacctgctgagccccaccgagaaggccctgatcaaggacttccagggcacccccaccttcacctacaaggccgcccacatcttcttcaccgacacctgccccgagcccctgttcagcgagctgggcagaagcagactggccaaggtggtgaagaccctgaaggagatccacctggccttcctgccctacgaggcccaggtgttcagcctggacgccccccacagcacctacaacctgtactgccccttcagagccgaggagagaaccagacagctggaggtgctggcccagcagatcgccaccctgtgcgccaccctgcaggagtaccccgccatcagatacagaaagggccccgaggacaccgcccagctggcccacgccgtgctggccaagctgaacgccttcaaggccgacacccccagcctgggcgagggccccgagaagaccagaagccagctgctgatcatggacagagccgccgaccccgtgagccccctgctgcacgagctgaccttccaggccatggcctacgacctgctggacatcgagcaggacacctacagatacgagaccaccggcctgagcgaggccagagagaaggccgtgctgctggacgaggacgacgacctgtgggtggagctgagacacatgcacatcgccgacgtgagcaagaaggtgaccgagctgctgagaaccttctgcgagagcaagagactgaccaccgacaaggccaacatcaaggacctgagccagatcctgaagaagatgccccagtaccagaaggagctgaacaagtacagcacccacctgcacctggccgacgactgcatgaagcacttcaagggcagcgtggagaagctgtgcagcgtggagcaggacctggccatgggcagcgacgccgagggcgagaagatcaaggacagcatgaagctgatcgtgcccgtgctgctggacgccgccgtgcccgcctacgacaagatcagagtgctgctgctgtacatcctgctgagaaacggcgtgagcgaggagaacctggccaagctgatccagcacgccaacgtgcaggcccacagcagcctgatcagaaacctggagcagctgggcggcaccgtgaccaaccccggcggcagcggcaccagcagcagactggagcccagagagagaatggagcccacctaccagctgagcagatggacccccgtgatcaaggacgtgatggaggacgccgtggaggacagactggacagaaacctgtggcccttcgtgagcgaccccgcccccaccgccagcagccaggccgccgtgagcgccagattcggccactggcacaagaacaaggccggcatcgaggccagagccggccccagactgatcgtgtacgtgatgggcggcgtggccatgagcgagatgagagccgcctacgaggtgaccagagccaccgagggcaagtgggaggtgctgatcggcagcagccacatcctgacccccaccagattcctggacgacctgaaggccctggacaagaagctggaggacatcgccctgccctag

SEQ ID NO: 44874 - DNA, 1773 bp, Artificial Sequence
  derived and/or modified sequence
atggcccccagcggcctgaaggcagttgtgggagaaaagattctctctggggtcatccgcagtgtgaaaaaggatggagagtggaaggtactcatcatggaccacccctctatgcgaatcctgtcatcctgttgcaaaatgagcgacatcttagccgaaggcattaccatcgttgaagacattaacaaaaggcgagagcccattccttcgctcgaggccatttatctcctcagccccactgagaaggcattgatcaaagatttccagggaaccccaactttcacttataaggccgcgcacatatttttcaccgatacttgccccgagcctttgttttcggagctggggaggtcacggttggccaaggtggttaagactttaaaggagatccatctggcttttctgccttatgaggctcaggtattttctctggacgcaccacacagcacctataacctttactgtcctttcagagcagaggagcgcacgagacaactagaagtgctcgctcaacagatcgcaacgctctgtgccacactccaggagtatcccgcgatccggtatagaaaggggcccgaagacaccgcccagttagcccatgcagtactggcaaagctgaacgcgttcaaagcagacactccgtccctgggagaggggcccgagaaaacacgaagtcagttgctcatcatggaccgggccgcagatccagtatcacccttgctccacgaactgaccttccaagcaatggcctatgacttgctggacattgaacaggacacttatcggtatgagaccactgggctctcagaagctcgagagaaggctgtactcctcgacgaggacgatgacctttgggtggagctgcgacatatgcacatcgctgacgtgtcaaaaaaagtcactgaattgttgcgcaccttttgcgagtctaaacgattgacaaccgataaggcgaatattaaggatctgtcacaaatcctcaaaaagatgcctcaataccagaaggaactgaacaagtacagtacccacctacatcttgctgacgactgcatgaagcatttcaaagggagcgtggagaaactgtgtagtgtcgagcaagatctcgccatgggaagtgacgccgagggcgaaaagattaaagattcaatgaagttaatcgtccccgttctgcttgatgccgctgtgcctgcttatgacaagatccgagtactgctcctgtacatcctgcttcgaaacggtgtgtccgaagagaacttggcaaaactgatccagcatgccaatgtacaggcgcactcttcccttatccgcaatttggaacaactggggggcacagtcaccaatcccggagggtcaggtacatccagcagactagaaccaagggaaaggatggaacctacctaccaattgtcccggtggacaccggttataaaggacgttatggaggacgctgtggaagacagactggacaggaacctctggccattcgtgtctgatcctgccccaaccgcctcctcccaggcagccgtgagtgcacggttcggacactggcataagaacaaagctgggatcgaagcaagagccggtccgagacttattgtgtatgtcatggggggcgtagccatgtctgaaatgcgggccgcctacgaggttacacgcgctacagaaggaaaatgggaagtgctgatcggctcctctcatattttgacaccaaccaggttcctggatgatctcaaggcactggacaagaagctcgaggacattgctttaccttag

SEQ ID NO: 44875 - DNA, 1773 bp, Artificial Sequence
  derived and/or modified sequence
atggcccccagcggcctgaaggctgtggtgggggagaagatcctgagcggggtcatccgctctgtgaagaaggatggagagtggaaggtgctgatcatggaccaccccagcatgaggatcctgagcagctgctgcaagatgtctgacatcctggccgagggcatcaccatcgtggaggacatcaacaagaggcgggagcccatccccagcctggaggccatctacctgctgagccccacagagaaggccctgatcaaggacttccagggcacccccaccttcacctacaaggccgcccacatcttcttcacagacacctgcccagagcccctcttcagcgagctgggccgcagccggctggccaaggtggtgaagaccctgaaggagatccacctggccttcctgccctatgaggcccaggtgttcagcctggatgccccccacagcacctacaacctgtactgccccttccgggcagaggagaggacccggcagctggaggtgctggcccagcagatcgccaccctgtgtgccaccctgcaggagtacccagccatccgctacaggaagggccctgaggacacagcccagctggcccatgctgtgctggccaagctgaatgccttcaaggctgacacccccagcctgggggagggccctgagaagaccaggagccagctgctgatcatggacagagctgctgaccctgtgagccccctgctgcacgagctgaccttccaggccatggcctatgacctgctggacatcgagcaggacacctaccgctatgagaccaccggcctgtctgaggcccgggagaaggctgtgctgctggatgaagatgatgacctgtgggtggagctgcggcacatgcacatcgcagatgtgtccaagaaggtgacagagctgctgcggaccttctgtgagagcaagaggctgaccacagacaaggccaacatcaaggacctgagccagatcctgaagaagatgccccagtaccagaaggagctgaacaagtacagcacccacctgcacctggctgatgactgcatgaagcacttcaagggctctgtggagaagctgtgcagcgtggagcaggacctggccatgggcagtgatgctgagggggagaagatcaaggacagcatgaagctgattgtgcctgtgctgctggatgctgctgtgcctgcctatgacaagatccgggtgctgctgctgtacatcctgctgagaaatggagtgtctgaggagaacctggccaagctgatccagcacgccaacgtgcaggcccacagcagcctcatccggaacctggagcagctgggcggcaccgtgaccaaccctgggggcagcggcaccagcagccggctggagccccgggagaggatggagcccacctaccagctgagccgctggacccctgtgatcaaggatgtgatggaggatgctgtggaggaccggctggacaggaacctgtggccctttgtgtctgaccctgcccccacagccagcagccaggccgctgtgtctgccaggtttggccactggcacaagaacaaggccggcatcgaggcccgggccggccccaggctcatcgtgtatgtgatgggcggcgtggccatgtctgagatgagagctgcctatgaggtgacccgggccacagagggcaagtgggaggtgctgattggcagcagccacatcctgacccccacccgcttcctggatgacctgaaggccctggacaagaagctggaggacatcgccctgccctag

SEQ ID NO: 44876 - DNA, 1773 bp, Artificial Sequence
  derived and/or modified sequence
atggcccccagcggcctgaaggccgtggtgggcgagaagatcctgtctggggtcatccgttcagtcaaaaaggatggggaatggaaggtgctgattatggatcacccatccatgaggatcctgtcctcttgctgtaagatgtccgatattcttgctgaagggattacaatagtggaagatatcaataagcgacgtgagccaatcccttctctggaagctatatatcttctgtccccgaccgagaaagccctgatcaaagacttccagggaactcccaccttcacgtacaaggccgcccacattttctttacagatacctgtccggagccactgtttagcgagctcggccggagtaggttagccaaagtcgtgaagacactgaaggagattcacctcgctttcctgccctatgaggcccaagtgtttagcctcgatgcgcctcattccacctataacctctactgtccgttccgcgctgaggagcggactcgacaactcgaagtgttggcccaacagatcgcaactctctgtgccactctccaagagtatcccgctatccggtatagaaaaggtcccgaagacactgcacagctggcccacgctgtgctggccaagcttaacgcattcaaagcagacactcctagcctgggcgaaggcccagagaaaacgaggagtcaacttctgattatggaccgagctgcagacccagtgagtcccttgctccatgagttaaccttccaggccatggcatacgacctgttagatatagagcaggacacctatcgatacgagacaactggcttaagcgaagcgagggagaaagctgtattgctggacgaagatgatgatctatgggtagagctgcgccacatgcatatcgcagatgtatccaagaaggttaccgaactgctgagaacgttctgcgaaagcaagaggcttactacagataaggcgaacattaaggatcttagccagatcctgaagaaaatgccacagtatcagaaggaactgaacaagtattccacacatctgcacttggccgacgactgcatgaagcactttaagggttccgtcgagaaactgtgctcagtcgaacaggatctcgccatggggtccgatgctgagggggagaagattaaggattcaatgaaactgatagttccagtactgctggatgcggctgtgcctgcttatgacaagattcgtgtgttgctgttgtacatcctgctgcgaaacggcgtttccgaggagaatctggccaagctgatccagcacgctaacgtgcaggcccactcttctctgatccgcaaccttgagcagctcggaggcaccgtgaccaacccaggcgggagcggaacgagctccagactcgaaccccgggaaaggatggagccaacgtaccagttgtcaaggtggactcctgtgatcaaggatgtgatggaagacgcagttgaagaccgtcttgaccgcaatctgtggccctttgtgtcagatcctgccccgaccgcctcctcacaggctgctgtgtccgccaggttcggccattggcacaagaacaaggcgggtatcgaggctcgggcggggccaagattaatcgtatacgtgatggggggagtggccatgagcgagatgcgggcggcctacgaagtaactcgcgctacggaggggaaatgggaagtgctgatcggaagtagtcacatcctgactcctacacgcttcctagacgacctgaaggctctggataaaaaactggaagacatcgctctcccgtag

SEQ ID NO: 44877 - DNA, 1773 bp, Artificial Sequence
  derived and/or modified sequence
atggccccttctgggctgaaggcagtagtgggtgagaagatcctctccggcgtcattagaagtgttaaaaaggatggggagtggaaggtgcttattatggatcatccctcaatgcggattctgagctcttgctgcaagatgagcgacatactggcagaggggatcacaatcgtagaggatattaacaaacggagagagccgatcccatctttagaggcaatctacctcctgtcccccactgaaaaggcattaataaaggactttcagggcacccccaccttcacatacaaagcagctcatattttcttcaccgacacatgccccgagccgcttttctctgagctcgggcgatcaagactggcgaaggtggtgaaaacactgaaagagatacatctggccttcctgccgtatgaggcacaggtgttctctcttgacgctccacacagtacatataacctgtattgtccctttcgagcagaggagagaacaagacagctagaagtcctcgcacaacagatcgccaccctttgcgctacactccaggagtacccagccattcgttatcggaagggaccagaagatactgcccagctggcacatgcagtgcttgccaaacttaatgcattcaaagccgacactccatcgctcggcgagggacctgagaagacccggtcccagcttttgatcatggaccgcgctgctgacccggtgtccccactgcttcacgaacttacttttcaggcaatggcgtacgatttgctagatatcgagcaggacacgtatcggtacgaaaccaccggcctgtctgaggcccgtgaaaaggctgtgctacttgacgaagacgacgatctgtgggtggagctccgccatatgcatatcgccgatgtgtccaagaaggtaaccgagctgctgcggacattctgcgaatctaaaagacttactacagacaaagcgaatatcaaggacctgtctcagattctcaagaaaatgccacaataccaaaaggagctgaacaagtactccacacaccttcacctggcagatgattgcatgaaacattttaagggatccgttgaaaaactgtgcagtgtggaacaggacctcgctatggggagtgacgccgagggcgagaagatcaaggacagtatgaagctgatagtgcctgtgctgctagacgctgctgtgcccgcatatgataaaataagagtcttgcttctgtatatcttgctcaggaatggagtaagcgaagagaacctggctaagcttattcagcacgcgaacgtgcaggcccacagcagtctgatcagaaatctcgagcaactgggcggaaccgtcactaatccagggggttctggtacgagttcgcggctcgaacccagagaaagaatggaacccacgtaccagctgtcccgatggacgccagtcattaaagacgtcatggaggatgcagtggaggaccgccttgaccggaatctgtggcccttcgtgtccgaccctgccccaactgcctcgagtcaggctgccgtgagcgccagattcgggcactggcacaagaataaagcaggcatagaagctcgggcagggcctaggctaattgtctatgtgatgggaggagttgccatgagcgaaatgagagcggcatacgaggtgacacgggctacagaggggaaatgggaggtattgatcggatcctcacacattctaactcccactcggtttttggacgatttaaaggctctggacaagaaattagaggatatcgctctcccctag

SEQ ID NO: 44878 - DNA, 1880 bp, Artificial Sequence
  derived and/or modified sequence
accttgggacacacccggaagcggcggcggcgcccctcggggaagatggcgccctcggggctgaaggcggtggtgggggaaaaaattctgagcggagttattcggagtgtcaagaaggatggggagtggaaggtgcttatcatggatcacccaagcatgcgcatcttgtcttcctgctgcaaaatgtcagatatcctggctgagggcatcaccattgttgaagacatcaacaaacggcgggaacccattcccagtctggaggccatttatttgctgagccccacggagaaggccctgatcaaagacttccaggggaccccgactttcacctacaaagcggcccatatcttcttcaccgacacctgccccgagcccctgttcagtgagctaggccgctctcgtctggcaaaggtggtgaagacgttgaaggagattcaccttgccttcctcccctacgaggcccaggtgttctccctcgatgctccccacagcacctacaacctctactgccccttccgggcagaggagcgcacgcggcagctcgaggtgctggcccagcagattgccacgctgtgcgccaccctgcaggagtacccggccatccgctaccgcaagggcccagaggacacagcccagttggcccacgccgtcctggccaagctgaacgccttcaaggcagacactcccagtctgggcgagggcccagagaaaacccgctcccagctgctgataatggaccgggcagctgaccccgtgtccccactactgcatgagctcacgttccaggccatggcgtatgatctgctggacatagagcaggacacatacaggtatgagaccaccgggctgagcgaggcgcgggagaaggccgtcttgctggacgaggacgatgacttgtgggtggagcttcgccacatgcatatcgcagatgtgtccaagaaggtcacggagctcctgaggaccttctgtgagagcaagaggctgaccacggacaaggcgaacatcaaagacctatcccagatcctgaaaaagatgccgcagtaccagaaggagctgaataagtattctacgcacctgcatctagcagatgattgtatgaagcacttcaagggctcggtggagaagctgtgtagtgtggagcaggacctggccatgggctccgacgcagagggggagaagatcaaggactccatgaagctgatcgttccggtgctgctggacgcggcggtgcccgcctacgacaagatccgggtcctgctgctctacatcctccttcggaatggtgtgagtgaggagaacctggccaagctgatccagcatgccaatgtacaggcgcacagcagcctcatccgtaacctggagcagctgggaggcactgtcaccaaccccgggggctcggggacctccagccggctggagccgagagaacgcatggagcccacctatcagctgtcccgctggaccccggtcatcaaggatgtaatggaggacgccgtggaggaccggctggacaggaacctgtggcccttcgtatccgaccccgcccccacggccagctcccaggccgctgtcagtgcccgcttcggtcactggcacaagaacaaggctggcatagaagcccgggcgggcccccggctcatcgtgtatgtcatgggcggtgtggccatgtcagagatgagggccgcctacgaggtgaccagggccaccgagggcaagtgggaggtgctcattggctcctcacacatcctcaccccgacccgcttcctggatgacctgaaggcactggacaagaagctggaggacattgccctgccctgacccctggccccgccccctacccctccctttccagagaaataaactcttcccgtcgctctgcc

SEQ ID NO: 44879 - protein, 457 aa, Artificial Sequence
  derived and/or modified sequence
MEEGGGGVRSLVPGGPVLLVLCGLLEASGGGRALPQLSDDIPFRVNWPGTEFSLPTTGVLYKEDNYVIMTTAHKEKYKCILPLVTSGDEEEEKDYKGPNPRELLEPLFKQSSCSYRIESYWTYEVCHGKHIRQYHEEKETGQKINIHEYYLGNMLAKNLLFEKEREAEEKEKSNEIPTKNIEGQMTPYYPVGMGNGTPCSLKQNRPRSSTVMYICHPESKHEILSVAEVTTCEYEVVILTPLLCSHPKYRFRASPVNDIFCQSLPGSPFKPLTLRQLEQQEEILRVPFRRNKEEDLQSTKEERFPAIHKSIAIGSQPVLTVGTTHISKLTDDQLIKEFLSGSYCFRGGVGWWKYEFCYGKHVHQYHEDKDSGKTSVVVGTWNQEEHIEWAKKNTARAYHLQDDGTQTVRCKESDSPHAVTVYMLEPHSCQYILGVESPVICKILDTADENGLLSLPN

SEQ ID NO: 44880 - DNA, 1374 bp, Artificial Sequence
  derived and/or modified sequence
atggaggaagggggtggcggagtgaggtctctggtccctggtggcccagtgctactggttctctgcggacttttggaggctagtggcggtgggagagccctaccgcagctgagcgacgacatccctttcagggtgaactggccaggcaccgagttttcgctacctacaaccggggtgctctataaggaggataactacgtgatcatgaccaccgctcataaggaaaagtataaatgtatcttgcctctggttacatctggagatgaggaggaggagaaggattacaagggacctaatccacgcgagcttctcgagccattattcaagcagtcatcctgctcttatagaatagagtcctactggacctatgaggtgtgccacgggaagcatatccgacaataccatgaggaaaaggagactggtcagaaaattaacatccatgagtactacctgggcaatatgttggctaagaacctcctgtttgaaaaagagcgcgaagcggaagagaaagaaaaatccaacgagattcccactaagaatatcgaaggccaaatgaccccctactatcctgtcggaatggggaatgggaccccatgttccctcaaacagaatcgacctcgaagctccaccgtgatgtatatttgtcaccctgagagcaagcatgaaattctgtcagtggccgaagtcaccacatgcgagtacgaagttgtgatcctaacccctctgttatgtagccacccaaagtatcgattcagagcctcaccggtcaacgacatcttctgtcagtctctgcctggctcacctttcaaaccattgaccctgagacagctggagcaacaggaagaaatcctccgagttccttttcggagaaataaggaggaggacctccagagtacaaaggaggaaagattccccgccatccacaagtccatcgcaattggctctcagccagtgctgaccgttggcaccacacacatatcgaagcttactgacgaccaactcattaaagagttcctgtccgggtcttattgtttcagagggggagtggggtggtggaaatacgaattctgctatggtaagcacgtgcaccagtaccatgaagacaaggattctggaaagacttcagtggtagtggggacttggaaccaggaggagcacattgagtgggctaagaaaaatacggcgagggcctaccatctgcaggacgacggtacccagactgtccggtgtaaagagtcggactctcctcacgccgtcacagtgtacatgctggagcctcacagctgtcagtacatccttggagtggagagtccggtgatttgcaagatattggacactgcggatgagaacgggctcctgagcctaccgaactag

SEQ ID NO: 44881 - DNA, 1374 bp, Artificial Sequence
  derived and/or modified sequence
atggaggagggcggcggcggcgtgcgcagcctggtgcctgggggccctgtgctgctggtgctgtgtggcctgctggaggccagcggcggcggccgggccctgccccagctgagtgatgacatccccttccgggtgaactggccaggcacagagttcagcctgcccaccactggagtgctgtacaaggaggacaactacgtgatcatgaccacagcccacaaggagaagtacaagtgcatcctgcccctggtgaccagcggagatgaggaggaggagaaggactacaagggccccaacccccgggagctgctggagcccctcttcaagcagagcagctgcagctacagaattgagagctactggacctatgaggtgtgccacggcaagcacatccggcagtaccacgaggagaaggagaccggccagaagatcaacatccacgagtactacctgggcaacatgctggccaagaacctgctgtttgagaaggagcgggaggccgaggagaaggagaagagcaatgagatccccaccaagaacatcgagggccagatgaccccctactaccctgtgggcatgggaaatggcaccccctgcagcctgaagcagaaccggcccaggagcagcacagtgatgtacatctgccaccctgagagcaagcatgagatcctgtctgtggccgaggtgaccacctgtgaatatgaggtggtgatcctgacccccctgctgtgcagccaccccaagtaccgcttccgggccagccctgtgaatgacatcttctgccagagcctgcccggcagccccttcaagcccctgaccctgcggcagctggagcagcaggaggagatcctgcgggtgcccttcagaagaaacaaggaggaggacctgcagagcaccaaggaggagcgcttccctgccatccacaagagcatcgccatcggcagccagcctgtgctgactgtgggcaccacccacatcagcaagctgacagatgaccagctgatcaaggagttcctgagcggcagctactgcttccggggcggcgtgggctggtggaagtatgagttctgctacggcaagcacgtgcaccagtaccacgaggacaaggacagcggcaagacctctgtggtggtgggcacctggaaccaggaggagcacatcgagtgggccaagaagaacacagcccgggcctaccacctgcaggatgatggcacccagacagtgcgctgcaaggagagtgacagcccccatgctgtgacagtgtacatgctggagccccacagctgccagtacatcctgggcgtggagagccctgtgatctgcaagatcctggacacagcagatgaaaatggcctgctgagcctgcccaactag

SEQ ID NO: 44882 - DNA, 1374 bp, Artificial Sequence
  derived and/or modified sequence
atggaggagggcggcggcggcgtgcggagcctggtgcccggcggccctgtgctcttggtgctgtgcggactattggaagcgagcggtggcgggcgcgctctgccacagctctcagacgacatccctttcagagtgaactggccagggacagagttcagcctaccaaccacaggggtgctatacaaagaggataactacgtaatcatgactaccgcccataaggagaagtataagtgtatccttccattggttacctctggagacgaagaagaggaaaaggactataaagggccgaatcccagagaattgttagagccgctgttcaaacaatcgagttgtagttaccggatcgaatcttactggacctacgaggtgtgtcacgggaaacacatccgtcaatatcatgaagagaaagagactggtcagaagatcaatatccatgaatactatttggggaacatgcttgccaagaatctgttatttgaaaaagaacgggaggccgaggagaaggagaagagcaatgagatccctactaaaaatattgaagggcagatgactccttattacccagtcggcatgggcaacggaaccccgtgctcacttaagcagaatcggccccgcagctcaacagtcatgtacatctgccatccagagagtaagcacgagattcttagcgtcgccgaggtcacaacctgcgaatacgaggtggtcatcctgacgcccctgctgtgctctcatcctaagtatcggttccgcgcgtcaccagtgaacgacatattctgtcaaagtctgcctgggagcccgttcaagcccctcacactccgccagctcgaacagcaggaggagatacttagggtgccctttcgcaggaacaaagaagaggatctgcaatcaacgaaagaggagcggttccccgccatccacaagagcatcgcaatcggctcccaacccgtgctgacagtcggaactactcacatttccaagctcactgatgatcagctgatcaaagaatttctttcaggtagttactgtttcagggggggcgtcggctggtggaagtacgagttctgctatggtaagcatgtacatcagtaccacgaggataaagactctggaaaaaccagcgtggtcgtgggcacctggaatcaagaagagcacatcgagtgggctaagaagaacacagcacgggcctatcatctccaagacgacggtactcagacagtgcgttgcaaagaatctgactcccctcacgccgtaaccgtctacatgttggaaccacactcttgccagtatatactcggggtggagtcacctgtaatttgcaaaattctagatacagccgacgaaaatggccttctgtctctgcccaattag

SEQ ID NO: 44883 - DNA, 1374 bp, Artificial Sequence
  derived and/or modified sequence
atggaggaaggtggaggaggggttagaagtctggtgcccggaggtcctgtgcttctggtgctctgtggcctgctggaggcttccggagggggaagagcgctgccccagctgtccgatgatatcccctttcgcgtgaactggcctggcaccgaattctctctccccactaccggtgtgctgtacaaggaggataactacgtgatcatgaccaccgcccacaaagagaaatacaagtgtatcctgcctctcgtcacttctggggacgaagaagaggaaaaggattacaagggccctaatccccgtgagttgcttgaacctctgttcaaacaaagctcgtgctcttatcggattgagtcttactggacttatgaggtctgccacggaaaacacatacgacagtatcacgaggagaaggagactggccaaaaaataaatatacatgagtactatctgggcaatatgttggccaaaaatcttcttttcgagaaggaacgggaggctgaagagaaagaaaaatctaacgaaatacccacgaagaatatcgaaggacagatgacgccctactaccccgtcggaatgggcaatgggaccccctgtagcctcaagcagaatcgaccaagatcaagcacagttatgtatatttgccaccctgaaagcaagcatgagatattatccgtagccgaagtcactacatgcgagtatgaagtggtgatcttgaccccactgctttgtagccatcctaagtaccgctttagagcctccccagtgaacgatatattttgccaaagtcttcctggctcaccattcaagccgttaacgctccgccagcttgagcaacaggaggagatcctccgcgtccccttccgaagaaataaggaggaggacttacagagtacaaaggaagaaagattcccagctatccacaagagtatagcaataggctcccagcccgtcctgaccgttggaaccacacacatcagcaagttgacagacgaccaactcatcaaggagttccttagtgggtcttactgcttccgcggtggcgtgggttggtggaaatatgaattttgctacgggaagcacgtgcaccaatatcacgaagacaaagacagcggaaaaacaagcgtagtcgtgggaacttggaaccaggaggagcacatagaatgggcaaagaaaaacactgctcgggcttatcatctgcaagatgatgggactcagaccgtgaggtgtaaagaatctgactctcctcacgctgtaaccgtgtacatgctggagccacatagctgccagtatattctgggcgtggagtctcctgtcatctgcaaaatacttgacacagcggacgagaacggcctcctctctctgccaaattag

SEQ ID NO: 44884 - DNA, 1374 bp, Artificial Sequence
  derived and/or modified sequence
atggaggagggcggcggcggcgtgagaagcctggtgcccggcggccccgtgctgctggtgctgtgcggcctgctggaggccagcggcggcggcagagccctgccccagctgagcgacgacatccccttcagagtgaactggcccggcaccgagttcagcctgcccaccaccggcgtgctgtacaaggaggacaactacgtgatcatgaccaccgcccacaaggagaagtacaagtgcatcctgcccctggtgaccagcggcgacgaggaggaggagaaggactacaagggccccaaccccagagagctgctggagcccctgttcaagcagagcagctgcagctacagaatcgagagctactggacctacgaggtgtgccacggcaagcacatcagacagtaccacgaggagaaggagaccggccagaagatcaacatccacgagtactacctgggcaacatgctggccaagaacctgctgttcgagaaggagagagaggccgaggagaaggagaagagcaacgagatccccaccaagaacatcgagggccagatgaccccctactaccccgtgggcatgggcaacggcaccccctgcagcctgaagcagaacagacccagaagcagcaccgtgatgtacatctgccaccccgagagcaagcacgagatcctgagcgtggccgaggtgaccacctgcgagtacgaggtggtgatcctgacccccctgctgtgcagccaccccaagtacagattcagagccagccccgtgaacgacatcttctgccagagcctgcccggcagccccttcaagcccctgaccctgagacagctggagcagcaggaggagatcctgagagtgcccttcagaagaaacaaggaggaggacctgcagagcaccaaggaggagagattccccgccatccacaagagcatcgccatcggcagccagcccgtgctgaccgtgggcaccacccacatcagcaagctgaccgacgaccagctgatcaaggagttcctgagcggcagctactgcttcagaggcggcgtgggctggtggaagtacgagttctgctacggcaagcacgtgcaccagtaccacgaggacaaggacagcggcaagaccagcgtggtggtgggcacctggaaccaggaggagcacatcgagtgggccaagaagaacaccgccagagcctaccacctgcaggacgacggcacccagaccgtgagatgcaaggagagcgacagcccccacgccgtgaccgtgtacatgctggagccccacagctgccagtacatcctgggcgtggagagccccgtgatctgcaagatcctggacaccgccgacgagaacggcctgctgagcctgcccaactag

SEQ ID NO: 44885 - DNA, 1756 bp, Artificial Sequence
  derived and/or modified sequence
ggcggcggttgggccggtgatacccgggcgctttatagtcccgccgcctcctcctccacctcctcctcctcctcctctcctcctggagcagaggaggttgtggcggtggctggagaaagcggcggcggaggatggaggaaggaggcggcggcgtacggagtctggtcccgggcgggccggtgttactggtcctctgcggcctcctggaggcgtccggcggcggccgagcccttcctcaactcagcgatgacatccctttccgagtcaactggcccggcaccgagttctctctgcccacaactggagttttatataaagaagataattatgtcatcatgacaactgcacataaagaaaaatataaatgcatacttccccttgtgacaagtggggatgaggaagaagaaaaggattataaaggccctaatccaagagagcttttggagccactatttaaacaaagcagttgttcctacagaattgagtcttattggacttacgaagtatgtcatggaaaacacattcggcagtaccatgaagagaaagaaactggtcagaaaataaatattcacgagtactaccttgggaatatgttggccaagaaccttctatttgaaaaagaacgagaagcagaagaaaaggaaaaatcaaatgagattcccactaaaaatatcgaaggtcagatgacaccatactatcctgtgggaatgggaaatggtacaccttgtagtttgaaacagaaccggcccagatcaagtactgtgatgtacatatgtcatcctgaatctaagcatgaaattctttcagtagctgaagttacaacttgtgaatatgaagttgtcattttgacaccactcttgtgcagtcatcctaaatataggttcagagcatctcctgtgaatgacatattttgtcaatcactgccaggatctccatttaagcccctcaccctgaggcagctggagcagcaggaagaaatactaagggtgccttttaggagaaataaagaggaagatttgcaatcaactaaagaagagagatttccagcgatccacaagtcgattgctattggctctcagccagtgctcactgttgggacaacccacatatccaaattgacagatgaccaactcataaaagagtttcttagtggttcttactgctttcgtgggggtgtcggttggtggaaatatgaattctgctatggcaaacatgtacatcaataccatgaggacaaggatagtgggaaaacctctgtggttgtcgggacatggaaccaagaagagcatattgaatgggctaagaagaatactgctagagcttatcatcttcaagacgatggtacccagacagtcaggtgcaaagaatcagattcacctcatgctgttactgtatatatgctagagcctcactcctgtcaatatattcttggggttgaatctccagtgatctgtaaaatcttagatacagcagatgaaaatggacttctttctctccccaactaaaggatattaaagttaggggaaagaaaagatcattgaaagtcatgataatttctgtcccactgtgtctcattatagagttctcagccattggacctcttctaaaggatggtataaaatgactctcaaccactttgtgaatacatatgtgtatataagaggttattgataaacttctgaggcagacatttgtctcgctttttttcatttttgttgtgtcttataaactgactgtttttctttgcttggatact

SEQ ID NO: 44886 - protein, 429 aa, Artificial Sequence
  derived and/or modified sequence
MEEGGGGVRSLVPGGPVLLVLCGLLEASGGGRALPQLSDDIPFRVNWPGTEFSLPTTGVLYKEDNYVIMTTAHKEKYKCILPLVTSGDEEEEKDYKGPNPRELLEPLFKQSSCSYRIESYWTYEVCHGKHIRQYHEEKETGQKINIHEYYLGNMLAKNLLFEKEREAEEKEKSNEIPTKNIEGQMTPYYPVGMGNGTPCSLKQNRPRSSTVMYICHPESKHEILSVAEVTTCEYEVVILTPLLCSHPKYRFRASPVNDIFCQSLPGSPFKPLTLRQLEQQEEILRVPFRRNKEGVGWWKYEFCYGKHVHQYHEDKDSGKTSVVVGTWNQEEHIEWAKKNTARAYHLQDDGTQTVRMVSHFYGNGDICDITDKPRQVTVKLKCKESDSPHAVTVYMLEPHSCQYILGVESPVICKILDTADENGLLSLPN

SEQ ID NO: 44887 - DNA, 1290 bp, Artificial Sequence
  derived and/or modified sequence
atggaagaaggcggggggggggttcgctcactggttccgggcggaccagtactgctggtcttgtgcggcctattggaggccagcggtggcggtagagccctccctcagttatctgatgatatcccttttagggtgaattggcctgggacagagtttagtttacccactactggggttttatataaagaagacaattacgtcatcatgaccacagcccacaaggagaagtataaatgtatactacccctggtgacctcaggcgacgaggaggaggagaaggattacaaaggccctaacccccgcgaactgctggaacccttattcaagcagtcatcctgtagctatagaattgagtcctactggacttacgaagtgtgtcacggcaaacatataagacagtaccacgaagagaaggaaactggccaaaagattaatatccacgagtactatcttggaaatatgctggccaaaaacttgctatttgagaaagaaagggaggctgaggaaaaggaaaaatccaacgagatcccaaccaaaaacatcgaaggtcagatgactccatattatcccgtgggaatggggaatggtacaccgtgttcactcaaacaaaatcgacctcgatccagcacagtgatgtatatttgccaccccgagtcgaagcatgagattttaagcgtagcggaagtcaccacatgcgagtatgaggttgttatcctaaccccactactgtgctcccacccaaagtatcgatttagggccagcccggtgaatgacatcttctgtcagtctctgcctggatctccatttaagccattgactcttcgccagctcgagcagcaggaggaaatcctgagagtaccgtttagaaggaataaggagggcgtaggctggtggaagtacgaattctgctacggcaagcatgtccaccagtatcacgaggacaaagacagtggaaaaactagcgtggtggtgggcacatggaaccaggaagaacatattgagtgggccaaaaagaacacagctcgtgcttaccatcttcaagacgacgggacgcagactgttcgcatggtctctcacttctacggcaatggtgatatctgcgatatcaccgacaagccacgccaggtgacggtaaagctgaaatgtaaagagagtgattctccgcacgccgtgaccgtttacatgttggaaccacacagctgtcagtatattctcggagtggaaagccccgtgatttgtaaaatcctggacacagccgacgagaatggcctccttagtctgcccaattag

SEQ ID NO: 44888 - DNA, 1290 bp, Artificial Sequence
  derived and/or modified sequence
atggaggagggcggcggcggcgtgcgcagcctggtgcctgggggccctgtgctgctggtgctgtgtggcctgctggaggccagcggcggcggccgggccctgccccagctgagtgatgacatccccttccgggtgaactggccaggcacagagttcagcctgcccaccactggagtgctgtacaaggaggacaactacgtgatcatgaccacagcccacaaggagaagtacaagtgcatcctgcccctggtgaccagcggagatgaggaggaggagaaggactacaagggccccaacccccgggagctgctggagcccctcttcaagcagagcagctgcagctacagaattgagagctactggacctatgaggtgtgccacggcaagcacatccggcagtaccacgaggagaaggagaccggccagaagatcaacatccacgagtactacctgggcaacatgctggccaagaacctgctgtttgagaaggagcgggaggccgaggagaaggagaagagcaatgagatccccaccaagaacatcgagggccagatgaccccctactaccctgtgggcatgggaaatggcaccccctgcagcctgaagcagaaccggcccaggagcagcacagtgatgtacatctgccaccctgagagcaagcatgagatcctgtctgtggccgaggtgaccacctgtgaatatgaggtggtgatcctgacccccctgctgtgcagccaccccaagtaccgcttccgggccagccctgtgaatgacatcttctgccagagcctgcccggcagccccttcaagcccctgaccctgcggcagctggagcagcaggaggagatcctgcgggtgcccttcagaagaaacaaggagggcgtgggctggtggaagtatgagttctgctacggcaagcacgtgcaccagtaccacgaggacaaggacagcggcaagacctctgtggtggtgggcacctggaaccaggaggagcacatcgagtgggccaagaagaacacagcccgggcctaccacctgcaggatgatggcacccagacagtgaggatggtgagccacttctatggaaatggagacatctgtgacatcacagacaagccccggcaggtgacagtgaagctgaagtgcaaggagagtgacagcccccatgctgtgacagtgtacatgctggagccccacagctgccagtacatcctgggcgtggagagccctgtgatctgcaagatcctggacacagcagatgaaaatggcctgctgagcctgcccaactag

SEQ ID NO: 44889 - DNA, 1290 bp, Artificial Sequence
  derived and/or modified sequence
atggaggagggcggcggcggcgtgcggagcctggtgcccggcggccccgtcctgcttgtactttgtgggttgctcgaagcctccgggggtggccgcgcccttccccagctcagcgacgacattcctttcagagtgaattggccagggactgagttctcgctgcccacaaccggcgtgctctataaggaagataattatgtcatcatgacgacagcacataaggagaagtacaagtgtattcttccactggtgacctcaggagacgaggaagaagagaaagattacaaaggacctaaccccagagaactgctagagcctcttttcaaacagtcttcttgttcctacaggatcgaaagctattggacctacgaggtttgtcacgggaaacacatcagacagtaccatgaggaaaaggaaacagggcaaaagatcaacatccatgaatactatctgggtaacatgctggctaaaaatctgctattcgagaaggaacgtgaagccgaggagaaggaaaaatcaaacgaaattcccacgaagaacatcgaaggacagatgaccccttactacccagtaggcatgggaaatggcaccccctgttccctgaagcaaaataggcctcgtagttccacagtcatgtacatctgccatccagaatctaagcacgaaatcctctctgttgccgaggtaaccacttgtgagtacgaagtagtgattcttaccccccttctatgctcacatcctaagtacaggtttcgcgcctcacccgtgaatgacattttctgccaaagccttccaggctcaccctttaaacccctgacacttagacaactggagcaacaagaggagattctaagagtgcccttcagacgcaacaaagagggtgtcggatggtggaagtacgagttttgctatgggaagcacgtccaccaataccatgaagacaaggactccggaaaaacttctgtggttgtgggcacttggaatcaagaggaacacattgagtgggctaaaaaaaacaccgctagagcgtaccacctgcaggacgacggcacacagacggtgcgcatggtgagccatttttacggcaatggggacatctgtgatattacagacaagcccaggcaggtaactgtgaagttaaagtgcaaagagagcgattctccccacgccgtcacagtctacatgctggagcctcattcatgccaatatattcttggagtagagtcaccggtgatctgtaaaatcctggacaccgctgatgagaacggactgctctctctgcccaactag

SEQ ID NO: 44890 - DNA, 1290 bp, Artificial Sequence
  derived and/or modified sequence
atggaggagggaggtggcggagtgaggtctctggtgcccggaggaccggtactcctagttctttgtggcctgctcgaagctagcggcggtggtagagccctgccgcagttgagtgatgacatcccatttcgtgttaattggcccggtacagagtttagccttcccaccaccggcgtcctctacaaagaggataactacgtcatcatgacgaccgcccataaggaaaagtataagtgcatattgccactggtcacctccggagacgaagaagaggaaaaagattataaaggtccaaatcctcgggagctgctggaacccctgtttaagcaatcctcctgctcttaccgtatagagtcctactggacttacgaggtgtgtcacggaaaacatattcgccagtaccatgaagaaaaagagaccggacagaagatcaacatccacgaatattacctcggtaacatgcttgccaaaaacctgctgtttgagaaagagcgcgaagctgaagagaaggagaagtcaaatgaaatccccacgaagaatatcgaaggccagatgactccatattaccctgtcggcatgggaaatgggactccatgtagtctcaagcagaacaggccgagatcaagtaccgtcatgtatatctgtcatccagagagcaagcacgagatcttgtccgtggccgaggtaactacttgcgagtacgaggtcgtaatcctcacgccattactctgctctcatccgaagtaccgattccgggctagcccagtcaacgatatcttctgtcagagtttgccaggctcacccttcaaaccattgactctgaggcagctggaacaacaagaggaaatactgagggtcccctttagacgaaataaggagggggtaggatggtggaagtacgagttttgctatggcaagcatgtccaccagtaccatgaggacaaagactctggtaagaccagtgtggtggttgggacctggaaccaggaagaacacatcgagtgggctaaaaagaacacagcacgggcttatcacctccaggacgacggaacgcagaccgttcggatggtgtcccatttctatggcaatggagacatatgcgacattactgataagcccagacaggtcacggtaaaattgaaatgtaaggagtctgattccccccatgcagtgaccgtatatatgctggagccacattcttgtcagtatattttaggtgttgaaagtccagtcatttgcaagatattagatacagccgatgagaatggcctgttatccctccctaattag

SEQ ID NO: 44891 - DNA, 1290 bp, Artificial Sequence
  derived and/or modified sequence
atggaggagggcggcggcggcgtgagaagcctggtgcccggcggccccgtgctgctggtgctgtgcggcctgctggaggccagcggcggcggcagagccctgccccagctgagcgacgacatccccttcagagtgaactggcccggcaccgagttcagcctgcccaccaccggcgtgctgtacaaggaggacaactacgtgatcatgaccaccgcccacaaggagaagtacaagtgcatcctgcccctggtgaccagcggcgacgaggaggaggagaaggactacaagggccccaaccccagagagctgctggagcccctgttcaagcagagcagctgcagctacagaatcgagagctactggacctacgaggtgtgccacggcaagcacatcagacagtaccacgaggagaaggagaccggccagaagatcaacatccacgagtactacctgggcaacatgctggccaagaacctgctgttcgagaaggagagagaggccgaggagaaggagaagagcaacgagatccccaccaagaacatcgagggccagatgaccccctactaccccgtgggcatgggcaacggcaccccctgcagcctgaagcagaacagacccagaagcagcaccgtgatgtacatctgccaccccgagagcaagcacgagatcctgagcgtggccgaggtgaccacctgcgagtacgaggtggtgatcctgacccccctgctgtgcagccaccccaagtacagattcagagccagccccgtgaacgacatcttctgccagagcctgcccggcagccccttcaagcccctgaccctgagacagctggagcagcaggaggagatcctgagagtgcccttcagaagaaacaaggagggcgtgggctggtggaagtacgagttctgctacggcaagcacgtgcaccagtaccacgaggacaaggacagcggcaagaccagcgtggtggtgggcacctggaaccaggaggagcacatcgagtgggccaagaagaacaccgccagagcctaccacctgcaggacgacggcacccagaccgtgagaatggtgagccacttctacggcaacggcgacatctgcgacatcaccgacaagcccagacaggtgaccgtgaagctgaagtgcaaggagagcgacagcccccacgccgtgaccgtgtacatgctggagccccacagctgccagtacatcctgggcgtggagagccccgtgatctgcaagatcctggacaccgccgacgagaacggcctgctgagcctgcccaactag

SEQ ID NO: 44892 - DNA, 2271 bp, Artificial Sequence
  derived and/or modified sequence
ggcggcggttgggccggtgatacccgggcgctttatagtcccgccgcctcctcctccacctcctcctcctcctcctctcctcctggagcagaggaggttgtggcggtggctggagaaagcggcggcggaggatggaggaaggaggcggcggcgtacggagtctggtcccgggcgggccggtgttactggtcctctgcggcctcctggaggcgtccggcggcggccgagcccttcctcaactcagcgatgacatccctttccgagtcaactggcccggcaccgagttctctctgcccacaactggagttttatataaagaagataattatgtcatcatgacaactgcacataaagaaaaatataaatgcatacttccccttgtgacaagtggggatgaggaagaagaaaaggattataaaggccctaatccaagagagcttttggagccactatttaaacaaagcagttgttcctacagaattgagtcttattggacttacgaagtatgtcatggaaaacacattcggcagtaccatgaagagaaagaaactggtcagaaaataaatattcacgagtactaccttgggaatatgttggccaagaaccttctatttgaaaaagaacgagaagcagaagaaaaggaaaaatcaaatgagattcccactaaaaatatcgaaggtcagatgacaccatactatcctgtgggaatgggaaatggtacaccttgtagtttgaaacagaaccggcccagatcaagtactgtgatgtacatatgtcatcctgaatctaagcatgaaattctttcagtagctgaagttacaacttgtgaatatgaagttgtcattttgacaccactcttgtgcagtcatcctaaatataggttcagagcatctcctgtgaatgacatattttgtcaatcactgccaggatctccatttaagcccctcaccctgaggcagctggagcagcaggaagaaatactaagggtgccttttaggagaaataaagagggtgtcggttggtggaaatatgaattctgctatggcaaacatgtacatcaataccatgaggacaaggatagtgggaaaacctctgtggttgtcgggacatggaaccaagaagagcatattgaatgggctaagaagaatactgctagagcttatcatcttcaagacgatggtacccagacagtcaggatggtgtcacatttttatggaaatggagatatttgtgatataactgacaaaccaagacaggtgactgtaaaactaaagtgcaaagaatcagattcacctcatgctgttactgtatatatgctagagcctcactcctgtcaatatattcttggggttgaatctccagtgatctgtaaaatcttagatacagcagatgaaaatggacttctttctctccccaactaaaggatattaaagttaggggaaagaaaagatcattgaaagtcatgataatttctgtcccactgtgtctcattatagagttctcagccattggacctcttctaaaggatggtataaaatgactctcaaccactttgtgaatacatatgtgtatataagaggttattgataaacttctgaggcagacatttgtctcgctttttttcatttttgttgtgtcttataaactgactgtttttctttgcttggatactgtgattccaaaataaatctcatccaagcaagttagagtccagcctaatcaaatgtcataattgttgtacctattgaaagtttttaaataatagatttattatgtaaattatagtatatgtaagtagctaatgaagtaaagatcatgaagaaagaaattgataggtgtaaatgagagaccatgtaaaatatgtaaattctagtacctgaaatcctttcaacagatttttatatagcaactgctctctgcaagtagttaaactagaaactgggcacatggtagaggctcacatgggagttgtcctcacccttgttaatctcaagaaactcttatttataataggttgcttctctctcagaacttttatctattacttttttcttcttatgagtatgtttactctcagagtatctatctgatgtagacagttggtgatgcttctgagactcagaatggtttactctaacaaaacactgtgctgtctatcccttgtacttgcctactgtaatatggatttcacttctgaacagtttacagcacaatatttattttaaagtgaataaaatgtccacaagcagtgttgtcatgtagtcaatggca

SEQ ID NO: 44893 - protein, 121 aa, Artificial Sequence
  derived and/or modified sequence
MGRIFLDHIGGTRLFSCANCDTILTNRSELISTRFTGATGRAFLFNKVVNLQYSEVQDRVMLTGRHMVRDVSCKNCNSKLGWIYEFATEDSQRYKEGRVILERALVRESEGFEEHVPSDNS

SEQ ID NO: 44894 - DNA, 366 bp, Artificial Sequence
  derived and/or modified sequence
atgggcagaatcttcctggaccacatcggcggcaccagactgttcagctgcgccaactgcgacaccatcctgaccaacagaagcgagctgatcagcaccagattcaccggcgccaccggcagagccttcctgttcaacaaggtggtgaacctgcagtacagcgaggtgcaggacagagtgatgctgaccggcagacacatggtgagagacgtgagctgcaagaactgcaacagcaagctgggctggatctacgagttcgccaccgaggacagccagagatacaaggagggcagagtgatcctggagagagccctggtgagagagagcgagggcttcgaggagcacgtgcccagcgacaacagctag

SEQ ID NO: 44895 - DNA, 366 bp, Artificial Sequence
  derived and/or modified sequence
atgggccgcatctttctggaccatatcggcgggaccaggctcttttcttgcgcaaattgcgataccattttgactaaccggtccgagctgatctctacgaggttcaccggagctactggacgagccttcttgtttaataaggttgttaatttgcaatactcagaagtacaggatcgtgtgatgctgactggccgccacatggtgagagacgtatcctgtaagaattgcaactccaagctgggctggatctatgaatttgcgacggaagattctcaaagatataaggagggccgagttattctggagcgagcactcgttcgtgaaagcgaaggcttcgaagagcacgtgccatcagacaactcttag

SEQ ID NO: 44896 - DNA, 366 bp, Artificial Sequence
  derived and/or modified sequence
atgggcaggatcttcttggatcatatcggagggacgcggttattctcatgcgcaaattgtgatactattctcactaatagaagcgaactcatttcaaccagatttaccggcgcgactggcagggcctttttatttaataaagtggttaacctgcaatattccgaagtccaggaccgggtgatgctgaccggcaggcacatggtgcgggatgtgagctgtaagaattgtaactctaagctcggctggatctatgagttcgccaccgaggactcccagcggtataaagaaggacgcgtcatcctggaacgtgctctggtgcgggagtcagagggattcgaggaacacgtgccatccgacaatagctag

SEQ ID NO: 44897 - DNA, 366 bp, Artificial Sequence
  derived and/or modified sequence
atgggcaggatctttcttgatcatattgggggcacgcggctgttctcttgcgccaactgcgataccattcttaccaaccgatccgagttgatcagcacccggttcaccggggctactgggcgcgcctttctcttcaacaaggtcgtgaacttgcagtacagcgaggtacaggatcgggttatgctgactgggaggcacatggtccgggacgtgtcttgcaaaaattgtaattccaagctgggctggatctatgaattcgctaccgaggatagccagcgctacaaggagggcagggtgattctggagagggctctggtgcgggaaagcgaaggatttgaggaacacgtccccagcgataacagttag

SEQ ID NO: 44898 - DNA, 366 bp, Artificial Sequence
  derived and/or modified sequence
atgggtaggatttttctcgaccatatcggaggaaccaggctgttctcgtgtgctaattgcgacactattcttaccaatcgaagcgagttaatcagcacgcgcttcaccggggccaccgggagggcttttctatttaataaagttgtgaacttacagtactcagaagtgcaggatcgtgtcatgctaacgggccggcatatggtgagagacgtgagctgtaagaattgtaatagcaaactaggttggatctacgaattcgccaccgaagacagtcagcgctataaggagggaagagtcatcctcgaaagggcccttgtgagagaatcagagggctttgaggagcacgtgccaagtgacaactcatag

SEQ ID NO: 44899 - DNA, 366 bp, Artificial Sequence
  derived and/or modified sequence
atgggccgcattttcctcgatcatattggcgggacccggctgttcagctgtgctaattgtgatacaatactgactaaccgatccgaactcatctctacccggttcaccggtgcaaccggaagagccttcctgtttaataaggtcgtcaatctgcaatattcagaggtgcaggatcgtgttatgctgacggggcggcacatggttcgagatgtctcatgtaaaaactgcaacagtaaacttggctggatttatgagttcgcaactgaggacagtcagaggtataaagaaggccgggtgatcttggaacgcgctttggtgcgagaaagcgagggctttgaggagcacgtgccttctgataatagctag

SEQ ID NO: 44900 - DNA, 366 bp, Artificial Sequence
  derived and/or modified sequence
atgggccgcatcttcctggaccacatcggcggcaccaggctcttcagctgtgccaactgtgacaccatcctgaccaacagaagtgagctgatcagcacccgcttcaccggggccaccggccgggccttcctgttcaacaaggtggtgaacctgcagtacagcgaggtgcaggacagagtgatgctgaccggccgccacatggtgagagatgtgtcctgcaagaactgcaacagcaagctgggctggatctatgaatttgccacagaggacagccagcgctacaaggagggccgggtcatcctggagcgggccctggtgcgggagagcgagggctttgaggagcacgtgcccagcgacaacagctag

SEQ ID NO: 44901 - DNA, 366 bp, Artificial Sequence
  derived and/or modified sequence
atgggccggatcttcctggaccacatcggcggcacccggctgttctcttgtgccaattgcgacactattctgaccaatcgatcagaactcatcagtacacgcttcaccggcgccacaggccgcgcatttctttttaataaggtagttaatctacagtattccgaagtgcaggatagggttatgttgaccggacggcatatggttagagacgttagttgcaagaactgtaatagcaaacttggttggatctacgaatttgcaactgaggatagccagcgttacaaagaggggcgggtgatcctggagcgagctttagtgcgggaatccgagggatttgaggaacatgtgccatctgataattcttag

SEQ ID NO: 44902 - DNA, 366 bp, Artificial Sequence
  derived and/or modified sequence
atgggccggatcttcctggaccacatcggcggcacccggctgttcagctgtgctaactgcgatacaatattgactaatcgtagtgaactgatcagtactcgttttaccggtgcaactggcagggccttcctgttcaacaaggttgtgaaccttcagtatagcgaggtgcaggatcgagtcatgctgaccggtaggcacatggtccgcgacgtctcttgtaagaattgcaattcaaagctgggttggatctatgaattcgctactgaggatagccagcgttataaagaaggtcgagtgatactggagagggctttggtgcgggagtctgagggttttgaggagcacgtcccttctgacaactcatag

SEQ ID NO: 44903 - DNA, 366 bp, Artificial Sequence
  derived and/or modified sequence
atgggccggatcttcctggaccacatcggcggcacccggctgttctcttgtgcgaactgcgacaccatcctgaccaacaggtccgaacttattagcacaaggttcacaggagctacgggccgggcttttctgtttaataaagtggtgaaccttcagtattctgaggtgcaagatagagtcatgctcactggacggcatatggtgcgggacgtcagttgcaaaaactgcaactctaagctggggtggatatatgagttcgcaacagaggattcccagaggtacaaagaagggagagttattctggaacgcgctttagtacgggagtctgaaggattcgaagagcatgtgcctagcgataactcgtag

SEQ ID NO: 44904 - DNA, 366 bp, Artificial Sequence
  derived and/or modified sequence
atgggccggatcttcctggaccacatcggcggcacccggctgttcagttgcgcgaattgtgatacaattctcaccaacagaagtgaattaatatccacacggttcacgggcgctacaggccgagcatttctctttaataaagtcgttaatctgcaatacagtgaggtgcaggatagggtgatgctgactgggcgtcacatggtcagggacgtctcatgtaaaaactgcaacagcaagttgggctggatctacgagttcgcaacggaggattcgcagaggtataaggaagggagggtgattctggagagggcactcgtcagagagtcagaagggtttgaggagcatgtgcctagcgacaacagttag

SEQ ID NO: 44905 - DNA, 366 bp, Artificial Sequence
  derived and/or modified sequence
atgggccggatcttcctggaccacatcggcggcacccggctgttctcctgtgctaactgcgacaccattctcacaaaccgcagcgagttaatttctacgcgattcacaggggctaccggaagagcctttctctttaataaggtggtgaatctccagtattctgaggtgcaggatagagtgatgctgaccggcaggcacatggtgcgcgatgtatcctgtaaaaactgcaactccaaactcggttggatctacgagtttgctacagaggacagccagagatacaaagagggtcgggtgattctggagcgcgccttggtacgagagagcgagggtttcgaagagcatgtcccctcagacaattcttag

SEQ ID NO: 44906 - DNA, 366 bp, Artificial Sequence
  derived and/or modified sequence
atgggccgtatcttcctggaccacatagggggtacacgtctcttttcgtgtgccaactgcgacactatcctgaccaatagatccgaacttatcagcacccgctttaccggggcaactgggagggccttcctgtttaacaaagtggttaacttgcagtatagtgaggttcaagacagggtgatgttgactggccgacatatggttcgggatgtgagttgtaaaaactgtaactcaaagctgggctggatctacgaattcgcaacagaggattcccagcggtacaaggagggcagagtgatcttagaaagagccctggtaagagagagtgaggggtttgaggaacacgttcctagcgataattcttag

SEQ ID NO: 44907 - DNA, 366 bp, Artificial Sequence
  derived and/or modified sequence
atgggccgtatttttttggatcatatcggaggaacccgtctattcagctgtgccaactgcgacacgattctgactaatcggtctgaattgatcagcactaggtttacgggcgctaccggacgcgcatttctgtttaataaagtggtaaacctccaatactccgaggttcaagaccgtgtcatgctcacgggcagacacatggtacgtgacgtgtcatgcaaaaactgcaattccaagctgggatggatatacgaatttgcaaccgaagattctcagagatacaaggaaggcagggtcatcctggaacgcgcattggtcagggagagtgagggctttgaagaacacgttcccagcgataatagctag

SEQ ID NO: 44908 - DNA, 366 bp, Artificial Sequence
  derived and/or modified sequence
atgggacggatttttctggatcatatcggcggtacccgactgttttcctgtgctaattgtgatacgatactgacgaaccggagcgagctaatatctactcgctttaccggcgctactggacgagcctttctgtttaataaagtcgtgaatcttcagtacagtgaggttcaggatagagtgatgctcaccgggaggcacatggtgcgcgacgtctcctgcaaaaactgtaactctaagctcgggtggatctatgagttcgccaccgaggacagccagcgttataaggagggacgtgttatcttagaaagggccttagtacgggaaagcgaggggtttgaggaacatgttcccagcgacaatagttag

SEQ ID NO: 44909 - DNA, 366 bp, Artificial Sequence
  derived and/or modified sequence
atgggaaggatcttcctggatcatattggcggaactcggctgttcagctgtgcaaattgcgataccatattgactaatcgcagcgagctaatatccacccgtttcaccggggcaaccggcagggctttcctcttcaataaagtcgtgaacctccagtatagcgaagtgcaggacagggttatgcttacaggacgccacatggtgagggacgtaagctgtaaaaactgcaactcaaagttgggttggatctatgagtttgcaacagaggactcacagcgctacaaggagggtcgcgtcatcctggagcgagccctggtccgtgagtccgagggatttgaagaacacgtgcccagcgacaattcttag

SEQ ID NO: 44910 - DNA, 366 bp, Artificial Sequence
  derived and/or modified sequence
atgggcagaatattccttgatcatatcgggggtacacgcctgttctcctgcgccaattgtgacacgattctgactaacagatcagaactgatctccacacgcttcactggcgctactggtcgggcattcctattcaacaaggttgtgaatttgcagtactctgaagtgcaggacagggtgatgctaacaggcaggcatatggtgcgggacgtgagttgtaagaattgcaacagtaagctcgggtggatttacgagtttgcaactgaggactctcagaggtacaaagagggacgggtgatcctagagagagctctggtgagagagtcagaagggttcgaggagcacgtgcccagtgacaatagctag

SEQ ID NO: 44911 - DNA, 2182 bp, Artificial Sequence
  derived and/or modified sequence
gccagggcctgactaaacctggagactcgggtggccgaggggcttcataccagctgaagagcgacaagccgctggcagccgcggatctcaccgccgctcagggtttttagaacttcagccataaaaatgggcagaattttccttgatcatatcggtggtacccgtctgttttcttgtgcaaactgtgatacgatcctgaccaaccgctcagaactcatctccactcgtttcacaggcgccactggcagagcatttctttttaacaaggtagttaacctgcagtacagtgaagttcaagatcgggtcatgctcactggccgccacatggttcgagatgtgagctgcaaaaactgcaatagcaaactgggatggatctatgagtttgccactgaagacagccagcgatataaggaaggccgcgtgatcctggaacgtgctctagttcgagagagtgagggctttgaggagcatgtaccatctgataactcttgaagatacagagagaaatccatcttttcccaggtctccttcactgaaaacaaaaatctacttacatacactgtcaccttagcatcagagtcggattaatgaactgcggaacaagaggttgtgagaatctaagatggaacctttctttctttctttctttttttttaaattttgtattttccatccaacagcagtgtgtagagagaatattatgcagatgccgttaattttttaccctatgtttacatcttgaggcagcagagtctgtctgcagctatgtggtgagctatgtaaggaaaaaaatctgggctgttagagtgaaaaagtgtgttttatgtcaattgtgaaaggaaaatgttaggagtatggtttttaaacttgggcttcattttaaacttttttttttaaacccagttatttcacttgatttgctagcttcagagaagagatccgaatctgtgcccagcgctaaaggctcagtgttagcatggcttgtgctggccggtgtgccatattcttgttggagatgaaccgtagcaccagagcccattcttccttgtcagtcttggcccaaagatgtcaccattcctagttatttgtcaccacataattggtgttgattggaaactttttctgagatgggacagaactgctgggttgtctttttccatgtaacttaagcatagtaatataaataaagtaatagttggatgcttttggtcctgtgttgcttttaaaaacaccttataaaagaggagagtatttgataagcaattttcatagtagtaaagttttttttcatctcttaaactaaattgaccatgcatataatattctttgtttaaatgaaagcatactgttgaaacccgcagtgttgcatttagaaaacagttgaacagaatgtcaatgtgcattcatgcaaaaaaacatttaatctgcatctgttttagaaaagggggaaatgaagcaacttgtctaaaaatactgctttacaaagcatttcagcctttccccctcagttttgcattgattttttgacaagtctgtagagcctaatagtttccatcaaaggcctagatctcttatttagcatttttttcagctcttctctcagaagttcagctgttgaaacgaaaactgtactttgtaccctcacatacaaagggatcaaatttgacctggtgttattttagccccaaatttatgacattacacaatattaaaatgtaaatgtttctttacccaaactacttctagatattctagtatttgcttctggtggaattaaatgacggtaaaattggctaattatttgaatgaatgaatggatggatgttttgcatgctcaatttctaggtcctttgtctagaaaggaaatttgcctcagttgaattagtgaaatatttctgtcgttgatattaaaagtgacttctgagtacagttaagttcctcctatttgccactgggctgttggttagaagcataggtaactgattaagtaggtatgatactgcatttgaaataagtggacacaaactatcctttctccaccatggactcaatctgagaacaacagcattcatttccattcatttccatactggcttttgattatatgcagattcctagtagcatgccttacctacagcactatgtgcatttgctgtcacaataaagtatattttgtcttgca

SEQ ID NO: 44912 - DNA, 2499 bp, Artificial Sequence
  derived and/or modified sequence
cagggagaggcggggccaaggccagggcctgactaaacctggagactcgggtggccgaggggcttcataccagctgaagagcgacaagccgctggcagccgcggatctcaccgccgctcaggagatctgttggtaatctgaggatttttattctacgtcgtcttgacagatggaaaacctgaagtaacttcgggctaaccttgtgtttttggaaaattagtagacttggtggtgaagaaactgggaggagtaggatattagctaactttgcatagccacatatagagcgtcgcagctgcattccaccaaagaggaaccaaaaggcctgtggtgttcccagggtacatattcatgccagaagtgaagtgctttggtgaattcgtttcctgaaagtttatcgcatacttgtactgggttaggtttttagaacttcagccataaaaatgggcagaattttccttgatcatatcggtggtacccgtctgttttcttgtgcaaactgtgatacgatcctgaccaaccgctcagaactcatctccactcgtttcacaggcgccactggcagagcatttctttttaacaaggtagttaacctgcagtacagtgaagttcaagatcgggtcatgctcactggccgccacatggttcgagatgtgagctgcaaaaactgcaatagcaaactgggatggatctatgagtttgccactgaagacagccagcgatataaggaaggccgcgtgatcctggaacgtgctctagttcgagagagtgagggctttgaggagcatgtaccatctgataactcttgaagatacagagagaaatccatcttttcccaggtctccttcactgaaaacaaaaatctacttacatacactgtcaccttagcatcagagtcggattaatgaactgcggaacaagaggttgtgagaatctaagatggaacctttctttctttctttctttttttttaaattttgtattttccatccaacagcagtgtgtagagagaatattatgcagatgccgttaattttttaccctatgtttacatcttgaggcagcagagtctgtctgcagctatgtggtgagctatgtaaggaaaaaaatctgggctgttagagtgaaaaagtgtgttttatgtcaattgtgaaaggaaaatgttaggagtatggtttttaaacttgggcttcattttaaacttttttttttaaacccagttatttcacttgatttgctagcttcagagaagagatccgaatctgtgcccagcgctaaaggctcagtgttagcatggcttgtgctggccggtgtgccatattcttgttggagatgaaccgtagcaccagagcccattcttccttgtcagtcttggcccaaagatgtcaccattcctagttatttgtcaccacataattggtgttgattggaaactttttctgagatgggacagaactgctgggttgtctttttccatgtaacttaagcatagtaatataaataaagtaatagttggatgcttttggtcctgtgttgcttttaaaaacaccttataaaagaggagagtatttgataagcaattttcatagtagtaaagttttttttcatctcttaaactaaattgaccatgcatataatattctttgtttaaatgaaagcatactgttgaaacccgcagtgttgcatttagaaaacagttgaacagaatgtcaatgtgcattcatgcaaaaaaacatttaatctgcatctgttttagaaaagggggaaatgaagcaacttgtctaaaaatactgctttacaaagcatttcagcctttccccctcagttttgcattgattttttgacaagtctgtagagcctaatagtttccatcaaaggcctagatctcttatttagcatttttttcagctcttctctcagaagttcagctgttgaaacgaaaactgtactttgtaccctcacatacaaagggatcaaatttgacctggtgttattttagccccaaatttatgacattacacaatattaaaatgtaaatgtttctttacccaaactacttctagatattctagtatttgcttctggtggaattaaatgacggtaaaattggctaattatttgaatgaatgaatggatggatgttttgcatgctcaatttctaggtcctttgtctagaaaggaaatttgcctcagttgaattagtgaaatatttctgtcgttgatattaaaagtgacttctgagtacagttaagttcctcctatttgccactgggctgttggttagaagcataggtaactgattaagtaggtatgatactgcatttgaaataagtggacacaaactatcctttctccaccatggactcaatctgagaacaacagcattcatttccattcatttccatactggcttttgattatatgcagattcctagtagcatgccttacctacagcactatgtgcatttgctgtcacaataaagtatattttgtcttgca

SEQ ID NO: 44913 - DNA, 2560 bp, Artificial Sequence
  derived and/or modified sequence
cagggagaggcggggccaaggccagggcctgactaaacctggagactcgggtggccgaggggcttcataccagctgaagagcgacaagccgctggcagccgcggatctcaccgccgctcaggagatctgttggtaatctgaggatttttattctacgtcgtcttgacagatggaaaacctgaagtaacttcgggctaaccttgtgtttttggaaaattagtagacttggtggtgaagaaactgggaggagtaggatattagctaactttgcatagccacatatagagcgtcgcagctgcattccaccaaagaggaaccaaaaggcctgtggtgttcccagggtacatattcatgccagaagtgaagtgctttggtgaattcgtttcctgaaagtttatcgcatacttgtactgggttagccttatgccagcctggaccatcttggaggcagtgtaggatcatggaagaactttgaattaggtttttagaacttcagccataaaaatgggcagaattttccttgatcatatcggtggtacccgtctgttttcttgtgcaaactgtgatacgatcctgaccaaccgctcagaactcatctccactcgtttcacaggcgccactggcagagcatttctttttaacaaggtagttaacctgcagtacagtgaagttcaagatcgggtcatgctcactggccgccacatggttcgagatgtgagctgcaaaaactgcaatagcaaactgggatggatctatgagtttgccactgaagacagccagcgatataaggaaggccgcgtgatcctggaacgtgctctagttcgagagagtgagggctttgaggagcatgtaccatctgataactcttgaagatacagagagaaatccatcttttcccaggtctccttcactgaaaacaaaaatctacttacatacactgtcaccttagcatcagagtcggattaatgaactgcggaacaagaggttgtgagaatctaagatggaacctttctttctttctttctttttttttaaattttgtattttccatccaacagcagtgtgtagagagaatattatgcagatgccgttaattttttaccctatgtttacatcttgaggcagcagagtctgtctgcagctatgtggtgagctatgtaaggaaaaaaatctgggctgttagagtgaaaaagtgtgttttatgtcaattgtgaaaggaaaatgttaggagtatggtttttaaacttgggcttcattttaaacttttttttttaaacccagttatttcacttgatttgctagcttcagagaagagatccgaatctgtgcccagcgctaaaggctcagtgttagcatggcttgtgctggccggtgtgccatattcttgttggagatgaaccgtagcaccagagcccattcttccttgtcagtcttggcccaaagatgtcaccattcctagttatttgtcaccacataattggtgttgattggaaactttttctgagatgggacagaactgctgggttgtctttttccatgtaacttaagcatagtaatataaataaagtaatagttggatgcttttggtcctgtgttgcttttaaaaacaccttataaaagaggagagtatttgataagcaattttcatagtagtaaagttttttttcatctcttaaactaaattgaccatgcatataatattctttgtttaaatgaaagcatactgttgaaacccgcagtgttgcatttagaaaacagttgaacagaatgtcaatgtgcattcatgcaaaaaaacatttaatctgcatctgttttagaaaagggggaaatgaagcaacttgtctaaaaatactgctttacaaagcatttcagcctttccccctcagttttgcattgattttttgacaagtctgtagagcctaatagtttccatcaaaggcctagatctcttatttagcatttttttcagctcttctctcagaagttcagctgttgaaacgaaaactgtactttgtaccctcacatacaaagggatcaaatttgacctggtgttattttagccccaaatttatgacattacacaatattaaaatgtaaatgtttctttacccaaactacttctagatattctagtatttgcttctggtggaattaaatgacggtaaaattggctaattatttgaatgaatgaatggatggatgttttgcatgctcaatttctaggtcctttgtctagaaaggaaatttgcctcagttgaattagtgaaatatttctgtcgttgatattaaaagtgacttctgagtacagttaagttcctcctatttgccactgggctgttggttagaagcataggtaactgattaagtaggtatgatactgcatttgaaataagtggacacaaactatcctttctccaccatggactcaatctgagaacaacagcattcatttccattcatttccatactggcttttgattatatgcagattcctagtagcatgccttacctacagcactatgtgcatttgctgtcacaataaagtatattttgtcttgca

SEQ ID NO: 44914 - DNA, 2197 bp, Artificial Sequence
  derived and/or modified sequence
ataccagctgaagagcgacaagccgctggcagccgcggatctcaccgccgctcaggagatctgttggtaatctgaggatttttattctacgtcgtcttgacagatggaaaacctgaagtttttagaacttcagccataaaaatgggcagaattttccttgatcatatcggtggtacccgtctgttttcttgtgcaaactgtgatacgatcctgaccaaccgctcagaactcatctccactcgtttcacaggcgccactggcagagcatttctttttaacaaggtagttaacctgcagtacagtgaagttcaagatcgggtcatgctcactggccgccacatggttcgagatgtgagctgcaaaaactgcaatagcaaactgggatggatctatgagtttgccactgaagacagccagcgatataaggaaggccgcgtgatcctggaacgtgctctagttcgagagagtgagggctttgaggagcatgtaccatctgataactcttgaagatacagagagaaatccatcttttcccaggtctccttcactgaaaacaaaaatctacttacatacactgtcaccttagcatcagagtcggattaatgaactgcggaacaagaggttgtgagaatctaagatggaacctttctttctttctttctttttttttaaattttgtattttccatccaacagcagtgtgtagagagaatattatgcagatgccgttaattttttaccctatgtttacatcttgaggcagcagagtctgtctgcagctatgtggtgagctatgtaaggaaaaaaatctgggctgttagagtgaaaaagtgtgttttatgtcaattgtgaaaggaaaatgttaggagtatggtttttaaacttgggcttcattttaaacttttttttttaaacccagttatttcacttgatttgctagcttcagagaagagatccgaatctgtgcccagcgctaaaggctcagtgttagcatggcttgtgctggccggtgtgccatattcttgttggagatgaaccgtagcaccagagcccattcttccttgtcagtcttggcccaaagatgtcaccattcctagttatttgtcaccacataattggtgttgattggaaactttttctgagatgggacagaactgctgggttgtctttttccatgtaacttaagcatagtaatataaataaagtaatagttggatgcttttggtcctgtgttgcttttaaaaacaccttataaaagaggagagtatttgataagcaattttcatagtagtaaagttttttttcatctcttaaactaaattgaccatgcatataatattctttgtttaaatgaaagcatactgttgaaacccgcagtgttgcatttagaaaacagttgaacagaatgtcaatgtgcattcatgcaaaaaaacatttaatctgcatctgttttagaaaagggggaaatgaagcaacttgtctaaaaatactgctttacaaagcatttcagcctttccccctcagttttgcattgattttttgacaagtctgtagagcctaatagtttccatcaaaggcctagatctcttatttagcatttttttcagctcttctctcagaagttcagctgttgaaacgaaaactgtactttgtaccctcacatacaaagggatcaaatttgacctggtgttattttagccccaaatttatgacattacacaatattaaaatgtaaatgtttctttacccaaactacttctagatattctagtatttgcttctggtggaattaaatgacggtaaaattggctaattatttgaatgaatgaatggatggatgttttgcatgctcaatttctaggtcctttgtctagaaaggaaatttgcctcagttgaattagtgaaatatttctgtcgttgatattaaaagtgacttctgagtacagttaagttcctcctatttgccactgggctgttggttagaagcataggtaactgattaagtaggtatgatactgcatttgaaataagtggacacaaactatcctttctccaccatggactcaatctgagaacaacagcattcatttccattcatttccatactggcttttgattatatgcagattcctagtagcatgccttacctacagcactatgtgcatttgctgtcacaataaagtatattttgtcttgca

SEQ ID NO: 44915 - DNA, 1735 bp, Artificial Sequence
  derived and/or modified sequence
tcgcatagtcgggggcgcgcccggtctccgccccgaatccaagtcggaacttgaccgagttgtttgggccgcgatgaccgcacggcgtgaaccgtcctgagcagggcccacgcccggcccaagcggcccagccaccgggctggggcggtgtctccctttgccccctcccccccatgaacgtccgcctcccccgccctcctgcccagaggacccgggactgacagcgcagggtgacggttgggcagcccgccgggtgtcgggaccaagagagccccccggccacccgctcagctgtttcctgctcgtgtttgttgtgccgagggaggccccgccgccaccgccgccgccgcgctctgccgccccggtccctcccgattggccggctggcgtcacgtggcctccatcagctgggccggcgggggcgctcgcgggccccactgcggctgccgggtgagcccacccgggggtcgcccgggccggcccagctccgccagcttcgggctgcggccttccctccgcttgcagtcgggagggtgggcgtgcccttgcaacccctttcctgtaccttctctgcagccttatgccagcctggaccatcttggaggcagtgtaggatcatggaagaactttgaattaggtttttagaacttcagccataaaaatgggcagaattttccttgatcatatcggtggtacccgtctgttttcttgtgcaaactgtgatacgatcctgaccaaccgctcagaactcatctccactcgtttcacaggcgccactggcagagcatttctttttaacaaggtagttaacctgcagtacagtgaagttcaagatcgggtcatgctcactggccgccacatggttcgagatgtgagctgcaaaaactgcaatagcaaactgggatggatctatgagtttgccactgaagacagccagcgatataaggaaggccgcgtgatcctggaacgtgctctagttcgagagagtgagggctttgaggagcatgtaccatctgataactcttgaagatacagagagaaatccatcttttcccaggtctccttcactgaaaacaaaaatctacttacatacactgtcaccttagcatcagagtcggattaatgaactgcggaacaagaggttgtgagaatctaagatggaacctttctttctttctttctttttttttaaattttgtattttccatccaacagcagtgtgtagagagaatattatgcagatgccgttaattttttaccctatgtttacatcttgaggcagcagagtctgtctgcagctatgtggtgagctatgtaaggaaaaaaatctgggctgttagagtgaaaaagtgtgttttatgtcaattgtgaaaggaaaatgttaggagtatggtttttaaacttgggcttcattttaaacttttttttttaaacccagttatttcacttgatttgctagcttcagagaagagatccgaatctgtgcccagcgctaaaggctcagtgttagcatggcttgtgctggccggtgtgccatattcttgttggagatgaaccgtagcaccagagcccattcttccttgtcagtcttggcccaaagatgtcaccattcctagttatttgtcaccacataattggtgttgattggaaactttttctgagatgggacagaactgctgggttgtctttttccatgtaacttaagcatagtaatataaataaagtaatagttgga

SEQ ID NO: 44916 - protein, 496 aa, Artificial Sequence
  derived and/or modified sequence
MFAKATRNFLREVDADGDLIAVSNLNDSDKLQLLSLVTKKKRFWCWQRPKYQFLSLTLGDVLIEDQFPSPVVVESDFVKYEGKFANHVSGTLETALGKVKLNLGGSSRVESQSSFGTLRKQEVDLQQLIRDSAERTINLRNPVLQQVLEGRNEVLCVLTQKITTMQKCVISEHMQVEEKCGGIVGIQTKTVQVSATEDGNVTKDSNVVLEIPAATTIAYGVIELYVKLDGQFEFCLLRGKQGGFENKKRIDSVYLDPLVFREFAFIDMPDAAHGISSQDGPLSVLKQATLLLERNFHPFAELPEPQQTALSDIFQAVLFDDELLMVLEPVCDDLVSGLSPTVAVLGELKPRQQQDLVAFLQLVGCSLQGGCPGPEDAGSKQLFMTAYFLVSALAEMPDSAAALLGTCCKLQIIPTLCHLLRALSDDGVSDLEDPTLTPLKDTERFGIVQRLFASADISLERLKSSVKAVILKDSKVFPLLLCITLNGLCALGREHS

SEQ ID NO: 44917 - protein, 332 aa, Artificial Sequence
  derived and/or modified sequence
MQKCVISEHMQVEEKCGGIVGIQTKTVQVSATEDGNVTKDSNVVLEIPAATTIAYGVIELYVKLDGQFEFCLLRGKQGGFENKKRIDSVYLDPLVFREFAFIDMPDAAHGISSQDGPLSVLKQATLLLERNFHPFAELPEPQQTALSDIFQAVLFDDELLMVLEPVCDDLVSGLSPTVAVLGELKPRQQQDLVAFLQLVGCSLQGGCPGPEDAGSKQLFMTAYFLVSALAEMPDSAAALLGTCCKLQIIPTLCHLLRALSDDGVSDLEDPTLTPLKDTERFGIVQRLFASADISLERLKSSVKAVILKDSKVFPLLLCITLNGLCALGREHS

SEQ ID NO: 44918 - DNA, 1491 bp, Artificial Sequence
  derived and/or modified sequence
atgtttgcgaaagcaacccggaatttcctacgagaggtagacgccgacggagacctgatcgcagtatcaaatctgaatgattccgataaactccagctgctctcactggttactaagaaaaagcgtttctggtgctggcagaggccaaaatatcagttcctgtcactgacactgggggacgtgttgatagaggaccagttcccctcccccgtcgttgtggagagcgattttgtgaaatacgaaggaaagttcgccaaccacgtttcaggaacccttgaaacagcactgggtaaggtgaaacttaatctcgggggatcttcacgcgttgagtcacaatcctcctttggtaccctgcgaaaacaggaggtggatttgcagcaactgatcagggactccgccgaacggacaataaacctgcgcaatcctgttttacagcaggtgctggaggggcgcaatgaggtattatgcgttcttacccagaagattactacaatgcagaagtgcgtcatcagtgagcacatgcaggtggaggagaagtgcgggggcatcgtggggatccaaaccaagaccgttcaggtgtccgctacagaggatgggaatgttacaaaagactctaatgtggtcttggaaatcccagctgctacaactatcgcctatggagtaatagagctgtatgtgaagctggatggccagtttgagttttgtctgctgaggggaaagcagggcggtttcgagaacaaaaagcgtatcgacagcgtctatcttgaccccctggtgttccgggaattcgcatttatcgacatgccggacgccgctcatggtatttcgagccaagacgggcctttgagtgtattgaagcaggcaacactcctgctggagcgtaactttcacccattcgccgagctgcctgagccccaacagacggccctgtcagatatattccaggccgtgctgttcgatgatgagttgctaatggtcctggagcccgtctgtgacgatctggtcagcggcctgtctcctactgtggctgtcttaggcgagctgaaacctagacagcaacaggatctcgtcgcttttctgcagctggttggttgttccctccagggtggctgtccaggccccgaggacgccggctccaagcagctgttcatgaccgcttacttcttggtttccgccctagcagagatgcccgactcagctgccgccctgctcggcacctgctgcaagctccaaatcatccctacattatgccacctgttacgggcgctgtccgacgatggagtgagtgacctggaggaccccacacttacaccactcaaggataccgagcggttcggcatcgtccaaagactgttcgccagtgccgacataagtctggaaaggctgaagtcaagcgtgaaagcggtcatcctaaaagactccaaagtattcccattactgctgtgcatcaccctaaatggactatgcgctctgggaagagagcactcttag

SEQ ID NO: 44919 - DNA, 1491 bp, Artificial Sequence
  derived and/or modified sequence
atgttcgcaaaggcaacacgcaacttcctacgagaggtggatgcagacggcgacctgatagcagtgtccaatttaaacgacagcgataagcttcaactgctatccttagtgacaaagaagaaacgattttggtgctggcaacggcctaaatatcagtttctttccctcacactcggggacgtcctgatcgaagaccagtttccttctcctgtagtggtggaaagtgacttcgtgaagtacgaaggtaagttcgccaaccatgtaagtggcactctggaaacagcccttggcaaggttaaactgaacctcggtggttcgtcacgggtagagtcgcagtcgtccttcggaacattacgcaaacaggaggtggacctccagcagctgatcagagactcggccgaacgaacaatcaatctgagaaatcctgtgctacaacaggtgctggaaggacgcaatgaagtgctttgcgtcctgactcagaagataactactatgcaaaagtgcgtgatctctgagcacatgcaggtagaagagaagtgcggcggcattgtcggaattcagactaaaactgtacaggtgagcgccacggaggatggtaacgttacaaaagacagcaacgtcgttctggagatacccgcagccacgacaatagcctatggcgtaattgaactctatgtcaagctggacggacagtttgaattctgccttctcaggggcaagcaggggggcttcgaaaataagaaaagaatagattccgtctacctagatcctctcgtgtttagggaatttgcgttcattgatatgccagatgccgcccacgggatatcttctcaggacggccctctgagtgtgctgaaacaggcaactttgctgttggagcggaatttccatccgttcgccgaactgcctgagcctcagcagacggctctgtccgatatatttcaggccgttctctttgacgatgagcttttaatggtcctggaaccggtgtgcgacgacctcgtcagcggtctgtcccctaccgttgccgtgctcggggagttgaagccccggcagcaacaggatttggtggcattcctgcagctggtgggctgttcactgcaggggggctgtcccgggccagaagacgcagggtctaaacagctgttcatgactgcctattttcttgtcagtgctctagcggaaatgccagattcagccgccgccctgctggggacatgctgcaaattacagattatccctaccctgtgtcatctgctccgggccctttctgacgacggagtatctgatttggaagaccccaccttgactcctcttaaagacactgagcggtttgggatcgtgcaacgcctattcgctagcgctgatatcagcctagagagactcaagtcgagtgtcaaggcagtgattctgaaagactctaaagtcttcccccttcttctgtgcattaccctcaacggattgtgcgcgttgggccgggagcacagctag

SEQ ID NO: 44920 - DNA, 1491 bp, Artificial Sequence
  derived and/or modified sequence
atgtttgccaaggccaccaggaacttcctgcgggaggtggatgctgatggagacctgattgctgtgagcaacctgaatgacagcgacaagctgcagctgctgagcctggtgaccaagaagaagcgcttctggtgctggcagaggcccaagtaccagttcctgagcctgaccctgggagatgtgctgattgaggaccagttccccagccctgtggtggtggagagtgactttgtgaagtatgagggcaagtttgccaaccacgtgtctggcaccctggagacagccctgggcaaggtgaagctgaacctgggcggcagcagccgggtggagagccagagcagctttggcaccctgaggaagcaggaggtggacctgcagcagctgatccgggacagcgctgagaggaccatcaacctgaggaaccctgtgctgcagcaggtgctggagggcagaaatgaggtgctgtgtgtgctgacccagaagatcaccaccatgcagaagtgtgtgatcagcgagcacatgcaggtggaggagaagtgtggcggcatcgtgggcatccagaccaagacagtgcaggtgtctgccacagaagatggaaatgtgaccaaggacagcaatgtggtgctggagatcccagctgccaccaccatcgcctatggagtcatcgagctgtatgtgaagctggatggccagtttgagttctgcctgctgcggggcaagcagggcggctttgagaacaagaagagaattgacagcgtgtacctggaccccctggtgttccgggagtttgccttcatcgacatgccagatgctgcccacggcatcagcagccaggacggccccctgtctgtgctgaagcaggccaccctgctgctggagaggaacttccacccctttgctgagctgcctgagccccagcagacagccctgagtgacatcttccaggccgtgctgtttgatgatgagctgctgatggtgctggagcctgtgtgtgatgacctggtgtctggcctgagccccaccgtggccgtgctgggggagctgaagccccggcagcagcaggacctggtggccttcctgcagctggtgggctgcagcctgcagggcggctgccccggcccagaagatgctggcagcaagcagctgttcatgacagcctacttcctggtgtctgccctggccgagatgccagattctgctgctgccctgctgggcacctgctgcaagctgcagatcatccccaccctgtgccacctgctgcgggccctgagtgatgatggagtgtctgacctggaggaccccaccctgacccccctgaaggacacagaaagatttggaattgtgcagaggctgtttgccagcgctgacatcagcctggagcggctgaagagctctgtgaaggccgtcatcctgaaggacagcaaggtgttccccctgctgctgtgcatcaccctgaatggcctgtgtgccctgggccgggagcacagctag

SEQ ID NO: 44921 - DNA, 1491 bp, Artificial Sequence
  derived and/or modified sequence
atgttcgccaaggccacccggaacttcctgcgggaggtggacgccgacggggatctgatcgcagtttccaatttgaatgacagtgacaagctgcagctgctctctctcgtgaccaagaagaagcgtttctggtgctggcagaggcccaaatatcagttcctgtccctgactttgggggacgtgctgatagaagatcagtttccctcaccagtggtcgtcgagtctgactttgtgaagtatgaagggaaatttgcaaaccacgtgtcgggcacccttgagaccgccctgggtaaggttaaacttaatctagggggcagttcccgcgtagagtcacaaagctcatttgggaccttgcgtaaacaggaggtggatctgcaacagctcattcgtgactctgccgagcgcactatcaacttgcggaatcccgttctccagcaggtgctggaaggccgtaatgaagtgctgtgtgtcctgacacaaaagattaccaccatgcagaaatgcgtcatcagcgagcatatgcaggtcgaagaaaagtgtggcggcatcgtcggaatccaaaccaaaactgtgcaggtgtccgctaccgaagacgggaacgtgaccaaggattcgaacgtggtgcttgagatccccgcagctaccaccatagcctacggcgtgatcgaactatacgtgaagttggacggacagttcgaattctgcctcctcagaggcaagcagggaggatttgagaataaaaaaagaatcgatagcgtgtacctggatccactcgtctttcgggagttcgccttcattgatatgccagatgccgcacatggtatcagcagccaggatggccccctgagtgtgctaaaacaagccaccttgctgctcgaaaggaactttcatcctttcgctgagctcccagaacctcagcaaacggcactgagcgacatttttcaggccgttctgttcgacgatgagctcctcatggttcttgaaccagtgtgtgacgacttggtaagcggcctgtcccccacagtagctgtgcttggggaattaaagccgcgccagcaacaggatctggtggcgtttctgcagctggttgggtgttctctccaggggggctgcccgggtccggaggatgccggaagcaaacagctgttcatgacagcctacttcctcgtctcagccctggccgagatgcccgatagcgccgcagcactactgggcacctgctgtaagctccagatcatccctaccctttgccacttgctgcgagctttgagtgacgatggcgtgagtgatctcgaggatcccactctgacccctcttaaggacactgaacgtttcggaatcgtacaacgactctttgcatctgccgatatctcactggagcgcttgaaaagtagtgtcaaggcagtcattctgaaggacagcaaagtgttccccctgctactgtgtatcactctgaacggtctgtgtgcactcggccgcgagcattcgtag

SEQ ID NO: 44922 - DNA, 1491 bp, Artificial Sequence
  derived and/or modified sequence
atgttcgccaaggccacccggaacttcctgcgggaggtggacgccgacggcgatttaatcgcagtgtctaaccttaacgattctgataagctgcaattgctgagtctcgtgacgaaaaaaaagagattctggtgctggcaaaggccgaagtatcagttcttgtctcttactctcggggatgtcctcatcgaagaccagtttccgtctcccgtggttgtagaatccgattttgtgaaatatgagggcaaattcgccaaccacgtgtccgggacactggagaccgctctcgggaaggttaagctcaatctggggggaagctccagggtcgaatcccagagttcattcggcacactccgcaaacaggaggtcgacctgcaacagctgattcgcgatagtgccgagagaaccatcaaccttcgcaacccagtgctacaacaggtgctggagggtcgtaacgaggtgttatgcgtgttaacccagaagatcactactatgcagaagtgtgtgattagcgaacacatgcaggtcgaggagaagtgcgggggaatcgtggggatccagacaaagactgtgcaggttagtgcaacagaagatggtaatgtgaccaaagatagtaacgtggttctggaaattcctgcggcaaccacaattgcatatggggtgatcgagctctatgtgaagctagatgggcagtttgaattttgtttactgaggggcaaacaaggaggctttgaaaacaagaaaaggatcgactcagtctaccttgacccccttgtctttagggaattcgcgttcatcgatatgcccgatgctgcacacgggattagtagccaggacgggcccctgagcgtgctgaaacaggcgactctgttactggaaagaaactttcacccttttgccgagctgcctgagccacaacagactgcactctctgatatattccaggcagtgcttttcgatgatgaactactaatggtcctagaaccagtttgtgacgatttggtctcaggcctgtctcccactgtggccgtgctgggagaactgaagcctaggcagcagcaagacttggtggcgttcttgcagcttgtcggctgctcacttcagggtggatgcccgggccctgaggacgccggaagtaaacagctgtttatgaccgcctatttcctggtgtctgccctagccgaaatgcccgattccgcagctgccctcctaggtacatgttgtaaactgcagattataccaaccctgtgtcatttactgcgcgcattgtctgatgacggtgtcagcgacttagaagatccaacactgactccactcaaggatacagagcgcttcggcatcgtgcagcgcctgttcgctagtgctgacatatcactggagcggctgaagtcatccgtgaaggccgtgattctgaaagactccaaagtctttccccttctgctttgtatcacgctgaatggcctgtgtgcccttggccgcgagcattcctag

SEQ ID NO: 44923 - DNA, 1491 bp, Artificial Sequence
  derived and/or modified sequence
atgtttgcaaaagctacaaggaactttctacgagaagtggacgccgatggagacctgatcgctgtctctaacttaaacgactccgacaagctccagttactatctctcgtgaccaaaaaaaaacggttctggtgctggcagcggcctaagtaccagttcctgagcctgacattgggagacgtgttaatcgaagaccagttcccctctcctgtggtcgtggagtccgattttgtaaagtacgaagggaagttcgctaatcacgtgagcggcacgcttgagactgcacttggcaaagtcaagttgaatctaggaggctctagcagagttgagtcccaatcatctttcggcaccctcaggaaacaggaggtcgacttgcagcaactgatcagggattctgccgagcgaaccattaaccttaggaaccctgtcctgcaacaggtgctagaaggtagaaatgaggtgctgtgtgttctgacacagaagatcactactatgcagaagtgcgtaatttcagagcatatgcaagtcgaagagaagtgtggcggaattgtcgggatccagactaagacggtgcaggttagcgctaccgaagacggtaacgtgactaaggatagcaacgtagtgcttgaaatccccgcagcaaccacgatagcttatggcgttattgaactgtacgtcaagctcgacggccagttcgagttctgcctgctccgcggaaagcaaggcggattcgaaaacaagaagaggattgattcggtgtatctggacccactcgtgttcagagagtttgcttttatcgatatgcccgatgctgcgcatgggatcagtagtcaagatgggcctctgtcagtcctgaaacaggcaacactccttctagaacgcaatttccacccgttcgctgaattaccagagccgcagcaaaccgcgttgtctgacattttccaggccgtgctgtttgacgacgagctcctgatggtgttagaacccgtgtgcgatgacctggtgtcaggcctctctccgaccgtggccgttctcggcgagctgaagcctagacaacaacaagaccttgtcgccttccttcaacttgtcgggtgcagcttgcagggagggtgtcccggacctgaggatgctggatccaagcaactgttcatgacggcctactttttggtgagcgccctggcagaaatgcctgattcagctgccgctctgctcggcacctgctgtaaactgcaaatcataccaacactatgccacctgcttagagccttgtccgacgacggggtttccgacttggaggatccaacgctgactccgcttaaggacacagagagattcggcattgtccagaggctgtttgccagtgccgacatcagtctagaacgcctcaaatcgtcagtgaaggctgtgatactgaaagattccaaggtctttcctttactgctttgtatcaccctcaatggactctgcgccctaggaagagaacattcctag

SEQ ID NO: 44924 - DNA, 1491 bp, Artificial Sequence
  derived and/or modified sequence
atgttcgccaaggccacccgcaacttccttcgtgaggtagatgctgacggcgatctgattgccgtcagtaacctcaacgacagcgacaaacttcagctgctgtctcttgtgaccaagaagaagaggttctggtgctggcaacgtccgaagtaccaatttctgagtctgaccctgggggatgtcctcattgaggaccagttccccagcccggtggtggtggaaagcgatttcgtcaagtacgaaggcaaattcgcgaaccacgtctctggcacgctggagactgcattgggcaaggtcaagcttaacctaggaggtagttcgcgcgttgaaagccagtcatcctttggcactctgcgtaagcaagaagttgaccttcagcagcttatcagagactcagctgagcggactataaatcttagaaatccggtgctgcagcaggtcctggaagggcgtaatgaagtcctgtgcgtactgacccagaagatcactacgatgcagaagtgcgtgatttccgagcacatgcaggtagaagaaaagtgtggaggcattgtgggaatccagaccaagaccgtccaggttagcgctacagaagacgggaacgttacgaaggacagcaatgtagtgttggagatccccgctgcgactaccatcgcttacggcgtaatcgagctctatgttaaactcgatgggcaatttgaattttgtctgctcagaggcaaacagggtggcttcgaaaataagaagagaattgacagtgtctacctcgatcccctcgtgttcagggagttcgcttttattgatatgcccgatgccgctcacggcatctcgagccaggacggtcctctaagcgtgctaaagcaagcaactctgctgctcgaacgtaacttccacccatttgccgagctgcctgagccccaacagacagcactaagcgatatttttcaagctgtgctgtttgacgatgagctgctcatggtcttggaaccagtttgcgatgacctcgtctcaggattgtcccccacggtagccgtactgggagagctcaaaccgcgacagcagcaggatctggtcgctttcctgcagctcgtaggatgttccctccagggtgggtgccccggacccgaagatgcgggatcaaagcaattatttatgactgcttattttctggtgtccgccctcgctgagatgcctgactctgcagctgcacttctgggtacatgttgcaagctgcaaataattcctaccctgtgtcatcttctccgtgccctgagcgacgacggggtctccgatctggaagaccccaccctgacccccctcaaagacacagagaggttcgggatagtgcagagactgtttgccagcgcagacatcagcttggagagactcaaatcctctgtgaaagcagtcatactaaaggacagcaaggtgtttcctcttctactgtgcattactctcaatgggctatgcgctttgggcagggagcactcttag

SEQ ID NO: 44925 - DNA, 1491 bp, Artificial Sequence
  derived and/or modified sequence
atgttcgccaaggccaccagaaacttcctgagagaggtggacgccgacggcgacctgatcgccgtgagcaacctgaacgacagcgacaagctgcagctgctgagcctggtgaccaagaagaagagattctggtgctggcagagacccaagtaccagttcctgagcctgaccctgggcgacgtgctgatcgaggaccagttccccagccccgtggtggtggagagcgacttcgtgaagtacgagggcaagttcgccaaccacgtgagcggcaccctggagaccgccctgggcaaggtgaagctgaacctgggcggcagcagcagagtggagagccagagcagcttcggcaccctgagaaagcaggaggtggacctgcagcagctgatcagagacagcgccgagagaaccatcaacctgagaaaccccgtgctgcagcaggtgctggagggcagaaacgaggtgctgtgcgtgctgacccagaagatcaccaccatgcagaagtgcgtgatcagcgagcacatgcaggtggaggagaagtgcggcggcatcgtgggcatccagaccaagaccgtgcaggtgagcgccaccgaggacggcaacgtgaccaaggacagcaacgtggtgctggagatccccgccgccaccaccatcgcctacggcgtgatcgagctgtacgtgaagctggacggccagttcgagttctgcctgctgagaggcaagcagggcggcttcgagaacaagaagagaatcgacagcgtgtacctggaccccctggtgttcagagagttcgccttcatcgacatgcccgacgccgcccacggcatcagcagccaggacggccccctgagcgtgctgaagcaggccaccctgctgctggagagaaacttccaccccttcgccgagctgcccgagccccagcagaccgccctgagcgacatcttccaggccgtgctgttcgacgacgagctgctgatggtgctggagcccgtgtgcgacgacctggtgagcggcctgagccccaccgtggccgtgctgggcgagctgaagcccagacagcagcaggacctggtggccttcctgcagctggtgggctgcagcctgcagggcggctgccccggccccgaggacgccggcagcaagcagctgttcatgaccgcctacttcctggtgagcgccctggccgagatgcccgacagcgccgccgccctgctgggcacctgctgcaagctgcagatcatccccaccctgtgccacctgctgagagccctgagcgacgacggcgtgagcgacctggaggaccccaccctgacccccctgaaggacaccgagagattcggcatcgtgcagagactgttcgccagcgccgacatcagcctggagagactgaagagcagcgtgaaggccgtgatcctgaaggacagcaaggtgttccccctgctgctgtgcatcaccctgaacggcctgtgcgccctgggcagagagcacagctag

SEQ ID NO: 44926 - DNA, 2590 bp, Artificial Sequence
  derived and/or modified sequence
agaaagcaatgtttgagcaccagctatgctgagattccctcgttcagtattcgttgagcacccagtgtgtgagagcgcctggttttgccctcaaggagcttagagtggagtttacaggaatgaatcactgattagcggcaggcctaagtgtgggcactgtcgcaccacacacccagatactactccaggcacgggcattaggggctcccacaggctggacaggccttggactttcctggttgaaccgtgaggccgcggtgtcagtccacactccactgtgggtggcgggttcggccccgcgaggaggcgccgctctcaaaccccacggtcccgcgcagcgaagaggcgaggcggccgcggaaggcaggcgcagcccactcttcccgagaggccccgacatctcccggataatctggagctttcaaaatgtttgccaaagcaaccaggaattttcttagagaagttgatgctgatggtgacctgattgcagtatcaaatctgaatgactctgataagttacagcttctaagtctggtgacaaaaaagaagagattctggtgctggcagagacccaagtaccagtttttatccctcacccttggcgatgtactcatagaagaccaatttccgagtccagtggtcgtggagtcggactttgtgaaatacgagggcaagtttgcaaaccacgtgagtggaaccctggagactgcactggggaaggtcaagctgaacctggggggcagcagccgcgtagagagccagtcttcatttggaaccctgaggaagcaggaggtggatttgcagcagctcatcagagactctgccgagagaacaataaatctgagaaaccctgtgctccagcaggtgctggaaggaaggaatgaggtcctgtgcgttttgacacagaagatcacgacgatgcagaagtgtgtgatctctgagcacatgcaggtcgaggagaagtgtggtggcatcgtgggcatccagaccaagacggtgcaggtgtcagcgacggaggatgggaatgtcaccaaggactccaacgtggtgctggagatcccagctgccaccaccattgcctacggtgtcattgagttatacgtgaaactggacggccagttcgagttctgccttctccgagggaagcaaggtggcttcgagaacaagaagagaattgactctgtctacctggaccccctggtctttcgagagtttgcattcatagacatgccagatgctgcgcatgggatatcttcccaggatggaccattaagtgttttaaagcaagcgaccctgctcctggagaggaatttccatccatttgcggagctgcctgagccacaacagacagctttgagtgacatcttccaggcggtcctatttgatgatgaactactcatggtcctggaaccagtgtgcgatgacctggtcagcggcctctcgcccacagtggcggtgctgggggagctgaagccccggcagcagcaggaccttgtggccttcctgcagctggtggggtgcagcttacagggtgggtgtccgggccccgaggatgcaggcagcaagcagctgtttatgacagcctacttcttggtcagtgccctcgcagaaatgccagatagcgcagcagctctgctgggcacttgctgcaaactccagatcattcccacactgtgccacttgcttcgtgctctgtctgatgatggagtatctgatcttgaagacccaaccttgactcccctgaaagatacagaaaggtttgggattgtgcagcgcttgtttgcctcagctgacattagtctggagagactgaagtcatctgtgaaagctgtcattctgaaggactctaaagtcttcccactgcttctttgtataaccctgaatggactctgtgctttaggcagagaacattcatgatgtcatatgtgaactagaagtacgtgttactggccaaggctatttttcagaactgttaaaggtcatatgcacgttaaaagttgaccaatgaaatgaatttacagaacagtttaagaagtggtgacattttgcatgatgaatgacctgacttttagccaccaggtactctttaaacagttttccttatcagaggccctcctgtgctggtgacccagcatctgagttaggttccagcatgtaaagagctgggagggcggagaattcttagcatacattcagacgttttttctgcacaataataagtccatctgtcacttgcattccactttttgttacatagaaagagtctgaccctttaatccaaaaggtctttttacattgtgaatgctgtgggaaggcaatttctctgcacacaagaggctacgttttggaagtgatgtatgttatttgatgactgaaaatgaactgtaaatgctcctagagtatattcctctgctgaacaaaattaaacttcaaaaaaatctaacagtaacacacccctgcttgggaccctagctatatgcattttatgtgaccttgccatgcttcagtgaacatactaattctatgtctagcacatgttgatttcctatgtattctgggtattctattaaaggaaactttgaactatgtc

SEQ ID NO: 44927 - DNA, 1689 bp, Artificial Sequence
  derived and/or modified sequence
ggggcgcccggaccgagcaaaggtcccggcgggcgggccctctctccgccctccccaagcgcccgccccccgccggcccagcgcaggctcctccgactccgccagcgcagggggcgcggctgccggggacccagcagcgggcgcgcggataatctggagctttcaaaatgtttgccaaagcaaccaggaattttcttagagaagttgatgctgatggtgacctgattgcagtatcaaatctgaatgactctgataagttacagcttctaagtctggtgacaaaaaagaagagattctggtgctggcagagacccaagtaccagtttttatccctcacccttggcgatgtactcatagaagaccaatttccgagtccagtggtcgtggagtcggactttgtgaaatacgagggcaagtttgcaaaccacgtgagtggaaccctggagactgcactggggaaggtcaagctgaacctggggggcagcagccgcgtagagagccagtcttcatttggaaccctgaggaagcaggaggtggatttgcagcagctcatcagagactctgccgagagaacaataaatctgagaaaccctgtgctccagcaggtgctggaaggaaggaatgaggtcctgtgcgttttgacacagaagatcacgacgatgcagaagtgtgtgatctctgagcacatgcaggtcgaggagaagtgtggtggcatcgtgggcatccagaccaagacggtgcaggtgtcagcgacggaggatgggaatgtcaccaaggactccaacgtggtgctggagatcccagctgccaccaccattgcctacggtgtcattgagttatacgtgaaactggacggccagttcgagttctgccttctccgagggaagcaaggtggcttcgagaacaagaagagaattgactctgtctacctggaccccctggtctttcgagagtttgcattcatagacatgccagatgctgcgcatgggatatcttcccaggatggaccattaagtgttttaaagcaagcgaccctgctcctggagaggaatttccatccatttgcggagctgcctgagccacaacagacagctttgagtgacatcttccaggcggtcctatttgatgatgaactactcatggtcctggaaccagtgtgcgatgacctggtcagcggcctctcgcccacagtggcggtgctgggggagctgaagccccggcagcagcaggaccttgtggccttcctgcagctggtggggtgcagcttacagggtgggtgtccgggccccgaggatgcaggcagcaagcagctgtttatgacagcctacttcttggtcagtgccctcgcagaaatgccagatagcgcagcagctctgctgggcacttgctgcaaactccagatcattcccacactgtgccacttgcttcgtgctctgtctgatgatggagtatctgatcttgaagacccaaccttgactcccctgaaagatacagaaaggtttgggattgtgcagcgcttgtttgcctcagctgacattagtctggagagactgaagtcatctgtgaaagctgtcattctgaaggactctaaagtcttcccactgcttctttgtataaccctgaatggactctgtgctttaggcagagaacattcatgatgtcatatgtgaactagaagtacgtgttact

SEQ ID NO: 44928 - DNA, 2265 bp, Artificial Sequence
  derived and/or modified sequence
aggagcttagagtggagtttacaggaatgaatcactgattagcggcaggcctaagtgtgggcactgtcgcaccacacacccagatactactccaggcacgggcattaggggctcccacaggctggacaggccttggactttcctggttgaaccgtgaggccgcggtgtcagtccacactccactgtgggtggcgggttcggccccgcgaggaggcgccgctctcaaaccccacggtcccgcgcagcgaagaggcgaggcggccgcggaaggcaggcgcagcccactcttcccgagaggccccgacatctcccggtggtcgtggagtcggactttgtgaaatacgagggcaagtttgcaaaccacgtgagtggaaccctggagactgcactggggaaggtcaagctgaacctggggggcagcagccgcgtagagagccagtcttcatttggaaccctgaggaagcaggaggtggatttgcagcagctcatcagagactctgccgagagaacaataaatctgagaaaccctgtgctccagcaggtgctggaaggaaggaatgaggtcctgtgcgttttgacacagaagatcacgacgatgcagaagtgtgtgatctctgagcacatgcaggtcgaggagaagtgtggtggcatcgtgggcatccagaccaagacggtgcaggtgtcagcgacggaggatgggaatgtcaccaaggactccaacgtggtgctggagatcccagctgccaccaccattgcctacggtgtcattgagttatacgtgaaactggacggccagttcgagttctgccttctccgagggaagcaaggtggcttcgagaacaagaagagaattgactctgtctacctggaccccctggtctttcgagagtttgcattcatagacatgccagatgctgcgcatgggatatcttcccaggatggaccattaagtgttttaaagcaagcgaccctgctcctggagaggaatttccatccatttgcggagctgcctgagccacaacagacagctttgagtgacatcttccaggcggtcctatttgatgatgaactactcatggtcctggaaccagtgtgcgatgacctggtcagcggcctctcgcccacagtggcggtgctgggggagctgaagccccggcagcagcaggaccttgtggccttcctgcagctggtggggtgcagcttacagggtgggtgtccgggccccgaggatgcaggcagcaagcagctgtttatgacagcctacttcttggtcagtgccctcgcagaaatgccagatagcgcagcagctctgctgggcacttgctgcaaactccagatcattcccacactgtgccacttgcttcgtgctctgtctgatgatggagtatctgatcttgaagacccaaccttgactcccctgaaagatacagaaaggtttgggattgtgcagcgcttgtttgcctcagctgacattagtctggagagactgaagtcatctgtgaaagctgtcattctgaaggactctaaagtcttcccactgcttctttgtataaccctgaatggactctgtgctttaggcagagaacattcatgatgtcatatgtgaactagaagtacgtgttactggccaaggctatttttcagaactgttaaaggtcatatgcacgttaaaagttgaccaatgaaatgaatttacagaacagtttaagaagtggtgacattttgcatgatgaatgacctgacttttagccaccaggtactctttaaacagttttccttatcagaggccctcctgtgctggtgacccagcatctgagttaggttccagcatgtaaagagctgggagggcggagaattcttagcatacattcagacgttttttctgcacaataataagtccatctgtcacttgcattccactttttgttacatagaaagagtctgaccctttaatccaaaaggtctttttacattgtgaatgctgtgggaaggcaatttctctgcacacaagaggctacgttttggaagtgatgtatgttatttgatgactgaaaatgaactgtaaatgctcctagagtatattcctctgctgaacaaaattaaacttcaaaaaaatctaacagtaacacacccctgcttgggaccctagctatatgcattttatgtgaccttgccatgcttcagtgaacatactaattctatgtctagcacatgttgatttcctatgtattctgggtattctattaaaggaaactttgaactatg

SEQ ID NO: 44929 - DNA, 2818 bp, Artificial Sequence
  derived and/or modified sequence
gttctatagtcctattaatcagtctttagtgagcctatgtcctgggctgtgaaacttagttccctccccccattatgtggggcagaatggctagaggggactggagttgagttaggctctgataaaaccccaatcgtttaggctttggtgaaacagtttctcttgaagacaggcctcgttaagaacagaatgctctggcatgtttcaaaatggctacgttccccgcctcccgctgcaagaatgaggggagtttttctgatattccctgtgagaacctggttagagctcctagaggtaaaactcacagaagtgtagagagtttctaactctcagacttgtccaccctgagcttccagcagttcatcagttacagttcagggtttcccatgcaagcaatggttcctgtggtttctgctctgtttctgtcacccaggctggagtacagtggcacgatcacagctcactgcaccctcaacttcccaggctcaggtgattctcctgcatcagcctcccgagtagctgggactacaggtgtggacacattgagaagtcactatctatgaactaggaagcaggatctcaccagacatcgaatctgctgatgccttcatcttggacttctctctcagcctccagaactataatctggagctttcaaaatgtttgccaaagcaaccaggaattttcttagagaagttgatgctgatggtgacctgattgcagtatcaaatctgaatgactctgataagttacagcttctaagtctggtgacaaaaaagaagagattctggtgctggcagagacccaagtaccagtttttatccctcacccttggcgatgtactcatagaagaccaatttccgagtccagtggtcgtggagtcggactttgtgaaatacgagggcaagtttgcaaaccacgtgagtggaaccctggagactgcactggggaaggtcaagctgaacctggggggcagcagccgcgtagagagccagtcttcatttggaaccctgaggaagcaggaggtggatttgcagcagctcatcagagactctgccgagagaacaataaatctgagaaaccctgtgctccagcaggtgctggaaggaaggaatgaggtcctgtgcgttttgacacagaagatcacgacgatgcagaagtgtgtgatctctgagcacatgcaggtcgaggagaagtgtggtggcatcgtgggcatccagaccaagacggtgcaggtgtcagcgacggaggatgggaatgtcaccaaggactccaacgtggtgctggagatcccagctgccaccaccattgcctacggtgtcattgagttatacgtgaaactggacggccagttcgagttctgccttctccgagggaagcaaggtggcttcgagaacaagaagagaattgactctgtctacctggaccccctggtctttcgagagtttgcattcatagacatgccagatgctgcgcatgggatatcttcccaggatggaccattaagtgttttaaagcaagcgaccctgctcctggagaggaatttccatccatttgcggagctgcctgagccacaacagacagctttgagtgacatcttccaggcggtcctatttgatgatgaactactcatggtcctggaaccagtgtgcgatgacctggtcagcggcctctcgcccacagtggcggtgctgggggagctgaagccccggcagcagcaggaccttgtggccttcctgcagctggtggggtgcagcttacagggtgggtgtccgggccccgaggatgcaggcagcaagcagctgtttatgacagcctacttcttggtcagtgccctcgcagaaatgccagatagcgcagcagctctgctgggcacttgctgcaaactccagatcattcccacactgtgccacttgcttcgtgctctgtctgatgatggagtatctgatcttgaagacccaaccttgactcccctgaaagatacagaaaggtttgggattgtgcagcgcttgtttgcctcagctgacattagtctggagagactgaagtcatctgtgaaagctgtcattctgaaggactctaaagtcttcccactgcttctttgtataaccctgaatggactctgtgctttaggcagagaacattcatgatgtcatatgtgaactagaagtacgtgttactggccaaggctatttttcagaactgttaaaggtcatatgcacgttaaaagttgaccaatgaaatgaatttacagaacagtttaagaagtggtgacattttgcatgatgaatgacctgacttttagccaccaggtactctttaaacagttttccttatcagaggccctcctgtgctggtgacccagcatctgagttaggttccagcatgtaaagagctgggagggcggagaattcttagcatacattcagacgttttttctgcacaataataagtccatctgtcacttgcattccactttttgttacatagaaagagtctgaccctttaatccaaaaggtctttttacattgtgaatgctgtgggaaggcaatttctctgcacacaagaggctacgttttggaagtgatgtatgttatttgatgactgaaaatgaactgtaaatgctcctagagtatattcctctgctgaacaaaattaaacttcaaaaaaatctaacagtaacacacccctgcttgggaccctagctatatgcattttatgtgaccttgccatgcttcagtgaacatactaattctatgtctagcacatgttgatttcctatgtattctgggtattctattaaaggaaactttgaact

SEQ ID NO: 44930 - DNA, 999 bp, Artificial Sequence
  derived and/or modified sequence
atgcagaaatgtgttattagtgagcacatgcaggtggaggagaaatgcggaggcattgttggtatccaaacaaagactgtccaggtgagcgcaacggaggatggaaacgtgacgaaggactccaatgtagtgcttgaaattcccgcggccaccaccattgcatatggcgtgatcgagctctacgttaaattagacggccaattcgaattttgtctgctcagaggcaagcaggggggctttgagaacaagaagcgcatcgatagtgtatatttggatcccctcgtgttcagagaattcgcgtttatcgatatgcccgacgccgctcacggaatctcctctcaggacggccccctctccgtgctgaaacaagctactctcctgctcgaaaggaactttcacccattcgccgagcttcctgaaccacaacaaaccgcactgtctgacattttccaggctgtcctattcgacgatgagctgctgatggtgctcgagcccgtttgcgacgacctggtgtcagggctctcgcccacagtggctgttttgggggagctgaagccaaggcagcagcaggacctcgtggcctttctgcagcttgttgggtgctctctgcagggagggtgcccaggaccagaagatgccggcagcaagcaactcttcatgacagcatacttcctggtatccgctttagccgagatgccagacagcgcggccgcattgctaggaacgtgctgcaaactgcagataattcccaccctgtgtcacttgctaagagctctctcagatgacggggtaagtgacctggaggacccaacgcttacccccctcaaagatacagagcggttcggtattgtccagcggctgttcgcatccgccgacattagcctggagcgtctgaagtcaagtgttaaggcagtgattctgaaggacagtaaagttttcccactgctgctgtgtataacgcttaatggcttatgtgccctggggcgcgaacattcctag

SEQ ID NO: 44931 - DNA, 999 bp, Artificial Sequence
  derived and/or modified sequence
atgcagaagtgcgtgatctctgagcacatgcaagtggaagagaaatgcggcggtattgttggcatccaaaccaaaaccgttcaagtgagcgccacagaggatgggaatgtgacaaaggattcgaatgtcgttctggaaattcccgctgccactacaatcgcttacggggtcatagagctgtatgtaaagctcgacggacagttcgagttttgtctgctccgggggaagcaaggcgggttcgagaacaagaaacggatcgattccgtctatttggatcctctggtcttcagagaatttgcatttatcgatatgccagatgccgcccatggcataagtagtcaggatggacccctgagtgtgctcaagcaagcaacactgttgctggagcgcaacttccaccccttcgctgagctacctgagccacaacagaccgctctctccgacatcttccaggccgtactttttgacgacgagcttctaatggtcctggaaccagtctgtgatgatctggtgagcggcctgtccccaacagtggcggtccttggtgagctcaagccgcgccagcagcaggatctggttgccttcttacagctggtcggctgtagcctccaggggggctgtccaggcccagaggacgctggttctaaacaactctttatgacggcctactttctcgtgagtgcactggccgagatgcctgatagtgctgctgcgctgcttggtacttgctgcaagctgcaaataatacctacactgtgccatttacttcgcgccctgtcagacgatggagtcagtgacctggaagaccccaccctaacaccactcaaggacacggagagatttggcattgtccagagactcttcgcctccgcagacatctctctagagcgattgaagagttccgtgaaagctgtgattttgaaggatagcaaggtgtttcccctcctgctttgcattaccttgaatgggctctgtgccttaggccgagagcattcgtag

SEQ ID NO: 44932 - DNA, 999 bp, Artificial Sequence
  derived and/or modified sequence
atgcagaagtgtgtgatcagcgagcacatgcaggtggaggagaagtgtggcggcatcgtgggcatccagaccaagacagtgcaggtgtctgccacagaagatggaaatgtgaccaaggacagcaatgtggtgctggagatcccagctgccaccaccatcgcctatggagtcatcgagctgtatgtgaagctggatggccagtttgagttctgcctgctgcggggcaagcagggcggctttgagaacaagaagagaattgacagcgtgtacctggaccccctggtgttccgggagtttgccttcatcgacatgccagatgctgcccacggcatcagcagccaggacggccccctgtctgtgctgaagcaggccaccctgctgctggagaggaacttccacccctttgctgagctgcctgagccccagcagacagccctgagtgacatcttccaggccgtgctgtttgatgatgagctgctgatggtgctggagcctgtgtgtgatgacctggtgtctggcctgagccccaccgtggccgtgctgggggagctgaagccccggcagcagcaggacctggtggccttcctgcagctggtgggctgcagcctgcagggcggctgccccggcccagaagatgctggcagcaagcagctgttcatgacagcctacttcctggtgtctgccctggccgagatgccagattctgctgctgccctgctgggcacctgctgcaagctgcagatcatccccaccctgtgccacctgctgcgggccctgagtgatgatggagtgtctgacctggaggaccccaccctgacccccctgaaggacacagaaagatttggaattgtgcagaggctgtttgccagcgctgacatcagcctggagcggctgaagagctctgtgaaggccgtcatcctgaaggacagcaaggtgttccccctgctgctgtgcatcaccctgaatggcctgtgtgccctgggccgggagcacagctag

SEQ ID NO: 44933 - DNA, 999 bp, Artificial Sequence
  derived and/or modified sequence
atgcagaagtgcgtgatcagcgagcacatgcaggtggaggagaagtgcggcggaatcgtgggaatccaaactaagacggtgcaagtgtccgcaacagaggatggaaatgtgaccaaggactccaatgttgtcctcgaaattccggcagccacaaccatcgcctatggagttatcgaactgtacgtcaaactagatgggcagttcgagttttgcctccttcggggcaagcagggcggcttcgaaaataaaaaacgaattgatagcgtgtatcttgatccccttgtgtttagggagttcgcttttattgacatgcccgatgccgctcacggaatttcctcacaggacggaccgctgagtgtgctcaagcaggcaactctgctgttggagcgcaatttccacccatttgccgagctgccggagcctcagcagaccgcactctcagacatattccaagcagtcctgttcgatgatgaactgctgatggtgttggagccggtgtgtgatgatctggtgtctggtctatctcccacagtcgcggtgcttggggagcttaagcccaggcagcagcaagaccttgtggccttcttacaactcgttggctgcagccttcagggggggtgcccaggcccagaggacgctggctcgaagcagttgtttatgactgcgtactttctggttagcgccctggcagaaatgccggactccgccgcagctctcctgggaacttgttgtaagttgcagatcatcccaactctttgccacttgcttcgtgccctcagcgatgacggcgtatccgatctggaggatcccactctgacaccgttaaaggacacagagcggttcgggatagtgcagcggttgttcgctagtgcggacatctccctggagagactgaagtcatcggtcaaggctgtaattctcaaggactcaaaagtgttccccctgctactgtgtatcacattaaacgggttgtgcgctctgggtcgtgagcacagctag

SEQ ID NO: 44934 - DNA, 999 bp, Artificial Sequence
  derived and/or modified sequence
atgcagaagtgcgtgatcagcgagcacatgcaggtggaggagaagtgcggcggaatagtgggaatccagactaagaccgtgcaggtgtctgctacagaggatggaaacgtaacaaaggattccaacgtcgtccttgaaattcctgcagccacaaccattgcctatggggttattgaactgtacgtaaaattagacggtcaatttgaattctgtctgttacgtgggaaacagggcggctttgagaataagaagcgtatagactcagtgtatttagacccactagttttccgcgaattcgctttcattgatatgcctgatgccgcacacgggataagctcccaggacgggccgctgtccgtcctcaagcaggctacccttctcttggaacgcaactttcacccattcgctgaactgccagagcctcagcagactgcactgtccgatatcttccaggccgtcctgtttgacgatgaattactcatggttctcgagcctgtctgcgatgacctagtcagtggcctgtccccaaccgttgctgtgctaggagaattgaagccgcgacaacagcaggacttggtagcatttctgcagttggtgggctgctccctgcagggaggctgtcccgggccagaggatgctggcagcaagcagttatttatgaccgcctactttcttgtctctgcgcttgctgagatgccggacagcgccgcggcgctgctgggtacttgctgtaagctgcagatcatccctacgctgtgtcacctgctgagagctctcagcgatgacggggtctcggacctggaggaccctacactgacccctctgaaagacaccgagcgcttcggcattgtacagaggttgttcgcgagtgcagatattagcctcgagagactcaagtcctctgtgaaggcggtgatcctgaaggatagcaaggtattccctctgctcctgtgtataactctcaacggtctctgcgctctgggacgcgagcactcttag

SEQ ID NO: 44935 - DNA, 999 bp, Artificial Sequence
  derived and/or modified sequence
atgcagaagtgtgttatctccgaacatatgcaggtggaggaaaaatgcggtggaatagtgggaatccagacaaagactgtccaggttagtgctactgaagatggtaatgtcacaaaagacagtaacgtggtgctggagatccccgctgccaccacgatcgcgtacggggtgattgagctgtacgtgaaactggatggacaatttgaattctgcctgttgaggggcaagcagggaggcttcgagaacaagaaacggatagattctgtctacctggaccccctagtgtttcgcgagtttgccttcatagacatgccagacgcagcacacggaattagctcacaggatggacctctctctgtactcaagcaggcaaccttgttgttagagagaaattttcatccattcgcagagttaccggagccccagcagacagctttatctgatatctttcaggcggtgttgtttgacgacgagcttcttatggtgcttgagcctgtgtgcgacgatcttgtctccgggctgagccctacagtggccgtcctcggggaactgaagccaaggcagcaacaggatcttgtggcattcctgcaacttgtggggtgttcgctccagggcggatgcccagggccagaagacgcaggctctaagcagctcttcatgactgcatactttttggtttcagcattggcggagatgcccgattctgccgctgcacttttgggtacgtgttgtaagcttcaaattatccctactttgtgtcacctgctgcgagcgttatctgatgacggagtgtctgacttggaggacccgactttgactcctctaaaagataccgaaaggtttggcatcgtacagcggctgtttgctagtgctgatatatccctggagcgcttaaagagcagcgtcaaggccgtgatattgaaggactctaaggtattcccgttgctgctgtgcattactctgaacggtctgtgcgcactcgggagggaacatagttag

SEQ ID NO: 44936 - DNA, 999 bp, Artificial Sequence
  derived and/or modified sequence
atgcagaaatgcgttatttcagaacatatgcaggtggaagaaaagtgcggcggaattgtgggaatccaaacgaagacagtccaggttagcgctacagaggatggtaatgtcaccaaggacagtaacgtggtactggagatcccagcagcaaccactatagcatacggtgtgatagaactgtatgtaaagctagacggtcagtttgaattctgcctcctgcgcggtaagcaggggggatttgaaaataagaagagaatcgattctgtgtatcttgacccgttagtgtttagggagtttgcattcatcgacatgcctgatgcagcccacggtatttcttctcaggatggaccattgagcgttctgaaacaagccacacttttgttggaacggaactttcacccgtttgcagagctccctgagccacagcaaaccgcgctgtccgacattttccaggccgtcctcttcgacgacgagctgctgatggtgctggaacccgtgtgtgatgatctcgtgagcggattgagccctactgtggctgtgctgggggaacttaaacctaggcagcaacaggacttggtcgccttccttcagctggtgggatgcagcctgcaaggtggatgccctggccctgaggatgcagggagtaaacagctctttatgacagcctacttcctcgtgagcgctctagctgaaatgcctgacagcgctgctgccctactcgggacttgctgcaagctgcagataatcccaaccctctgccacctgttaagagcactttccgatgacggggtttccgatctcgaagacccaactctgacaccacttaaggatacggagagattcgggattgtacaacgtcttttcgcatccgccgatataagcctggagagactcaaaagcagtgttaaagccgtcatccttaaagatagcaaagtgtttccgctgctgttatgtattaccctgaatggactgtgcgccctgggacgggagcacagctag

SEQ ID NO: 44937 - DNA, 999 bp, Artificial Sequence
  derived and/or modified sequence
atgcagaagtgcgtgatcagcgagcacatgcaggtggaggagaagtgcggcggcatcgtgggcatccagaccaagaccgtgcaggtgagcgccaccgaggacggcaacgtgaccaaggacagcaacgtggtgctggagatccccgccgccaccaccatcgcctacggcgtgatcgagctgtacgtgaagctggacggccagttcgagttctgcctgctgagaggcaagcagggcggcttcgagaacaagaagagaatcgacagcgtgtacctggaccccctggtgttcagagagttcgccttcatcgacatgcccgacgccgcccacggcatcagcagccaggacggccccctgagcgtgctgaagcaggccaccctgctgctggagagaaacttccaccccttcgccgagctgcccgagccccagcagaccgccctgagcgacatcttccaggccgtgctgttcgacgacgagctgctgatggtgctggagcccgtgtgcgacgacctggtgagcggcctgagccccaccgtggccgtgctgggcgagctgaagcccagacagcagcaggacctggtggccttcctgcagctggtgggctgcagcctgcagggcggctgccccggccccgaggacgccggcagcaagcagctgttcatgaccgcctacttcctggtgagcgccctggccgagatgcccgacagcgccgccgccctgctgggcacctgctgcaagctgcagatcatccccaccctgtgccacctgctgagagccctgagcgacgacggcgtgagcgacctggaggaccccaccctgacccccctgaaggacaccgagagattcggcatcgtgcagagactgttcgccagcgccgacatcagcctggagagactgaagagcagcgtgaaggccgtgatcctgaaggacagcaaggtgttccccctgctgctgtgcatcaccctgaacggcctgtgcgccctgggcagagagcacagctag

SEQ ID NO: 44938 - protein, 532 aa, Artificial Sequence
  derived and/or modified sequence
MPAPPGRTHTWFLLQSLEDLDTSLRKLNSRLFVVRGQPADVFPRLFKEWGVTRLTFEYDSEPFGKERDAAIMKMAKEAGVEVVTENSHTLYDLDRIIELNGQKPPLTYKRFQAIISRMELPKKPVGLVTSQQMESCRAEIQENHDETYGVPSLEELGFPTEGLGPAVWQGGETEALARLDKHLERKAWVANYERPRMNANSLLASPTGLSPYLRFGCLSCRLFYYRLWDLYKKVKRNSTPPLSLFGQLLWREFFYTAATNNPRFDRMEGNPICIQIPWDRNPEALAKWAEGKTGFPWIDAIMTQLRQEGWIHHLARHAVACFLTRGDLWVSWESGVRVFDELLLDADFSVNAGSWMWLSCSAFFQQFFHCYCPVGFGRRTDPSGDYIRRYLPKLKAFPSRYIYEPWNAPESIQKAAKCIIGVDYPRPIVNHAETSRLNIERMKQIYQQLSRYRGLCLLASVPSCVEDLSHPVAEPSSSQAGSMSSAGPRPLPSGPASPKRKLEAAEEPPGEELSKRARVAELPTPELPSKDA

SEQ ID NO: 44939 - DNA, 1599 bp, Artificial Sequence
  derived and/or modified sequence
atgccagcccctcccgggcgtacccacacatggtttctgttacagagtctcgaagatttggacaccagcctcagaaagttgaacagtcgactatttgtagtgagggggcaacccgctgacgtttttccccgcctgttcaaggagtggggagtcacgagactcacatttgaatatgacagcgagcccttcgggaaggagcgcgatgccgctattatgaaaatggccaaagaggccggtgtcgaagtggtgactgaaaacagccacaccctctatgacctggaccgcattattgaactgaatgggcaaaagccccctctgacatacaagcgtttccaggctattatctcccggatggaactcccaaagaaaccagtggggctggtgaccagccagcaaatggagtcatgtcgggcagaaatacaggagaatcacgatgagacgtatggcgtcccaagcttagaggagcttgggttcccgacagagggactgggcccggctgtttggcaaggcggagagacagaggctctggctcggcttgacaagcacctggagcgcaaggcttgggttgccaattatgagaggcccaggatgaatgcaaactccttacttgcaagtcctacaggcctgagcccatacctgagattcggttgtttaagctgcagacttttttactaccggttatgggatttgtataagaaggtcaagcggaattctacccctccgctgtcacttttcggccagcttctgtggagggagtttttctacaccgcagcaaccaacaatccccgttttgaccgaatggaaggtaatcccatttgcatacagattccatgggatcggaatccggaagccctcgctaaatgggctgaggggaagacagggttcccatggatcgacgcaatcatgacccagctgcgtcaggagggttggatccaccacctcgctaggcacgccgtggcctgcttcctgacaaggggagacctgtgggtaagttgggaaagtggtgtgcgcgtcttcgatgaactcctattagatgcagacttttcggtgaacgcgggctcgtggatgtggttgagctgcagcgccttcttccagcaattttttcactgctactgtcccgtgggcttcggtagacgcaccgacccaagtggcgattatatcaggagatacctccccaaacttaaagcctttccgtcccgctacatctacgaaccatggaacgccccagagtccatccagaaggctgctaagtgtatcatcggggtggactaccctcgccccattgttaaccacgcagaaacgtctcggctcaatatagagcggatgaagcagatctaccagcagttgtctagataccgcgggttgtgtttgctcgcctctgttccatcctgcgtcgaagacctgtcccaccctgtggccgagccttcgtcatcacaggccggctcaatgtcttcagccgggcctagacccttgccttctgggcccgcatctccaaagcgtaagctcgaggctgctgaggagccccctggcgaggagctgagtaaaagagccagggtggctgaactccctacacccgagttgccaagcaaggatgcctag

SEQ ID NO: 44940 - DNA, 1599 bp, Artificial Sequence
  derived and/or modified sequence
atgcctgcccctcctggccgcacccacacctggttcctgctgcagagcctggaggacctggacaccagcctgaggaagctgaacagccggctgtttgtggtgcggggccagcctgcagatgtgttccccaggctcttcaaggagtggggcgtgacccggctgacctttgaatatgacagcgagccctttgggaaggagagagatgctgccatcatgaagatggccaaggaggccggcgtggaggtggtgacagagaacagccacaccctgtatgacctggaccgcatcatcgagctgaatggccagaagccacccctgacctacaagcgcttccaggccatcatcagcaggatggagctgcccaagaagcctgtgggcctggtgaccagccagcagatggagagctgcagagctgagatccaggagaaccatgatgagacctacggcgtgcccagcctggaggagctgggcttccccacagagggcctgggccctgctgtgtggcagggcggggagacagaggccctggcccggctggacaagcacctggagaggaaggcctgggtggccaactatgaaagacccaggatgaatgccaacagcctgctggccagccccaccggcctgagcccctacctgcgcttcggctgcctgagctgccgcctcttctactaccgcctgtgggacctgtacaagaaggtgaagaggaacagcaccccacccctgagcctgtttggccagctgctgtggagggagttcttctacacagctgccaccaacaaccccaggtttgacaggatggagggcaaccccatctgcatccagatcccctgggacaggaaccctgaggccctggccaagtgggccgagggcaagacaggcttcccctggattgatgccatcatgacccagctgcggcaggagggctggatccaccacctggcccggcatgctgtggcctgcttcctgaccaggggggacctgtgggtgtcctgggagagcggcgtgcgggtgtttgatgagctgctgctggatgctgacttctctgtgaatgccggctcctggatgtggctgagctgcagcgccttcttccagcagttcttccactgctactgccctgtgggcttcggccgcaggacagaccccagcggggactacatccgccgctacctgcccaagctgaaggccttccccagccgctacatctatgagccctggaatgcccctgagagcatccagaaggccgccaagtgcatcatcggcgtggactacccccggcccatcgtgaaccacgccgagaccagccggctgaacattgaaagaatgaagcagatctaccagcagctgagccgctaccggggcctgtgcctgctggcctctgtgcccagctgtgtggaggacctgagccaccctgtggccgagcccagcagcagccaggccggctccatgagcagcgctggcccccggcccctgcccagcggccctgccagccccaagaggaagctggaggccgctgaggagcccccaggagaggagctgagcaagagggcccgggtggccgagctgcccaccccagagctgcccagcaaggatgcctag

SEQ ID NO: 44941 - DNA, 1599 bp, Artificial Sequence
  derived and/or modified sequence
atgcccgccccccccggccggacccacacctggttcctgctgcagtccctggaggatctcgacaccagtctgcgcaaactgaacagtcgcctgtttgtcgtgcgcggacaacccgctgatgtgttccctaggttattcaaggagtggggagtcactcgcctaacttttgaatacgacagcgagcctttcggaaaggagagggacgcagcaatcatgaaaatggctaaggaagccggcgtggaagtggtgactgaaaattctcacaccttatacgatcttgatagaattatcgagttaaacggacaaaagccgccactaacctataagcgcttccaagccattatatccaggatggagttgccaaaaaaacctgtcggtctggtaacatcccaacagatggagagttgcagagcagaaattcaggagaatcacgacgagacctacggagttccgtccctggaggagctcggattccccactgaaggccttggtcccgccgtgtggcagggaggcgaaaccgaggccttagcaaggctggacaaacaccttgagagaaaagcctgggtggccaattacgagaggccccggatgaatgccaattccctgttggcctctcctactggtttatctccttacctccgctttggttgtctttcctgtagattattctattatcgactgtgggatctgtacaaaaaggtcaagcgaaattcgacgcctccgcttagcttgttcggccaacttctctggcgcgagtttttctataccgcggctactaacaatccccggttcgaccgcatggaaggcaacccgatctgcattcagatcccctgggaccggaatcccgaggccctggctaagtgggctgaaggcaagacggggttcccttggattgatgccattatgacacagctgcgtcaggagggctggattcaccatcttgcaagacacgccgtagcgtgtttcctgaccaggggtgatctgtgggtgagctgggagagtggtgtaagagtgtttgatgagcttctcttagacgcggatttttctgtcaacgcaggaagttggatgtggttgtcatgcagcgcctttttccagcaattcttccactgctactgtcctgtgggtttcggccgtcggacagacccctccggcgattatatccgtaggtacttacccaaattgaaggcgtttccatcccggtacatatacgagccctggaacgctcccgagtccattcagaaagctgccaagtgcatcatcggtgttgactatcccaggcctatcgttaatcatgctgagacctcccgtctgaacatcgagcgaatgaaacagatctaccagcagctgtcccgttaccggggcttgtgcctcctagccagtgtcccttcctgcgtggaagacctctcccatcccgtcgccgagccctctagtagccaggccggcagcatgtcctccgctggtcctcggccgctgccatccggccctgccagcccgaagaggaaactggaagcagctgaagaacccccaggggaagaacttagtaaaagggcccgggtcgccgagttgccaactcctgaacttccatccaaagatgcatag

SEQ ID NO: 44942 - DNA, 1599 bp, Artificial Sequence
  derived and/or modified sequence
atgcccgcacctccgggacggacccacacctggttcctcctccagtccttggaggacctggacacatctctgcgcaagctgaacagcagactgttcgtcgtcagggggcagcccgctgatgtgttccctcggctcttcaaggagtggggggtgactaggctgacctttgagtacgacagcgagcctttcggcaaagagcgggatgccgctattatgaagatggccaaagaagctggggtcgaggtggtgaccgagaattcccatacgctgtacgacctcgatcgcattatcgagctaaatggacagaagccccctcttacatataagcgcttccaggccattatcagcagaatggagctgcccaagaaacctgtgggactggttacctctcaacagatggagagctgcagggccgagatccaggagaatcatgatgagacttatggtgtgcccagcctcgaggaactggggttccccacggaagggttgggccctgctgtttggcagggcggtgaaactgaggctctcgcacgacttgataagcatcttgaaaggaaggcatgggttgccaactatgagcggcctcgcatgaacgccaacagcctgctggctagcccaacaggcctctccccttacctccgcttcgggtgcctgagttgtcgtctgttctactaccggttgtgggatctttataaaaaggtgaaaagaaattctaccccccctttaagccttttcgggcagctcctgtggagagagttcttttataccgccgcaaccaacaatccccgatttgaccggatggagggtaatcctatttgcattcagatcccctgggaccggaatccagaggctctcgcaaaatgggccgagggaaaaacaggattcccttggatagatgcaattatgacccagctgcgccaggaaggatggatccatcacctggctcggcacgctgtcgcatgcttcctcactcgtggagacctgtgggtgtcttgggagtctggggtccgcgtgttcgatgagctgctgcttgacgcggactttagcgtgaacgctggctcctggatgtggctgtcatgtagtgcattctttcagcaattcttccactgttattgccccgtcggtttcgggcgaagaaccgaccctagtggcgactacattcgacggtatctgcccaaactgaaagcatttccaagccgatatatttacgaaccttggaacgcaccagaatctattcaaaaagcagccaagtgcatcatcggggttgattatcccaggcctatcgttaatcacgcagaaaccagtcggctgaacattgaacgcatgaaacagatctatcagcagctctctcggtaccgaggactttgcctgctagcttccgtcccttcttgcgtggaggatctgagccacccagtagccgagccatcaagcagccaggctggatccatgtcctcagctggacccaggccactgccaagtggaccagctagccccaagagaaaattggaggctgcggaggaacctcctggcgaggagctgagcaagcgggcaagagtggctgagctgccaacacctgagcttccgagtaaggacgcctag

SEQ ID NO: 44943 - DNA, 2053 bp, Artificial Sequence
  derived and/or modified sequence
agcttcttctagaagcaggccctgaacaggacgtgggtaagagatccgctgtcccttgagacttggcctactcccggcactccgcggacagccccagcctgcggacagccccagcctgcgtcacttgtccgcatgccagctccacccgggcggacccacacatggttcctacttcagtctctggaagatttggacacaagtttaaggaaactgaactcccgcctgtttgtagtccggggacagccagccgacgtgttcccaaggctgttcaaggaatggggagtgacccgcttgacctttgaatatgactctgaaccctttgggaaagaacgggatgcagccatcatgaagatggccaaggaggctggtgtggaagtagtgacggagaattctcataccctctatgacctggacaggatcattgagctgaatgggcagaagccaccccttacatacaagcgctttcaggccatcatcagccgcatggagctgcccaagaagccagtgggcttggtgaccagccagcagatggagagctgcagggccgagatccaggagaaccacgacgagacctacggcgtgccctccctggaggagctggggttccccactgaaggacttggtccagctgtctggcagggaggagagacagaagctctggcccgcctggataagcacttggaacggaaggcctgggttgccaactatgagagaccccgaatgaacgccaactccctcctggccagccccacaggcctcagcccctacctgcgctttggttgtctctcctgccgcctcttctactaccgcctgtgggacctgtataaaaaggtgaagcggaacagcacacctcccctctccctatttgggcaactcctatggcgagagttcttctacacggcagctaccaacaaccccaggtttgaccgcatggaggggaaccccatctgcatccagatcccctgggaccgcaatcctgaggccctggccaagtgggctgagggcaagacaggcttcccttggattgatgccatcatgacccaactgaggcaggagggctggatccaccacctggcccggcatgccgtggcctgcttcctgacccgcggggacctctgggtcagctgggagagcggggtccgggtatttgatgagctgctcctggatgcagatttcagcgtgaacgcaggcagctggatgtggctgtcctgcagtgctttcttccagcagttcttccactgctactgccctgtgggctttggccgtcgcacggaccccagtggggactacatcaggcgatacctgcccaaattgaaagcgttcccctctcgatacatctatgagccctggaatgccccagagtcaattcagaaggcagccaagtgcatcattggtgtggactacccacggcccatcgtcaaccatgccgagaccagccggcttaacattgaacgaatgaagcagatttaccagcagctttcgcgctaccggggactctgtctactggcatctgtcccttcctgtgtggaagacctcagtcaccctgtggcagagcccagctcgagccaggctggcagcatgagcagtgcaggcccaagaccactacccagtggcccagcatcccccaaacgcaagctggaagcagccgaggaaccacctggtgaagaactcagcaaacgggcccgggtggcagagttgccaaccccagagctgccgagcaaggatgcctgagactgcagagcccttgctccgtgagcaaagcctgggtgcccaagcagccaccgcagcagcagagtacaacctgcagagaagctgatcaccgggcagagatagagcgagcatgtgtgtgtgtgtgcgcgtgtgcagaggagggagtggtgtgcctgtttgtgtgtgcatgcatctgttgacactcatgattctgaatgttgcctgggctgggggagtacctgtagcacgccagtgctgtttcccggcctccagacacaaggctcgaggttatggcagtgactttcagctgagacctgttcctgcaagccagctgccttgtctg

SEQ ID NO: 44944 - DNA, 1599 bp, Artificial Sequence
  derived and/or modified sequence
atgcccgccccccccggcagaacccacacctggttcctgctgcagagcctggaggacctggacaccagcctgagaaagctgaacagcagactgttcgtggtgagaggccagcccgccgacgtgttccccagactgttcaaggagtggggcgtgaccagactgaccttcgagtacgacagcgagcccttcggcaaggagagagacgccgccatcatgaagatggccaaggaggccggcgtggaggtggtgaccgagaacagccacaccctgtacgacctggacagaatcatcgagctgaacggccagaagccccccctgacctacaagagattccaggccatcatcagcagaatggagctgcccaagaagcccgtgggcctggtgaccagccagcagatggagagctgcagagccgagatccaggagaaccacgacgagacctacggcgtgcccagcctggaggagctgggcttccccaccgagggcctgggccccgccgtgtggcagggcggcgagaccgaggccctggccagactggacaagcacctggagagaaaggcctgggtggccaactacgagagacccagaatgaacgccaacagcctgctggccagccccaccggcctgagcccctacctgagattcggctgcctgagctgcagactgttctactacagactgtgggacctgtacaagaaggtgaagagaaacagcaccccccccctgagcctgttcggccagctgctgtggagagagttcttctacaccgccgccaccaacaaccccagattcgacagaatggagggcaaccccatctgcatccagatcccctgggacagaaaccccgaggccctggccaagtgggccgagggcaagaccggcttcccctggatcgacgccatcatgacccagctgagacaggagggctggatccaccacctggccagacacgccgtggcctgcttcctgaccagaggcgacctgtgggtgagctgggagagcggcgtgagagtgttcgacgagctgctgctggacgccgacttcagcgtgaacgccggcagctggatgtggctgagctgcagcgccttcttccagcagttcttccactgctactgccccgtgggcttcggcagaagaaccgaccccagcggcgactacatcagaagatacctgcccaagctgaaggccttccccagcagatacatctacgagccctggaacgcccccgagagcatccagaaggccgccaagtgcatcatcggcgtggactaccccagacccatcgtgaaccacgccgagaccagcagactgaacatcgagagaatgaagcagatctaccagcagctgagcagatacagaggcctgtgcctgctggccagcgtgcccagctgcgtggaggacctgagccaccccgtggccgagcccagcagcagccaggccggcagcatgagcagcgccggccccagacccctgcccagcggccccgccagccccaagagaaagctggaggccgccgaggagccccccggcgaggagctgagcaagagagccagagtggccgagctgcccacccccgagctgcccagcaaggacgcctag

SEQ ID NO: 44945 - protein, 202 aa, Artificial Sequence
  derived and/or modified sequence
MPQYENPWTIPNMLSMTRIGLAPVLGYLIIEEDFNIALGVFALAGLTDLLDGFIARNWANQRSALGSALDPLADKILISILYVSLTYADLIPVPLTYMIISRDVMLIAAVFYVRYRTLPTPRTLAKYFNPCYATARLKPTFISKVNTAVQLILVAASLAAPVFNYADSIYLQILWCFTAFTTAASAYSYYHYGRKTVQVIKD

SEQ ID NO: 44946 - DNA, 609 bp, Artificial Sequence
  derived and/or modified sequence
atgccccaatatgagaatccatggacgattccgaatatgctctcaatgacgaggattggcctcgctcctgtacttggatatttgatcatcgaagaggactttaacattgccctgggcgtctttgcgctagccggactaacagaccttctggatgggtttatcgctcggaattgggccaatcagcgatctgctcttggctccgcacttgaccccctggccgataaaatactgatctctatcctctacgtgtccctgacgtacgccgatctgatccccgtgcccctaacttacatgattatttcgcgggatgtcatgctgatcgccgcagttttctatgtgcgctacaggaccttaccgacacctagaacgctggcaaagtatttcaatccatgctacgccaccgcgcggctgaaacctacattcatcagcaaggtgaatacagccgtccagctgatcctagtagcggcctccctggctgcacccgtgtttaattacgcagattccatctatctccagatcctgtggtgcttcaccgcctttacaactgccgcgtctgcctactcctactatcattacggacggaagacggttcaggtcattaaggactag

SEQ ID NO: 44947 - DNA, 609 bp, Artificial Sequence
  derived and/or modified sequence
atgccccagtatgagaacccctggaccatccccaacatgctgtccatgaccagaattggcctggcccctgtgctgggctacctgatcatcgaggaggacttcaacatcgccctgggcgtgtttgccctggccggcctgacagacctgctggatggcttcatcgccaggaactgggccaaccagaggtctgccctgggcagcgccctggaccccctggccgacaagatcctgatcagcatcctgtatgtgtccctgacctacgccgacctgatccctgtgcccctgacctacatgatcatcagcagagatgtgatgctgattgctgctgtgttctacgtgcgctaccgcaccctgcccacccccaggaccctggccaagtacttcaacccctgctacgccacagcccggctgaagcccaccttcatcagcaaggtgaacacagctgtgcagctgatcctggtggccgccagcctggccgcccctgtgttcaactatgctgacagcatctacctgcagatcctgtggtgcttcaccgccttcaccacagctgccagcgcctacagctactaccactacggcaggaagacagtgcaggtgatcaaggactag

SEQ ID NO: 44948 - DNA, 609 bp, Artificial Sequence
  derived and/or modified sequence
atgccccagtacgagaacccctggaccatccccaacatgctgagcatgacacgcataggtcttgccccagtgctagggtacctcattatcgaggaggacttcaatatcgccctaggcgtgtttgctctagctggtctcactgacctgctggatggcttcattgctcggaactgggccaatcagagaagcgccctgggctccgccctcgacccgctggctgataaaattctgattagtattctctatgtgtccctcacctatgccgatttgatccccgtgccgctgacttatatgattattagcagagacgttatgcttatcgcagctgtcttctacgtgcgctaccggaccttgccaacgccccgaacattagcgaaatactttaatccttgttatgccaccgcccgtttaaagccgacctttatttcaaaggtgaacactgccgtgcaattaattctagtcgctgccagcttagctgccccagtgtttaactacgccgactctatctacctacagatcctgtggtgttttaccgccttcaccactgcggctagtgcttattcctactatcactatggaaggaagaccgttcaggtgatcaaggattag

SEQ ID NO: 44949 - DNA, 609 bp, Artificial Sequence
  derived and/or modified sequence
atgcctcagtacgaaaatccctggaccatacccaacatgctaagcatgacaaggatcgggttggccccagtgcttggttacttgatcatcgaagaagactttaatattgccctaggagtttttgcattagctggacttaccgaccttttggatggtttcattgctaggaactgggcaaaccaacgcagtgctctggggagtgcgctggaccctttggcagacaaaattctaatctctatcctgtatgtcagtcttacatatgccgacctgatcccggtgccattgacctacatgataatctcgagggacgtaatgctaatcgccgctgtcttctacgtcaggtaccggactttgccaacgccgaggaccttagcaaaatattttaacccatgttacgccaccgctcgcttaaagccaacattcatatccaaagtgaacactgcggtgcagttgattcttgtggctgcttccctggcggctccggtgttcaactatgcagacagtatttatttacaaatattgtggtgctttactgccttcacgacagccgcatctgcatatagctattatcactacggaagaaagacagtgcaggtcataaaggattag

SEQ ID NO: 44950 - DNA, 3650 bp, Artificial Sequence
  derived and/or modified sequence
agttgtacagcatgggttgaggtggccagatcctggcaggggtctcaactccactgatagctaaagcatgttggggtttgaatgctggatactttgaagttgccatatcctgactgaagtccttcccagaacggcagtagttggtcgagtatgccacagtatgaaaacccatggacaatcccgaatatgttgtcaatgacgagaattggcttggccccagttctgggctatttgattattgaagaagattttaatattgcactaggagtttttgctttagctggactaacagatttgttggatggatttattgctcgaaactgggccaatcaaagatcagctttgggaagtgctcttgatccacttgctgataaaatacttatcagtatcttatatgttagcttgacctatgcagatcttattccagttccacttacttacatgatcatttcgagagatgtaatgttgattgctgctgttttttatgtcagataccgaactcttccaacaccacgaacacttgccaagtatttcaatccttgctatgccactgctaggttaaaaccaacattcatcagcaaggtgaatacagcagtccagttaatcttggtggcagcttctttggcagctccagttttcaactatgctgacagcatttatcttcagatactatggtgttttacagctttcaccacagctgcatcagcttatagttactatcattatggccggaagactgttcaggtgataaaagactgatgaaagtcatccctcactgttagtaaggaagcagtatacatcaatgggaacagggcccatggaaatgtacaggagtttccctattttggtgttcagcttgaaaaaggacttgtcagaatcaactgtgtcatcaaaatttaagtaatgtgcattgaaaataaggttgatcatgggaatatgcagaatttccaatgtatttttaaatacaaataaaattgtaatttagaatttttaatcttaggtttcttgattaatttataagagatcaattattgtcagtcttttttgtatgttttttaaaaacatagtccagagcatgggcagaattgacacctctcttttaagtgaaatttggattgctcacaaagcactaggaaatgtcatggggttcaaatatatatcctacacaactgggcaatacatttttgtttgatttttaggtctgtgtatacattaacagttcatgtaattaatacctgatcatttgggataatgaaagtgaagttagttgtagatgaagtaaagttataaaagagattaaaaatgcggtaactttttaagataataatcatacagaaggtatgaagttcattttcggtagtcttccaacctctcaggtgcctaataatttatgtttgaggataacaggtaacaaagatagtcgagataggagaacgtgtctattagtctttgcatctaaaaggcagtgagttacgttcctgccttccactgtgtttctgacatagcaatgtttgtttgatattggaacctggattcatattttatgtaaataatatcaagctgtatatttttcaaaggttttttaaactttggagactctttcttttgttaagcagttaaaggaataaaagagctggaaaaaaaattgtaccttcaactcaggttgttccatataacatacgtattctctgctgttacgtaagttttccgattcacagagtccattcatgtacatcacttacacttaaattgtaaaaataattagtctgaccatctgactttaaaagactgttgctacacgtacatcatgtttaggagaatgtgggatatggggaaggggagaagaagacagtccagtggtgactagttgctgctgcttaacctatggcctattgctgcccattgtccctggttttaatccaagcctattatggaatactgcagtgagattatccattctcagcctgttgagctgcattaaattagaatgggaggctgtaagtaaaactcatgcctcttggccaggcattctgcaccagcgtgtccctctgtggcttgctggtcctggttgttctcagactggcagctgagctgcgcttggcttgaagcatactgaagcctgcagccagggacaccgccattgaatcagatggagggggatgaaaaagcagagaagggggcatgtggctggctattcttgctctctggagaacagcttcattgttaggagtagttaggctgaaagtggacttcccactgctgagccacccaagaggcacactgagcattagtgacgggtgagccacataagaataatgtttaaaaaagagaggacttgaagtagctatgcgaaaatttagaactttgcactttgttaacgcttatttatggtttagtgttgatgccatttggagtgacctatgggttggacccatatctttttattattaaggtctcaatctggctctggttaataaacgtttcccgcttcatcccttaggaaaatggtccaagtctcctcaggcttttggatactgaattgttataaaacacatcaattctgccagtttataaaacactggaattgtattagacatgtctgagtatgtacttgtttatagactcaaaacatgatgaaaattcatttcattgtcttcactgaatagacttaaccttgacagtaagcttaaagcattagtgtcatttaattacatgtctgaggaatttatgctaactagattttgggcttttgcagcgaattttagtcggggcctcattcctgagcccaagtgaccctttcacctcagcttcccaagtagctgggattacaggtgcacaccaactgtgctttgcagttttgtttgtgtgtgtgtgtgtgtgtgtgtgtgtgtgtgtgtgtgtgtgtattttgttttttttacaagcccacaacatcatagctttgcagtttttaaccaggagctggtggagatctttgaaatcatttaggccaattcttttagttacatttatgatgaaactagggatctaccttaaagttttgggaagctctttcaaaacttcagacacctagaaatatatatagtgcagttcagttttagtttctgcagcatggtttggaaacaaaagatacataggatttaaactcgatttgttttcttcttacagtagaagtaaatgctcttgtggcttgaatcgcatctcccaagaaagatacgttcacgttcaaacccccagtactgtacatgtgaccttatttggaaatagggtctttttagatgcagtcaagatagaattagatcatactggattacagtgggccccaataactaggtttttttgttaaaaaaaaaaaaaaaggaaatgtgaacagagagagaatgccgtgagatgatggagggatagattggaatgatgtctgcgagctaaggaatactgaggattgctgccaaccatccgaagctgggagaggagatggaacaactccctcggagcctccaagaggaaccaaccccactgatgctttgatttgggatttccggcctgaactgtaggaaaataaatttctgttcttttaagccatttttaccagtttgtggtaacttgttacagcagctgcaggaaattaataaatgccaatgttgaaaatt

SEQ ID NO: 44951 - DNA, 609 bp, Artificial Sequence
  derived and/or modified sequence
atgccccagtacgagaacccctggaccatccccaacatgctgagcatgaccagaatcggcctggcccccgtgctgggctacctgatcatcgaggaggacttcaacatcgccctgggcgtgttcgccctggccggcctgaccgacctgctggacggcttcatcgccagaaactgggccaaccagagaagcgccctgggcagcgccctggaccccctggccgacaagatcctgatcagcatcctgtacgtgagcctgacctacgccgacctgatccccgtgcccctgacctacatgatcatcagcagagacgtgatgctgatcgccgccgtgttctacgtgagatacagaaccctgcccacccccagaaccctggccaagtacttcaacccctgctacgccaccgccagactgaagcccaccttcatcagcaaggtgaacaccgccgtgcagctgatcctggtggccgccagcctggccgcccccgtgttcaactacgccgacagcatctacctgcagatcctgtggtgcttcaccgccttcaccaccgccgccagcgcctacagctactaccactacggcagaaagaccgtgcaggtgatcaaggactag

SEQ ID NO: 44952 - protein, 1202 aa, Artificial Sequence
  derived and/or modified sequence
MNFEGLDPGLAEYAPAMHSALDPVLDAHLNPSLLQNVELDPEGVALEALPVQESVHIMEGVYSELHSVVAEVGVPVSVSHFDLHEEMLWVGSHGGHATSFFGPALERYSSFQVNGSDDIRQIQSLENGILFLTKNNLKYMARGGLIIFDYLLDENEDMHSLLLTDSSTLLVGGLQNHIIEIDLNTVQETQKYAVETPGVTIMRQTNRFFFCGHTSGKVSLRDLRTFKVEHEFDAFSGSLSDFDVHGNLLAACGFSSRLTGLACDRFLKVYDLRMMRAITPLQVHVDPAFLRFIPTYTSRLAIISQSGQCQFCEPTGLANPADIFHVNPVGPLLMTFDVSASKQALAFGDSEGCVHLWTDSPEPSFNPYSRETEFALPCLVDSLPPLDWSQDLLPLSLIPVPLTTDTLLSDWPAANSAPAPRRAPPVDAEILRTMKKVGFIGYAPNPRTRLRNQIPYRLKESDSEFDSFSQVTESPVGREEEPHLHMVSKKYRKVTIKYSKLGLEDFDFKHYNKTLFAGLEPHIPNAYCNCMIQVLYFLEPVRCLIQNHLCQKEFCLACELGFLFHMLDLSRGDPCQGNNFLRAFRTIPEASALGLILADSDEASGKGNLARLIQRWNRFILTQLHQDMQELEIPQAYRGAGGSSFCSSGDSVIGQLFSCEMENCSLCRCGSETVRASSTLLFTLSYPDGSKSDKTGKNYDFAQVLKRSICLDQNTQAWCDTCEKYQPTIQTRNIRHLPDILVINCEVNSSKEADFWRMQAEVAFKMAVKKHGGEISKNKEFALADWKELGSPEGVLVCPSIEELKNVWLPFSIRMKMTKNKGLDVCNWTDGDEMQWGPARAEEEHGVYVYDLMATVVHILDSRTGGSLVAHIKVGETYHQRKEGVTHQQWYLFNDFLIEPIDKHEAVQFDMNWKVPAILYYVKRNLNSRYNLNIKNPIEASVLLAEASLARKQRKTHTTFIPLMLNEMPQIGDLVGLDAEFVTLNEEEAELRSDGTKSTIKPSQMSVARITCVRGQGPNEGIPFIDDYISTQEQVVDYLTQYSGIKPGDLDAKISSKHLTTLKSTYLKLRFLIDIGVKFVGHGLQKDFRVINLMVPKDQVLDTVYLFHMPRKRMISLRFLAWYFLDLKIQGETHDSIEDARTALQLYRKYLELSKNGTEPESFHKVLKGLYEKGRKMDWKVPEPEGQTSPKNAAVFSSVLAL

SEQ ID NO: 44953 - DNA, 3609 bp, Artificial Sequence
  derived and/or modified sequence
atgaattttgagggcctggatcctggcttggcagagtacgctcctgcaatgcattccgctttggacccagtgctggacgctcatctgaacccatcactgctgcagaatgtagagctcgaccctgagggtgtcgccctagaggctctgcctgtccaagaatctgtccacataatggagggcgtctatagtgagctccactctgtagtcgctgaggtcggggtacctgtatccgtcagccatttcgacctgcatgaagaaatgttgtgggttggaagccatggtgggcatgccacgagtttcttcggtcctgccttagagagatatagttcctttcaggtgaatggctctgacgacattcgccagatccagagcttggaaaatggcattctgtttctgaccaaaaataatttaaagtacatggcccgcggcgggctgatcatattcgactacttactggatgaaaacgaggacatgcacagcttgctgttgaccgatagctcaaccctgctggtgggcggactgcagaatcacatcattgaaattgatttgaataccgtgcaggagacgcagaaatatgctgtggagacaccgggagtgactattatgcggcaaactaacaggtttttcttttgcgggcacacctccggaaaggtctccctccgagatcttaggactttcaaagtcgagcatgaatttgatgcatttagcgggtctctttcggactttgacgttcatggaaatctgcttgccgcctgtggcttttctagcaggctgacgggcctggcatgcgatagattcctcaaagtttatgaccttcggatgatgagagcaataactcctttacaggttcacgtggaccccgctttccttcggttcattccgacctacacaagtagattagccatcatatcacaatctgggcagtgccaattctgcgagcctacgggcctggcgaatcccgcggatatcttccatgtcaatcctgtaggccccttattgatgaccttcgacgtgagcgcaagcaagcaggccctcgcttttggagactccgaaggttgtgtgcacttgtggaccgattcacctgaacccagcttcaatccctactcacgcgaaacggaatttgctctcccatgcctggtggattctttacctcccctggactggtcccaggatctcttacctctgtccctgattcccgtgccccttacaaccgacactctgttatctgattggccggctgccaattcggcccccgctccaaggagagcccctccggtagacgcggagatcctccgcacaatgaagaaggtaggattcattggatacgcacctaatccacggactcgcctaagaaatcagattccttataggttaaaagagtcagactctgagttcgacagcttcagtcaagtaacagagagccccgttggccgagaggaggagccccatctacacatggtgtctaaaaaatatagaaaggtgaccataaagtatagtaaactcggactggaagacttcgactttaaacactacaacaagaccctcttcgccgggttagagccccacatcccaaatgcatattgcaactgtatgatccaagtgttatacttcctggagccagtcaggtgtctcattcagaatcacctttgccagaaggagttttgcctggcctgtgagctcgggttcctcttccacatgcttgatcttagcaggggtgatccttgtcaaggcaataacttcttgagagcctttcgtacaatcccggaggcatctgctctgggactcatcttggctgactccgatgaagcaagtgggaaggggaacctggccaggcttatccagaggtggaatcgatttattctcacacaactccaccaggacatgcaggagttagagatacctcaggcataccgcggcgctggcggaagtagtttctgttcaagcggtgatagtgtaatcggccagctcttttcttgcgagatggagaattgtagcctgtgtaggtgcggcagcgagacagtcagggcaagtagcacactgctgtttaccctatcatatccggatgggtcaaaatcggataagacaggcaagaattacgatttcgcacaagttctaaagcgatcaatatgtcttgaccagaacactcaggcatggtgtgacacttgcgagaagtatcaaccaacaattcaaacacgcaatatcaggcatttgcctgatattctggtgatcaactgtgaagtgaactcctcaaaggaggccgatttctggcgcatgcaagccgaggtcgcctttaaaatggctgtgaaaaaacacggcggcgagattagcaagaataaggagtttgccctagccgattggaaggagctgggcagcccagaaggcgttctggtttgtccctctatcgaggaattaaagaatgtctggcttcctttcagcattaggatgaaaatgacgaagaacaaggggctggacgtatgcaattggaccgacggagatgaaatgcagtggggtccggcccgcgcggaggaggagcatggagtctacgtgtacgacctgatggctaccgtcgtccacatcttagactctaggaccgggggatccttggtggcccacatcaaggttggcgagacttatcatcaaaggaaggagggagtgactcatcagcagtggtatttatttaacgactttcttatcgagcccattgataagcatgaggccgtccagtttgatatgaactggaaagtaccagcgatcttatactacgtgaaacgtaacctcaattcgcgatataacctgaacatcaagaatccaatagaagcctccgtgttactggcagaggctagtctggctcggaagcaacgcaagacccatactaccttcattccattgatgctgaatgaaatgccccagattggggacctagtcggcttggacgccgaatttgtgaccctcaacgaggaagaagccgaactgcggtccgatggcaccaagtctactataaagccctcccagatgtccgtggccagaatcacatgtgtcagaggccaggggccaaatgaggggattccttttatcgatgactacataagcacccaggaacaggtcgtcgactatttaacacagtactctggcatcaaacccggcgacctggacgccaagatctccagtaaacacctcaccacactaaaatctacctatctgaagttgaggtttctgatcgacatcggagtcaaatttgtaggtcacggactccaaaaagacttcagagtgatcaacctgatggtccccaaggaccaggtcctggatactgtatatttgtttcatatgccaagaaagcgaatgatatcactaaggttcctggcctggtactttctggacttaaaaatccaaggtgaaacacacgattcaattgaggatgcccggactgctctgcagctttataggaagtatctggaactgagcaagaatggcacagagcctgagtcttttcataaggttctcaaaggcctgtatgaaaagggacggaagatggactggaaggtgccagaacccgagggtcaaactagtcccaaaaatgccgccgtcttctcctcggtcctcgctctctag

SEQ ID NO: 44954 - DNA, 3609 bp, Artificial Sequence
  derived and/or modified sequence
atgaatttcgagggcctggatcctggccttgctgaatacgctcctgccatgcattccgcactggaccccgtcctggacgcccatcttaacccctccctgctgcaaaatgtagaattagacccagagggtgtggccctcgaggccctacccgtacaagagtccgtacatattatggagggggtatactcagagctgcattccgtggttgctgaggtgggcgtccccgtgtcagtctcccattttgacctgcatgaggagatgctgtgggtggggtcccacggaggccatgccacaagcttcttcgggccagctctcgagaggtattcaagcttccaggtcaatggttctgacgacattcggcagattcaaagcctcgaaaacgggattctttttcttactaaaaataacctgaaatatatggccaggggcggactcattatctttgattacctactggatgagaatgaggatatgcatagcctgcttctaaccgattcatcgacgcttctggtgggcggattacaaaatcacatcatcgaaattgaccttaatactgttcaggagacacagaaatacgcagtggaaacgccaggggtgacgataatgaggcagaccaatagattttttttctgtgggcacaccagtggtaaagtgagcttgcgggacctcaggacgtttaaggtcgagcatgaattcgacgcatttagcggtagtctaagcgatttcgacgtccatggaaatctgctggctgcatgcggtttcagttctcggctgacaggactggcctgcgaccgctttctaaaggtttacgaccttagaatgatgagagccattacccctcttcaggtgcatgtcgatcccgccttcctgcggttcataccaacatatacttcccgattggccatcataagccagtctggacagtgccagttttgcgagccaaccggattggccaatccagctgatattttccacgttaaccccgttggtcccctcctgatgactttcgacgtttccgcctccaaacaggcactggcctttggcgattctgaagggtgtgtgcatctgtggactgacagccctgaaccttcctttaatccctactctcgggagactgagtttgccctgccttgtctggtggatagtttacccccccttgactggagccaggatctcttgcccctgtccctgatcccagtcccccttactactgataccctcctgagtgactggccggctgccaattctgcccctgccccccgtcgggcaccccccgtcgatgctgaaattctgcggacaatgaaaaaggtagggttcataggttacgcccccaaccctaggactaggttgagaaatcagatcccttaccgactaaaagaatcggacagtgagtttgattcgttcagccaggtaaccgagagcccggtcggcagagaagaagagccccatctacatatggtctcaaaaaaataccggaaagtgacaattaaatactccaaactcggcctggaggatttcgattttaaacattataataagaccctattcgcaggacttgagccacacataccgaatgcatactgcaactgtatgattcaggtgctctattttcttgagcctgtgaggtgccttatacagaaccatctgtgccagaaggagttctgccttgcctgcgagctgggcttcctgttccacatgcttgacctatcacgcggagatccttgccagggaaacaactttctgcgcgccttcagaacgattcccgaagcctctgccttgggcctgatcctggcagatagcgatgaagcttctggcaagggcaatctcgccagactcattcagagatggaatagatttatcctgacccagctccaccaagacatgcaggaactggagattccacaggcttatcggggcgccggtggatcaagtttttgttcatccggcgattccgtgataggacagttgttctcctgtgagatggagaactgcagtctctgtcggtgcgggtctgagaccgtcagagccagctctactttactatttactctttcgtatccagacggatcaaaatctgacaaaactggcaaaaattacgatttcgcacaggtactaaagcgatctatctgtttagatcagaacactcaggcgtggtgtgacacctgcgagaagtaccaacccaccattcagactcgaaatattcggcacctgccagatatcttggtcattaattgtgaggttaattcttccaaggaggctgatttttggcgaatgcaggccgaagtcgcctttaagatggccgtgaagaagcacgggggtgagatttctaaaaataaggagtttgcactcgccgattggaaggaacttggatcaccggagggagtgctagtctgtccgagtattgaagaactcaaaaatgtatggctgcctttttctattaggatgaagatgacgaagaacaaggggctagacgtctgtaactggactgatggagacgagatgcagtgggggccagccagggccgaggaagagcatggcgtgtacgtgtacgatctcatggctaccgtcgtgcatatactcgattcgagaaccggcggtagtctggttgctcacatcaaggtgggcgagacgtatcatcaacggaaggaaggagtgacccaccaacagtggtacctgtttaacgatttccttattgaacccattgataagcacgaggcagttcagtttgacatgaactggaaggtgccggctatcctctattatgtcaagagaaacctcaatagcagatataacttgaacatcaagaatcctattgaggcgtccgtgctgttggcagaagcttcccttgcaaggaagcagcgtaagacccataccacattcatcccgctgatgcttaacgagatgcctcaaatcggtgacctagttgggctggacgcggaattcgtcactttaaacgaagaagaggccgaactgcgctctgacggaacaaaatccaccatcaagccttcacagatgagcgtagctcgaatcacatgtgtacgtggacaaggaccaaatgaaggaattcctttcatagatgactatatctctacccaagaacaggtcgttgattatctgactcagtatagtggcattaaacccggcgacctggatgccaagatatctagtaaacatctgaccactttgaaaagtacatatcttaagcttagattcctgatagacattggcgtaaaatttgttggccatggcttgcagaaggacttccgagtcatcaacctcatggtgcctaaggatcaggtgctggacacagtttatctctttcatatgcctaggaagaggatgatcagccttcgtttccttgcttggtactttctcgatttgaagatacaaggggaaactcacgacagcattgaggacgctcgcactgccctgcagctctaccgaaaatatttagaactgagcaaaaacggtactgaaccagaatcctttcataaagtcctgaaggggttatacgagaagggtagaaaaatggattggaaggtcccagagcctgaagggcagacaagtcccaagaatgctgcagtgttcagttccgtgttagccctctag

SEQ ID NO: 44955 - DNA, 3609 bp, Artificial Sequence
  derived and/or modified sequence
atgaactttgagggcctggaccccggcctggccgagtatgccccagccatgcacagcgccctggaccctgtgctggatgcccacctgaaccccagcctgctgcagaatgtggagctggaccctgagggcgtggccctggaggccctgcctgtgcaggagagcgtgcacatcatggagggcgtgtacagcgagctgcacagcgtggtggccgaggtgggcgtgcctgtgtctgtgagccactttgacctgcacgaggagatgctgtgggtgggcagccatggaggccacgccaccagcttctttggacctgccctggagcgctacagcagcttccaggtgaatggaagtgatgacatccggcagatccagagcctggagaatggcatcctcttcctgaccaagaacaacctgaagtacatggcccggggcggcctcatcatctttgactacctgctggatgaaaatgaagacatgcacagcctgctgctgacagacagcagcaccctgctggtgggcggcctgcagaaccacatcattgaaattgacctgaacacagtgcaggagacccagaagtatgctgtggagaccccaggagtgaccatcatgaggcagaccaaccgcttcttcttctgtggccacaccagcggcaaggtgtccctgcgggacctgcggaccttcaaggtggagcacgagtttgatgccttcagcggcagcctgagtgactttgatgtgcacggcaacctgctggccgcctgtggcttcagcagccggctgaccggcctggcctgtgaccgcttcctgaaggtgtatgacctgaggatgatgagggccatcacccccctgcaggtgcacgtggaccctgccttcctgcgcttcatccccacctacaccagccggctggccatcatcagccagagcggccagtgccagttctgtgagcccaccggcctggccaacccagctgacatcttccacgtgaaccctgtgggccccctgctgatgacctttgatgtgtctgccagcaagcaggccctggcctttggagacagcgagggctgtgtgcacctgtggacagacagccctgagcccagcttcaacccctacagccgggagacagaatttgccctgccctgcctggtggacagcctgccccccctggactggagccaggacctgctgcccctgagcctcatccctgtgcccctgaccacagacaccctgctgagtgactggccagctgccaacagcgccccagccccccggcgggcccctcctgtggatgctgagatcctgcggaccatgaagaaggtgggcttcatcggctacgcccccaaccccaggacccggctgaggaaccagatcccctaccgcctgaaggagagtgacagcgagtttgacagcttcagccaggtgacagagagccctgtgggccgggaggaggagccccacctgcacatggtgtccaagaagtacaggaaggtgaccatcaagtacagcaagctgggcctggaggactttgacttcaagcactacaacaagaccctgtttgctggcctggagccccacatccccaatgcctactgcaactgcatgatccaggtgctgtacttcctggagcctgtgcgctgcctgatccagaaccacctgtgccagaaggagttctgcctggcctgtgagctgggcttcctgttccacatgctggacctgagcagaggagacccctgccagggcaacaacttcctgcgggccttccgcaccatccctgaggccagcgccctgggcctcatcctggccgacagtgatgaggccagcggcaagggcaacctggcccggctcatccagcgctggaaccgcttcatcctgacccagctgcaccaggacatgcaggagctggagatcccccaggcctacagaggagctgggggcagcagcttctgcagcagcggggacagcgtgattggccagctgttcagctgtgagatggagaactgcagcctgtgccgctgtggcagcgagaccgtgcgggccagcagcaccctgctcttcaccctgagctacccagatggcagcaagagtgacaagacaggcaagaactatgactttgcccaggtgctgaagaggagcatctgcctggaccagaacacccaggcctggtgtgacacctgtgagaagtaccagcccaccatccagaccaggaacatccgccacctgcctgacatcctggtgatcaactgtgaggtgaacagcagcaaggaggccgacttctggaggatgcaggccgaggtggccttcaagatggctgtgaagaagcatggaggagagatcagcaagaacaaggagtttgccctggccgactggaaggagctgggcagccctgagggcgtgctggtgtgccccagcattgaggagctgaagaatgtgtggctgcccttcagcatccgcatgaagatgaccaagaacaagggcctggatgtgtgcaactggacagatggagatgagatgcagtggggccctgcccgggcagaggaggagcacggcgtgtatgtgtatgacctgatggccaccgtggtgcacatcctggacagcaggactggaggcagcctggtggcccacatcaaggtgggggagacctaccaccagaggaaggagggcgtgacccaccagcagtggtacctgttcaatgacttcctgattgagcccatcgacaagcatgaggccgtgcagtttgacatgaactggaaggtgcctgccatcctgtactacgtgaagaggaacctgaacagccgctacaacctgaacatcaagaaccccatcgaggcctctgtgctgctggccgaggccagcctggccaggaagcagaggaagacccacaccaccttcatccccctgatgctgaatgagatgccccagattggagacctggtgggcctggatgctgagtttgtgaccctgaatgaggaggaggccgagctgcggagtgatggcaccaagagcaccatcaagcccagccagatgtctgtggcccgcatcacctgtgtgcggggccagggccccaatgaaggcatccccttcattgatgactacatcagcacccaggagcaggtggtggactacctgacccagtacagcggcatcaagccaggggacctggatgccaagatcagcagcaagcacctgaccaccctgaagagcacctacctgaagctgcgcttcctgattgatattggagtgaagtttgtgggccacggcctgcagaaggacttccgggtcatcaacctgatggtgcccaaggaccaggtgctggacacagtgtacctgttccacatgcccaggaagaggatgatcagcctgcgcttcctggcctggtacttcctggacctgaagatccagggcgagacccatgacagcattgaagatgccaggacagccctgcagctgtacaggaagtacctggagctgagcaagaatggaacagagcctgagagcttccacaaggtgctgaagggcctgtatgaaaaaggaaggaagatggactggaaggtgcctgagcctgagggccagaccagccccaagaatgctgctgtgttcagctctgtgctggccctgtag

SEQ ID NO: 44956 - DNA, 3609 bp, Artificial Sequence
  derived and/or modified sequence
atgaacttcgagggcctggaccccggcctggccgagtacgcccccgcgatgcacagtgccttagatcctgttctggacgctcatttaaacccctctctgctccagaacgtggagcttgatccggagggcgtggccctggaagctctccccgtccaagagtccgtgcatatcatggaaggcgtctacagtgagctccactctgttgtcgctgaggtgggggtgcccgtttccgtatcacattttgatctacacgaagagatgctgtgggttggcagccacggcggccacgcaaccagcttctttgggcctgccttggaacgttatagctccttccaggtgaacggctcagatgacatccgacaaatacagagtctcgaaaatggcatcctatttttgacgaagaataatctcaaatatatggcacggggcgggctgataattttcgactacctgctggacgagaatgaggatatgcatagcctcttgctcaccgattctagcacacttctcgtgggtggcctgcagaaccatatcattgagatcgatctgaacaccgttcaggaaacccaaaagtacgccgtggaaacccccggcgtgactattatgaggcagacaaaccgattcttcttctgtggacacacatctggcaaagtttccctccgggatctgagaacattcaaggtagagcacgaattcgatgcattcagtggtagcttgagtgactttgacgtgcacggcaacctgctggctgcttgtggcttctcttccagacttacaggcttagcttgcgacaggttccttaaagtgtatgacctcagaatgatgcgagcaataacacctttgcaggtgcacgttgaccctgcgtttctgaggttcattcccacatataccagccgcctagcaatcatctcccagtctggacagtgccagttttgcgaaccaactggtcttgccaatcctgccgatattttccacgtgaacccagtagggcctttgctgatgacatttgacgtgagcgcatctaagcaggcgctggcatttggtgactctgaaggatgcgtccatctttggacagatagccccgagccatccttcaatccttacagcagagagactgagtttgcactcccctgtttggtggactcattgcccccactagactggtcccaggacctgcttccgctgtccctgattcctgtcccacttacaaccgacacgctgttgtccgactggcctgccgccaactcagcgccggcaccacgcagagctccacctgtagacgccgagattctgcggactatgaagaaagttggctttatcgggtatgcgccaaaccctcggactcgtcttagaaaccagataccgtacaggcttaaagaatctgactcggaattcgactccttctcccaggtcaccgaatctcccgtcgggcgcgaagaggaaccacacctgcatatggtgagtaagaaatacaggaaggttaccattaagtacagtaagctgggactcgaggactttgatttcaaacactacaacaagacactgtttgcaggtttagagcctcacatcccgaacgcatattgcaattgtatgattcaagttctctattttctggaaccagtacggtgtctcatccaaaatcacctttgtcaaaaggaattctgtctcgcttgcgagctgggtttcctgttccatatgctggatttatcacgcggggacccctgtcaggggaacaatttcctacgcgccttcagaacgatacctgaggcaagcgcccttggtcttattttggccgactcagacgaagcgtccggcaagggcaacctggctaggctgatccagcggtggaatcggtttattctgacacagttacatcaggatatgcaggagttagaaattccacaggcctaccgaggagctggcgggtcctctttctgtagctcaggtgacagtgtcatcgggcagctttttagttgtgagatggagaactgctctctgtgcagatgcggatctgaaaccgtgagagcttcaagcacgctgctgttcactctgagctatcctgacggttcgaagagtgacaaaacaggtaagaactacgatttcgcccaggtgctgaaaagatctatttgtctcgaccagaacacccaagcatggtgtgatacatgcgagaaatatcagccaactatccagacaaggaacatccgccatctccccgatattcttgtgattaactgcgaggttaacagctctaaggaggccgacttctggaggatgcaggcggaggtggcttttaagatggccgtcaagaagcatggaggggaaatcagcaagaacaaagaattcgcccttgccgactggaaagaactcggcagccctgagggagtgctggtctgcccctctatcgaagagttgaagaacgtgtggctgccattttctatcagaatgaagatgaccaaaaacaagggattggatgtgtgtaattggactgacggagatgagatgcagtggggccctgcaagggctgaggaagaacacggcgtctacgtatatgatcttatggctactgtggtgcatatccttgattcccgcactggcggatctcttgtggcccacatcaaagtgggggaaacctaccaccagagaaaagagggcgtgacccaccagcaatggtacctgttcaacgattttttaattgaacccatagataagcatgaggccgtgcagttcgacatgaactggaaagtgccagcgatcctctattacgtgaagcgcaatctcaactccaggtataatctcaacatcaagaaccctattgaagcctcagttcttctggccgaggcttccctcgcccgtaaacaacgcaaaacccataccacttttatacccctgatgcttaacgagatgcctcagatcggagatctggtgggcctggacgcagaattcgtcacacttaacgaggaagaagcggagcttcgctctgatgggaccaagagcacaataaagccctcacagatgtctgtagccaggattacttgcgtgcgaggccagggacccaacgagggtattccatttatcgatgactacatttctacccaggagcaagtagtggactatttgacccagtattctggaattaaacccggcgatcttgatgctaaaatcagttcaaaacaccttactacactgaaatctacctacctgaaactgagatttctgattgatatcggcgttaagttcgtggggcacgggctccagaaagactttagagtcatcaatttaatggtgccaaaggatcaagtactggacactgtatatctattccacatgccacgtaaacggatgatctctcttcgcttcctcgcatggtattttctggatctgaaaatccagggagagactcacgattcaatagaggatgcacgcaccgccttgcagctgtaccggaaatatctagaacttagtaaaaacgggacagagccggagagcttccataaggtgttgaaaggcttatatgagaagggccggaaaatggactggaaggtgcccgagccggagggccagacttcccccaagaatgcagccgtattcagttccgtgctggccttatag

SEQ ID NO: 44957 - DNA, 3609 bp, Artificial Sequence
  derived and/or modified sequence
atgaacttcgagggcctggaccccggcctggccgagtacgcccccgcgatgcactcagctctggatcccgttctggatgcacacctaaaccccagcctcctgcagaatgtagagcttgacccggaaggggtggccctcgaagctttgccggtgcaggagtccgtccacattatggagggtgtatactccgagttacactccgtggtagcggaggtgggagtacctgtgagtgtgtcacacttcgatcttcatgaggagatgctgtgggtagggtctcatggaggtcacgctacgtccttctttggtccagctctggaacgttactcctcgttccaggtgaacggcagtgatgatatccgacaaatccagtctctggaaaatgggatcctcttcctgacaaaaaataaccttaagtatatggcccgcggtgggttgattatttttgattatctactggatgagaatgaggatatgcattctctgcttctgaccgacagctccacgcttcttgtaggcggactgcaaaatcacatcatcgagatcgacctcaacaccgtgcaagaaacacagaaatacgctgtcgaaaccccaggtgtgactattatgaggcaaactaacagattcttcttctgtggccatactagcggaaaagtaagtttgcgcgacctgaggaccttcaaggttgaacacgagtttgacgcattttccggctctctgagtgatttcgatgtgcacggtaacttattggcggcatgcggattttcctcccgtttaactggcttggcctgcgacaggtttctgaaagtctacgacctccggatgatgcgcgccattacgcctttgcaggtacacgtggacccagctttcctgcggttcattcccacttacactagtagactggccatcatctcacagagcgggcaatgtcagttctgtgagccaactggactcgcgaacccagcagacatctttcacgtgaatcctgttggcccgttgctgatgacctttgatgtgtctgcgtcgaaacaggcccttgcattcggagacagcgagggctgtgtgcatctgtggaccgacagcccagagccgtcttttaacccttactcgagggagacagagttcgcacttccatgcttggtggacagcctcccccctctggactggagccaggatctgctgccactgagcctgattccagtaccgctgaccaccgacacccttctgtctgactggccagccgccaactctgctccagctcccaggcgggctccaccagtggacgcggaaatattgaggactatgaaaaaggtggggttcatcggctatgcgcccaacccccggacgaggctgcgaaatcagatcccgtatcggctcaaagagtccgactctgagttcgactcattttctcaggttactgagagcccagtcggacgtgaagaagagccccacctgcacatggttagcaaaaagtaccggaaggtcaccatcaagtattcgaaactcggcctcgaggatttcgattttaagcactacaacaaaaccctgttcgcaggactggagccacacataccgaacgcctattgcaattgcatgattcaggtgctgtattttcttgagcctgtgcgatgtctcatccagaaccacctgtgtcaaaaagaattttgtcttgcatgtgaactagggtttctgttccatatgttagatttgagccgcggcgatccctgccaagggaataacttcctcagagcttttcgcacaatccccgaggcaagcgctttgggtctgattcttgccgactcagacgaagcttctgggaagggcaacttagcccggttgatccaacgctggaataggttcatcttaacccaactccatcaggacatgcaggagctggaaattccccaggcataccgcggagccggcgggtcttccttctgctccagtggcgacagcgttatcggacagctgttctcctgtgaaatggaaaactgctctctctgtcgctgtggatccgaaaccgtacgcgccagctcaacgctcctcttcacactttcatatccggacggctcaaagtcagacaaaactggcaaaaactacgactttgcccaggtcttgaagagaagcatttgtctggaccagaacacccaggcgtggtgcgatacctgtgagaagtaccagcctaccatacagacgaggaacattcgacaccttcctgatatcctggtcattaactgcgaggttaatagttctaaggaggccgacttttggcgcatgcaggccgaagtcgcttttaaaatggccgtgaaaaaacatggcggcgagatttcaaagaacaaggagttcgctctcgcagactggaaggagctgggcagtcctgagggggtacttgtgtgtccttcaattgaggagttgaaaaacgtttggctgcctttttccattcgcatgaaaatgactaaaaataaagggctggacgtgtgtaattggacagatggcgacgagatgcagtgggggccggcccgagccgaagaagagcacggcgtgtatgtgtacgacttaatggctactgttgtacacatcttggactcaagaactggtggatcgctggttgctcatatcaaggtgggagaaacatatcaccagaggaaagagggggtcactcatcaacagtggtatttgttcaacgattttctgatagaacccattgacaagcacgaggccgtccaattcgatatgaattggaaggtccctgccatcttatattatgtgaagcgcaatttaaattcgaggtataatctgaatattaagaaccccatcgaagccagcgtgctcttggctgaggcaagtctagcgaggaagcagcggaaaacccatactactttcattcctctaatgcttaacgagatgccacaaatcggtgacctcgtcggcctagatgctgagtttgtgacactgaacgaggaggaagcagagcttcgctcagacggcaccaagtcaaccatcaagccgtcacaaatgtctgttgctaggattacatgcgtgcgtggccaggggccaaatgaaggaattccgttcatagacgattatatctcaacgcaagaacaggtggttgactacctgactcagtattctggaattaaaccaggagacttggatgccaaaatctccagtaaacacctcacaaccctgaaatctacatacttgaagctccgctttctcatcgatattggggtgaagttcgtgggacacggcctccagaaggacttcagagtcataaatttaatggtgccaaaggatcaggtccttgatacagtgtatcttttccacatgccccggaagcgcatgatttcattacggtttctcgcttggtatttcctggatctgaaaattcagggtgaaactcatgattctatcgaagacgctcgtacagccctacaactgtaccgcaaatacctggagctgagcaagaatggaaccgagccagagagttttcataaggttcttaagggtctctacgagaaggggagaaagatggactggaaggtcccggagcccgagggacaaacttcaccaaagaacgccgcagtcttctcctctgtattagccttatag

SEQ ID NO: 44958 - DNA, 5372 bp, Artificial Sequence
  derived and/or modified sequence
agagaattctgggtaactagccgtttccgtcaccttcccctgcccccgccccaattgtgggtaactggccattattgttttcctctagagaatcctgggtagctattggagaggattctaggaaactgacttctcgttctccccaccgtccaatccacccgttttcacccccaattctgggagaaagcaccttaaatccctctacctaactccaacccccgcaattctcgctcccttcacctgatgattcagggctgaacaaggccaggatgtccattctaggcccatcggtgctgtcttgctgaaggttgggtcaggcatctaaagggactgtggtaagggagggtgtgacacaggtgtaagctgccatcgtcatcatgaactttgagggtctggaccctggactggcagaatatgccccagccatgcattctgccctggaccctgtcttggatgcccacctgaacccaagtctgctacagaatgtggagctggacccagagggagtggccttggaggctcttcccgtccaggaatcagtgcacataatggaaggtgtctactctgaattgcacagcgtggtggctgaagtgggtgtacctgtttccgtctcccactttgacttgcacgaggagatgctgtgggtggggagccacgggggccatgccacttcattttttggcccagccttggagcgctactcatcctttcaagtcaatggcagtgatgatattcggcagatccagagcctggagaatggtatcctttttctcaccaagaacaacctcaagtatatggcccgtgggggcctcattatatttgattacctgctggatgagaatgaggatatgcacagtctcctactgactgacagcagcactctactcgttggtgggctgcagaatcacataatagagattgatcttaacactgtccaggagactcagaagtatgcagtagagacgcctggagtcaccatcatgagacagacaaatcgcttcttcttctgcggccacacgtctggcaaggtttccctgagagacctccgtacttttaaggtggaacatgagtttgatgccttctcaggaagtctgtcagactttgatgtgcatggcaacctgctagctgcctgtggcttctccagccgcctcactggcctggcctgcgaccgtttcctcaaggtgtatgatttgcgcatgatgcgtgccatcacaccacttcaagtacatgtggatcctgccttcttgcgcttcattcctacatatacttctcgtcttgctatcatctctcagtcagggcagtgccaattctgtgaacccacaggcctggccaacccagccgatatctttcatgtgaatcctgtggggcctctgctaatgacatttgatgtgtcagccagcaagcaggctctggcctttggggattctgagggctgtgtgcacctctggactgattccccggagccttccttcaacccctactcccgtgagactgagtttgctttgccgtgtctcgtggactcactgcctcctctggactggagccaggacctgctgcctctttccctcatccctgtcccactcaccactgacacacttctctctgattggcctgctgccaactctgctccagctcccaggcgagcaccacccgtggatgcagagattctgcgcaccatgaagaaggtgggcttcattggctatgcgcccaatccccgcaccaggctgcgcaatcagataccctacagactcaaggagtcagacagtgaatttgacagcttcagccaggtcactgagtcaccagtaggacgagaagaggaaccacatctccacatggtttctaagaaataccgcaaggtgaccatcaaatattccaagctagggctggaggactttgacttcaaacactacaataagaccttgtttgctggattagagccccacattcccaacgcctactgtaactgcatgatccaggtgctctatttcctggagcctgtacgctgtctaattcaaaaccacctttgccagaaggagttctgtctggcatgtgagctgggcttcctgtttcacatgttggacctctctcgtggtgacccttgccagggcaataattttcttcgggcattccgtactattcctgaggcctcagccctcggtctaatcctggctgactcagatgaggcctcaggcaagggcaatctggccaggctcattcagaggtggaatcgcttcattctcactcaactgcatcaagatatgcaggagctggaaataccacaggcttatcgaggtgctggaggcagcagcttttgctcatcgggggactctgttattgggcagctcttcagctgtgagatggagaactgcagcctctgccgctgtggcagtgagaccgtgcgagcctcatccactctgcttttcacactctcctaccctgatggtagcaaaagtgataaaactgggaagaactatgactttgctcaggtgctgaagcgaagcatctgcctggaccagaatacacaggcctggtgtgacacctgtgaaaagtaccagcccacgattcagacccgcaacatccgccatctgccagatattcttgtcatcaattgtgaggtgaacagctcaaaagaggctgatttctggagaatgcaggctgaggttgccttcaagatggcagtaaagaaacacggtggggaaatctccaagaacaaggaatttgctttggctgattggaaggaactagggagtccagagggtgtgctggtgtgtccctccattgaggagttgaagaacgtctggcttcctttctccattcgcatgaagatgaccaaaaacaaagggctggatgtttgcaattggactgatggggatgagatgcagtggggcccagccagggcagaggaggagcatggtgtctatgtgtatgacctgatggctactgtggtacacatcctggactcacgcacagggggcagcctggtggctcacatcaaagttggagagacctaccaccagcgcaaggagggcgttactcaccagcagtggtatctgttcaatgactttcttattgaacctattgataagcatgaagctgtgcagtttgacatgaattggaaagtacctgcaatcctttattatgtcaaacggaatctcaattccagatacaacctgaacatcaagaaccctattgaggcaagtgtcttgctggctgaagcctcgctggcacggaagcagcggaaaacacatactacctttattccactgatgctgaatgagatgccacagattggggacctggtgggtctggatgctgagtttgtcacccttaatgaggaggaagcagagttacgcagtgatggtaccaagtctaccattaaaccaagccagatgtcagtagccaggattacctgtgttcggggccagggacccaatgagggtatccccttcattgatgactacatctctacccaggagcaggtggtggattacttgactcaatactcgggtataaagcctggtgacctcgatgccaaaatttcctccaagcacctaacaactctcaagtctacctacttaaagcttcgttttctcattgacattggagtcaagtttgtgggtcatggcctgcagaaggacttccgggtcatcaacctgatggtgcccaaggaccaagtccttgacactgtctacctgttccatatgccccgaaaacgaatgatttccctgcgattccttgcttggtactttctggacctgaagattcaaggggaaacccatgacagtattgaggatgcccgcacagcccttcagctgtaccgaaagtatctggagctaagcaaaaatggcactgagcctgagtctttccacaaggtgctcaagggtctttatgagaagggcagaaagatggactggaaggtgcctgagcctgagggccaaacaagtcccaagaatgcagctgtcttctcctcagtgctggcgctctgactacccttcccaaagaaccacggccctctccctttactgttctatagccccagaactgggagatggcttcctaagttggctataccttgtccacttccagtactggacgtgctcagggtctagggtcacagatggtgctattaattgaactggaacacagcagaattgttgcaaaggttctaggagccagattcattccttcttcattctttgcaaaacagtggtacagacatggagtctagaattgacccagatggaaagtaattggtattcttaatatcctgggtgactaatatccaggcagagaagctcctggaaccataactgtaagttcctagctggctagggattgaagtcctggacagtgacagaggataccacagtagttcaagacttagcacaagtcaccaactgcttcagggatacctggaggggccagcaagtagagtgttggtggcccaagcaaaccagtgttgccaataccattgccaaaagggcctttggatcctggacaaagcttggctgccggcttcatttattcctgctgatggctgagaagcatctgtcttccatcccacttgcctgtcccaagttttgttccattttttaaaaatttgttgtaaactgcatgttttataaaataaaaataaaatatcgtttgttatttatctcattagagaactgctagtgtgggttctctggcttcagtcttcctctccttcctttgaaggtaaaggtccggaatccaaagttatggatatgaaagggtataattaggccgggcgcggtggctcacttctgtaatcctagcactttgggaggcagaggtgggtggaacacgaggtcaggagttaaagaccagcctgaccaagatggtgaaaccccgtctctactaaaaatacaaaaattagctgggagtggtggatggcgactgtaaccctagctgaggcagaaaattgcttcaacccgggaggcggaggttgcagtgagccgagatcacgccactgtatgccagcctgggcgatagggcgagactccgtctcaaaaaaaggggaaaaaggtataatttatgccttttctgggcaatgctgggtctttgctatagctgcccagtaccctaagtcagactgaagatgtacagtatggtttccgttaattgtgtaagccgacaaactacaggtcccaggatagcttgagacttgtagttgctcacaaagatgggtccggtgctgcggtgcttcctgggagatgtagtttcctgtgtattgaaacctggactgctcgctggccggcagcgcaccgttttgaaggtcctagcccacctgggctggctcacgcgcacgactagccgctcccatacagcacgcccggactctgtcgtcgctt

SEQ ID NO: 44959 - DNA, 4641 bp, Artificial Sequence
  derived and/or modified sequence
ttctgggtaactagccgtttccgtcaccttcccctgcccccgccccaattgtgggtaactggccattattgttttcctctagagaatcctgggtagctattggagaggattctaggaaactgacttctcgttctccccaccgtccaatccacccgttttcacccccaattctgggagaaagcaccttaaatccctctacctaactccaacccccgcaattctcgctcccttcacctgatgattcagggctgaacaaggcaagatgtccattctaggcccatcggtgctgtcttgctgaaggttgggtcaggcatctaaagggactgtggtaagggagggtgtgacacaggtgtaagctgccatcgtcatcatgaactttgagggtctggaccctggactggcagaatatgccccagccatgcattctgccctggaccctgtcttggatgcccacctgaacccaagtctgctacagaatgtggagctggacccagagggagtggccttggaggctcttcccgtccaggaatcagtgcacataatggaaggtgtctactctgaattgcacagcgtggtggctgaagtgggtgtacctgtttccgtctcccactttgacttgcacgaggagatgctgtgggtggggagccacgggggccatgccacttcattttttggcccagccttggagcgctactcatcctttcaagtcaatggcagtgatgatattcggcagatccagagcctggagaatggtatcctttttctcaccaagaacaacctcaagtatatggcccgtgggggcctcattatatttgattacctgctggatgagaatgaggatatgcacagtctcctactgactgacagcagcactctactcgttggtgggctgcagaatcacataatagagattgatcttaacactgtccaggagactcagaagtatgcagtagagacgcctggagtcaccatcatgagacagacaaatcgcttcttcttctgcggccacacgtctggcaaggtttccctgagagacctccgtacttttaaggtggaacatgagtttgatgccttctcaggaagtctgtcagactttgatgtgcatggcaacctgctagctgcctgtggcttctccagccgcctcactggcctggcctgcgaccgtttcctcaaggtgtatgatttgcgcatgatgcgtgccatcacaccacttcaagtacatgtggatcctgccttcttgcgcttcattcctacatatacttctcgtcttgctatcatctctcagtcagggcagtgccaattctgtgaacccacaggcctggccaacccagccgatatctttcatgtgaatcctgtggggcctctgctaatgacatttgatgtgtcagccagcaagcaggctctggcctttggggattctgagggctgtgtgcacctctggactgattccccggagccttccttcaacccctactcccgtgagactgagtttgctttgccgtgtctcgtggactcactgcctcctctggactggagccaggacctgctgcctctttccctcatccctgtcccactcaccactgacacacttctctctgattggcctgctgccaactctgctccagctcccaggcgagcaccacccgtggatgcagagattctgcgcaccatgaagaaggtgggcttcattggctatgcgcccaatccccgcaccaggctgcgcaatcagataccctacagactcaaggagtcagacagtgaatttgacagcttcagccaggtcactgagtcaccagtaggacgagaagaggaaccacatctccacatggtttctaagaaataccgcaaggtgaccatcaaatattccaagctagggctggaggactttgacttcaaacactacaataagaccttgtttgctggattagagccccacattcccaacgcctactgtaactgcatgatccaggtgctctatttcctggagcctgtacgctgtctaattcaaaaccacctttgccagaaggagttctgtctggcatgtgagctgggcttcctgtttcacatgttggacctctctcgtggtgacccttgccagggcaataattttcttcgggcattccgtactattcctgaggcctcagccctcggtctaatcctggctgactcagatgaggcctcaggcaagggcaatctggccaggctcattcagaggtggaatcgcttcattctcactcaactgcatcaagatatgcaggagctggaaataccacaggcttatcgaggtgctggaggcagcagcttttgctcatcgggggactctgttattgggcagctcttcagctgtgagatggagaactgcagcctctgccgctgtggcagtgagaccgtgcgagcctcatccactctgcttttcacactctcctaccctgatggtagcaaaagtgataaaactgggaagaactatgactttgctcaggtgctgaagcgaagcatctgcctggaccagaatacacaggcctggtgtgacacctgtgaaaagtaccagcccacgattcagacccgcaacatccgccatctgccagatattcttgtcatcaattgtgaggtgaacagctcaaaagaggctgatttctggagaatgcaggctgaggttgccttcaagatggcagtaaagaaacacggtggggaaatctccaagaacaaggaatttgctttggctgattggaaggaactagggagtccagagggtgtgctggtgtgtccctccattgaggagttgaagaacgtctggcttcctttctccattcgcatgaagatgaccaaaaacaaagggctggatgtttgcaattggactgatggggatgagatgcagtggggcccagccagggcagaggaggagcatggtgtctatgtgtatgacctgatggctactgtggtacacatcctggactcacgcacagggggcagcctggtggctcacatcaaagttggagagacctaccaccagcgcaaggagggcgttactcaccagcagtggtatctgttcaatgactttcttattgaacctattgataagcatgaagctgtgcagtttgacatgaattggaaagtacctgcaatcctttattatgtcaaacggaatctcaattccagatacaacctgaacatcaagaaccctattgaggcaagtgtcttgctggctgaagcctcgctggcacggaagcagcggaaaacacatactacctttattccactgatgctgaatgagatgccacagattggggacctggtgggtctggatgctgagtttgtcacccttaatgaggaggaagcagagttacgcagtgatggtaccaagtctaccattaaaccaagccagatgtcagtagccaggattacctgtgttcggggccagggacccaatgagggtatccccttcattgatgactacatctctacccaggagcaggtggtggattacttgactcaatactcgggtataaagcctggtgacctcgatgccaaaatttcctccaagcacctaacaactctcaagtctacctacttaaagcttcgttttctcattgacattggagtcaagtttgtgggtcatggcctgcagaaggacttccgggtcatcaacctgatggtgcccaaggaccaagtccttgacactgtctacctgttccatatgccccgaaaacgaatgatttccctgcgattccttgcttggtactttctggacctgaagattcaaggggaaacccatgacagtattgaggatgcccgcacagcccttcagctgtaccgaaagtatctggagctaagcaaaaatggcactgagcctgagtctttccacaaggtgctcaagggtctttatgagaagggcagaaagatggactggaaggtgcctgagcctgagggccaaacaagtcccaagaatgcagctgtcttctcctcagtgctggcgctctgactacccttcccaaagaaccacggccctctccctttactgttctatagccccagaactgggagatggcttcctaagttggctataccttgtccacttccagtactggacgtgctcagggtctagggtcacagatggtgctattaattgaactggaacacagcagaattgttgcaaaggttctaggagccagattcattccttcttcattctttgcaaaacagtggtacagacatggagtctagaattgacccagatggaaagtaattggtattcttaatatcctgggtgactaatatccaggcagagaagctcctggaaccataactgtaagttcctagctggctagggattgaagtcctggacagtgacagaggataccacagtagttcaagacttagcacaagtcaccaactgcttcagggatacctggaggggccagcaagtagagtgttggtggcccaagcaaaccagtgttgccaataccattgccaaaagggcctttggatcctggacaaagcttggctgccggcttcatttattcctgctgatggctgagaagcatctgtcttccatcccacttgcctgtcccaagttttgttccattttttaaaaatttgttgtaaactgcatgttttataaaataaaaataaaatatcgtttgt

SEQ ID NO: 44960 - DNA, 3609 bp, Artificial Sequence
  derived and/or modified sequence
atgaacttcgaaggcttggacccgggactggccgaatacgcgccagcgatgcactctgctctggaccccgtgcttgacgctcatcttaacccaagcctcctgcaaaacgtggagcttgatcccgagggcgtggccctcgaggcactcccagtacaggagtccgtgcacatcatggaaggagtgtactccgagctgcattccgttgttgctgaagtgggtgttccagtgagcgtttcacattttgatctccatgaagaaatgctatgggtcggatcccatggaggccatgctacctctttctttggacccgcactcgaaaggtatagttcatttcaagtgaatggctcagatgacatcaggcagattcaaagtctggagaacgggattctgttcctcacaaagaacaacctgaagtatatggcaagagggggactaatcatctttgattacttactggacgaaaacgaagatatgcactcgctactgctgaccgactcttcaactctcttggtaggcggactgcaaaaccatattattgaaattgacctgaatacggttcaagagactcagaaatacgctgttgagacgcccggtgtcactataatgagacagaccaacagatttttcttctgcgggcacacttctggcaaagtgagcctccgcgacctgcgaaccttcaaagtcgagcatgagtttgacgcattttctggatccctgagcgacttcgacgttcacggaaatctgctagcagcatgtggcttttcatctcggttaacaggactggcatgtgaccggtttcttaaggtctacgacctccggatgatgcgcgctatcacaccacttcaggtacacgtggatccagccttccttaggttcatacccacatacaccagcagattagccattattagtcaaagtgggcagtgtcagttttgcgaacctactggcctagccaacccagccgacattttccatgtcaatcccgtgggtccactcctaatgacatttgatgtgtcagcttctaagcaagccctggcctttggcgacagcgaaggttgtgtgcatctgtggactgactcgcctgagccctcatttaatccatattctagggagactgagtttgccttaccatgtcttgtggatagcttgccccctttggattggagtcaggacctcctgccactatcactcattccagtgcccctaacaacagacacactgctgtccgattggccggctgccaatagtgcaccagctcctcgaagggcccctccagtggacgccgagatcctgcggaccatgaaaaaggttggcttcataggctacgcaccaaaccccagaacccggctgcgaaaccagatcccttatcggttgaaagaaagcgacagtgaattcgacagtttttctcaagtaacggagtcacctgtgggaagagaagaagaaccacacttacacatggtcagcaagaagtaccgcaaagttactattaaatactccaagttgggactcgaggacttcgattttaagcattacaacaagacattgttcgcgggattggaacctcacatccccaatgcttattgcaactgcatgatacaggtcctttacttcttggagcctgtgaggtgcttaatccagaaccacctctgccagaaggagttttgtctcgcatgcgaacttggctttctgttccacatgcttgatctaagcagaggggacccgtgtcagggcaataacttcctccgagcctttaggaccatcccggaagcatcagctcttggactgatcctggcagactccgatgaggcgtcgggcaaaggcaacctggcccgattaattcagaggtggaacagattcattctgacacagctacaccaggatatgcaggagcttgagatcccccaggcctatcggggagcgggtggaagttctttctgttcttccggcgattctgtgatagggcagttgttttcttgtgagatggaaaattgttctctctgcaggtgtggcagtgagactgtccgcgcttcctccaccctcctgtttactctgtcgtaccccgatggaagcaagtcggataagacgggcaagaactatgatttcgcgcaggtcttgaaaagatccatctgcctggaccagaatacacaagcgtggtgtgatacatgtgaaaaataccaacccacaatccaaacccgaaacatcaggcacctgcctgatatcctggtaatcaactgcgaggtgaactcatcaaaggaggccgatttctggcggatgcaggcagaagtagctttcaagatggccgtcaaaaaacatggaggggaaatctcaaaaaacaaagagttcgcactggcagattggaaagaattgggatcacctgaaggtgtgctggtgtgtccatctattgaagaactcaagaatgtgtggctgcccttttctattcgcatgaagatgaccaagaacaagggcctcgacgtgtgtaactggactgatggtgacgagatgcagtggggtcccgctagagctgaggaagaacacggcgtttacgtgtacgatttgatggccacagtggtccacatcctggattccaggaccggaggctctctggtcgcacatatcaaagtgggagaaacctaccaccagcgtaaggagggtgtgacccaccagcagtggtacctgttcaatgacttccttattgagcccatcgacaagcacgaggccgtacagttcgacatgaattggaaagtaccggcaatactctattatgtcaaaagaaatctgaactcacgctataatcttaatattaaaaatcccattgaggcctccgtcctgctggccgaggctagtttagccaggaagcagcgcaaaacacacacgactttcatacctttaatgctcaatgagatgccacagatcggggacctcgttggcctggacgctgaattcgtgaccctgaatgaagaggaagctgaactgcgctcagacggcaccaaatcgacaatcaagcccagccaaatgtctgtggcacgaatcacatgtgtgcgcggtcaggggccaaatgaaggcattcccttcattgatgactacataagcactcaagagcaagttgttgactatctgactcagtatagcggaatcaagcccggagacctggacgccaagattagctccaaacatcttacaacacttaaatccacgtatttgaaacttaggttcttaatagacattggcgtgaagtttgtgggccacggcctacagaaggactttcgcgtgatcaatctcatggtgccaaaagatcaagtgctggacacagtgtatctgttccacatgccaagaaagcggatgattagtctcagattcctggcctggtactttctcgacctgaagatccaaggcgagactcatgattcaattgaggatgccaggacagctctgcagctgtatagaaagtacctagagttgagcaaaaacggaaccgagcctgagtcgttccataaggtcctcaaagggctgtacgagaagggccgtaaaatggactggaaggtcccagagcctgaggggcagacttctcctaaaaacgctgccgttttcagcagcgtgctagcattgtag

SEQ ID NO: 44961 - DNA, 3609 bp, Artificial Sequence
  derived and/or modified sequence
atgaattttgagggactggaccccggtctggccgagtatgcccctgctatgcactcggctctggatccggtgctagacgcccatctgaatccctcacttttgcagaatgtggagttagaccctgagggggtcgctctggaagctttacccgtccaggaaagtgtgcacatcatggagggagtatactccgagctgcactccgtggtggccgaggttggagtgcctgtatctgtttcacattttgacctgcacgaagaaatgctctgggtcggatcgcacggaggccacgctacgtccttcttcggtccagcgctcgaacggtattcctcctttcaggtgaacgggtccgatgacattaggcaaattcagtctttggagaatggcatcctctttctgaccaaaaacaacctgaagtacatggccagaggcggtcttattatttttgactaccttctggacgagaatgaagacatgcactcacttctgctgactgattccagtacgctcctggtgggcggactgcagaaccatatcatagagatcgacctcaacacagtgcaggagacacagaagtacgccgtcgaaacccctggcgtgacaatcatgcgtcaaacaaaccggttctttttttgcgggcacaccagcggcaaagtgagtctccgggacctcaggactttcaaggtggagcacgagtttgacgccttcagcggaagtctaagtgactttgacgtgcacggtaacctacttgcagcctgtggattttcttctaggctgaccggcctagcatgtgaccggttcctgaaggtgtatgacctgagaatgatgcgcgctatcactcctttgcaggtgcatgtggaccccgcttttttgagatttattccaacatacacttcacggctcgccatcatcagccagtccgggcagtgtcaattttgcgaacccaccggactggctaacccggctgacattttccacgtgaacccagtggggccactgctcatgacattcgatgtgtctgcctctaagcaggcattagccttcggagattcagagggctgtgttcatttatggaccgattcccccgagccttcctttaacccatactctcgggaaaccgagttcgcacttccatgcttagtggactctctgcccccattggactggtcccaagatcttcttcccctctcactaatccctgtgccactcacgactgacaccctgctcagcgattggccagcagccaacagcgctcccgcacctagacgcgctccaccagttgacgccgagatcttgcgcaccatgaaaaaggtgggtttcatcggttatgcaccgaatccacggacgaggctgcgcaatcagattccctaccgcctgaaggagtctgactcagaatttgacagcttctcacaggttacagagagtccggtgggcagagaggaggaaccacatctccatatggtctctaagaagtaccgcaaggtgaccataaagtactccaagcttggacttgaggacttcgactttaagcactacaacaaaaccctgttcgctggactggagccccatatcccgaatgcatactgcaattgtatgatccaggtcttgtacttcctcgagcctgtcaggtgtctaatccagaaccacctttgtcagaaggaattctgcttggcttgcgagctcggatttctttttcacatgctggatctctctcgaggcgatccctgtcaaggaaataacttcctcagggcgttccggaccattcctgaagcctctgctcttgggctgattctggccgattccgatgaagcttccggcaagggaaatctggctcgacttatccagcgatggaatagattcattttgacccagctgcatcaggatatgcaagagctcgagatccctcaggcttataggggtgccggtggttcttctttctgctcttcaggcgattcagtgataggccaactgttcagctgcgaaatggagaactgttcattatgccgctgtggcagcgagaccgtcagggcatccagcactttactgtttaccctgagttatccggatggctccaaatcagacaagacagggaaaaactatgacttcgctcaggtcctaaagcggtctatttgcctcgaccagaacacccaggcttggtgtgatacttgtgaaaaataccagcccacgattcaaacccggaacataaggcatctgcctgatatcttggtgatcaattgcgaagttaattcctccaaagaggcggacttctggaggatgcaggctgaggttgccttcaagatggctgtgaagaagcacggtggagagataagtaaaaacaaggagttcgcccttgctgattggaaagagctcggctccccggaaggtgtgttagtatgccctagcatcgaggagctgaagaacgtctggctcccattttcaattagaatgaaaatgacaaaaaataaggggctggacgtttgcaattggaccgacggggatgagatgcagtggggtcccgcaagagctgaggaagaacacggcgtctatgtgtacgacctgatggccacggtagtgcacatccttgacagccgcactggcggttcactcgtagctcatatcaaggtgggagagacttaccaccagcgcaaggagggtgtgacgcatcaacagtggtatctctttaacgattttttaatagagccgatcgataaacatgaagccgttcagtttgatatgaattggaaggtgccggcaatattatattatgtaaagcgcaacttaaatagcaggtataatcttaatattaagaaccccatcgaggccagcgttctgctggctgaggctagcctggcccgaaaacaacggaagacacatacgaccttcatccccctcatgcttaacgagatgcctcaaattggcgacctggtgggccttgatgccgagtttgtgaccctaaacgaagaggaggctgaactgaggagcgatgggaccaaaagcacaattaagccgtcacagatgtccgttgctaggatcacttgcgtgcggggacaggggcctaatgaagggatcccttttatcgacgactacattagtacccaggaacaggtggtggattatctgacccagtatagtggcattaaacccggtgatcttgacgctaagataagctccaaacatcttacgacactgaagtctacctacctgaagctacgctttctcattgatatcggtgtgaaattcgtgggacatgggctccagaaggattttagagtaatcaaccttatggtccctaaggaccaggtgctggacacggtatacctgttccacatgcctcgcaagaggatgatcagtcttcggttcctcgcttggtattttctagatctgaaaatccagggggagactcatgatagcattgaggatgccaggacagctctccagctttacaggaagtaccttgagctttccaaaaacggaactgaacctgagtcttttcataaagttctcaagggactttacgagaaagggagaaaaatggattggaaggtgcctgagccggaggggcagaccagcccaaagaatgccgctgtcttctcttccgtgctggccctgtag

SEQ ID NO: 44962 - DNA, 3609 bp, Artificial Sequence
  derived and/or modified sequence
atgaacttcgagggcctggaccccggcctggccgagtacgcccccgccatgcacagcgccctggaccccgtgctggacgcccacctgaaccccagcctgctgcagaacgtggagctggaccccgagggcgtggccctggaggccctgcccgtgcaggagagcgtgcacatcatggagggcgtgtacagcgagctgcacagcgtggtggccgaggtgggcgtgcccgtgagcgtgagccacttcgacctgcacgaggagatgctgtgggtgggcagccacggcggccacgccaccagcttcttcggccccgccctggagagatacagcagcttccaggtgaacggcagcgacgacatcagacagatccagagcctggagaacggcatcctgttcctgaccaagaacaacctgaagtacatggccagaggcggcctgatcatcttcgactacctgctggacgagaacgaggacatgcacagcctgctgctgaccgacagcagcaccctgctggtgggcggcctgcagaaccacatcatcgagatcgacctgaacaccgtgcaggagacccagaagtacgccgtggagacccccggcgtgaccatcatgagacagaccaacagattcttcttctgcggccacaccagcggcaaggtgagcctgagagacctgagaaccttcaaggtggagcacgagttcgacgccttcagcggcagcctgagcgacttcgacgtgcacggcaacctgctggccgcctgcggcttcagcagcagactgaccggcctggcctgcgacagattcctgaaggtgtacgacctgagaatgatgagagccatcacccccctgcaggtgcacgtggaccccgccttcctgagattcatccccacctacaccagcagactggccatcatcagccagagcggccagtgccagttctgcgagcccaccggcctggccaaccccgccgacatcttccacgtgaaccccgtgggccccctgctgatgaccttcgacgtgagcgccagcaagcaggccctggccttcggcgacagcgagggctgcgtgcacctgtggaccgacagccccgagcccagcttcaacccctacagcagagagaccgagttcgccctgccctgcctggtggacagcctgccccccctggactggagccaggacctgctgcccctgagcctgatccccgtgcccctgaccaccgacaccctgctgagcgactggcccgccgccaacagcgcccccgcccccagaagagccccccccgtggacgccgagatcctgagaaccatgaagaaggtgggcttcatcggctacgcccccaaccccagaaccagactgagaaaccagatcccctacagactgaaggagagcgacagcgagttcgacagcttcagccaggtgaccgagagccccgtgggcagagaggaggagccccacctgcacatggtgagcaagaagtacagaaaggtgaccatcaagtacagcaagctgggcctggaggacttcgacttcaagcactacaacaagaccctgttcgccggcctggagccccacatccccaacgcctactgcaactgcatgatccaggtgctgtacttcctggagcccgtgagatgcctgatccagaaccacctgtgccagaaggagttctgcctggcctgcgagctgggcttcctgttccacatgctggacctgagcagaggcgacccctgccagggcaacaacttcctgagagccttcagaaccatccccgaggccagcgccctgggcctgatcctggccgacagcgacgaggccagcggcaagggcaacctggccagactgatccagagatggaacagattcatcctgacccagctgcaccaggacatgcaggagctggagatcccccaggcctacagaggcgccggcggcagcagcttctgcagcagcggcgacagcgtgatcggccagctgttcagctgcgagatggagaactgcagcctgtgcagatgcggcagcgagaccgtgagagccagcagcaccctgctgttcaccctgagctaccccgacggcagcaagagcgacaagaccggcaagaactacgacttcgcccaggtgctgaagagaagcatctgcctggaccagaacacccaggcctggtgcgacacctgcgagaagtaccagcccaccatccagaccagaaacatcagacacctgcccgacatcctggtgatcaactgcgaggtgaacagcagcaaggaggccgacttctggagaatgcaggccgaggtggccttcaagatggccgtgaagaagcacggcggcgagatcagcaagaacaaggagttcgccctggccgactggaaggagctgggcagccccgagggcgtgctggtgtgccccagcatcgaggagctgaagaacgtgtggctgcccttcagcatcagaatgaagatgaccaagaacaagggcctggacgtgtgcaactggaccgacggcgacgagatgcagtggggccccgccagagccgaggaggagcacggcgtgtacgtgtacgacctgatggccaccgtggtgcacatcctggacagcagaaccggcggcagcctggtggcccacatcaaggtgggcgagacctaccaccagagaaaggagggcgtgacccaccagcagtggtacctgttcaacgacttcctgatcgagcccatcgacaagcacgaggccgtgcagttcgacatgaactggaaggtgcccgccatcctgtactacgtgaagagaaacctgaacagcagatacaacctgaacatcaagaaccccatcgaggccagcgtgctgctggccgaggccagcctggccagaaagcagagaaagacccacaccaccttcatccccctgatgctgaacgagatgccccagatcggcgacctggtgggcctggacgccgagttcgtgaccctgaacgaggaggaggccgagctgagaagcgacggcaccaagagcaccatcaagcccagccagatgagcgtggccagaatcacctgcgtgagaggccagggccccaacgagggcatccccttcatcgacgactacatcagcacccaggagcaggtggtggactacctgacccagtacagcggcatcaagcccggcgacctggacgccaagatcagcagcaagcacctgaccaccctgaagagcacctacctgaagctgagattcctgatcgacatcggcgtgaagttcgtgggccacggcctgcagaaggacttcagagtgatcaacctgatggtgcccaaggaccaggtgctggacaccgtgtacctgttccacatgcccagaaagagaatgatcagcctgagattcctggcctggtacttcctggacctgaagatccagggcgagacccacgacagcatcgaggacgccagaaccgccctgcagctgtacagaaagtacctggagctgagcaagaacggcaccgagcccgagagcttccacaaggtgctgaagggcctgtacgagaagggcagaaagatggactggaaggtgcccgagcccgagggccagaccagccccaagaacgccgccgtgttcagcagcgtgctggccctgtag

SEQ ID NO: 44963 - protein, 979 aa, Artificial Sequence
  derived and/or modified sequence
MKMASTRCKLARYLEDLEDVDLKKFKMHLEDYPPQKGCIPLPRGQTEKADHVDLATLMIDFNGEEKAWAMAVWIFAAINRRDLYEKAKRDEPKWGSDNARVSNPTVICQEDSIEEEWMGLLEYLSRISICKMKKDYRKKYRKYVRSRFQCIEDRNARLGESVSLNKRYTRLRLIKEHRSQQEREQELLAIGKTKTCESPVSPIKMELLFDPDDEHSEPVHTVVFQGAAGIGKTILARKMMLDWASGTLYQDRFDYLFYIHCREVSLVTQRSLGDLIMSCCPDPNPPIHKIVRKPSRILFLMDGFDELQGAFDEHIGPLCTDWQKAERGDILLSSLIRKKLLPEASLLITTRPVALEKLQHLLDHPRHVEILGFSEAKRKEYFFKYFSDEAQARAAFSLIQENEVLFTMCFIPLVCWIVCTGLKQQMESGKSLAQTSKTTTAVYVFFLSSLLQPRGGSQEHGLCAHLWGLCSLAADGIWNQKILFEESDLRNHGLQKADVSAFLRMNLFQKEVDCEKFYSFIHMTFQEFFAAMYYLLEEEKEGRTNVPGSRLKLPSRDVTVLLENYGKFEKGYLIFVVRFLFGLVNQERTSYLEKKLSCKISQQIRLELLKWIEVKAKAKKLQIQPSQLELFYCLYEMQEEDFVQRAMDYFPKIEINLSTRMDHMVSSFCIENCHRVESLSLGFLHNMPKEEEEEEKEGRHLDMVQCVLPSSSHAACSHGLVNSHLTSSFCRGLFSVLSTSQSLTELDLSDNSLGDPGMRVLCETLQHPGCNIRRLWLGRCGLSHECCFDISLVLSSNQKLVELDLSDNALGDFGIRLLCVGLKHLLCNLKKLWLVNSGLTSVCCSALSSVLSTNQNLTHLYLRGNTLGDKGIKLLCEGLLHPDCKLQVLELDNCNLTSHCCWDLSTLLTSSQSLRKLSLGNNDLGDLGVMMFCEVLKQQSCLLQNLGLSEMYFNYETKSALETLQEEKPELTVVFEPSW

SEQ ID NO: 44964 - DNA, 2940 bp, Artificial Sequence
  derived and/or modified sequence
atgaaaatggccagcacaagatgtaaactagcaaggtaccttgaggatctggaagacgtcgatttgaagaaatttaagatgcatctggaagattacccccctcagaaagggtgcatccctcttcctagggggcagactgagaaggccgaccatgtggacttagccaccttgatgatagactttaatggcgaagaaaaagcttgggcaatggcagtgtggatattcgctgccattaatcggagagacctctacgaaaaagcgaagagagatgagcctaagtggggaagcgataacgctcgggtgagcaacccaaccgtaatatgtcaggaggacagcatagaggaggagtggatgggactcctcgagtatttgtctcgtatctccatctgcaagatgaaaaaagactatcgcaagaaataccgcaaatacgtgcgatcacgctttcagtgtatcgaggatagaaatgcgagactgggcgaaagtgttagtcttaacaaacgatacactagactcagactgattaaggaacaccggtcccaacaagagcgggagcaggagctgctggccatagggaagaccaagacgtgcgagtctcccgtgagcccgatcaagatggagttgctgtttgaccctgatgacgagcattctgagcctgtacataccgtcgtgtttcaaggggccgcgggaatcggtaaaactattttggcacgtaaaatgatgcttgattgggcaagcggcactctgtaccaggacagatttgattatcttttctatatacactgtcgggaggtttcgcttgttacacagagatccctgggcgacttgattatgtcatgctgtcccgatccgaatccaccaatacacaagatcgtccgcaaaccctctcgtatcctctttctcatggacggatttgatgagttgcaaggcgcctttgatgagcatattggacctctgtgtaccgactggcagaaagcggaaaggggagacatcctattgagctccttaatccgcaaaaagctgcttccagaggcaagcctactgatcacaactcgccctgtggccctcgaaaagctgcagcaccttctcgatcacccccgccacgtagaaattttgggcttcagtgaagcaaagagaaaagaatatttctttaagtacttctctgacgaggctcaggcacgggccgccttctcactcattcaggagaatgaagtcctgtttactatgtgtttcataccactggtgtgttggattgtgtgtaccggcctgaagcagcaaatggaaagcggcaaaagcttggcccagacgagtaagactacaaccgccgtgtacgtgtttttcttatcatctctcctgcagccaaggggaggcagtcaggagcacggcctgtgcgcacacctctgggggctatgttctctggccgctgacggcatctggaaccagaagattctgttcgaggagtctgatctgcgtaaccacgggctgcaaaaggccgacgtcagcgctttcttacgaatgaacttgttccagaaagaggttgattgcgagaagttctactcctttattcacatgacattccaggaattcttcgctgccatgtactacctcctggaagaagagaaagaaggcaggactaacgttccaggtagcaggcttaaactgccttctcgtgacgtgaccgtgctgctggaaaattacggaaagttcgaaaaaggttatttgattttcgtggtccgattccttttcgggttggtcaaccaggaacgcacctcctatctggagaagaagttgagctgcaaaattagccagcagatacggcttgaattacttaaatggatcgaggtgaaagccaaggctaagaaactgcagatccagccttcccagcttgagttgttctactgcctgtatgaaatgcaggaggaagattttgtgcagagggcgatggactattttccaaagattgaaattaacttgtccacccgtatggaccacatggtgagcagcttttgtatcgaaaactgccaccgtgtagagtctttatcactcggcttcctgcataatatgccaaaagaagaagaggaagaagagaaggagggaagacacctggacatggtgcagtgtgtcttaccttcttcctctcatgcagcctgtagccatggtctggtgaacagccatcttaccagctccttctgccggggcctctttagcgtcctctccacttctcagagtttaaccgagctggacctgtccgataattccctaggggaccctggcatgagagtgctgtgtgaaaccttacagcaccccggttgtaatattaggagactgtggttaggacgttgcggcctcagccacgaatgctgcttcgacatctccctggtgctctcctcaaatcaaaagcttgtcgagctagatctttccgacaacgccctcggcgatttcgggatcagactcctatgtgtgggccttaagcacctcttatgtaacctcaaaaaactatggctggtcaacagtggtctcacttcagtgtgctgcagcgcgctttcaagtgtgctgtcaacaaatcagaacctgacgcatctgtatctccgggggaacactctgggcgacaagggaataaaactgctgtgcgagggactgcttcatcccgattgcaagctccaggttctggaactagacaactgtaacttaacatcacattgttgttgggatctgagcacgctgcttactagcagccagtccctacgcaaactcagcctcggtaataatgacttgggtgacctgggcgttatgatgttttgcgaggtgttaaagcaacagtcttgccttctgcagaatctgggactcagcgagatgtatttcaattatgagacaaagtcagcgctggaaacacttcaggaagagaagccggagctgacggtggtcttcgagccttcgtggtag

SEQ ID NO: 44965 - DNA, 2940 bp, Artificial Sequence
  derived and/or modified sequence
atgaaaatggcctccaccagatgtaagctggcccgctatctggaggatctggaagacgtagatttgaagaaattcaagatgcatctggaggattaccctccccagaagggctgtattcccctcccaagggggcagacagagaaagccgaccatgtggatctggccacacttatgatagatttcaacggcgaggaaaaggcttgggcaatggccgtctggatattcgcagcaattaaccggagggacctgtacgaaaaagcgaaacgagacgagcctaaatggggttctgacaacgcacgggtgagcaacccgacagttatctgccaggaagattctatagaggaggaatggatgggtttgctggaatacctcagcaggattagtatatgtaaaatgaagaaggactatagaaagaaataccggaagtatgtgagaagcaggttccagtgtatcgaggatagaaatgccaggctgggagagagtgttagcctgaacaagcggtatactagactccggctcatcaaagagcacaggtcacagcaggagcgcgagcaggagcttttggccattgggaagacaaaaacctgcgagtccccggtctcccctataaaaatggagctactttttgaccctgacgatgagcacagcgaacctgtgcacaccgtcgtttttcagggagctgctggaattggcaaaactattctcgcaagaaaaatgatgttagattgggcttcaggtacgttgtaccaagacagattcgactacctgttttatatccattgcagagaggtgtcgctcgttacccagagatctctgggggatctaatcatgtcgtgttgcccagacccaaatccaccaatccacaaaatagtgcggaaaccatcccggatcctgtttcttatggatgggttcgatgagcttcagggtgcatttgacgagcacataggcccactgtgtactgattggcagaaagctgaacgtggggatattctgctgagctctctgattcggaaaaaattgctgccagaagcttcgctgcttataaccactaggccagtggcgctcgagaaactacagcacttgctcgatcatccccggcatgtcgaaatcctgggattttctgaggctaaacggaaagaatatttctttaaatatttttcagatgaagcacaggctagagcggccttctctctaattcaggagaatgaggtgctgttcacaatgtgcttcatccccctcgtgtgctggattgtgtgcaccggcctcaaacaacagatggaatccggaaagtcgctcgcacagacatctaaaaccaccactgctgtttatgtgttcttcctgtccagtttacttcagccacgcggcggatcccaggaacatgggctctgtgctcacctttggggattgtgtagtttagccgctgacgggatatggaaccagaaaatcctctttgaggaatctgacttgaggaatcacggtttgcagaaggcggatgtatccgctttccttagaatgaacctcttccagaaggaggttgactgcgaaaagttctattcttttattcacatgacatttcaagaattcttcgccgccatgtattacttgctggaagaggagaaggaggggcggaccaacgtgcccggctcgcgtctgaaactcccctctagggacgtgacagtgttgctcgagaattacggcaagtttgagaagggatacctgatcttcgttgtcaggttcctatttggtcttgtgaatcaggagaggacaagctatcttgagaagaagctgtcatgtaagattagccagcaaattagactagaactgctcaagtggatagaagtgaaagccaaagccaaaaaacttcagatacagcccagccagctggagttattctattgtctgtacgagatgcaggaggaggactttgtacagcgcgcgatggactattttccaaagattgagatcaacctgagtacacgtatggatcatatggtgtcatcattttgcatagaaaactgtcatagagtagaatcattaagcttaggctttttacacaatatgcctaaagaggaggaggaagaggaaaaagaggggcggcacctggatatggtgcagtgcgtgctgccttcaagttcccacgctgcttgctcccacggccttgtgaatagccacctgacctcctcattttgtagggggcttttcagtgtgctgagcacttcacaaagcctcactgagcttgatctctctgataactctttgggcgacccagggatgcgtgtgctgtgtgagacgctgcaacacccaggatgtaacatccgacggctttggctggggcgttgcgggctgagtcacgagtgctgcttcgacataagtcttgtcctctcatcaaatcagaagctggttgagctagatttgagtgacaacgccctcggagactttggtatcaggcttctctgtgtgggcctgaaacatctgttgtgtaaccttaaaaagctgtggttagttaactcaggactgacatcagtgtgctgctcggcgctgtcgtccgtcctttcaaccaaccagaacctgacccatctttacctcaggggaaatacactcggcgacaaaggcatcaaattactgtgtgagggcctgcttcaccccgactgtaagctgcaagtcctcgaactggacaactgcaatctaacgtctcattgttgctgggatctcagtactctgctgacatccagccagagcctcagaaagctgtcccttggtaataatgatctcggcgatctcggtgtgatgatgttctgcgaagtactgaaacagcagtcttgtttgctccagaacctcgggctgtcggagatgtactttaattacgagacgaagagcgccttagagacactccaggaagagaagcccgagctaactgtggtgtttgaacctagctggtag

SEQ ID NO: 44966 - DNA, 2940 bp, Artificial Sequence
  derived and/or modified sequence
atgaagatggccagcacccgctgcaagctggcccgctacctggaggacctggaggatgtggacctgaagaagttcaagatgcacctggaggactacccaccccagaagggctgcatccccctgccccggggccagacagagaaggctgaccacgtggacctggccaccctgatgattgacttcaacggggaggagaaggcctgggccatggctgtgtggatctttgctgccatcaacagaagagacctgtatgagaaggccaagagagatgagcccaagtggggcagtgacaatgcccgggtgagcaaccccaccgtcatctgccaggaggacagcattgaggaggagtggatgggcctgctggagtacctgagccgcatcagcatctgcaagatgaagaaggactacaggaagaagtacagaaaatatgtgcgcagccgcttccagtgcatcgaggacagaaatgcccggctgggggagagcgtgtccctgaacaagcgctacacccggctgcggctcatcaaggagcacaggagccagcaggagcgggagcaggagctgctggccatcggcaagaccaagacctgtgagagccctgtgagccccatcaagatggagctgctgtttgatcctgatgatgagcacagcgagcctgtgcacacagtggtgttccagggcgccgccggcatcggcaagaccatcctggccaggaagatgatgctggactgggccagcggcaccctgtaccaggacagatttgactacctgttctacatccactgccgggaggtgtccctggtgacccagaggagcctgggggacctgatcatgagctgctgcccagaccccaacccccccatccacaagatcgtgaggaagcccagccgcatcctcttcctgatggatggctttgatgagctgcagggcgcctttgatgagcacatcggccccctgtgcacagactggcagaaggccgagcggggggacatcctgctgagcagcctcatcaggaagaagctgctgcctgaggccagcctgctgatcaccaccaggcctgtggccctggagaagctgcagcacctgctggaccaccccaggcatgtggagatcctgggcttcagcgaggccaagaggaaggagtacttcttcaagtacttcagtgatgaggcccaggcccgggccgccttcagcctcatccaggagaatgaggtgctcttcaccatgtgcttcatccccctggtgtgctggatcgtgtgcaccggcctgaagcagcagatggagagcggcaagagcctggcccagaccagcaagaccaccacagctgtgtatgtgttcttcctgagcagcctgctgcagccccggggcggcagccaggagcacggcctgtgtgcccacctgtggggcctgtgcagcctggccgcagatggcatctggaaccagaagatcctgtttgaggagagtgacctgaggaaccacggcctgcagaaggcagatgtgtctgccttcctgaggatgaacctcttccagaaggaggtggactgtgagaagttctacagcttcatccacatgaccttccaggagttctttgctgccatgtactacctgctggaggaggagaaggagggccgcaccaacgtgcccggcagccggctgaagctgcccagcagagatgtgacagtgctgctggagaactacggcaagtttgagaagggctacctgatctttgtggtgcgcttcctgtttggcctggtgaaccaggagaggaccagctacctggagaagaagctgagctgcaagatcagccagcagatccggctggagctgctgaagtggattgaggtgaaggccaaggccaagaagctgcagatccagcccagccagctggagctgttctactgcctgtatgagatgcaggaggaggactttgtgcagagggccatggactacttccccaagattgagatcaacctgagcaccaggatggaccacatggtgtcctccttctgcatcgagaactgccaccgggtggagagcctgagcctgggcttcctgcacaacatgcccaaggaggaggaggaggaggagaaggagggccgccacctggacatggtgcagtgtgtgctgcccagcagcagccacgccgcctgcagccacggcctggtgaacagccacctgaccagcagcttctgccggggcctcttctctgtgctgagcaccagccagagcctgacagagctggacctgagtgacaacagcctgggggaccccggcatgagggtgctgtgtgagaccctgcagcaccctggctgcaacatccggcggctgtggctgggccgctgtggcctgagccatgagtgctgctttgacatcagcctggtgctgagcagcaaccagaagctggtggagctggacctgagtgacaatgccctgggggactttggcatccggctgctgtgtgtgggcctgaagcacctgctgtgcaacctgaagaagctgtggctggtgaacagcggcctgacctctgtgtgctgcagcgccctgagctctgtgctgagcaccaaccagaacctgacccacctgtacctgcggggcaacaccctgggggacaagggcatcaagctgctgtgtgagggcctgctgcacccagactgcaagctgcaggtgctggagctggacaactgcaacctgaccagccactgctgctgggacctgagcaccctgctgaccagcagccagagcctgaggaagctgagcctgggcaacaatgacctgggggacctgggcgtgatgatgttctgtgaggtgctgaagcagcagagctgcctgctgcagaacctgggcctgtctgagatgtacttcaactatgagaccaagagcgccctggagaccctgcaggaggagaagccagagctgactgtggtgtttgagcccagctggtag

SEQ ID NO: 44967 - DNA, 2940 bp, Artificial Sequence
  derived and/or modified sequence
atgaagatggccagcacccggtgcaagctggcccggtacctggaggatctagaagacgttgacctgaagaaattcaagatgcaccttgaagattatccgccccagaaaggctgtattccacttccccggggtcagaccgaaaaggctgaccatgtcgacctcgctacgctgatgattgattttaacggcgaagaaaaagcctgggcaatggctgtgtggatcttcgccgcaataaacaggcgggacctgtatgaaaaagccaaaagagatgaaccaaaatggggtagtgataatgcacgggtctctaacccaaccgttatctgccaagaggactcaatcgaggaagagtggatgggtttactggagtacttatctcggatttctatttgcaagatgaaaaaagattatcgtaaaaaataccgcaagtatgtgcgctcaagattccagtgcattgaggataggaacgccaggcttggtgaaagcgtgtctctgaataagaggtatacccggttgagactgattaaggaacaccgctctcaacaggaacgcgaacaagaactgctggccatcggcaaaacaaaaacatgcgaaagtcccgtgtccccaattaagatggagctgctgttcgacccagatgacgagcacagcgagcctgtgcacactgtggtgtttcagggcgccgccgggattgggaagactattctggctaggaaaatgatgctcgactgggcgtccggaacactgtatcaagacaggttcgattatctgttttatatacactgcagggaagtgtctctcgtcacacagagaagcctaggagacctaatcatgagctgctgccctgacccgaacccccccatccataagatcgtcagaaagccttctagaattttgtttttgatggatggattcgatgagctgcagggtgcttttgatgagcatatcggccctctttgcaccgactggcagaaagcagagaggggcgacatcctgctgtctagtctgatacgaaaaaagctcttgccagaggcctcactgttaatcacaacacggcctgtagcactggaaaagctgcagcacctgctcgaccaccctagacatgtggagatccttggattttcagaggctaagagaaaggaatatttttttaagtacttttccgacgaggcgcaggcccgggctgccttctccctcatccaagaaaatgaagtgctgttcacaatgtgttttatcccactcgtctgctggatagtgtgcacaggcctgaagcagcagatggagagcggtaagagcttagcccagacttccaagaccaccaccgccgtgtacgtttttttcctgtcatcgctactgcaacctaggggcggctcccaagagcacgggctttgcgctcatctttgggggctctgttcactcgccgcagatgggatctggaaccagaaaatcctcttcgaagaaagcgacctccgaaaccatggactgcagaaggctgacgtgagcgcattcctccggatgaacttattccagaaggaagttgactgcgaaaaattctacagcttcattcacatgacatttcaggagttctttgctgcaatgtattatctgctcgaggaggaaaaggagggccgcactaacgtcccgggctcccgcctcaaattaccaagccgggatgtgactgtgctgctggagaattacggcaagttcgaaaagggctatttgatctttgtcgtgagattcctcttcggtttagttaaccaagagcgcacttcctacctggagaaaaagttatcgtgtaagattagccagcaaatcaggttggaactgctgaaatggatcgaagtgaaggccaaggctaagaagctccagatccaaccgtcccagctcgagcttttctactgtctgtacgagatgcaagaggaagactttgttcagagagccatggattactttcctaaaatcgagattaatctgtccactcgcatggatcacatggtgagctccttctgcatcgagaactgccatagggtggagtccctgtccctgggatttctgcacaacatgcctaaagaggaagaagaagaagaaaaagagggacgccatctcgatatggtccagtgcgttctccccagctcctcacacgccgcttgtagccacggcctcgtaaattcacatttgacgagcagcttctgtcgagggctcttctctgttctgtccacgtcacagtctctgactgagttagatctgtcagacaattctcttggcgatcctggcatgcgtgtcttatgcgaaactctccagcacccaggatgtaacatacgccgtctgtggctgggccggtgcgggttaagtcacgaatgctgttttgacatatctcttgtactctccagtaaccagaagttggtggaactagatctttcagataacgcccttggggactttggaatccgcctgctgtgcgttggtttgaaacacctgctgtgtaacctaaagaagctgtggctggttaactctgggctgacatctgtatgttgttcagctctgtcgagtgtcctgagtaccaatcaaaatctgacccatctttatctgcgggggaacacactcggcgataagggtatcaagctcctctgcgaagggcttctgcacccagactgtaagttgcaggtgctagaattagataattgcaatcttacctcgcattgttgttgggacctttctactttgctgaccagtagtcagtccctgagaaagctcagtctcggcaataacgaccttggagacctgggcgtgatgatgttctgtgaagtcctgaagcagcagagctgtctcctccagaacctggggttgagtgaaatgtactttaactacgagactaagtcagcactggagaccctgcaggaggagaagcctgaacttaccgtggtgtttgaacccagttggtag

SEQ ID NO: 44968 - DNA, 2940 bp, Artificial Sequence
  derived and/or modified sequence
atgaagatggccagcacccggtgcaagctggcccggtacctggaggatctggaggacgtggacttaaaaaaatttaaaatgcacctggaggattacccaccacagaaaggatgcatccccctgcctcgaggacagacagagaaggccgatcatgtggatttggcgacgttgatgatcgactttaacggggaggaaaaagcctgggctatggcagtatggatatttgccgccatcaatcgtagggatctgtatgagaaggcgaagagagatgaaccgaagtggggatccgacaatgcaagggttagcaacccaaccgtgatctgtcaggaggactcgatcgaagaagaatggatgggccttcttgagtatctctcaaggatttccatatgcaagatgaagaaggactacaggaagaaatatcgcaagtacgtgcgcagccgcttccagtgcatcgaggatcgcaacgcacgactcggagagtcagtctcactgaacaaaaggtacactcgacttcggctgatcaaagagcatcgcagtcaacaggagagggaacaagaactgctcgcaataggcaagacaaaaacgtgcgagtctccagtgagcccaattaaaatggaactcctattcgacccagacgatgaacacagcgaaccggttcacactgtggtgtttcagggggctgcaggaatcggaaaaaccatcctcgcacgaaaaatgatgttggattgggcttccggaacgctgtaccaggatagattcgactatttattttacatccactgtagggaggtttctcttgtgacccaacgtagcctgggtgacctgattatgtcatgctgcccagatccaaacccacccattcacaaaatagtgaggaagcctagtagaatcctgtttctgatggacggcttcgacgaactgcagggagccttcgatgagcacattggccccttatgtaccgactggcaaaaggcagagcgcggcgacatactactgtcttctctcattcgcaagaaactcctacctgaggcctctttgctgataactacccggccagttgctcttgaaaaacttcagcacctcctcgaccacccacgccacgtggaaatcctggggttctccgaggcaaaaaggaaggaatacttctttaaatacttcagtgacgaggctcaagctagagcagctttttccctgatacaggagaatgaggtgctgtttacgatgtgtttcatcccactagtttgctggattgtgtgcactggcctgaagcagcaaatggaatcaggaaaatcattggcgcagacctccaagactactaccgcagtatacgtcttttttctgtcaagcctgctccagccgagaggggggagtcaggaacacggcctgtgcgcccatctttggggtttatgttctctcgctgcagacgggatctggaatcagaagattctattcgaagagtcggatctacgcaaccacgggctccagaaagccgatgtgtccgccttcctgcgcatgaatctttttcagaaggaggttgactgcgaaaagttttactcattcatccatatgaccttccaggagttcttcgcagcaatgtactacctcctggaggaggagaaggagggccggaccaacgtccccggcagcaggttgaaactgcccagtcgagatgtaaccgtcttactggaaaactatgggaaattcgaaaagggttacttaatctttgtagtgaggttcctcttcggtttagtcaaccaggaaaggacatcttatctcgaaaagaaactgagttgcaagattagccagcagatccgcctcgaactgcttaaatggattgaggttaaagccaaagccaaaaaactgcaaatccagccatctcagttagagctgttctactgcctttacgagatgcaggaggaggactttgtccagcgtgcaatggactacttcccaaagatagaaattaatctttcaacccgcatggaccacatggtcagcagcttctgtatagagaattgccacagggttgaaagcctctcacttggcttcttgcataacatgcccaaggaggaagaagaggaggagaaggaagggcggcacctggacatggtgcagtgcgtgctgcccagtagtagccacgctgcctgcagtcatggcctagtgaattcgcacttgacatcctccttttgccgaggcctgttcagcgtcctgtccacgtcacagtctctcactgagcttgatctgagcgataattccttaggtgaccctggcatgcgcgtgctgtgcgagacactgcaacaccctggttgtaatatcaggaggctgtggttgggccggtgcggcctttcgcacgagtgttgctttgatatttccttggtgctttctagtaatcaaaagttggtggaattagatctgagtgacaacgcactgggagatttcggtatccggcttctgtgtgtaggcctaaaacatctcctgtgtaatctgaagaagttatggcttgtgaattccggcctgaccagcgtgtgctgctctgctctatcttccgtgctgtcaaccaatcagaacctcactcatctgtatttacggggtaatacactgggggataagggtatcaagctgctgtgcgagggcctgttgcacccagattgcaaactgcaagtgctcgagctcgataattgcaacctcacctcccactgctgctgggacttgagtacgttgctcacttcctcacagtccctgcgcaagcttagcctgggcaacaatgacctcggggatcttggggttatgatgttctgcgaagtgttgaagcaacagtcatgcctgttacagaatctgggcctgtctgagatgtacttcaactacgaaacaaagtctgccttggaaacccttcaggaggaaaagcctgaattgaccgtggtgtttgagccttcttggtag

SEQ ID NO: 44969 - DNA, 3996 bp, Artificial Sequence
  derived and/or modified sequence
gatgaggaaactgaagttgaggaatagtgaagagtttgtccaatgtcatagccccgtaatcaacgggacaaaaattttcttgctgatgggtcaagatggcatcgtgaagtggttgttcaccgtaaactgtaatacaatcctgtttatggatttgtttgcatatttttccctccatagggaaacctttcttccatggctcaggacacactcctggatcgagccaacaggagaactttctggtaagcatttggctaacttttttttttttgagatggagtcttgctgtgtcgcctaggctggagtgcagtggcgtgatcttggctcactgcagcctccacttcccgggttcaatcaattctcctacctcaacttcctgagtagctgggattacaggcgcccgccaccacacccggctcatttttgtacttttagtagagacacagttttgccatgttggccaggctggtcttgaattcctcagctcaggtgatctgcctgccttggcctctcaaagtgctgggattacaggcgtgagccactgtgcccggccttggctaacttttcaaaattaaagattttgacttgttacagtcatgtgacatttttttctttctgtttgctgagtttttgataatttatatctctcaaagtggagactttaaaaaagactcatccgtgtgccgtgttcactgcctggtatcttagtgtggaccgaagcctaaggaccctgaaaacagctgcagatgaagatggcaagcacccgctgcaagctggccaggtacctggaggacctggaggatgtggacttgaagaaatttaagatgcacttagaggactatcctccccagaagggctgcatccccctcccgaggggtcagacagagaaggcagaccatgtggatctagccacgctaatgatcgacttcaatggggaggagaaggcgtgggccatggccgtgtggatcttcgctgcgatcaacaggagagacctttatgagaaagcaaaaagagatgagccgaagtggggttcagataatgcacgtgtttcgaatcccactgtgatatgccaggaagacagcattgaagaggagtggatgggtttactggagtacctttcgagaatctctatttgtaaaatgaagaaagattaccgtaagaagtacagaaagtacgtgagaagcagattccagtgcattgaagacaggaatgcccgtctgggtgagagtgtgagcctcaacaaacgctacacacgactgcgtctcatcaaggagcaccggagccagcaggagagggagcaggagcttctggccatcggcaagaccaagacgtgtgagagccccgtgagtcccattaagatggagttgctgtttgaccccgatgatgagcattctgagcctgtgcacaccgtggtgttccagggggcggcagggattgggaaaacaatcctggccaggaagatgatgttggactgggcgtcggggacactctaccaagacaggtttgactatctgttctatatccactgtcgagaggtgagccttgtgacacagaggagcctgggggacctgatcatgagctgctgccccgacccaaacccacccatccacaagatcgtgagaaaaccctccagaatcctcttcctcatggacggcttcgatgagctgcaaggtgcctttgacgagcacataggaccgctctgcactgactggcagaaggccgagcggggagacattctcctgagcagcctcatcagaaagaagctgcttcccgaggcctctctgctcatcaccacgagacctgtggccctggagaaactgcagcacttgctggaccatcctcggcatgtggagatcctgggtttctccgaggccaaaaggaaagagtacttcttcaagtacttctctgatgaggcccaagccagggcagccttcagtctgattcaggagaacgaggtcctcttcaccatgtgcttcatccccctggtctgctggatcgtgtgcactggactgaaacagcagatggagagtggcaagagccttgcccagacatccaagaccaccaccgcggtgtacgtcttcttcctttccagtttgctgcagccccggggagggagccaggagcacggcctctgcgcccacctctgggggctctgctctttggctgcagatggaatctggaaccagaaaatcctgtttgaggagtccgacctcaggaatcatggactgcagaaggcggatgtgtctgctttcctgaggatgaacctgttccaaaaggaagtggactgcgagaagttctacagcttcatccacatgactttccaggagttctttgccgccatgtactacctgctggaagaggaaaaggaaggaaggacgaacgttccagggagtcgtttgaagcttcccagccgagacgtgacagtccttctggaaaactatggcaaattcgaaaaggggtatttgatttttgttgtacgtttcctctttggcctggtaaaccaggagaggacctcctacttggagaagaaattaagttgcaagatctctcagcaaatcaggctggagctgctgaaatggattgaagtgaaagccaaagctaaaaagctgcagatccagcccagccagctggaattgttctactgtttgtacgagatgcaggaggaggacttcgtgcaaagggccatggactatttccccaagattgagatcaatctctccaccagaatggaccacatggtttcttccttttgcattgagaactgtcatcgggtggagtcactgtccctggggtttctccataacatgcccaaggaggaagaggaggaggaaaaggaaggccgacaccttgatatggtgcagtgtgtcctcccaagctcctctcatgctgcctgttctcatggattggtgaacagccacctcacttccagtttttgccggggcctcttttcagttctgagcaccagccagagtctaactgaattggacctcagtgacaattctctgggggacccagggatgagagtgttgtgtgaaacgctccagcatcctggctgtaacattcggagattgtggttggggcgctgtggcctctcgcatgagtgctgcttcgacatctccttggtcctcagcagcaaccagaagctggtggagctggacctgagtgacaacgccctcggtgacttcggaatcagacttctgtgtgtgggactgaagcacctgttgtgcaatctgaagaagctctggttggtgaattctggccttacgtcagtctgttgttcagctttgtcctcggtactcagcactaatcagaatctcacgcacctttacctgcgaggcaacactctcggagacaaggggatcaaactactctgtgagggactcttgcaccccgactgcaagcttcaggtgttggaattagacaactgcaacctcacgtcacactgctgctgggatctttccacacttctgacctccagccagagcctgcgaaagctgagcctgggcaacaatgacctgggcgacctgggggtcatgatgttctgtgaagtgctgaaacagcagagctgcctcctgcagaacctggggttgtctgaaatgtatttcaattatgagacaaaaagtgcgttagaaacacttcaagaagaaaagcctgagctgaccgtcgtctttgagccttcttggtaggagtggaaacggggctgccagacgccagtgttctccggtccctccagctgggggccctcaggtggagagagctgcgatccatccaggccaagaccacagctctgtgatccttccggtggagtgtcggagaagagagcttgccgacgatgccttcctgtgcagagcttgggcatctcctttacgccagggtgaggaagacaccaggacaatgacagcatcgggtgttgttgtcatcacagcgcctcagttagaggatgttcctcttggtgacctcatgtaattagctcattcaataaagcactttctttatttt

SEQ ID NO: 44970 - DNA, 4318 bp, Artificial Sequence
  derived and/or modified sequence
gcatttcctctctagctgttcctgaggctggcatctggatgaggaaactgaagttgaggaatagtgaagagtttgtccaatgtcatagccccgtaatcaacgggacaaaaattttcttgctgatgggtcaagatggcatcgtgaagtggttgttcaccgtaaactgtaatacaatcctgtttatggatttgtttgcatatttttccctccatagggaaacctttcttccatggctcaggacacactcctggatcgagccaacaggagaactttctggtaagcatttggctaacttttttttttttgagatggagtcttgctgtgtcgcctaggctggagtgcagtggcgtgatcttggctcactgcagcctccacttcccgggttcaatcaattctcctacctcaacttcctgagtagctgggattacaggcgcccgccaccacacccggctcatttttgtacttttagtagagacacagttttgccatgttggccaggctggtcttgaattcctcagctcaggtgatctgcctgccttggcctctcaaagtgctgggattacaggcgtgagccactgtgcccggccttggctaacttttcaaaattaaagattttgacttgttacagtcatgtgacatttttttctttctgtttgctgagtttttgataatttatatctctcaaagtggagactttaaaaaagactcatccgtgtgccgtgttcactgcctggtatcttagtgtggaccgaagcctaaggaccctgaaaacagctgcagatgaagatggcaagcacccgctgcaagctggccaggtacctggaggacctggaggatgtggacttgaagaaatttaagatgcacttagaggactatcctccccagaagggctgcatccccctcccgaggggtcagacagagaaggcagaccatgtggatctagccacgctaatgatcgacttcaatggggaggagaaggcgtgggccatggccgtgtggatcttcgctgcgatcaacaggagagacctttatgagaaagcaaaaagagatgagccgaagtggggttcagataatgcacgtgtttcgaatcccactgtgatatgccaggaagacagcattgaagaggagtggatgggtttactggagtacctttcgagaatctctatttgtaaaatgaagaaagattaccgtaagaagtacagaaagtacgtgagaagcagattccagtgcattgaagacaggaatgcccgtctgggtgagagtgtgagcctcaacaaacgctacacacgactgcgtctcatcaaggagcaccggagccagcaggagagggagcaggagcttctggccatcggcaagaccaagacgtgtgagagccccgtgagtcccattaagatggagttgctgtttgaccccgatgatgagcattctgagcctgtgcacaccgtggtgttccagggggcggcagggattgggaaaacaatcctggccaggaagatgatgttggactgggcgtcggggacactctaccaagacaggtttgactatctgttctatatccactgtcgagaggtgagccttgtgacacagaggagcctgggggacctgatcatgagctgctgccccgacccaaacccacccatccacaagatcgtgagaaaaccctccagaatcctcttcctcatggacggcttcgatgagctgcaaggtgcctttgacgagcacataggaccgctctgcactgactggcagaaggccgagcggggagacattctcctgagcagcctcatcagaaagaagctgcttcccgaggcctctctgctcatcaccacgagacctgtggccctggagaaactgcagcacttgctggaccatcctcggcatgtggagatcctgggtttctccgaggccaaaaggaaagagtacttcttcaagtacttctctgatgaggcccaagccagggcagccttcagtctgattcaggagaacgaggtcctcttcaccatgtgcttcatccccctggtctgctggatcgtgtgcactggactgaaacagcagatggagagtggcaagagccttgcccagacatccaagaccaccaccgcggtgtacgtcttcttcctttccagtttgctgcagccccggggagggagccaggagcacggcctctgcgcccacctctgggggctctgctctttggctgcagatggaatctggaaccagaaaatcctgtttgaggagtccgacctcaggaatcatggactgcagaaggcggatgtgtctgctttcctgaggatgaacctgttccaaaaggaagtggactgcgagaagttctacagcttcatccacatgactttccaggagttctttgccgccatgtactacctgctggaagaggaaaaggaaggaaggacgaacgttccagggagtcgtttgaagcttcccagccgagacgtgacagtccttctggaaaactatggcaaattcgaaaaggggtatttgatttttgttgtacgtttcctctttggcctggtaaaccaggagaggacctcctacttggagaagaaattaagttgcaagatctctcagcaaatcaggctggagctgctgaaatggattgaagtgaaagccaaagctaaaaagctgcagatccagcccagccagctggaattgttctactgtttgtacgagatgcaggaggaggacttcgtgcaaagggccatggactatttccccaagattgagatcaatctctccaccagaatggaccacatggtttcttccttttgcattgagaactgtcatcgggtggagtcactgtccctggggtttctccataacatgcccaaggaggaagaggaggaggaaaaggaaggccgacaccttgatatggtgcagtgtgtcctcccaagctcctctcatgctgcctgttctcatggattggtgaacagccacctcacttccagtttttgccggggcctcttttcagttctgagcaccagccagagtctaactgaattggacctcagtgacaattctctgggggacccagggatgagagtgttgtgtgaaacgctccagcatcctggctgtaacattcggagattgtggttggggcgctgtggcctctcgcatgagtgctgcttcgacatctccttggtcctcagcagcaaccagaagctggtggagctggacctgagtgacaacgccctcggtgacttcggaatcagacttctgtgtgtgggactgaagcacctgttgtgcaatctgaagaagctctggttggtgaattctggccttacgtcagtctgttgttcagctttgtcctcggtactcagcactaatcagaatctcacgcacctttacctgcgaggcaacactctcggagacaaggggatcaaactactctgtgagggactcttgcaccccgactgcaagcttcaggtgttggaattagacaactgcaacctcacgtcacactgctgctgggatctttccacacttctgacctccagccagagcctgcgaaagctgagcctgggcaacaatgacctgggcgacctgggggtcatgatgttctgtgaagtgctgaaacagcagagctgcctcctgcagaacctggggttgtctgaaatgtatttcaattatgagacaaaaagtgcgttagaaacacttcaagaagaaaagcctgagctgaccgtcgtctttgagccttcttggtaggagtggaaacggggctgccagacgccagtgttctccggtccctccagctgggggccctcaggtggagagagctgcgatccatccaggccaagaccacagctctgtgatccttccggtggagtgtcggagaagagagcttgccgacgatgccttcctgtgcagagcttgggcatctcctttacgccagggtgaggaagacaccaggacaatgacagcatcgggtgttgttgtcatcacagcgcctcagttagaggatgttcctcttggtgacctcatgtaattagctcattcaataaagcactttctttatttttctcttctctgtctaactttctttttcctatcttttttcttctttgttctgtttacttttgctcatatcatcattcccgctatctttctattaactgaccataacacagaactagttgactatatattatgttgaaattttatggcagctatttatttatttaaattttttgtaacagttttgttttctaataagaaaaatccatgctttttgtagctggttgaaaattcaggaatatgtaaaactttttggtatttaattaaattgattccttttcttaatttt

SEQ ID NO: 44971 - DNA, 2940 bp, Artificial Sequence
  derived and/or modified sequence
atgaagatggcaagtacacgatgcaaactcgctagatatctggaagatttagaagatgtggatttaaaaaagttcaaaatgcatttggaagattatccccctcagaagggttgtattccattgccccgtgggcagacagaaaaagctgaccacgtggacttggcaacgctcatgattgattttaatggagaagaaaaggcctgggccatggctgtctggatattcgcagctatcaataggcgggacttgtatgagaaggctaagcgggatgagccaaagtggggatcggacaacgctcgtgtgtctaatccgacagtgatctgccaggaagattccatcgaggaagagtggatggggctccttgaatatctaagtcgcatctccatctgcaagatgaagaaagactatcggaagaaataccggaagtatgtgaggtcaaggtttcagtgcattgaggatagaaacgcccgacttggagagagcgtgtcgctgaacaagcgctacaccaggctgagattgatcaaagaacatcggtctcagcaggagagagaacaggaactgctcgcaattggcaaaactaaaacttgtgagtctccggtgtcccccattaagatggagctgctgtttgacccagatgacgagcacagcgagccggtgcataccgtcgtgttccagggcgctgctggtataggtaagaccattctggcccgaaagatgatgctggactgggcctccggaacgctctatcaggataggttcgactacttattctacatccattgtagggaagtgtctctggtgacgcagagaagcttgggtgatctcatcatgtcctgttgtccagacccaaatccccctatccacaagattgtacggaagccctcccgaattctttttctaatggatggctttgacgagcttcaaggcgctttcgacgagcacatcggcccactctgcacagattggcaaaaggcagagaggggtgatattcttctcagctccttgattcgaaagaaactcctgcctgaggcaagcctgctgatcacgacgaggcctgtcgccctcgagaaactgcagcatctgttggaccatcccagacatgtggaaattctggggttcagcgaagccaagcggaaggagtatttctttaaatatttttccgatgaagcccaggctagagctgccttcagcctcatccaagaaaatgaagtcctctttactatgtgttttatacccctcgtatgctggattgtgtgtacaggcctaaaacagcagatggagtctgggaagtcgctggcacagacatctaagactaccaccgccgtgtatgtgttctttctaagctcactgcttcaacctagagggggatctcaggagcatggcttatgcgcccacctctggggattatgttctttagccgcagacgggatttggaatcagaaaatcctctttgaagagagcgacctgaggaatcacgggctgcagaaggccgatgtgtccgcgtttttgaggatgaacttatttcagaaagaagtagactgcgagaagttttacagctttatacatatgacttttcaagagttctttgccgcaatgtactaccttctcgaagaggagaaagaggggcgtacaaatgtacccggttctcgtttgaaactgccttccagagacgtcactgtactcctggaaaactacggcaagttcgaaaaaggctacctaatcttcgtagtgagatttctgtttgggctcgtcaatcaggaaaggacaagctatttagaaaagaaactcagctgcaaaatcagccagcaaattaggcttgagcttctgaaatggattgaggtgaaagcaaaggctaagaagctgcagatccagccatcccagctggagcttttctactgtctttacgagatgcaggaggaggacttcgtacagagagcaatggattattttcctaaaattgaaataaacttatctactagaatggatcatatggtgagctctttctgcattgagaattgccaccgggttgagtctctgtcgctcggattcttgcataacatgccaaaggaagaggaggaggaagaaaaagagggcagacatctcgacatggtccagtgcgtgcttcccagttcctctcacgccgcttgttcacatgggctggtgaacagtcacctcacatcctctttttgcagaggtctattttccgtattgtcaacatctcaatctctgacagagctcgacctctcggacaacagtctcggtgatcccggtatgcgagtgttatgtgaaaccctgcagcatcctggttgtaatatacgcaggctttggttgggtaggtgtggtctctctcatgagtgctgttttgatatttcccttgtgcttagctccaatcagaagctcgtggaacttgacctcagtgacaacgctctgggggatttcggaatccgccttctttgtgtggggcttaagcatctgctgtgtaacttaaagaagctgtggctggtcaattcgggtttgaccagtgtctgttgtagcgcactctcaagcgtgctgtctacaaatcagaatctgacccatctttatctgagaggtaatacattgggtgacaaaggtatcaagctcctgtgcgaggggctactacacccagattgcaagctgcaagtgttggaactggacaattgtaatctgacttctcattgttgctgggatctgtctacactgctgacgtcttcccagagcctccgtaaactttcactggggaataacgatttgggggacctcggggtcatgatgttctgcgaagttcttaaacagcagagttgccttctgcagaatctaggtctaagtgaaatgtacttcaattacgaaactaaatctgcgttggaaacacttcaagaggagaagccggagcttaccgtggtgtttgaaccttcttggtag

SEQ ID NO: 44972 - DNA, 2940 bp, Artificial Sequence
  derived and/or modified sequence
atgaagatggccagcacaagatgtaagctggccagatacctggaggacctggaggatgtcgatctgaagaaattcaagatgcatttagaggattatcctccccaaaaggggtgcatcccactgcctcgcggtcaaacagagaaggcagatcacgtagacttggccaccctgatgatcgactttaatggcgaggagaaggcttgggccatggcagtgtggatttttgccgcaatcaatcgacgtgacctgtatgagaaggccaaaagggatgagcctaaatgggggtcggataatgcaagagttagtaatccaacggtgatctgtcaggaggactccattgaagaggagtggatgggtctcctggaatacctgtcacgcatctccatctgcaagatgaaaaaagattatcgcaaaaaataccggaagtatgtgcgcagcaggtttcaatgtatagaggacaggaacgcccgtcttggtgaatccgtctctctgaacaaacggtacactcgcttacgactgatcaaggaacaccgttcacagcaagaacgggaacaggaactgctcgccatagggaagaccaagacatgtgagagcccagtgtctccaattaagatggagctcctttttgaccccgacgacgagcactctgagccggttcacacagtcgtctttcaaggggctgctgggattggtaagacgattctggcgaggaagatgatgctagattgggcgagtggcaccctgtaccaggaccgctttgactacttgttttatatacactgcagagaggtgagtttggtcacccagcgctcccttggagatttgattatgtcttgttgtcccgatcccaatccccctatacacaaaatagtccggaagccatcccggatcctgtttctgatggacggctttgacgagctacagggggctttcgatgagcacattgggcctctgtgcaccgactggcagaaggcagaacgcggagatatcctgctgagtagcctgattaggaaaaaattgttacccgaggcttccctcctgatcacgacccgccctgtagccctcgaaaaactgcagcaccttctcgatcaccccaggcacgtcgaaatccttggattctctgaagcaaaacgtaaggagtatttttttaagtatttctccgacgaagcacaggctcgagccgcattctccctcatccaggagaatgaggtcctgttcaccatgtgcttcattcctctggtgtgttggatcgtgtgcactggactcaagcaacagatggaatccggtaaatctttggcgcagacctccaagactaccaccgcggtgtatgtttttttcctgtcgagcctgcttcagcctcgcggtggcagccaagagcatggcctgtgcgcacacctgtgggggctgtgctccctggctgccgatggcatctggaatcaaaagatcctgttcgaggagtccgatctcaggaaccatgggttacagaaagccgacgtatctgcatttctgaggatgaacctgtttcagaaggaggtggactgcgagaagttttattctttcattcacatgacattccaggaatttttcgccgctatgtattacctcctggaggaggaaaaggaggggcgaaccaatgtgccaggctcaagactgaagctgccatctagggatgtaaccgtactgctcgagaactatgggaagttcgagaaaggatatttgatctttgtggtgcgcttcctcttcggtttggttaaccaggagcgcacttcctatctggagaagaagctgtcatgtaaaatttcccagcagatccggctggagctgcttaaatggattgaggtcaaagccaaagcgaaaaagctccaaattcagccatcacagctcgagttattctactgcctgtacgagatgcaagaggaggattttgtgcagagagccatggactactttccgaagattgaaattaatctgagtacacgaatggatcatatggtgagctccttctgcatagaaaattgccatagggtggaaagcctgagtctgggattcctccacaacatgcctaaggaagaagaggaggaagagaaagaaggcaggcatctggatatggttcagtgcgtgttaccatcttcttcccatgccgcttgtagccacggcctggtcaatagtcatctgactagctccttctgcagaggactgttttcagtgctctcgacctcgcagagtctgaccgaacttgatttgtctgacaacagtttaggggatcccggaatgagggttctgtgcgagacgctccagcatcctggttgcaatatccgccgtctctggctcggtagatgtggcttgtctcatgagtgctgcttcgacatctccctggtcttatcgtcaaatcagaagctcgtcgaactagacctgtccgacaacgctctgggcgactttgggatccgactcctctgcgttgggcttaagcacctcctctgtaatctgaaaaagctgtggctggtcaattcgggtctcacatccgtgtgttgcagcgccctgtcatcagttttgtcgacaaaccagaacctgacacacctctatctacgcggtaatactctgggcgataaaggaatcaaactactttgcgaagggctcctgcacccggactgcaagctgcaggtgctcgaactggacaactgcaacctgacgagtcattgctgctgggatctgagtaccctgctgacttctagtcaaagcctgaggaagttgagcttgggaaacaatgacctaggcgacctgggggtgatgatgttctgcgaagtgcttaagcagcagtcctgcctgctgcaaaacttggggctctccgaaatgtactttaactacgagacaaagagcgctctcgagacattgcaggaggagaagcctgagctcaccgtcgtgtttgagccaagttggtag

SEQ ID NO: 44973 - DNA, 2940 bp, Artificial Sequence
  derived and/or modified sequence
atgaagatggccagcaccagatgcaagctggccagatacctggaggacctggaggacgtggacctgaagaagttcaagatgcacctggaggactaccccccccagaagggctgcatccccctgcccagaggccagaccgagaaggccgaccacgtggacctggccaccctgatgatcgacttcaacggcgaggagaaggcctgggccatggccgtgtggatcttcgccgccatcaacagaagagacctgtacgagaaggccaagagagacgagcccaagtggggcagcgacaacgccagagtgagcaaccccaccgtgatctgccaggaggacagcatcgaggaggagtggatgggcctgctggagtacctgagcagaatcagcatctgcaagatgaagaaggactacagaaagaagtacagaaagtacgtgagaagcagattccagtgcatcgaggacagaaacgccagactgggcgagagcgtgagcctgaacaagagatacaccagactgagactgatcaaggagcacagaagccagcaggagagagagcaggagctgctggccatcggcaagaccaagacctgcgagagccccgtgagccccatcaagatggagctgctgttcgaccccgacgacgagcacagcgagcccgtgcacaccgtggtgttccagggcgccgccggcatcggcaagaccatcctggccagaaagatgatgctggactgggccagcggcaccctgtaccaggacagattcgactacctgttctacatccactgcagagaggtgagcctggtgacccagagaagcctgggcgacctgatcatgagctgctgccccgaccccaacccccccatccacaagatcgtgagaaagcccagcagaatcctgttcctgatggacggcttcgacgagctgcagggcgccttcgacgagcacatcggccccctgtgcaccgactggcagaaggccgagagaggcgacatcctgctgagcagcctgatcagaaagaagctgctgcccgaggccagcctgctgatcaccaccagacccgtggccctggagaagctgcagcacctgctggaccaccccagacacgtggagatcctgggcttcagcgaggccaagagaaaggagtacttcttcaagtacttcagcgacgaggcccaggccagagccgccttcagcctgatccaggagaacgaggtgctgttcaccatgtgcttcatccccctggtgtgctggatcgtgtgcaccggcctgaagcagcagatggagagcggcaagagcctggcccagaccagcaagaccaccaccgccgtgtacgtgttcttcctgagcagcctgctgcagcccagaggcggcagccaggagcacggcctgtgcgcccacctgtggggcctgtgcagcctggccgccgacggcatctggaaccagaagatcctgttcgaggagagcgacctgagaaaccacggcctgcagaaggccgacgtgagcgccttcctgagaatgaacctgttccagaaggaggtggactgcgagaagttctacagcttcatccacatgaccttccaggagttcttcgccgccatgtactacctgctggaggaggagaaggagggcagaaccaacgtgcccggcagcagactgaagctgcccagcagagacgtgaccgtgctgctggagaactacggcaagttcgagaagggctacctgatcttcgtggtgagattcctgttcggcctggtgaaccaggagagaaccagctacctggagaagaagctgagctgcaagatcagccagcagatcagactggagctgctgaagtggatcgaggtgaaggccaaggccaagaagctgcagatccagcccagccagctggagctgttctactgcctgtacgagatgcaggaggaggacttcgtgcagagagccatggactacttccccaagatcgagatcaacctgagcaccagaatggaccacatggtgagcagcttctgcatcgagaactgccacagagtggagagcctgagcctgggcttcctgcacaacatgcccaaggaggaggaggaggaggagaaggagggcagacacctggacatggtgcagtgcgtgctgcccagcagcagccacgccgcctgcagccacggcctggtgaacagccacctgaccagcagcttctgcagaggcctgttcagcgtgctgagcaccagccagagcctgaccgagctggacctgagcgacaacagcctgggcgaccccggcatgagagtgctgtgcgagaccctgcagcaccccggctgcaacatcagaagactgtggctgggcagatgcggcctgagccacgagtgctgcttcgacatcagcctggtgctgagcagcaaccagaagctggtggagctggacctgagcgacaacgccctgggcgacttcggcatcagactgctgtgcgtgggcctgaagcacctgctgtgcaacctgaagaagctgtggctggtgaacagcggcctgaccagcgtgtgctgcagcgccctgagcagcgtgctgagcaccaaccagaacctgacccacctgtacctgagaggcaacaccctgggcgacaagggcatcaagctgctgtgcgagggcctgctgcaccccgactgcaagctgcaggtgctggagctggacaactgcaacctgaccagccactgctgctgggacctgagcaccctgctgaccagcagccagagcctgagaaagctgagcctgggcaacaacgacctgggcgacctgggcgtgatgatgttctgcgaggtgctgaagcagcagagctgcctgctgcagaacctgggcctgagcgagatgtacttcaactacgagaccaagagcgccctggagaccctgcaggaggagaagcccgagctgaccgtggtgttcgagcccagctggtag

SEQ ID NO: 44974 - protein, 3925 aa, Artificial Sequence
  derived and/or modified sequence
MPGERPRGAPPPTMTGDLQPRQVASSPGHPSQPPLEDNTPATRTTKGAREAGGQAQAMELPEAQPRQARDGELKPPSLRGQAPSSTPGKRGSPQTPPGRSPLQAPSRLAGRAEGSPPQRYILGIASSRTKPTLDETPENPQLEAAQLPEVDTPQGPGTGAPLRPGLPRTEAQPAAEELGFHRCFQEPPSSFTSTNYTSPSATPRPPAPGPPQSRGTSPLQPGSYPEYQASGADSWPPAAENSFPGANFGVPPAEPEPIPKGSRPGGSPRGVSFQFPFPALHGASTKPFPADVAGHAFTNGPLVFAFHQPQGAWPEEAVGTGPAYPLPTQPAPSPLPCYQGQPGGLNRHSDLSGALSSPGAAHSAPRPFSDSLHKSLTKILPERPPSAQDGLGSTRGPPSSLPQRHFPGQAYRASGVDTSPGPPDTELAAPGPPPARLPQLWDPTAAPYPTPPGGPLAATRSMFFNGQPSPGQRLCLPQSAPLPWPQVLPTARPSPHGMEMLSRLPFPAGGPEWQGGSQGALGTAGKTPGPREKLPAVRSSQGGSPALFTYNGMTDPGAQPLFFGVAQPQVSPHGTPSLPPPRVVGASPSESPLPSPATNTAGSTCSSLSPMSSSPANPSSEESQLPGPLGPSAFFHPPTHPQETGSPFPSPEPPHSLPTHYQPEPAKAFPFPADGLGAEGAFQCLEETPFPHEGPEVGRGGLQGFPRAPPPYPTHHFSLSSASLDQLDVLLTCRQCDRNYSSLAAFLAHRQFCGLLLARAKDGHQRSPGPPGLPSPPAAPRVPADAHAGLLSHAKTFLLAGDAQAEGKDDPLRTGFLPSLAATPFPLPASDLDMEDDAKLDSLITEALNGMEYQSDNPEIDSSFIDVFADEEPSGPRGPSSGHPLKSKAGVTPESKAPPPLPAATPDPQTPRPGDRGCPARGRPKTRSLGLAPTEADAPSQGRQQRRGKQLKLFRKDLDSGGAAEGSGSGGGGRASGLRPRRNDGLGERPPPRPRRPRTQAPGSRADPAPRVPRAAALPEETRSSRRRRLPPRKDPRKRKARGGAWGKELILKIVQQKNRLREYDFASESEEDEQPPPRGPGFRGRRGRGEKRKEVELTQGPREDEPQKPRKAARQEAGGDGAPANPEEPGGSRPGPGRSPQARGPSRSLETGAAAREGGPKCADRPSVAPKDPLQVPTNTETSEETRPSLDFPQEAKEPETAEESAPDSTEFTEALRSPPAACAGEMGASPGLLIPEQPPPSRHDTGTPKPSGSLANTAPHGSSPTPGVGSLLGGPGGTQAPVSHNSKDPPARQPGEFLAPVANPSSTACPKPSVLSSKISSFGCDPAGFNRDPLGVPVAKKGPQPYSSPHSELFLGPKDLAGCFLEELHPKPSARDAPPASSSCLCQDGEDAGSLEPQLPRSPPGTAETEPGRAASPPTLESSSLFPDLPVDRFDPPLYGSLSANRDSGLPFACADPPQKTVPSDPPYPSFLLLEEVSPMLPSHFPDLSGGKVLSKTCPPERTVVPGAAPSLPGKGSGCSVALMSHLSEDELEIQKLVTELESQLQRSKDTRGAPRELAEAESVGRVELGTGTEPPSQRRTCQATVPHEDTFSAADLTRVGESTAHREGAESAVATVEAVQGRPGGTWPCPASFHPGHAALLPCAQEDLVSGAPFSPRGANFHFQPVQKAGASKTGLCQAEGDSRPPQDVCLPEPSKQPGPQLDAGSLAKCSPDQELSFPKNKEAASSQESEDSLRLLPCEQRGGFLPEPGTADQPHRGAPAPEAFGSPAVHLAPDLAFQGDGAPPLDATWPFGASPSHAAQGHSAGRAGGHLHPTAGRPGFEGNEFAPAGASSLTAPRGREAWLVPVPSPACVSNTHPSRRSQDPALSPPIRQLQLPGPGVAKSKDGILGLQELTPAAQSPPRVNPSGLEGGTVEGGKVACGPAQGSPGGVQVTTLPAVAGHQLGLEADGHWGLLGQAEKTQGQGTANQLQPENGVSPGGTDNHASVNASPKTALTGPTEGAVLLEKCKGSRAAMSLQEEAEPTPSPPSPNRESLALALTAAHSRSGSEGRTPERASSPGLNKPLLATGDSPAPSVGDLAACAPSPTSAAHMPCSLGPLPREDPLTSPSRAQGGLGGQLPASPSCRDPPGPQQLLACSPAWAPLEEADGVQATTDTGAEDSPVAPPSLTTSPCDPKEALAGCLLQGEGSPLEDPSSWPPGSVSAVTCTHSGDTPKDSTLRIPEDSRKEKLWESPGRATSPPLAGAVSPSVAVRATGLSSTPTGDEAQAGRGLPGPDPQSRGAPPHTNPDRMPRGHSSYSPSNTARLGHREGQAVTAVPTEPPTLQGAGPDSPACLEGEMGTSSKEPEDPGTPETGRSGATKMPRVTCPSTGLGLGRTTAPSSTASDFQSDSPQSHRNASHQTPQGDPLGPQDLKQRSRGYKKKPASTENGQWKGQAPHGPVTCEVCAASFRSGPGLSRHKARKHRPHPGAPAEPSPAALPAQQPLEPLAQKCQPPRKKSHRVSGKERPNHSRGDPSHVTQPPPAQGSKEVLRAPGSPHSQQLHPPSPTEHEVDVKTPASKPRPDQAREDELHPKQAEKREGRRWRREPTVDSPSHSEGKSNKKRGKLRGRRLREESILPVSADVISDGRGSRPSPAMASYAASPSHCLSVEGGPEADGEQPPRLATLGPGVMEGAAETDQEALCAGETGAQKPPGDRMLCPGRMDGAALGEQPTGQKGASARGFWGPRETKALGVCKESGSEPAEDSSRAHSRSEEGVWEENTPPLGPLGFPETSSSPADSTTSSCLQGLPDNPDTQGGVQGPEGPTPDASGSSAKDPPSLFDDEVSFSQLFPPGGRLTRKRNPHVYGKRCEKPVLPLPTQPSFEEGGDPTLGPARLPTDLSDSSSLCLCHEDPWEDEDPAGLPESFLLDGFLNSRVPGIDPWAPGLSLWALEPSREAGAEKLPSHCPEDDRPEAIPELHMVPAAWRGLEMPAPADDSSSSLGDVSPEPPSLERERCDGGLPGNTHLLPLRATDFEVLSTKFEMQDLCFLGPFEDPVGLPGPSFLDFEGTASSQGPQSRRTEEAAGAGRAQGRGRPAKGRRASYKCKVCFQRFRSLGELDLHKLAHTPAPPPTCYMCVERRFGSRELLRGHLQERHAQSKAGPWACGMCLKEVADVWMYNEHLREHAVRFARRGQARRSLGDLPGGLEGSSAVAHLLNSITEPAPKHHRGKRSAGKAAGSPGDPWGQEGEAKKDSPGERAKPRARSTPSNPDGAATPDSASATALADAGSPGPPRTTPSPSPDPWAGGEPLLQATPVHEACKDPSRDCHHCGKRFPKPFKLQRHLAVHSPQRVYLCPRCPRVYPEHGELLAHLGGAHGLLERPELQHTPLYACELCATVMRIIKKSFACSSCNYTFAKKEQFDRHMNKHLRGGRQPFAFRGVRRPGAPGQKARALEGTLPSKRRRVAMPGSAPGPGEDRPPPRGSSPILSEGSLPALLHLCSEVAPSTTKGWPETLERPVDPVTHPIRGCELPSNHQECPPPSLSPFPAALADGRGDCALDGALERPENEASPGSPGPLLQQALPLGASLPRPGARGQDAEGKRAPLVFSGKRRAPGARGRCAPDHFQEDHLLQKEKEVSSSHMVSEGGPRGTFHKGSATKPAGCQSSSKDRSAASTPSKALKFPVHPRKAVGSLAPGELARGTENGMKPATPKAKPGPSSQGSGSPRPGTKTGGGSQPQPASGQLQSETATTPAKPSFPSRSPAPERLPARAQAKSCTKGPREAGEQGPHGSLGPKEKGESSTKRKKGQVPGPARSESVGSFGRAPSAPDKPPRTPRKQATPSRVLPTKPKPNSQNKPRPPPSEQRKAEPGHTQRKDRLGKAFPQGRPLLRPPKRGTAVHGAEPAEPHTHRTAEAQSDLLSQLFGQRLTGFKIPLKKDASE

SEQ ID NO: 44975 - DNA, 336 bp, Artificial Sequence
  derived and/or modified sequence
atggtgagcctgtgggtcgaggatacctttctgagcccaggattcggcttcgcccacgttgcctgctccgggttagggatgaagcaaaaaaggaaggccgcatcttccgaacccacaagcgaagtagcgctgggcggttctgcgggacccgtgcgcagccacctccaccccgaaggccttctatggtgtagcaggtgcttcttctctctgcgacccaaaggcaccgaacccccagggcggtccgcaggactgcaaggggcgacagagcggtccggctggacatccgttcaggctcaggcgcaagcctgcgaaaacctggtccccgctgccgtctag

SEQ ID NO: 44976 - DNA, 11778 bp, Artificial Sequence
  derived and/or modified sequence
atgcccggcgagagacccagaggcgcccccccccccaccatgaccggcgacctgcagcccagacaggtggccagcagccccggccaccccagccagccccccctggaggacaacacccccgccaccagaaccaccaagggcgccagagaggccggcggccaggcccaggccatggagctgcccgaggcccagcccagacaggccagagacggcgagctgaagccccccagcctgagaggccaggcccccagcagcacccccggcaagagaggcagcccccagaccccccccggcagaagccccctgcaggcccccagcagactggccggcagagccgagggcagccccccccagagatacatcctgggcatcgccagcagcagaaccaagcccaccctggacgagacccccgagaacccccagctggaggccgcccagctgcccgaggtggacaccccccagggccccggcaccggcgcccccctgagacccggcctgcccagaaccgaggcccagcccgccgccgaggagctgggcttccacagatgcttccaggagccccccagcagcttcaccagcaccaactacaccagccccagcgccacccccagaccccccgcccccggccccccccagagcagaggcaccagccccctgcagcccggcagctaccccgagtaccaggccagcggcgccgacagctggccccccgccgccgagaacagcttccccggcgccaacttcggcgtgccccccgccgagcccgagcccatccccaagggcagcagacccggcggcagccccagaggcgtgagcttccagttccccttccccgccctgcacggcgccagcaccaagcccttccccgccgacgtggccggccacgccttcaccaacggccccctggtgttcgccttccaccagccccagggcgcctggcccgaggaggccgtgggcaccggccccgcctaccccctgcccacccagcccgcccccagccccctgccctgctaccagggccagcccggcggcctgaacagacacagcgacctgagcggcgccctgagcagccccggcgccgcccacagcgcccccagacccttcagcgacagcctgcacaagagcctgaccaagatcctgcccgagagaccccccagcgcccaggacggcctgggcagcaccagaggcccccccagcagcctgccccagagacacttccccggccaggcctacagagccagcggcgtggacaccagccccggcccccccgacaccgagctggccgcccccggccccccccccgccagactgccccagctgtgggaccccaccgccgccccctaccccaccccccccggcggccccctggccgccaccagaagcatgttcttcaacggccagcccagccccggccagagactgtgcctgccccagagcgcccccctgccctggccccaggtgctgcccaccgccagacccagcccccacggcatggagatgctgagcagactgcccttccccgccggcggccccgagtggcagggcggcagccagggcgccctgggcaccgccggcaagacccccggccccagagagaagctgcccgccgtgagaagcagccagggcggcagccccgccctgttcacctacaacggcatgaccgaccccggcgcccagcccctgttcttcggcgtggcccagccccaggtgagcccccacggcacccccagcctgcccccccccagagtggtgggcgccagccccagcgagagccccctgcccagccccgccaccaacaccgccggcagcacctgcagcagcctgagccccatgagcagcagccccgccaaccccagcagcgaggagagccagctgcccggccccctgggccccagcgccttcttccacccccccacccacccccaggagaccggcagccccttccccagccccgagcccccccacagcctgcccacccactaccagcccgagcccgccaaggccttccccttccccgccgacggcctgggcgccgagggcgccttccagtgcctggaggagacccccttcccccacgagggccccgaggtgggcagaggcggcctgcagggcttccccagagccccccccccctaccccacccaccacttcagcctgagcagcgccagcctggaccagctggacgtgctgctgacctgcagacagtgcgacagaaactacagcagcctggccgccttcctggcccacagacagttctgcggcctgctgctggccagagccaaggacggccaccagagaagccccggcccccccggcctgcccagcccccccgccgcccccagagtgcccgccgacgcccacgccggcctgctgagccacgccaagaccttcctgctggccggcgacgcccaggccgagggcaaggacgaccccctgagaaccggcttcctgcccagcctggccgccacccccttccccctgcccgccagcgacctggacatggaggacgacgccaagctggacagcctgatcaccgaggccctgaacggcatggagtaccagagcgacaaccccgagatcgacagcagcttcatcgacgtgttcgccgacgaggagcccagcggccccagaggccccagcagcggccaccccctgaagagcaaggccggcgtgacccccgagagcaaggcccccccccccctgcccgccgccacccccgacccccagacccccagacccggcgacagaggctgccccgccagaggcagacccaagaccagaagcctgggcctggcccccaccgaggccgacgcccccagccagggcagacagcagagaagaggcaagcagctgaagctgttcagaaaggacctggacagcggcggcgccgccgagggcagcggcagcggcggcggcggcagagccagcggcctgagacccagaagaaacgacggcctgggcgagagacccccccccagacccagaagacccagaacccaggcccccggcagcagagccgaccccgcccccagagtgcccagagccgccgccctgcccgaggagaccagaagcagcagaagaagaagactgccccccagaaaggaccccagaaagagaaaggccagaggcggcgcctggggcaaggagctgatcctgaagatcgtgcagcagaagaacagactgagagagtacgacttcgccagcgagagcgaggaggacgagcagcccccccccagaggccccggcttcagaggcagaagaggcagaggcgagaagagaaaggaggtggagctgacccagggccccagagaggacgagccccagaagcccagaaaggccgccagacaggaggccggcggcgacggcgcccccgccaaccccgaggagcccggcggcagcagacccggccccggcagaagcccccaggccagaggccccagcagaagcctggagaccggcgccgccgccagagagggcggccccaagtgcgccgacagacccagcgtggcccccaaggaccccctgcaggtgcccaccaacaccgagaccagcgaggagaccagacccagcctggacttcccccaggaggccaaggagcccgagaccgccgaggagagcgcccccgacagcaccgagttcaccgaggccctgagaagcccccccgccgcctgcgccggcgagatgggcgccagccccggcctgctgatccccgagcagcccccccccagcagacacgacaccggcacccccaagcccagcggcagcctggccaacaccgccccccacggcagcagccccacccccggcgtgggcagcctgctgggcggccccggcggcacccaggcccccgtgagccacaacagcaaggacccccccgccagacagcccggcgagttcctggcccccgtggccaaccccagcagcaccgcctgccccaagcccagcgtgctgagcagcaagatcagcagcttcggctgcgaccccgccggcttcaacagagaccccctgggcgtgcccgtggccaagaagggcccccagccctacagcagcccccacagcgagctgttcctgggccccaaggacctggccggctgcttcctggaggagctgcaccccaagcccagcgccagagacgccccccccgccagcagcagctgcctgtgccaggacggcgaggacgccggcagcctggagccccagctgcccagaagcccccccggcaccgccgagaccgagcccggcagagccgccagcccccccaccctggagagcagcagcctgttccccgacctgcccgtggacagattcgacccccccctgtacggcagcctgagcgccaacagagacagcggcctgcccttcgcctgcgccgaccccccccagaagaccgtgcccagcgaccccccctaccccagcttcctgctgctggaggaggtgagccccatgctgcccagccacttccccgacctgagcggcggcaaggtgctgagcaagacctgcccccccgagagaaccgtggtgcccggcgccgcccccagcctgcccggcaagggcagcggctgcagcgtggccctgatgagccacctgagcgaggacgagctggagatccagaagctggtgaccgagctggagagccagctgcagagaagcaaggacaccagaggcgcccccagagagctggccgaggccgagagcgtgggcagagtggagctgggcaccggcaccgagccccccagccagagaagaacctgccaggccaccgtgccccacgaggacaccttcagcgccgccgacctgaccagagtgggcgagagcaccgcccacagagagggcgccgagagcgccgtggccaccgtggaggccgtgcagggcagacccggcggcacctggccctgccccgccagcttccaccccggccacgccgccctgctgccctgcgcccaggaggacctggtgagcggcgcccccttcagccccagaggcgccaacttccacttccagcccgtgcagaaggccggcgccagcaagaccggcctgtgccaggccgagggcgacagcagacccccccaggacgtgtgcctgcccgagcccagcaagcagcccggcccccagctggacgccggcagcctggccaagtgcagccccgaccaggagctgagcttccccaagaacaaggaggccgccagcagccaggagagcgaggacagcctgagactgctgccctgcgagcagagaggcggcttcctgcccgagcccggcaccgccgaccagccccacagaggcgcccccgcccccgaggccttcggcagccccgccgtgcacctggcccccgacctggccttccagggcgacggcgccccccccctggacgccacctggcccttcggcgccagccccagccacgccgcccagggccacagcgccggcagagccggcggccacctgcaccccaccgccggcagacccggcttcgagggcaacgagttcgcccccgccggcgccagcagcctgaccgcccccagaggcagagaggcctggctggtgcccgtgcccagccccgcctgcgtgagcaacacccaccccagcagaagaagccaggaccccgccctgagcccccccatcagacagctgcagctgcccggccccggcgtggccaagagcaaggacggcatcctgggcctgcaggagctgacccccgccgcccagagcccccccagagtgaaccccagcggcctggagggcggcaccgtggagggcggcaaggtggcctgcggccccgcccagggcagccccggcggcgtgcaggtgaccaccctgcccgccgtggccggccaccagctgggcctggaggccgacggccactggggcctgctgggccaggccgagaagacccagggccagggcaccgccaaccagctgcagcccgagaacggcgtgagccccggcggcaccgacaaccacgccagcgtgaacgccagccccaagaccgccctgaccggccccaccgagggcgccgtgctgctggagaagtgcaagggcagcagagccgccatgagcctgcaggaggaggccgagcccacccccagcccccccagccccaacagagagagcctggccctggccctgaccgccgcccacagcagaagcggcagcgagggcagaacccccgagagagccagcagccccggcctgaacaagcccctgctggccaccggcgacagccccgcccccagcgtgggcgacctggccgcctgcgcccccagccccaccagcgccgcccacatgccctgcagcctgggccccctgcccagagaggaccccctgaccagccccagcagagcccagggcggcctgggcggccagctgcccgccagccccagctgcagagacccccccggcccccagcagctgctggcctgcagccccgcctgggcccccctggaggaggccgacggcgtgcaggccaccaccgacaccggcgccgaggacagccccgtggccccccccagcctgaccaccagcccctgcgaccccaaggaggccctggccggctgcctgctgcagggcgagggcagccccctggaggaccccagcagctggccccccggcagcgtgagcgccgtgacctgcacccacagcggcgacacccccaaggacagcaccctgagaatccccgaggacagcagaaaggagaagctgtgggagagccccggcagagccaccagcccccccctggccggcgccgtgagccccagcgtggccgtgagagccaccggcctgagcagcacccccaccggcgacgaggcccaggccggcagaggcctgcccggccccgacccccagagcagaggcgcccccccccacaccaaccccgacagaatgcccagaggccacagcagctacagccccagcaacaccgccagactgggccacagagagggccaggccgtgaccgccgtgcccaccgagccccccaccctgcagggcgccggccccgacagccccgcctgcctggagggcgagatgggcaccagcagcaaggagcccgaggaccccggcacccccgagaccggcagaagcggcgccaccaagatgcccagagtgacctgccccagcaccggcctgggcctgggcagaaccaccgcccccagcagcaccgccagcgacttccagagcgacagcccccagagccacagaaacgccagccaccagaccccccagggcgaccccctgggcccccaggacctgaagcagagaagcagaggctacaagaagaagcccgccagcaccgagaacggccagtggaagggccaggccccccacggccccgtgacctgcgaggtgtgcgccgccagcttcagaagcggccccggcctgagcagacacaaggccagaaagcacagaccccaccccggcgcccccgccgagcccagccccgccgccctgcccgcccagcagcccctggagcccctggcccagaagtgccagccccccagaaagaagagccacagagtgagcggcaaggagagacccaaccacagcagaggcgaccccagccacgtgacccagcccccccccgcccagggcagcaaggaggtgctgagagcccccggcagcccccacagccagcagctgcacccccccagccccaccgagcacgaggtggacgtgaagacccccgccagcaagcccagacccgaccaggccagagaggacgagctgcaccccaagcaggccgagaagagagagggcagaagatggagaagagagcccaccgtggacagccccagccacagcgagggcaagagcaacaagaagagaggcaagctgagaggcagaagactgagagaggagagcatcctgcccgtgagcgccgacgtgatcagcgacggcagaggcagcagacccagccccgccatggccagctacgccgccagccccagccactgcctgagcgtggagggcggccccgaggccgacggcgagcagccccccagactggccaccctgggccccggcgtgatggagggcgccgccgagaccgaccaggaggccctgtgcgccggcgagaccggcgcccagaagccccccggcgacagaatgctgtgccccggcagaatggacggcgccgccctgggcgagcagcccaccggccagaagggcgccagcgccagaggcttctggggccccagagagaccaaggccctgggcgtgtgcaaggagagcggcagcgagcccgccgaggacagcagcagagcccacagcagaagcgaggagggcgtgtgggaggagaacaccccccccctgggccccctgggcttccccgagaccagcagcagccccgccgacagcaccaccagcagctgcctgcagggcctgcccgacaaccccgacacccagggcggcgtgcagggccccgagggccccacccccgacgccagcggcagcagcgccaaggacccccccagcctgttcgacgacgaggtgagcttcagccagctgttcccccccggcggcagactgaccagaaagagaaacccccacgtgtacggcaagagatgcgagaagcccgtgctgcccctgcccacccagcccagcttcgaggagggcggcgaccccaccctgggccccgccagactgcccaccgacctgagcgacagcagcagcctgtgcctgtgccacgaggacccctgggaggacgaggaccccgccggcctgcccgagagcttcctgctggacggcttcctgaacagcagagtgcccggcatcgacccctgggcccccggcctgagcctgtgggccctggagcccagcagagaggccggcgccgagaagctgcccagccactgccccgaggacgacagacccgaggccatccccgagctgcacatggtgcccgccgcctggagaggcctggagatgcccgcccccgccgacgacagcagcagcagcctgggcgacgtgagccccgagccccccagcctggagagagagagatgcgacggcggcctgcccggcaacacccacctgctgcccctgagagccaccgacttcgaggtgctgagcaccaagttcgagatgcaggacctgtgcttcctgggccccttcgaggaccccgtgggcctgcccggccccagcttcctggacttcgagggcaccgccagcagccagggcccccagagcagaagaaccgaggaggccgccggcgccggcagagcccagggcagaggcagacccgccaagggcagaagagccagctacaagtgcaaggtgtgcttccagagattcagaagcctgggcgagctggacctgcacaagctggcccacacccccgcccccccccccacctgctacatgtgcgtggagagaagattcggcagcagagagctgctgagaggccacctgcaggagagacacgcccagagcaaggccggcccctgggcctgcggcatgtgcctgaaggaggtggccgacgtgtggatgtacaacgagcacctgagagagcacgccgtgagattcgccagaagaggccaggccagaagaagcctgggcgacctgcccggcggcctggagggcagcagcgccgtggcccacctgctgaacagcatcaccgagcccgcccccaagcaccacagaggcaagagaagcgccggcaaggccgccggcagccccggcgacccctggggccaggagggcgaggccaagaaggacagccccggcgagagagccaagcccagagccagaagcacccccagcaaccccgacggcgccgccacccccgacagcgccagcgccaccgccctggccgacgccggcagccccggcccccccagaaccacccccagccccagccccgacccctgggccggcggcgagcccctgctgcaggccacccccgtgcacgaggcctgcaaggaccccagcagagactgccaccactgcggcaagagattccccaagcccttcaagctgcagagacacctggccgtgcacagcccccagagagtgtacctgtgccccagatgccccagagtgtaccccgagcacggcgagctgctggcccacctgggcggcgcccacggcctgctggagagacccgagctgcagcacacccccctgtacgcctgcgagctgtgcgccaccgtgatgagaatcatcaagaagagcttcgcctgcagcagctgcaactacaccttcgccaagaaggagcagttcgacagacacatgaacaagcacctgagaggcggcagacagcccttcgccttcagaggcgtgagaagacccggcgcccccggccagaaggccagagccctggagggcaccctgcccagcaagagaagaagagtggccatgcccggcagcgcccccggccccggcgaggacagacccccccccagaggcagcagccccatcctgagcgagggcagcctgcccgccctgctgcacctgtgcagcgaggtggcccccagcaccaccaagggctggcccgagaccctggagagacccgtggaccccgtgacccaccccatcagaggctgcgagctgcccagcaaccaccaggagtgccccccccccagcctgagccccttccccgccgccctggccgacggcagaggcgactgcgccctggacggcgccctggagagacccgagaacgaggccagccccggcagccccggccccctgctgcagcaggccctgcccctgggcgccagcctgcccagacccggcgccagaggccaggacgccgagggcaagagagcccccctggtgttcagcggcaagagaagagcccccggcgccagaggcagatgcgcccccgaccacttccaggaggaccacctgctgcagaaggagaaggaggtgagcagcagccacatggtgagcgagggcggccccagaggcaccttccacaagggcagcgccaccaagcccgccggctgccagagcagcagcaaggacagaagcgccgccagcacccccagcaaggccctgaagttccccgtgcaccccagaaaggccgtgggcagcctggcccccggcgagctggccagaggcaccgagaacggcatgaagcccgccacccccaaggccaagcccggccccagcagccagggcagcggcagccccagacccggcaccaagaccggcggcggcagccagccccagcccgccagcggccagctgcagagcgagaccgccaccacccccgccaagcccagcttccccagcagaagccccgcccccgagagactgcccgccagagcccaggccaagagctgcaccaagggccccagagaggccggcgagcagggcccccacggcagcctgggccccaaggagaagggcgagagcagcaccaagagaaagaagggccaggtgcccggccccgccagaagcgagagcgtgggcagcttcggcagagcccccagcgcccccgacaagccccccagaacccccagaaagcaggccacccccagcagagtgctgcccaccaagcccaagcccaacagccagaacaagcccagacccccccccagcgagcagagaaaggccgagcccggccacacccagagaaaggacagactgggcaaggccttcccccagggcagacccctgctgagaccccccaagagaggcaccgccgtgcacggcgccgagcccgccgagccccacacccacagaaccgccgaggcccagagcgacctgctgagccagctgttcggccagagactgaccggcttcaagatccccctgaagaaggacgccagcgagtag

SEQ ID NO: 44977 - DNA, 11778 bp, Artificial Sequence
  derived and/or modified sequence
atgccgggcgagagaccaagaggggcgccacctcccaccatgactggggacctacagccgcgacaggtggcaagctcacctggacaccctagccagcctccactggaagacaatacgcccgctacacgcaccacaaaaggtgcccgggaagctggtggccaagcacaagccatggaactcccagaagcccagcctagacaggctagggacggcgagctgaagcccccttctctgcgcggtcaagcaccatcttctacacctggaaaacggggttcccctcaaaccccccccggccggagtccactgcaagcgccttctcggctcgccggtcgggcagaaggatcgccccctcagcggtatatccttgggatcgcaagctcccgaaccaagcctaccttagacgaaacacctgagaatccccagctggaagcagcccaacttcctgaggtagacaccccacagggacctgggaccggagctccactgcggcctgggttgccaaggacggaagcccagcctgccgctgaggagctgggattccataggtgcttccaggaaccaccctctagtttcacctccacaaattatacgagcccaagtgctactcctcgcccacctgcaccaggtccaccccagagcagggggacctctcccctgcagccagggtcttaccctgaataccaggcctcgggtgccgacagctggccgcccgctgccgagaactcgtttccgggagcgaactttggcgtgccacccgccgagccagaaccaatccccaagggctcccgccctggaggatcacccagaggcgtgagcttccagtttcccttccccgcactccacggggcaagcacaaagccttttccggccgacgtggccggccacgcatttacgaatggtccgctcgtattcgccttccatcaaccacagggcgcctggccagaagaggccgttggaaccggtcccgcctaccccctgccaacacaaccagcaccctcaccccttccatgttatcagggtcagcctgggggcctcaatcgccattccgacctgagcggtgccctaagctcccctggggctgcccatagcgctccaagaccgtttagcgattctctgcataagtcccttaccaagattctcccagagaggcccccctctgcacaggatggcttgggctccacccgcggccctccttccagcctaccccagagacactttcccggccaggcgtacagggcatcgggagttgatacctcccccggacccccagatactgagctcgcggctcccggaccccccccggcccgcctccctcagctttgggaccccacagcggcaccctaccccaccccccctggcggaccactggctgccactcgcagcatgtttttcaatgggcagccaagccctggccagaggctgtgcctcccccagagcgctccactgccgtggccacaggtgttgccgacagcgcgaccctcaccacacggcatggaaatgctcagccggctgcctttcccggccggcggcccagagtggcaggggggctctcaaggagctttgggcacggccggaaagactcctgggccacgtgaaaaactaccagccgtccgaagttctcaaggagggtcgccggccctattcacatacaacgggatgaccgatccgggagcccagccactgttttttggggtcgcccagcctcaggtatcgccccatggcactccaagtctcccccctcctcgggtggttggtgcaagccccagtgagtcccctcttccctctcctgcaaccaataccgctgggagcacatgtagctcattatcccccatgtcctccagccccgccaacccctcctccgaggaaagccaattgccaggaccattggggccaagcgcatttttccacccccctacccaccctcaagaaacgggatccccgttcccgagtcccgagcctcctcactccctgcctactcactaccagccagagcccgctaaagctttcccattccccgccgacgggctcggggctgaaggggcctttcagtgcctcgaggaaaccccgttcccgcacgaagggccagaggttggcaggggcggacttcagggatttccacgtgcacccccaccataccccactcatcacttctctctgagcagcgcctccctcgaccagctggacgtcctgctgacttgccgccagtgcgaccgaaactattctagcctggccgcgttcttggcccatcgtcagttctgtggactattgctagctagagctaaggacggtcatcagagatcccccgggcccccagggctcccctctcctccagcagccccacgggtgcccgcagatgcacacgcagggctgctgagccacgcaaagacttttctcctagccggggacgcccaggcagaaggaaaggatgatcctttgcgcaccggcttcctgccctcacttgcagcgacaccgtttcctctgcctgccagcgacttagacatggaggacgatgcaaagcttgatagcctcatcacggaggccctcaatggtatggaatatcagtcagataaccccgaaattgactcctccttcatcgatgtatttgcagacgaggaaccatccggccctagaggacctagcagcggacatcccctgaaatcaaaggcaggcgtaacaccagagagtaaggcacctcctccgctgccagctgccacgcccgaccctcagacaccacggcctggcgatagaggttgtcctgcaagggggcggccaaaaaccaggtcccttggactggcccctacggaggccgacgctccttcccagggcaggcaacagcgaaggggcaaacaattaaaattatttagaaaggacctcgacagtggtggggcagctgagggatccggttccggtggtggcggccgggcctccggactgcgtccacggcgcaatgatggcctgggcgaacgacccccccctagaccaagacgacctcggacccaggctcccgggtctcgggccgaccccgctccgcgggtgccccgagccgcagctctgcctgaggagacaagatcctcaaggaggcgccggctgccaccaaggaaagatccgcgcaagcgcaaggccagaggcggggcctgggggaaggagctgattctgaaaattgtacagcagaagaaccgtctgcgggaatacgattttgctagtgaatccgaggaagacgaacagcccccacctaggggtccgggctttcgcggaagaagaggcaggggagaaaagagaaaagaagtagagctgacacagggtcctcgggaggatgagccacagaaaccccgcaaagcggctcgtcaggaagcgggaggagacggagcacctgccaatcctgaagagcccggtggcagtaggccaggcccaggaaggtctcctcaagctcgcggtccatcccgatcactcgagaccggggctgccgcgagagagggcggacccaagtgcgctgatagaccttctgtcgcacctaaggatcctctgcaagtccccacgaacacagagacatccgaggaaacccgcccgtcattagacttccctcaggaagccaaggaacctgagacagcagaggagtcggctcccgatagcactgaatttacagaagccctcagaagtcccccggccgcctgtgctggggagatgggggccagccctggcttactgatacctgagcagcctccaccaagccggcacgatactgggacccctaagccctctggctcattggctaatactgctcctcatggaagctctcccactccgggcgtgggtagcctcttgggcggacctggaggcacccaagcaccagtatctcataatagtaaggatccccccgcgcggcagccgggggaatttctggccccagtcgcaaatcctagtagtactgcatgtccaaaacccagcgtactgtcctctaagattagttcctttggttgcgatcccgccggatttaatagggatcctctgggcgtacccgtcgcgaaaaagggcccccagccctactcgtcaccccactcggaattatttctcggcccaaaggatttagccggttgtttcttagaggagctgcatccaaagccgtccgctagggacgccccaccggctagctcctcatgcttatgccaggatggggaagacgcagggagtttggagccacagctgccacgatcaccccctgggacggcagagactgagcccgggcgggccgcgtcaccacctacactggaatcttccagcctgttccccgacctcccggtggacaggtttgacccacctttatacgggagcctttctgctaacagagacagtggcctaccattcgcatgtgccgacccccctcagaaaacggtcccgtctgaccccccctacccctcgtttcttttgctagaggaggtaagtcctatgttgccaagtcactttcccgacctgtcaggaggaaaggtgctgtccaaaacatgtcctcccgaacgcaccgtagtgccgggcgctgcgcccagtcttcccgggaagggttccgggtgcagtgtagctctgatgtcacacctctctgaggatgaattggagatacagaagctcgtcactgaactggaatcccaactgcagagatccaaggatactagaggagctcctcgggaattagccgaggccgaatcagtaggtagggtggaactcggtaccggcacagaacctccctctcaacggcgtacatgccaggccactgttccgcacgaggacacattctctgcggccgacctcaccagagtgggcgagtcaacggcacaccgggagggggccgagagcgctgttgcgacagtcgaggctgtgcagggcagaccgggcggcacctggccctgtccagcctctttccatcccgggcatgccgctcttctgccttgtgcccaggaagacctggtttctggcgccccgttctcgcctcgcggagccaattttcatttccaacctgtgcagaaggcaggcgccagtaaaacagggctgtgccaagcagagggagacagcagacctcctcaggacgtctgcctcccagagccctccaagcaaccaggacctcaactggacgcgggtagcctcgctaaatgtagtcctgatcaagagctgtcgttccctaagaataaggaagccgcctccagtcaggaaagcgaggacagcctgcgcttgctcccctgcgaacagcgcggaggttttctaccagaacccgggacggctgaccagcctcaccgcggggcaccggcgccagaagccttcgggtcaccagcagtgcacttagccccagacctcgctttccagggagacggtgcccccccgctagacgctacctggccttttggcgcatccccctcgcacgccgctcaggggcatagcgcaggccgtgcaggcggacatctgcaccccactgccggaaggcccgggttcgagggtaacgagttcgcacccgcaggagccagcagtctgaccgccccacgggggagggaggcgtggttggtgcctgtgcctagcccggcatgtgtaagcaacactcatcctagcaggaggagtcaggacccagcactgtcaccgcctatccgacagctgcaattgccgggtcccggagtcgcaaagagtaaggacggaattctgggactgcaggagctgaccccggctgcccagtcccccccgcgagtgaacccatcaggattggaagggggcacagtagagggcggcaaggtcgcctgcgggccagcccaaggctctcccgggggtgtacaagtgacgacgcttcctgcagtcgcagggcatcagctcggactagaggctgacggccattgggggctgctgggtcaggcagagaagacccagggacagggcaccgcgaaccaactgcaacctgagaatggcgtgtcaccaggtgggacggataaccatgcctctgtgaatgcatctccaaagaccgctctaacaggaccaactgagggggctgtcctgctcgagaaatgcaagggctctagggctgccatgagcctacaagaggaggctgaacctaccccatctcctccaagtcccaacagagaatccctcgcgctggcgcttactgccgcgcactctcgatcaggctctgaaggaaggacacctgagcgcgctagctcacccggcctgaataagccactcctcgccacaggggacagccctgccccaagcgtcggagaccttgctgcatgcgccccgtctcccacctctgcggctcatatgccgtgctctctcggccctttaccacgagaagacccgctgacctcgcctagcagggcccagggaggccttggcggccaactccccgcttctccaagctgtagggatcctccagggcctcagcagctgttggcatgttccccagcttgggcccccttagaggaagcagacggggtgcaggctacaacagacaccggtgccgaagattctcccgtggccccaccctcactgaccactagcccatgcgatccaaaagaggctctcgcaggatgccttttacagggagaagggagccccctcgaagaccccagctcctggccacccggctctgtgagcgctgtgacctgtacccattctggggacacgccaaaagattccacccttcgcattccagaggattcacggaaagaaaagctgtgggaaagtcctgggcgcgctacatcaccacccctggctggcgccgtaagcccgtccgtcgccgtgcgcgcgacaggtctatcgtccacaccaactggtgatgaagcccaggcaggcaggggtttgcccggtcccgacccacagagcagaggggcaccaccgcacacgaatccagatagaatgccccgcggtcattctagttacagcccttcaaacacggcacgattagggcacagagagggccaggcagtaactgctgtgccaactgagccgcctacactgcaaggtgccggcccggacagccctgcctgcctagagggcgaaatgggtactagctccaaggagcctgaagatccaggaactcccgagacgggcagaagcggtgcaaccaaaatgcctagggtcacttgcccgtctactggactggggttggggcgcacaactgctccctcttcaacagcctcggactttcagtccgattccccccagtcacatagaaatgcttcacaccagacgccccagggcgaccctctcggtccccaggacttaaaacagaggtctagaggttataaaaagaagccagcctccaccgaaaatggccagtggaaagggcaggctccccacggtccggtgacctgtgaggtatgcgcagcaagtttccgttccggaccagggctaagtcgccataaggcaagaaagcacagacctcacccaggtgcgccagccgagcccagtccagctgcactacccgcacagcaacccttggaaccgctggcgcagaaatgccagccgcctagaaaaaaaagccatcgggtgtcaggtaaggaaagacctaatcactcccggggcgacccatcccatgttacccagcccccccccgcacaggggtcaaaggaggtgctgagggcgcccggctcccctcattctcagcagctgcatcccccaagcccaacagaacatgaagtggacgtaaagactcctgcttctaaacctagaccagatcaggcccgggaggacgaactgcatcctaaacaggcagaaaaaagagagggccgccgctggcggcgtgaacccactgtagactcccctagtcattcggagggaaaaagcaataaaaaacgaggcaagctcagggggaggcggttgcgcgaggaaagcatcctgcccgtctccgcagacgtgataagtgatggcaggggatctagaccgtcaccagctatggctagctatgccgcgtcacccagccattgtctgagtgtggagggcgggcctgaggccgacggggaacagcctcctagacttgccactcttggccctggagtgatggagggcgcggcagagacagatcaggaggccctgtgcgctggcgaaaccggggcacagaagccacccggggatcggatgttatgcccaggccgcatggatggtgctgcattgggcgagcagcccaccggacaaaaaggcgcttccgccagaggcttttggggaccaagagagacgaaagcactcggggtctgcaaggagtccggcagcgaacccgcagaggattcttctcgtgcccacagcagaagcgaagagggtgtgtgggaagagaataccccccccctgggtcccctggggttccccgaaacctctagtagtcctgccgactcaacgaccagttcttgcctgcagggtctgcctgataatcccgacactcagggaggggtgcaaggtcccgaagggccaacacccgacgcttcagggagctctgcaaaggatccaccttcactgttcgacgacgaggtttcattctcccagcttttccctcccggtgggaggctgacacgcaagagaaacccccacgtttacggtaagcgctgcgaaaagcctgtgttaccgctgccaactcagccatcattcgaggagggcggagacccaacattaggtcccgcgcggctgcccacggacctctccgacagctccagcttgtgcctgtgtcatgaagacccttgggaggatgaggaccccgccggtcttcctgaatcatttctactggacgggttcttaaatagtcgagttcccggaattgacccttgggcccccggtctgtcactttgggccttggagcccagccgggaggcaggggcggaaaagcttcctagccattgcccagaggacgatagacccgaggccatcccagagttgcacatggttcccgccgcttggcggggtctagaaatgcctgcccctgcggacgacagttcgtctagtctcggagacgtgtctccagagccaccttctctggagagagagaggtgtgatggaggactgcccggcaacactcacctgctgccactccgggccactgacttcgaggtgttgtcgactaagttcgagatgcaagatctctgtttcctgggcccattcgaggatccagtgggattgccgggcccatccttcctcgattttgagggcaccgcgtccagtcagggcccccagtccaggaggacagaagaggcagccggggcggggagggcgcagggacgcggccggccggcgaaggggcgtagggcatcgtacaaatgcaaagtttgcttccagagatttcggagcctgggcgagcttgacttgcataaactggcacacactccagctccccctccaacttgctacatgtgtgtggaaagacgcttcggcagcagagagctactgcggggccacctgcaggaaagacatgcgcaaagcaaggccggaccatgggcttgcggtatgtgtctcaaagaggtggcggatgtctggatgtataacgagcatctgagagagcacgccgtgagatttgcacgccgaggccaggctagacgaagcctgggcgatctacctgggggactcgagggctcatctgccgtagcccacctgttgaacagtattacagaacccgcgcctaagcaccacaggggaaaacgctcagccggaaaagctgcgggatccccaggtgatccctggggtcaagagggcgaggcgaaaaaggattcccccggggaaagagccaaaccaagagccagaagtactccgtccaaccctgacggagctgcaacccccgactctgcctctgcgactgcacttgcagacgcgggatctcccggaccaccgcggaccacgcctagtcctagtccagacccatgggcaggaggtgaacctcttcttcaggcaactcccgttcacgaagcttgtaaagatccttcaagagactgccaccattgcggaaagaggttccctaagcctttcaaactccagcggcatctcgcagtacactcaccacaaagagtgtacctttgccctcgctgcccacgtgtataccctgaacatggagaactactcgctcatctgggcggagctcatggtctgttagagcggcctgagctgcagcacacccccttgtacgcatgcgaactgtgtgccaccgtgatgaggattatcaaaaaaagcttcgcatgcagttcatgcaactacaccttcgctaagaaagagcagtttgaccggcacatgaataaacacctaagagggggtcgccaaccattcgcattcagaggagtacggcgtcctggagcacctggtcagaaagcccgagccttggagggaactctccccagtaagcgccgtcgagtcgccatgcctggcagcgcaccggggcctggtgaggacaggcccccccctcgagggtcatccccaatactgagcgagggcagtctcccagccctgctgcatttatgctctgaagttgctccctctacaaccaagggttggccagagacactagaacggcctgtggaccctgttacgcaccctataagaggatgtgaactaccaagtaaccaccaagagtgccctccccccagcctgagtccgttcccggctgcgctagcagacggtaggggcgactgtgccttggacggagccctggaaagaccagagaacgaagcatcccctggcagccctggcccgctcctgcagcaggctcttcccctcggcgcctccttgccccgcccaggagctagaggacaagatgccgagggcaagcgggcccctctggtgttttcaggcaagagaagggccccaggcgcacgaggtcggtgcgcgcctgatcatttccaggaagaccacctcctgcagaaggagaaagaggtgtcaagcagccacatggtgtctgaaggaggtcccagagggactttccacaaggggtccgccactaagcccgcggggtgtcagagcagcagtaaggatcgctcagctgccagcaccccttccaaggccctgaagttcccggtccatcccaggaaagccgtggggagcctggcccctggcgagctggccagggggaccgagaacggcatgaagccagcaacccctaaggcaaaaccaggcccctcctctcaaggatccggcagtccgcgcccggggactaaaactggcggcggcagtcagccccagccagccagcggtcagcttcagtcagaaaccgctaccacacccgctaagccatcctttccatccaggagcccggcccccgagcgcctgcctgcaagggctcaggctaaatcctgtactaagggtccccgggaggctggggaacaggggccgcatggcagtctcgggcctaaggagaagggtgagtcgtctaccaagcggaaaaaagggcaggttcccggcccagctaggtccgagtctgtcggttcctttggccgcgcccccagcgcaccagacaagccacctcgcacaccgcggaagcaggcgactccttcacgggtccttcccacaaaacctaagcctaacagtcagaacaaaccaaggccccccccctctgagcagaggaaagccgagccgggccatacacagagaaaggaccgactcggaaaagctttcccgcagggccggccattgcttaggccacctaagagagggacggccgttcacggagccgagcctgctgaaccccacactcatcgcaccgccgaggcacagtccgatttattgtcccagctgttcgggcagcgcctgacgggtttcaagatccccctcaaaaaggacgcttctgaatag

SEQ ID NO: 44978 - DNA, 11778 bp, Artificial Sequence
  derived and/or modified sequence
atgcctggagagcggcccaggggggcccccccacccaccatgactggagacctgcagccccggcaggtggccagcagccctggccaccccagccagccccccctggaggacaacaccccagccaccaggaccaccaagggggcccgggaggccggcggccaggcccaggccatggagctgcctgaggcccagccccggcaggccagagatggagagctgaagccacccagcctgcggggccaggcccccagcagcaccccaggcaagaggggcagcccccagaccccacctggccgcagccccctgcaggcccccagccggctggccggccgggcagagggcagccccccccagcgctacatcctgggcatcgccagcagcaggaccaagcccaccctggatgagaccccagagaacccccagctggaggccgcccagctgcctgaggtggacaccccccagggccctggcaccggggcccccctgcggcccggcctgcccaggacagaggcccagcctgctgctgaggagctgggcttccaccgctgcttccaggagccccccagcagcttcaccagcaccaactacaccagccccagcgccaccccccggcccccagcccctggccccccccagagccggggcaccagccccctgcagcccggcagctacccagagtaccaggccagcggggctgacagctggcccccagctgctgagaacagcttccctggggccaactttggagtgcccccagctgagcctgagcccatccccaagggcagcaggcctgggggcagcccccggggcgtgtccttccagttccccttccctgccctgcatggagccagcaccaagcccttcccagcagatgtggccggccacgccttcaccaacggccccctggtgtttgccttccaccagccccagggcgcctggccagaggaggccgtgggcaccggccctgcctaccccctgcccacccagcctgcccccagccccctgccctgctaccagggccagcccggcggcctgaacagacacagcgacctgagcggggccctgagcagccctggggccgcccacagcgccccccggcccttcagtgacagcctgcacaagagcctgaccaagatcctgcctgagcggccccccagcgcccaggacggcctgggcagcacccggggcccccccagcagcctgccccagaggcacttccctggccaggcctaccgggccagcggcgtggacaccagccctggccccccagacacagagctggccgcccctggccccccaccagcccggctgccccagctgtgggaccccacagctgccccctaccccaccccacctgggggccccctggccgccaccaggtccatgttcttcaacggccagcccagccctggccagaggctgtgcctgccccagagcgcccccctgccctggccccaggtgctgcccacagcccggcccagcccccacggcatggagatgctgagccggctgcccttccctgctgggggccctgagtggcagggcggcagccagggcgccctgggcacagctgggaagaccccaggcccccgggagaagctgcctgctgtgcgcagcagccagggcggcagccctgccctcttcacctacaacggcatgacagaccccggggcccagcccctcttctttggagtggcccagccccaggtgagcccccacggcacccccagcctgcccccaccccgggtggtgggcgccagccccagcgagagccccctgcccagccctgccaccaacacagctggcagcacctgcagcagcctgagccccatgagcagcagccctgccaaccccagcagcgaggagagccagctgcccggccccctgggccccagcgccttcttccacccccccacccacccccaggagaccggcagccccttccccagccctgagcccccccacagcctgcccacccactaccagcctgagcccgccaaggccttccccttcccagcagatggcctgggcgctgagggcgccttccagtgcctggaggagacccccttcccccatgagggccctgaggtgggccggggcggcctgcagggcttcccccgggcccccccaccctaccccacccaccacttcagcctgagcagcgccagcctggaccagctggatgtgctgctgacctgccggcagtgtgacaggaactacagcagcctggccgccttcctggcccaccggcagttctgtggcctgctgctggcccgggccaaggatggccaccagaggagccctggccccccaggcctgcccagccccccagctgccccccgggtgcctgcagatgcccacgccggcctgctgagccacgccaagaccttcctgctggccggagatgcccaggccgagggcaaggatgaccccctgaggacaggcttcctgcccagcctggccgccacccccttccccctgcctgccagtgacctggacatggaggatgatgccaagctggacagcctcatcacagaggccctgaatggcatggagtaccagagcgacaaccctgagattgacagcagcttcattgatgtgtttgctgatgaggagcccagcggcccccggggccccagcagcggccaccccctgaagagcaaggccggcgtgaccccagagagcaaggcccccccacccctgcctgctgccaccccagacccccagacccccaggcctggggaccggggctgcccagcccggggccggcccaagaccaggagcctgggcctggcccccacagaagcagatgcccccagccagggccggcagcagaggcggggcaagcagctgaagctgttcaggaaggacctggacagcggcggcgctgctgagggcagcggcagcggcggcggcggccgggccagcggcctgcggcccaggagaaatgatggcctgggggagcggcccccaccccggccccggcggcccaggacccaggcccctggcagcagagctgaccctgccccccgggtgcccagggctgctgccctgcctgaggagaccaggagcagcagaagaagaaggctgccccccaggaaggaccccaggaagaggaaggcccggggcggggcctggggcaaggagctgatcctgaagatcgtgcagcagaagaaccggctgcgggagtatgactttgccagcgagagcgaggaggatgagcagcccccaccccggggccctggcttccggggccggcggggccgcggggagaagaggaaggaggtggagctgacccagggcccccgggaggatgagccccagaagcccaggaaggccgcccggcaggaggccggaggagatggagccccagccaaccctgaggagcccggcggcagcaggcctggccctggccgcagcccccaggcccggggccccagccgcagcctggagaccggggctgctgcccgggagggcggccccaagtgtgccgaccggcccagcgtggcccccaaggaccccctgcaggtgcccaccaacacagagaccagcgaggagacccggcccagcctggacttcccccaggaggccaaggagcctgagacagctgaggagagcgccccagacagcacagagttcacagaggccctgcggagccccccagctgcctgtgccggggagatgggcgccagccctggcctgctgatccctgagcagcccccacccagcagacatgacaccggcacccccaagcccagcggcagcctggccaacacagccccccacggcagcagccccaccccaggagtgggcagcctgctgggcggccctgggggcacccaggcccctgtgagccacaacagcaaggaccccccagcccggcagcccggggagttcctggcccctgtggccaaccccagcagcacagcctgccccaagcccagcgtgctgagcagcaagatcagcagctttggctgtgaccctgctggcttcaacagagaccccctgggcgtgcctgtggccaagaagggcccccagccctacagcagcccccacagcgagctgttcctgggccccaaggacctggccggctgcttcctggaggagctgcaccccaagcccagcgccagagatgcccccccagccagcagcagctgcctgtgccaggatggagaagatgctggcagcctggagccccagctgcccaggagccccccaggcacagctgagacagagcccggccgggccgccagcccccccaccctggagagcagcagcctcttcccagacctgcctgtggacagatttgacccccccctgtatggcagcctgagcgccaacagagacagcggcctgccctttgcctgtgccgaccccccccagaagacagtgcccagcgaccccccctaccccagcttcctgctgctggaggaggtgagccccatgctgcccagccacttcccagacctgagcggcggcaaggtgctgagcaagacctgccccccagagaggacagtggtgcctggggccgcccccagcctgcctggaaaaggaagtggctgcagcgtggccctgatgagccacctgtctgaagatgagctggagatccagaagctggtgacagagctggagagccagctgcagaggagcaaggacaccaggggggccccccgggagctggccgaggccgagagcgtgggccgggtggagctgggcactggaacagagccccccagccagaggaggacctgccaggccaccgtgccccatgaggacaccttctctgctgctgacctgaccagggtgggggagagcacagcccaccgggagggcgctgagagcgctgtggccaccgtggaggccgtgcagggccggcctgggggcacctggccctgcccagccagcttccaccctggccatgctgccctgctgccctgtgcccaggaggacctggtgtctggggcccccttcagccccaggggggccaacttccacttccagcctgtgcagaaggccggggccagcaagacaggcctgtgccaggccgagggggacagccggcccccccaggatgtgtgcctgcctgagcccagcaagcagcccggcccccagctggatgctggcagcctggccaagtgcagcccagaccaggagctgtccttccccaagaacaaggaggccgccagcagccaggagagcgaggacagcctgcggctgctgccctgtgagcagaggggcggcttcctgcctgagcccggcacagctgaccagccccacagaggagccccagcccctgaggccttcggcagccctgctgtgcacctggccccagacctggccttccagggagatggagccccacccctggatgccacctggccctttggagccagccccagccacgccgcccagggccacagcgctggccgggccggcggccacctgcaccccacagctggccggcccggctttgagggcaatgaatttgccccagctggggccagcagcctgacagccccccggggccgggaggcctggctggtgcctgtgcccagccctgcctgtgtgagcaacacccaccccagcagaagaagccaggaccctgccctgagcccccccatccggcagctgcagctgcccggccctggggtggccaagagcaaggatggcatcctgggcctgcaggagctgaccccagctgcccagagccccccccgggtgaaccccagcggcctggagggcggcaccgtggagggcggcaaggtggcctgtggccctgcccagggcagccctggaggagtgcaggtgaccaccctgcctgctgtggccggccaccagctgggcctggaggctgatggccactggggcctgctgggccaggccgagaagacccagggccagggcacagccaaccagctgcagccagaaaatggagtgtccccaggcggcacagacaaccacgcctctgtgaatgccagccccaagacagccctgaccggccccacagagggcgctgtgctgctggagaagtgcaagggcagccgggccgccatgagcctgcaggaggaggccgagcccacccccagcccccccagccccaaccgggagagcctggccctggccctgacagctgcccacagccgcagcggcagcgagggccgcaccccagagcgggccagcagccctggcctgaacaagcccctgctggccactggagacagccctgcccccagcgtgggggacctggccgcctgtgcccccagccccaccagcgctgcccacatgccctgcagcctgggccccctgccccgggaggaccccctgaccagccccagccgggcccagggcggcctgggcggccagctgcctgccagccccagctgccgggaccccccaggcccccagcagctgctggcctgcagccctgcctgggcccccctggaggaggctgatggagtgcaggccaccacagacacaggagctgaggacagccctgtggccccacccagcctgaccaccagcccctgtgaccccaaggaggccctggccggctgcctgctgcagggcgagggcagccccctggaggaccccagctcctggcccccaggctctgtgtctgctgtgacctgcacccacagcggggacacccccaaggacagcaccctgcgcatccctgaggacagcaggaaggagaagctgtgggagagccctggccgggccaccagcccccccctggccggggctgtgagccccagcgtggccgtgcgggccaccggcctgagcagcacccccactggagatgaggcccaggccggccggggcctgcccggccctgacccccagagcagaggagccccaccccacaccaacccagacaggatgccccggggccacagcagctacagccccagcaacacagcccggctgggccaccgggagggccaggccgtgacagctgtgcccacagagccccccaccctgcagggcgccggccctgacagccctgcctgcctggagggggagatgggcaccagcagcaaggagcctgaggaccccggcaccccagagaccggccgcagcggggccaccaagatgccccgggtgacctgccccagcacaggcctgggcctgggccgcaccacagcccccagcagcacagccagtgacttccagagcgacagcccccagagccacagaaatgccagccaccagaccccccagggcgaccccctgggcccccaggacctgaagcagaggagccggggctacaagaagaagccagccagcacagaaaatggccagtggaagggccaggcccctcatggccctgtgacctgtgaggtgtgtgccgccagcttccgcagcggccctggcctgagccgccacaaggccaggaagcaccggccccaccctggggccccagctgagcccagccctgctgccctgcctgcccagcagcccctggagcccctggcccagaagtgccagccccccaggaagaagagccaccgggtgtctgggaaggagcggcccaaccacagcagaggagaccccagccacgtgacccagcccccaccagcccagggcagcaaggaggtgctgcgggcccctggcagcccccacagccagcagctgcacccccccagccccacagaacatgaggtggatgtgaagaccccagccagcaagcccaggccagaccaggccagagaagatgagctgcaccccaagcaggccgagaagcgggagggccgccgctggaggcgggagcccaccgtggacagccccagccacagcgagggcaagagcaacaagaagaggggcaagctgcggggccgccgcctgcgggaggagagcatcctgcctgtgtctgcagatgtgatcagtgatggccggggcagccggcccagccctgccatggccagctatgctgccagccccagccactgcctgtctgtggagggcggccctgaggctgatggagagcagcccccccggctggccaccctgggccctggggtgatggagggcgctgctgagacagaccaggaggccctgtgtgccggggagactggagcccagaagcccccaggggacaggatgctgtgccccggccgcatggatggagctgccctgggggagcagcccaccggccagaagggggccagcgcccggggcttctggggcccccgggagaccaaggccctgggcgtgtgcaaggagagcggcagcgagcctgctgaggacagcagccgggcccacagccgctctgaggagggcgtgtgggaggagaacaccccacccctgggccccctgggcttccctgagaccagcagcagccctgctgacagcaccaccagcagctgcctgcagggcctgcctgacaacccagacacccagggcggcgtgcagggccctgagggccccaccccagatgccagcggcagcagcgccaaggacccccccagcctgtttgatgatgaggtgtccttcagccagctgttccccccaggcggccgcctgaccaggaagaggaacccccacgtgtatggcaagagatgtgagaagcctgtgctgcccctgcccacccagcccagctttgaggagggcggggaccccaccctgggccctgcccggctgcccacagacctgagtgacagcagcagcctgtgcctgtgccacgaggacccctgggaggatgaagatcctgctggcctgcctgagagcttcctgctggatggcttcctgaacagccgggtgcccggcatcgacccctgggcccctggcctgagcctgtgggccctggagcccagccgggaggccggggctgagaagctgcccagccactgcccagaagatgacaggcctgaggccatccctgagctgcacatggtgcctgctgcctggaggggcctggagatgcctgccccagcagatgacagcagcagcagcctgggagatgtgtccccagagccccccagcctggagcgggagcgctgtgatggcggcctgcccggcaacacccacctgctgcccctgcgggccacagactttgaggtgctgagcaccaagtttgagatgcaggacctgtgcttcctgggcccctttgaagatcctgtgggcctgcccggccccagcttcctggactttgagggcacagccagcagccagggcccccagagcagaagaacagaggaggccgccggggccggccgggcccagggccggggccgcccagccaagggcagaagagccagctacaagtgcaaggtgtgcttccagcgcttccgcagcctgggggagctggacctgcacaagctggcccacaccccagcccccccacccacctgctacatgtgtgtggagaggagatttggcagccgggagctgctgcggggccacctgcaggagagacatgcccagagcaaggccggcccctgggcctgtggcatgtgcctgaaggaggtggctgatgtgtggatgtacaatgagcacctgcgggagcacgctgtgcgctttgcccggcggggccaggcccggcgcagcctgggggacctgcccggcggcctggagggcagcagcgctgtggcccacctgctgaacagcatcacagagcccgcccccaagcaccaccggggcaagaggtctgctgggaaggctgctggcagccctggggacccctggggccaggagggggaggccaagaaggacagccctggagagcgggccaagccccgggcccggagcacccccagcaacccagatggagctgccaccccagacagcgccagcgccacagccctggctgatgctggcagccctggcccccccaggaccacccccagccccagcccagacccctgggccggcggggagcccctgctgcaggccacccctgtgcatgaggcctgcaaggaccccagccgggactgccaccactgtgggaagcgcttccccaagcccttcaagctgcagaggcacctggccgtgcacagcccccagagggtgtacctgtgcccccgctgcccccgggtgtacccagagcacggggagctgctggcccacctgggcggggcccacggcctgctggagaggcctgagctgcagcacacccccctgtatgcctgtgagctgtgtgccaccgtgatgaggatcatcaagaagagctttgcctgcagcagctgcaactacacctttgccaagaaggagcagtttgacagacacatgaacaagcacctgcggggcggccggcagccctttgccttccggggcgtgcggcggcctggggcccctggccagaaggcccgggccctggagggcaccctgcccagcaagagaagaagagtggccatgcctggcagcgcccctggccctggagaggaccggcccccaccccggggcagcagccccatcctgtctgagggcagcctgcctgccctgctgcacctgtgcagcgaggtggcccccagcaccaccaagggctggccagagaccctggagaggcctgtggaccctgtgacccaccccatccggggctgtgagctgcccagcaaccaccaggagtgccccccacccagcctgagccccttccctgctgccctggctgatggccgcggggactgtgccctggatggagccctggagaggccagaaaatgaggccagccctggcagccctggccccctgctgcagcaggccctgcccctgggcgccagcctgcccaggcctggggcccggggccaggatgctgagggcaagagggcccccctggtgttttctgggaagaggcgggcccctggggcccggggccgctgtgccccagaccacttccaggaggaccacctgctgcagaaggagaaggaggtgagcagcagccacatggtgtctgagggcggcccccggggcaccttccacaagggcagcgccaccaagccagctggctgccagagcagcagcaaggacagatctgctgccagcacccccagcaaggccctgaagtttcctgtgcaccccaggaaggctgtgggcagcctggcccctggagagctggcccggggcacagaaaatggcatgaagccagccacccccaaggccaagccaggccccagcagccagggcagcggcagcccccggcccggcaccaagacaggaggcggcagccagccccagcctgccagcggccagctgcagagcgagacagccaccaccccagccaagcccagcttccccagccgcagccctgcccctgagcggctgcctgcccgggcccaggccaagagctgcaccaagggcccccgggaggccggggagcagggcccccacggcagcctgggccccaaggagaagggggagagcagcaccaagaggaagaagggccaggtgcccggccctgcccggtctgagagcgtgggcagctttggccgggcccccagcgccccagacaagccacccaggacccccaggaagcaggccacccccagccgggtgctgcccaccaagcccaagcccaacagccagaacaagccccggcccccaccttctgagcagaggaaggccgagcccggccacacccagaggaaggaccggctgggcaaggccttcccccagggccggcccctgctgcggccccccaagaggggcacagctgtgcacggggctgagcctgctgagccccacacccacaggacagctgaggcccagagcgacctgctgagccagctgtttggccagaggctgaccggcttcaagatccccctgaagaaggatgccagcgagtag

SEQ ID NO: 44979 - DNA, 11778 bp, Artificial Sequence
  derived and/or modified sequence
atgcccggcgagcggccccggggcgcccccccccccaccatgaccggagatctgcagcctcgccaagttgccagctccccgggacacccatcccagccccccttggaggacaacactccagccactagaactacaaagggggcgagagaagccggggggcaggcccaggcaatggagctgcctgaagcccagcctaggcaggcacgagatggggaattgaaacctccaagtctgagaggccaggcaccatcatcaactccggggaagaggggaagtccccagactccacccggaagatcacccctgcaggccccatccaggctggctggtagagctgaaggatccccgcctcagaggtatattctgggaattgcctcctccaggaccaaaccaaccctggacgagacgccggagaatccacagcttgaagctgcccagctgcctgaagtcgacacccctcagggacccggtacaggggcccccctgcggcctgggctccctcgtaccgaagcgcaaccagccgctgaggaactcgggttccatcgctgtttccaggagccaccatcctctttcacatccactaactacacttcgccttctgcaacgcctaggccgcccgcgcctggccctcctcaaagtcgtggcacgagcccactgcagcctggatcctacccagagtaccaagcatcaggcgcagacagttggcctccggccgccgagaatagctttcccggagctaactttggggtgccacccgcagaaccggagcctattccaaaggggtctagaccaggagggtcacctagaggagtgtcctttcaatttccatttccagcattgcacggcgcttctaccaaacccttccccgccgacgtggccggccacgcttttacgaacggaccccttgtttttgcgtttcatcagccccagggggcatggcccgaggaagctgtcggcacaggtccggcatatccattacccacccagcccgcaccaagcccgttaccgtgttatcagggccaaccaggaggcctcaaccgacattccgacttatctggggccctgtcttccccaggggccgcgcattccgcgcccagacccttctcggattccctccacaaaagtttgactaagatcctccccgaacgccctccgtcagcccaggacggcttggggagtacacggggccccccctccagtcttccccagcggcactttccagggcaggcatatcgggctagcggggtggacacttctccaggcccccctgatactgagttagctgctccaggacctcccccagcgagattgccacaactttgggatccaaccgcggcgccctatccaaccccacccggaggtcccctagctgccacacgcagcatgttcttcaatggccagccgtcgccggggcagagactatgcctgccgcagtcagcgcccttaccttggccccaagtgctgcctaccgctcggccttccccacacggaatggagatgttgtccagattaccctttcctgcggggggacctgagtggcagggggggagccagggtgccttgggcacggcaggaaagactccaggtcctagggaaaagctgcccgccgtaagatcctctcagggcggctcccctgcactgtttacgtacaacggcatgaccgatccaggagcccagcctctgttcttcggggtagcccaaccccaggtgtcaccccatgggaccccttctctgccccctccacgggtcgtgggcgcctcgccgtcagagagcccattgcccagcccagccacaaacacagcagggtcgacctgctcctctctttctccaatgtcatcttcccctgctaacccctcttcggaggagagccaacttcccgggcccttgggtccctctgcattctttcatccccccactcatcctcaggaaacgggctcacccttcccaagccccgaacctccccactctttgcctacacactatcaacccgagcccgccaaagcttttccgttcccggcagatggactaggggcagagggggcttttcagtgcttggaggagaccccctttcctcacgagggaccggaggtcggcaggggagggctgcagggctttccccgcgctcctcctccttaccctacccaccacttctctctctctagtgcctccctggatcagctcgacgtgctactcacctgccgccaatgcgaccgcaattattcaagcctggccgcttttctagctcaccggcagttttgtggactattgctagccagagctaaggatgggcatcagaggagccccggaccccctggactgcccagcccccccgcagccccacgcgtccccgcggacgcacacgctggactcctgtcacatgcaaagacctttctcctagctggcgatgcgcaggcagagggcaaggacgatcctctacgtactggatttctgccctccttggccgcgacaccattcccactgccagcctctgatcttgatatggaagatgatgctaaactcgacagcctgatcacagaggccctaaacggcatggagtatcagtccgataacccagagattgactcttcatttattgatgtattcgccgacgaggaaccgtcaggtccccgcggtccttccagcggacatcccctgaagtccaaagccggcgttacgcccgaatccaaagctcccccgcccctccctgccgcaacacctgacccacagacccctagacccggcgatagaggatgccccgctagaggccgcccgaagaccagatcattggggttggcccctacagaagccgacgctccatcacagggtcgccagcagcggaggggtaagcagcttaagctattcagaaaggatctcgactccggtggcgctgccgagggatcggggagcggcgggggcggaagggctagcggcctccgccctaggaggaacgacggacttggggagagaccgccaccaaggccccggcggccaaggacccaggcgcctggttcacgagccgatcccgcacccagggtgcctcgtgctgctgcgctgccagaagagacacgcagctcgaggcggaggagactgccccctcggaaagacccaagaaagaggaaggcccgaggcggagcatgggggaaagaattaatattaaaaattgtgcagcagaagaaccggctccgcgagtacgatttcgcttccgagtccgaggaagatgagcagccgccaccaagaggtcccggcttccgcggacggaggggtcggggggaaaagcgaaaggaggtggagctgacccaggggccacgcgaagatgagccgcagaagccaaggaaagccgccaggcaagaggcagggggagatggagctcctgccaatccggaggagcccggggggtcccggccgggtcctggccggtcaccacaagcgaggggaccctctcgcagcctggagacaggtgctgctgcccgcgagggggggccgaagtgtgccgatagacctagtgtcgctccaaaagacccacttcaggtcccaacgaacaccgaaacctccgaggaaactcgacccagtctggacttcccacaggaggccaaagaaccggaaaccgccgaggagagcgccccagattctaccgagtttacagaggccttaagatcacctcccgcagcttgcgcaggcgaaatgggggccagcccaggattgttgattcccgagcagccccccccatctagacacgacaccggtacaccaaaaccttctggaagtctggcaaatactgctccccatggcagtagccctactcctggagttgggtccctgctggggggccccgggggaacccaggctcctgtcagtcacaattccaaggacccccctgcccgccagcctggagaattcctggcccctgtggccaatccttccagcactgcatgcccgaagccaagcgtcctgtcctcaaaaatcagttctttcggctgcgaccccgccggcttcaacagagaccctctgggcgtgccggtcgcaaagaagggaccccaaccctactcttccccccattcagaactgttcctgggcccaaaggacttggccgggtgctttctggaggaactgcaccccaagccctctgctcgcgatgcaccccctgcctcttcctcctgtctgtgtcaggatggagaggacgcagggagcctggaacctcaacttcctagatcaccacccggcacggccgagacagaaccagggagggccgcctcacctcctacattagagtccagctctctgttccccgacctccccgtggacaggttcgacccccccctttacgggtccctcagcgcaaatcgtgacagtggacttccttttgcgtgcgctgaccctccccagaagacggtaccttcggacccgccatacccatcttttttactgttagaggaggtctcaccaatgctcccatctcactttcctgacctgagcggcggcaaggttttgagtaagacctgccccccagaacggaccgttgtcccaggcgccgctccttcactgcctggcaagggatcaggctgcagcgttgctctaatgagccatctgtcggaggatgaattagaaatccagaagctagtgacggagctcgaaagtcagctgcagcgctcaaaggacacgcgaggagcgccgagggagttagcggaagccgaatctgttggtcgagtggagctcggaaccggcaccgagcctccttctcagaggagaacatgtcaggcgaccgtaccacacgaggatacatttagcgctgccgatctgactcgcgtgggagaatctaccgcccatcgcgagggcgccgagtccgcagtggccactgtggaggccgtccagggccgccctggcgggacgtggccttgtcctgccagctttcaccccggacacgccgctctccttccctgcgcccaggaggatctggtgtccggggctccattctcgccacgcggggccaactttcatttccagcccgttcagaaagcgggcgctagcaaaacgggcctctgtcaggccgagggtgattcacgccccccccaggatgtctgcctgcccgagcctagtaagcaaccaggaccccaactggatgctggctccttagctaaatgcagcccagatcaggagttaagcttcccgaagaacaaagaagccgcaagttcccaggaatcagaagattcgctgagactgctgccgtgcgaacagagagggggattccttcctgagcccggcactgcggatcagccccaccgaggagcccccgcccctgaagcatttggctcccctgctgtccacctggcacccgatctggccttccagggagatggtgcaccccccctggatgcaacttggcctttcggcgcatctccatctcatgctgctcagggtcacagcgctgggagggccggaggccacctacatcccaccgccggaaggccagggtttgaaggtaatgagttcgctcccgctggggccagttcactaacagctcctagagggcgggaggcgtggctggtgccggtgccttcccctgcgtgtgtgtccaacacgcaccccagcaggagatcgcaagaccctgcactgtctccccccataagacagctgcagcttcctgggcccggggtcgctaaatcgaaagatgggatactagggcttcaggaactgacacctgctgcccagtccccgccaagggttaaccctagtggactggaagggggcaccgtggaaggagggaaagtggcctgcggccccgcacagggttcccctggtggtgtgcaggtgacaacactccctgccgtggcaggccaccagttaggcctcgaggccgatggacactgggggctcttggggcaagcagagaaaactcagggccagggcacagcaaaccagcttcaacccgagaatggggtcagtcccggtggcacagacaaccatgccagtgtgaatgctagtccaaagaccgcactgacaggacctaccgagggtgcagttctgttggaaaaatgcaagggctcccgagcagctatgagcctgcaggaggaagctgagccaacacctagcccgccttccccaaacagagaatccctcgccctagccttaaccgctgcccattccagatccggatccgaggggcgcactcccgaaagagcctcttctcctgggttgaacaagccattgctggcaacgggagactcaccagctccctctgttggtgatttagctgcttgtgccccttcccccacctcagcggcgcatatgccctgcagcctgggaccactgcctcgcgaagacccactcacaagcccgagcagagcgcaaggaggcctcggcggccagctgccagccagtccctcctgccgggaccccccaggcccacagcagctgctcgcatgtagtcctgcttgggcccctctggaggaagcggatggcgttcaggcaacgactgacactggtgcggaagattcccccgtcgcaccgccgtcactcaccacgagtccctgtgatccaaaagaagcattggctggctgcttgcttcaaggcgaagggtctcctctagaggatccctccagttggccacccggatctgtctccgccgtgacttgtacccattccggcgacacgccaaaggatagcaccctaaggattcctgaggattcgcgcaaagagaagctgtgggaaagccccggtcgggctacctccccaccactggccggagctgtgtctccctcggtggccgttcgcgcaaccgggctgtccagcacaccaaccggtgacgaagcccaggctggtagaggcctccctggccccgatccacagagccggggtgccccacctcacacgaaccctgatagaatgcctagggggcacagctcttatagccctagcaacaccgcgcggctcggacatcgcgaaggtcaagcagtcaccgctgttcccaccgagccacctacactgcagggcgccggtccagactcacctgcctgtctggaaggagagatgggcacgtcaagcaaagagccagaggacccaggaacacccgagaccggtcgctccggcgcaaccaaaatgccccgcgttacctgcccgagcacagggttgggattggggcgaaccaccgctccatcttccacagcctctgactttcagagcgatagtcctcagtcccacagaaatgcgtctcaccaaaccccccagggtgatccactcggcccacaagatcttaagcaacgaagccggggatacaagaagaaacctgcctccacggagaacggccagtggaaaggtcaggcccctcacggaccagtgacatgtgaagtgtgtgcagcctcgttcaggagcggacccgggctctctagacacaaagcccgaaagcacaggccgcaccccggggcaccagccgaaccgtcccccgcagcactgcctgcccaacagccgctggagccattagcgcagaaatgccagcctccacggaagaagtctcatagagtatccgggaaggagcgccctaatcactcaaggggggatccgagccatgtgactcagccgcctcccgcccaaggctccaaagaggtgcttcgggcccctggctcgccccacagccagcagctacaccctccatcacccaccgaacatgaagttgacgtaaaaactcccgccagtaagcctaggcctgaccaggcaagagaagacgagttgcaccccaaacaagccgaaaaacgggaaggtcggcggtggcgcagggagcccacagtggactccccttctcactccgagggcaagagtaataagaaacgggggaagttgagaggacgcagattacgcgaggagagcattctgcctgttagcgccgacgttatctcagacggccgcggcagccgaccttctcccgctatggcctcgtacgccgcctcccctagtcattgtctatccgtcgaggggggtccagaagccgatggtgagcagccccctcgccttgccaccctgggacccggcgtgatggagggagccgccgagacggaccaggaagccctgtgcgcaggcgaaacaggagcacagaagccccctggagatcgcatgctctgccccggacgaatggatggcgccgcccttggggaacaaccaacaggtcagaagggggcgagtgcacgcggcttttggggccctagggagacaaaagccctgggggtgtgtaaagagtctggttctgaaccagcagaggactcctccagagcacactcccgttcggaagaaggcgtatgggaggagaatacccctcccctgggaccgctgggattccccgaaacctcctccagccctgctgactccactaccagttcatgcctgcaggggctccccgataatccagatacacaaggaggtgtgcagggcccagaaggtcccacacctgacgcatcggggtcttctgctaaggaccctccttccctatttgacgacgaggtgagtttcagtcagctatttccacccgggggcagactgactcgaaagcgcaacccacatgtctatggcaagcgctgtgagaagccagtcttgcccctgcctacccagccatcgtttgaagaaggcggggatcccacgctcggtcccgcaaggttgccaacagacctgagtgattccagctctctttgcctgtgccacgaggatccttgggaggatgaagaccctgctggattgcctgagtcatttctgctggacggattcctgaacagtagggtgcctggcattgacccctgggcgccagggctgtctctgtgggctctggaaccatcacgggaagctggggctgaaaaactgccctctcattgtccagaggatgacaggccagaggccattccagagcttcacatggtgccagccgcatggagaggtttggagatgcccgcacctgctgatgactcctcctcctccttaggtgatgtgtctcccgaacctcctagtctggagcgggaaagatgtgacggaggattgcccggtaacacccatctgctgcctttacgcgcgacagatttcgaggtgttgtctactaagttcgagatgcaggacctgtgctttttgggacctttcgaagaccctgtagggttaccaggcccgtcctttctggatttcgagggtaccgcttctagtcagggtccgcagagccggcggacagaagaggcagcaggagcagggcgggctcaagggaggggtagaccagctaagggacgccgggccagctataagtgtaaggtctgttttcagcgatttcgtagtttgggcgagctggacttgcataaactcgctcatacgcccgccccaccgcctacctgctatatgtgtgtggaacgccgctttggcagtcgcgagctattaagaggtcatctgcaagagcgccacgcacagtccaaggcaggcccatgggcatgcggcatgtgtctcaaagaagtcgcagatgtgtggatgtacaacgaacatcttagagagcacgctgtgcgcttcgcaaggagggggcaggctcgccgtagcctgggtgatctacctggcggtctcgaaggctctagtgcagtggcccacttactgaattccattacggaacctgcccccaagcatcaccgtggaaagagaagcgcagggaaggccgctgggtctcctggcgatccctggggccaagaaggggaggcaaagaaagactcccccggcgaaagagcaaagccgcgtgcacgctcaaccccctccaaccctgatggggcagcgacaccagattcagcatcagctaccgccttagccgatgccgggagcccgggtccgccccgaactactccgtcccccagccctgatccctgggcaggcggcgagcccctgctacaggctacccctgtccacgaagcctgcaaggatccttctcgcgactgtcatcattgtggaaagagattccccaagccgtttaagctccagcggcatctggctgtacactccccacagagagtttacctctgcccaaggtgtcccagagtttaccccgagcatggagaactgctcgcgcatctgggaggagctcatggactcctcgaaagacctgagctgcaacacactcctctgtatgcttgtgagctgtgcgcaactgttatgcgcatcatcaagaagtcctttgcgtgtagctcgtgtaattatactttcgcaaaaaaggaacagtttgatcggcacatgaataaacatctgcgaggcgggagacagccgtttgcatttaggggcgtgaggagacccggagcacccggccagaaggcacgggccctggagggcacccttccatccaagcgccgaagagttgccatgcctggtagcgctcctggccccggggaggaccgaccaccgcctagaggtagctctccaattctctcagaaggatccctgccagctctactccacctctgtagtgaggttgctccctcaacgactaagggttggccagagactctcgagagacccgtggaccctgtgactcaccccatccgaggctgcgaactcccttctaaccaccaagagtgcccacctcccagcctctcgcctttccctgccgctcttgcggacggtcggggtgattgtgcccttgacggcgcactggagagacctgagaacgaggcttccccagggagtcccggacccttgcttcaacaagctctgccactaggggcctcgctgccccggcccggcgctagggggcaagacgccgaaggcaagagagctcctcttgtgtttagcgggaagcggagggccccaggcgcgcgcggcaggtgcgcgcctgatcacttccaggaggatcatttactgcagaaggagaaggaggtgtcttcatctcatatggtgagtgaaggaggacccaggggcacatttcacaagggcagcgcaactaagcccgcaggctgtcaatcttctagtaaggacagatcagccgcctctaccccttcaaaggcgcttaagtttcctgtgcaccctagaaaggctgtaggatcccttgcacccggggagctcgcacggggcaccgaaaacggcatgaagcccgccacacccaaggccaaacccggtccaagctcacaggggtcaggatcaccccgaccagggacaaagacagggggtggaagccaaccccagccagcaagcgggcaattgcaaagtgaaactgccactacaccagccaagccatcattcccgtcccggagccccgcaccagaaaggctgcccgcaagggcgcaagcaaaaagttgcaccaaaggcccccgcgaagcaggagaacagggcccccacggcagcttgggtccgaaggaaaaaggcgaatcctccacaaagaggaaaaagggacaggtcccagggccggcccgaagcgagagcgtggggtcttttggcagggccccttccgctcccgataagccacccaggactccaaggaagcaggctacaccttccagagtgctgcctacaaaaccaaaaccgaacagtcagaacaaacccaggccaccaccctccgaacagagaaaagctgagccggggcatactcagaggaaggataggctcggcaaagcctttccacaggggcgccccctcctccgcccaccgaaacggggcacggctgtgcatggggccgagcccgccgagccccacacccaccggacagccgaggctcaatccgacctattgagtcaactgttcggccaaaggctgaccggattcaagattccccttaagaaggacgcttctgagtag

SEQ ID NO: 44980 - DNA, 11778 bp, Artificial Sequence
  derived and/or modified sequence
atgccgggtgaacgcccacgcggagctccaccccctactatgaccggggacctccagccacgccaggtggcaagctcccccggtcatccaagtcagccgcctcttgaagataacacccccgctactcgtacaacaaagggggctagagaagctggtggccaagcccaggcaatggagctcccggaagcacagccacggcaggctcgtgatggagagctgaaacctccatcacttcgcggacaggccccttccagtacacctggcaagcggggaagtccgcagacaccacccggtagaagcccactgcaggctcctagcagactcgccggaagagccgaggggtcgccccctcagaggtatatcctaggaattgcgtcttctaggactaagcccacactggatgagacacctgagaacccacaactagaagccgctcagctgcccgaggtggacacaccccaggggcctggcaccggtgcacccctccggcctgggctgccacgcaccgaagcccagccagccgcagaggaactgggtttccatcgctgttttcaagagcctccatccagtttcacctcaaccaactatacgtcaccttcagcaacaccaaggccccctgcccctgggccaccgcagtcacgtggaacatccccccttcagccagggtcttaccccgaatatcaggcctccggggcagactcctggccacctgccgctgagaatagctttcccggtgcaaacttcggcgttcccccagccgagcccgagcctataccaaagggcagtcgcccaggtgggagcccccgaggtgttagttttcagtttccctttcccgcattacacggcgctagcaccaaacctttcccagccgacgtggccggacacgctttcaccaacggacccttagtattcgcattccaccagccccagggggcttggcccgaggaagcagtggggaccggacctgcctatcctctccctactcaacccgctccaagccccttgccttgctaccaggggcaaccaggcggtctgaataggcacagcgacctcagtggagccctttcttctccaggcgcagcacactctgccccaaggcctttttccgatagtttacacaagtcactgacaaaaattctaccagaacggcctccctctgcccaggatgggctgggctctaccaggggtcccccaagttctctgcctcagcgccacttcccagggcaggcctatagagcaagcggcgtcgatacaagtccaggacccccagataccgagctcgctgccccaggtccccctcccgctcgtctgccacagctatgggatcccaccgctgcgccttatcccacacccccaggaggtcccctggcagccacaaggagcatgtttttcaacggccaaccctccccaggccagcgactgtgtctcccgcaaagcgctcccctgccctggcctcaggtgcttccgaccgcccgaccttcgccacatggtatggagatgctatcacggctgcctttcccagccggagggcctgaatggcaaggcggatctcagggcgcattaggcaccgctggcaagacccccggtccaagggagaagctgccggcagtgcgctcaagccaaggtggcagcccagccctgttcacctataatgggatgaccgaccccggtgcgcagcccctgtttttcggcgtcgcccagcctcaagtgtctccacacggtaccccatctttgccgcctccacgggtcgtgggagcgtccccgtccgagagcccactccccagtcctgcgaccaatacagctgggagcacctgctccagcctcagccctatgtccagctctcctgccaatccttcctcggaggaatcgcaactccctgggccactgggaccctctgccttctttcatccacccacccatccccaggaaaccgggtcccctttcccgtcccccgagcctcctcattctctcccaacccattaccagcctgagcctgcgaaagcatttccttttcctgcggatgggctgggtgcagaaggagccttccagtgcctagaagaaacgcccttcccccacgagggacccgaggtggggagaggcggtctgcaggggtttccaagagccccaccgccttatcccactcaccatttcagtctctcttccgcatctctggaccagctcgacgtactgctgacgtgtcggcagtgtgatcggaactatagcagtctcgcagccttcctggctcacagacagttttgcggccttctgctggccagagccaaagacggtcaccagaggtcccctgggccaccaggactgccttcccctcccgctgctcctagggtccccgctgatgcccatgccggtttactgagccacgcaaagacattccttctagccggtgatgctcaggccgaaggcaaagatgaccccctcagaaccggctttcttccttcattggcggctactccatttcctctgcctgccagcgatctcgacatggaggacgacgctaagctggactcactcattacagaggccctgaacgggatggaatatcaaagcgacaatccggaaatcgactcgtcattcattgatgtgttcgctgatgaagagccgtctggcccacgagggccatcttccgggcatccgcttaaatctaaggccggagtcacaccagagtccaaggctccaccacccctccctgccgctaccccagacccccaaacccctcgcccaggcgacagggggtgccctgcacgcggtcgtcccaagactcggtctctaggtttagctcctacggaggctgacgcaccaagccagggccgacagcagcgcagaggcaaacagctgaagctgtttcggaaggacctcgacagtggaggtgccgcagagggcagcgggtctgggggtggcggacgggcatcagggctgagacccaggagaaacgacggtctgggggaaagaccgcctccaagaccgaggagacctagaacccaggcccctggatctcgcgctgaccctgcccctagggttcccagagccgctgctctccccgaagagacccggtcaagccggagaaggcgcctcccccctcgtaaagatccgaggaaacggaaagcacggggaggcgcttgggggaaggaactgatcctcaagattgttcagcagaagaaccggctgcgggagtatgattttgcttcagagtctgaggaagatgaacagccaccaccgaggggcccaggtttccggggacgcagagggcgtggagaaaagcgtaaggaagtggagctaacacaaggcccaagggaggacgagccgcagaaacctagaaaggcggcacgtcaagaggcaggcggagacggggctcctgctaatcccgaggagcccggaggatcaagaccgggacccggacgatcacctcaggcacgaggaccttctcggagtttggaaacgggcgcagcagcccgtgaaggcggtcccaagtgtgcggatagaccctccgtggcccctaaagatcctttacaagtgcccactaacaccgagaccagcgaggaaaccagaccatcgctggactttccacaggaggcaaaggaaccggaaacggctgaggagtctgcccctgatagtactgaattcactgaggcactgagatcccccccagcagcctgtgcgggtgaaatgggagcctctccaggccttttaatcccagaacagccccctccatctagacacgacactgggacccccaagccctctggatcactcgcgaacaccgctccccacggttcttcccctaccccgggagtagggtctcttctgggcggtcccggaggaacccaagcacctgtttcccacaactctaaggacccgccagcacgacagcctggcgaatttttggcacctgtggccaatccgagcagtacagcatgtcctaagcccagtgtgctgtcctccaaaattagctctttcggttgtgatcctgccggatttaacagagatcccctgggagttccagttgccaaaaaaggacctcagccgtacagttctccccacagcgaactgtttctcggtccaaaggacctggctggttgctttctcgaggaactacaccccaaaccctccgccagggacgctccccctgcgtctagctcttgcctttgccaggacggtgaggatgccggaagtcttgaacctcaactcccccgatcccctcctggcaccgctgagaccgagccaggcagggcggctagcccacccacccttgagtcatctagcctgtttccagatctgccagtggaccgctttgatcctcctctttatggatcactctccgcaaatagggattcgggcctcccattcgcgtgcgctgatcccccacagaagacagtcccaagcgatcccccataccccagctttttgctgttggaggaagtctcccctatgctaccaagtcacttccccgatctgtctggaggaaaagtcctcagcaaaacgtgccctccggagagaaccgtggtaccaggcgctgcgccttcattaccgggtaaagggagcgggtgcagtgttgccctgatgtcacacctgtccgaagacgaattagaaatccagaaactcgtcactgagcttgagtcccaactgcagcggtccaaagacacccgcggagcacctcgggagctggccgaggctgagtccgttgggagagttgaactcggtaccggaaccgaaccaccatctcagcgaaggacctgccaggcaaccgtcccacacgaagacactttcagcgcggctgatctgactcgggttggagagagcaccgctcatcgcgaaggggcagaatccgcggtagcgaccgtggaagccgtccaagggaggccaggtggtacctggccatgtcccgcttcattccatcccggacacgcagcccttctgccatgcgctcaggaggacttagttagcggcgcaccctttagcccccgaggcgcaaatttccacttccagccagtccagaaagctggagcttccaaaactggcctgtgccaggcggagggcgacagccgaccaccacaggacgtctgtttgccagaaccctctaaacaaccagggccacagctggacgcgggttccctggccaagtgttcaccagaccaagagctctcttttccgaaaaataaagaagccgcaagtagccaagaatctgaagatagccttcggctgctcccatgcgagcagcggggtggctttctgccagaaccagggaccgctgaccagccgcatcgtggggctccagctcccgaagcctttgggtcaccagccgtgcacctcgcccctgatctcgcatttcaaggtgatggtgcgccacctcttgatgctacgtggccttttggtgccagtcccagtcatgctgcccagggccattctgctggcagagcaggcggtcacttgcatcccaccgcaggtcgccctggattcgaaggtaatgaatttgccccagccggagccagcagcttgaccgcgcctcgtggtcgtgaggcttggttagtgccagttccgagtccagcttgcgtcagcaacacccacccaagtagaaggtctcaggatccagcgctctcacccccaattagacagttacaactcccaggccctggcgtcgccaaaagtaaggacggtatcttgggactgcaggagctgacaccggcagcccagtcacccccacgggtcaacccttctggcctggagggcggtacagtagaggggggtaaagtcgcttgcggccctgctcaaggctcccctgggggagtgcaggtgacgactctgcccgcagtggccggacaccagcttggcttggaagcagacgggcactggggccttctgggccaagctgagaagacgcagggccagggaactgcaaatcagctgcaaccagaaaacggagtttcgccgggtggcaccgataatcacgcatccgttaatgcttcccctaagacggccctgacagggcctaccgaaggagccgtgctgctcgagaagtgcaagggttccagggctgccatgtctctgcaagaggaagcagagcctacaccctcgcccccatcccctaatcgcgagtccctagcactcgccctcacagcggcacactcaagatcagggtctgagggacgcacccccgagagagcctcaagcccaggtttgaacaaacccctgctcgccacgggtgatagtccagccccttccgtcggggatctcgccgcatgcgctcccagccccacgtcggccgcacacatgccctgtagtcttggccctctgccccgagaggatccacttaccagtccctcccgagctcaaggagggttaggcggtcagctcccagcctctcccagctgcagggacccacctggaccacaacagctcctagcatgttctcctgcctgggctcctctggaagaagcggacggggtccaggcgaccactgacacaggagctgaggattccccagtcgcccctcctagtctgacgacttccccatgcgacccgaaagaagctctcgccggttgcctcctgcagggggagggatctccgctggaagacccgagtagctggccccctggcagcgtgtccgcagtcacttgcacacatagcggtgacacccctaaggacagcaccctgagaatccctgaagattctcgcaaggagaagctgtgggaaagcccgggacgggctactagtcccccactggctggcgctgtgtcaccgtccgtggccgtgcgggctaccggcctgtcctcgacgcctacaggcgacgaggcacaagccggtcgcggactgcccggacctgacccccagagcagaggagcccctcctcacacgaatccagatagaatgccacggggtcattcgagctattctccttccaacacggctaggttgggacatagggagggacaggccgtaacagctgtgcctacagaaccacctacactgcaaggggctggccctgatagcccagcgtgcttggaaggcgagatggggactagttctaaggagccggaggatccagggacccctgagaccggacgctccggtgccacaaagatgcctcgcgttacctgtccaagtacagggctggggctcgggagaactactgccccatcgtctactgcctctgatttccaaagcgattctccacagagccacaggaacgcgagccaccaaacccctcagggcgatccattgggaccacaagacctcaaacaacgctcccggggttacaaaaagaagcctgccagcactgaaaacgggcagtggaagggccaggctccacacgggcctgtcacctgcgaggtttgtgccgcttcgtttcggtcgggtcccggtttaagtcggcacaaggctaggaaacacagacctcatcccggagccccagccgaaccatcaccagccgcattgcctgcacagcagccactggaaccattggcacagaagtgccagccgcctcgcaagaagagtcaccgcgttagtggaaaggaaaggcccaaccactcaagaggggacccctcgcatgttacacagccgcctcccgctcaggggtccaaggaggtcctccgggctcccggttcccctcactcacaacaattgcatccgccatcaccaacagaacacgaagtggacgtgaaaacccccgctagcaaacctaggcctgaccaagccagagaggacgagctgcaccctaaacaggcagagaaaagggaaggcagacggtggagacgggagcctaccgtggacagccctagccactccgaagggaaatctaacaaaaagcgcggaaaactgcggggtaggagactgcgggaggagtccattttgcccgtctccgccgacgttataagtgacggcagaggaagccgcccatctccagccatggcctcctatgccgcatctccgagtcattgcctgagcgtggaagggggtccagaggccgatggggaacagcctcctagattagctactttgggcccaggggtcatggaaggagcagctgaaacagaccaggaagctttgtgcgccggtgagaccggagctcagaaaccccctggagaccggatgttgtgccctggcaggatggatggcgctgcgctcggggaacaaccaacaggtcagaagggtgcttccgccagggggttttggggtcctcgggagaccaaggcactcggcgtgtgtaaagaaagcggtagtgagcccgctgaggactcatctagggcccatagtcggtcggaggaaggtgtgtgggaagaaaataccccgcctctgggccctttgggttttcccgaaacgtcctcttccccagcggacagtacaactagcagctgtctccaggggctccctgacaatccggatacccaaggcggagtgcagggtccagaaggtccaacaccagacgcttctgggtcaagcgcaaaagatccacccagcctcttcgacgatgaagtttccttcagccagctgttccctccaggaggtcgcctgacacgaaaaagaaatccccatgtttatggaaagcgctgtgaaaaaccagttttaccactcccaactcagccctctttcgaagaaggtggcgacccgaccttgggtcccgcacgtttgccaacagatctttctgactccagttccttgtgtttgtgccatgaagatccctgggaggacgaggatccagccggattgccagagagtttcctgctggatggattcctgaactcccgcgtgcccggtattgacccatgggcaccgggtttatcgctttgggccctggaaccttcaagggaagccggagccgaaaaactgcctagccactgcccggaggatgatagacctgaggccattccagagttgcacatggttcccgctgcctggagaggcctggagatgccggcaccggcagacgactcatcctccagcttaggcgatgtgagtcctgaaccacccagtctggagcgagagcgatgcgatggtggcctgccaggcaatacacacctgttgccgctccgcgcaaccgatttcgaagtcttgagcactaaattcgagatgcaggatctttgctttttaggacctttcgaggacccggtgggcctgcctgggccatctttcctggacttcgagggcaccgcctcgtcacagggtccgcagtcacggcgtacagaagaggctgccggtgctgggagagcgcagggcaggggccgtccagcaaaggggaggcgcgcttcatataaatgcaaagtgtgtttccagagattcagaagtctcggtgagctggatctgcacaaactcgcacatacccctgcgccaccccctacatgctacatgtgtgtggagcgaagattcggttcacgcgagcttctgcgcggtcacctgcaagagcgccatgcccagagcaaggctggcccatgggcatgcgggatgtgccttaaggaagtggccgacgtatggatgtataacgagcatcttcgagagcacgccgtgagattcgccaggcggggtcaagcccgtaggtcattgggggacttgcctggcggacttgagggtagtagtgccgtagctcaccttctgaattccatcacagaaccggctcccaagcaccaccggggaaaacgaagcgctgggaaagctgctggtagtccaggcgatccttgggggcaggagggagaggctaaaaaggattctcctggagaacgtgccaaaccaagagcacggtccactccaagcaatccagatggcgcagccacacctgacagtgcctcagcaaccgcgttggccgacgctggttctccaggccctccccgaaccactccctccccatctccagatccttgggctggcggagaaccgctgctgcaagcgaccccagtgcacgaggcctgcaaggacccttctcgggattgtcatcactgtgggaaacgcttccctaagccctttaagctgcaacgccacctagccgtgcatagtccccagagggtttatctttgtccgaggtgcccgcgtgtttacccagaacacggcgaacttctggcccatcttggaggcgctcatggcctgttggagagacctgaacttcagcacacacccctgtacgcctgcgagctttgcgctaccgtcatgagaataatcaagaaatcttttgcctgcagttcctgtaattacacttttgctaagaaggagcaatttgatagacacatgaacaaacatctaaggggagggaggcaaccatttgctttccggggagtgcgcaggccaggagccccaggccaaaaggcccgagcgttggaggggacactgccttctaagcgcagaagggtcgcaatgccaggcagtgcacccggtcccggtgaggaccgcccacccccaagaggcagcagtccaatactttctgaagggtcactgcccgctttgttacacctgtgttccgaggtggccccaagcacaactaagggctggcccgagactttggagaggcccgtcgaccccgtcactcacccaattagggggtgcgagctgccctcgaaccatcaggaatgtcccccacctagcctgagtcctttccccgcagctctagccgatgggaggggtgattgtgcacttgatggcgcactggaaagacccgagaacgaggcttcccctgggtcgcctggtcctctattgcagcaggcccttcctttaggagccagtttgccgagacccggagccaggggacaggacgccgagggaaagcgagctccccttgtattttccggtaagaggcgcgctccgggagctcggggtaggtgcgctccggaccacttccaagaggatcaccttctccaaaaagagaaggaagtatcctctagccacatggtgtctgagggtggccctcgaggcaccttccacaagggatctgccactaagccggctggatgccagtcctcatcaaaggaccgctctgctgcctccacaccttccaaagctctgaagttcccagttcaccctcggaaagccgtgggatcactagcccctggtgaactggccagaggaactgaaaacggtatgaagcctgccaccccaaaagcgaaacccggacccagcagtcagggttcaggaagccccaggcccggaacaaagacaggcggtggctcacaaccacagccggcatctggacagcttcagtcagagaccgcaaccactccggctaaaccatcatttccctcccgcagccccgctcccgagaggctacctgcccgagcgcaggccaagtcctgtaccaaaggccctagagaagctggcgaacagggaccgcacggctctctcggccctaaagaaaagggcgagagtagtaccaagaggaagaaaggacaggtcccagggcctgctcgtagcgagtcagttggcagcttcgggagggctccaagcgcacctgataaacccccacgtactccgagaaagcaggccacacccagtcgcgtgttgcccacaaagccgaaaccgaacagtcagaataagcccagacccccaccaagtgagcaaagaaaggcagagccgggacatacgcagcgcaaagaccgccttggaaaagcatttccacaagggaggcctctgctcaggcccccaaaacgcggaaccgccgttcatggggcagagcccgcagagccgcatacacaccggacggctgaagcacagagcgatctgctgtcgcaactgtttgggcagcgcttgactggcttcaagatacccctcaaaaaagatgcttcggaataa

SEQ ID NO: 44981 - DNA, 13203 bp, Artificial Sequence
  derived and/or modified sequence
atgcctggggagcgcccccgaggagcgccgccccccaccatgactggagacctgcagccccgccaagttgccagcagcccggggcacccctcccagccgccactggaggacaacaccccagctaccaggaccaccaagggtgccagggaggctggcggccaggcccaggccatggagctccccgaggcccagccaaggcaggccagggacggggagctcaagcccccatccctgagaggccaggccccgagcagcacccctgggaagaggggcagcccccagaccccaccggggagaagccccttgcaggctccctcaaggctggcgggcagggcagagggcagccccccacagcgctacattctgggcatcgccagctcgaggaccaagcccaccctggacgagacaccagagaacccacagctggaggctgcccagctccctgaggtggacaccccccagggccctgggactggagctccactcaggccgggcctcccaaggactgaggcccaacccgccgccgaagagcttggcttccacaggtgcttccaggagccaccctccagctttacctccaccaactatacctcaccaagcgccacccccaggcccccagccccggggcccccccagagcaggggcaccagccccctccagcccggttcctatcccgaataccaggccagtggggccgactcctggcctcccgctgctgagaatagcttcccaggtgctaatttcggggttccccccgccgagccggaacctattcccaaaggcagcaggcccggcggcagccccaggggagtttccttccagttccccttcccggcactgcatggggccagcacaaaacccttccctgcggatgtggctgggcacgcattcaccaatgggccactggtgtttgccttccatcagccccagggagcgtggccggaggaggccgtgggcacgggccctgcctacccgctgcccacccagcctgcgccctcacccctgccctgctaccagggccagccaggtggcctgaaccgccacagcgacctcagtggtgccctctcttcccctggagctgctcactcggccccgagacccttctctgacagtttacacaagagcctgaccaaaatccttcccgaaagaccaccttcagcccaggatgggctggggagcacgagagggccccctagctccctaccccagaggcactttccagggcaggcgtacagagccagtggggtggacaccagcccggggcctccggacaccgagctggccgccccagggcccccacccgccaggctgccccagctgtgggaccccacagcagccccttaccccacacctcctgggggccccctggctgccaccaggagtatgttctttaacggccagcccagcccaggccagcggctctgcctcccccagagtgcccccctgccttggccccaagtgctcccgaccgcccggccaagtccccacggaatggagatgctgagccggctgcctttccccgcggggggccccgagtggcaggggggcagccaaggagccctgggcactgctggcaagacaccgggacccagagagaagctgccagccgtgagaagcagccagggcggctccccagcactgttcacctacaacggaatgacagaccctggggctcagcccctgttcttcggggtggcccagccccaggtttcaccccacgggacacccagcctgcccccaccgagggtagtgggagcctcccccagcgagtccccactgccgtcaccggccaccaacacggccggcagcacctgctcttccctgtcgccgatgtccagcagcccagccaaccccagctcagaggaaagccagctccccggccccctcgggccctcggccttcttccacccacccactcacccccaggagacgggcagccccttcccgtccccggagcccccccactccctccccacccactaccagccagagccagccaaggccttcccttttcccgcagatgggctgggagccgagggtgccttccagtgcctggaggagaccccattcccccacgagggccccgaggtgggtcggggagggctgcagggcttcccccgtgcgccgcctccgtaccccacacaccacttctccctcagcagcgccagcctggaccagctggacgtgctgctgacctgcaggcagtgtgaccgcaactacagcagcctggcggccttcctggcccaccggcagttctgtggcctgctcctggccagggccaaggatggccaccagcggtctccaggcccccctgggctcccctcgccccccgctgcccccagagtccctgccgacgcacacgcgggcttgctcagccacgcgaagaccttcctgttagctggggacgcccaggccgagggcaaagacgaccccctgaggacaggcttcctgcccagcctggccgccacccccttcccgctccctgcctcggacctggacatggaggatgacgccaagctggacagcctcatcacagaggcgctcaacggcatggagtaccagtcggacaacccggagatcgacagcagcttcatcgacgtcttcgcggacgaggagccttccggccccagaggtcccagctccggacacccccttaagagcaaggcgggggtgactccagagagcaaagctccgcccccgctcccagcagccacgccggacccccaaaccccccgccctggggacaggggctgcccagcccgaggcaggcccaaaacgcgttccctgggtctggcccccaccgaggcggatgcgcccagccagggcaggcagcagaggagggggaagcagttgaagctgttccggaaggatctggactcgggcggcgcagcagaggggtcggggtcgggcggcggcggcagagcctccggcctgaggccccggaggaacgacggtctcggggagcggcccccaccccgtccccggcgccctagaacgcaggcccccgggagccgcgcagaccccgcgccccgggtcccgagagccgccgccctccccgaggagacccgcagctcccggcgccgccggctgccccccaggaaggaccccaggaagaggaaggctcggggcggcgcctggggcaaggagctcattctgaagatcgtgcagcagaagaacaggctccgcgagtacgacttcgcctcggagtccgaggaggacgagcagcctccgccgcggggccccggcttcagaggccggcggggccgaggcgagaagaggaaggaagtggagctgacccagggtcccagagaggatgagccacagaaaccccggaaggcggcgaggcaggaagccggcggggacggagcccccgcgaaccccgaggagccgggcgggtctcgcccgggccccggcaggagccctcaggcccgtggcccgtctcgaagcctggagacgggagcggccgccagggagggaggccccaagtgtgctgatcgcccctcagtggcccccaaggatcccctgcaggtccccaccaacaccgagacctcagaggaaacccgcccgtcgctggactttccccaggaggccaaggagcctgaaactgccgaagagtcagccccggacagcacagaattcacagaggctttgcgttctcctccagccgcctgtgcgggagaaatgggagcaagccccggtctcctgataccagagcagccgccgcccagcagacatgacaccggcacccccaagccgtcgggaagcctcgccaacacggcgccccacggaagctcgccaacgccaggtgtgggcagcctgctgggtggtcctgggggcacacaggccccagtctcccacaacagcaaggacccccctgcccgccagcctggagaatttctggcacccgtggctaacccctcaagtaccgcctgccccaaacccagtgttctgtcttcaaagatctccagttttggctgtgaccctgctggttttaacagagaccccttgggggttccagttgccaaaaaggggcctcagccctacagcagcccccacagtgagttgttcctcggacccaaagacctggctggctgtttcctggaagaactgcaccccaagccctcagccagggatgccccgccggccagcagctcctgcctttgccaggacggcgaggatgccggttccctcgagccacagctgccaaggagcccacctggcaccgctgagacggagccaggcagggctgcatcgccaccgaccttggagtcctcatccctcttcccagacctgccggtggacagattcgacccacccctctatggcagcctgtctgcgaacagggactccggtctgccgttcgcatgtgccgaccctccccagaagacggtgccgtcagatccaccgtacccctcttttttgctgcttgaggaagtatccccgatgctgcctagccattttcctgatctctcggggggaaaggtgctcagtaagacgtgtccccctgaacggacagtggttcccggcgccgccccatctttgcctgggaaggggagtggatgtagcgttgctcttatgagtcacctgtccgaggatgaactggagatccagaaattggtcaccgaattagaaagtcagctgcaaaggagcaaagacacacgtggggccccgagagagcttgcagaagctgagtcggtgggcagggtggagctcggcacaggcacagagccaccctcccaacggcgcacctgccaggccaccgtgccccacgaggacacgttctcggcagctgacctcacgcgcgttggagaatccactgcacatcgggagggtgcggaatcggctgtggccaccgtggaagcggttcaggggaggcctggggggacgtggccctgcccagcctccttccatccgggacatgcagcccttctcccctgtgcccaggaagacctggtttctggggctcctttcagccccaggggagccaacttccattttcagccagtgcagaaagccggagcctccaagactggactttgccaggcagaaggagacagcaggcccccccaagatgtctgcctgcctgagcccagcaagcagcctggcccacagctggatgccgggagtttagcaaagtgcagccccgaccaggaactttcatttcctaagaataaggaggccgccagctcacaagaaagtgaagactccctgcggctgcttccctgtgaacagagaggagggttcctcccagagcccggcacagcagaccagccccaccgaggggcccctgctccagaagcttttggcagccctgctgtccatctggcccctgacttggcatttcagggtgacggggctccacctctggatgccacctggccttttggtgccagtcccagccatgctgcccagggacattctgcaggcagagcaggtgggcacctccaccccacggcagggaggcctggctttgagggtaatgagtttgcaccggcgggggcctcctcactgactgccccccggggcagggaggcttggttggtccctgtgccaagtcccgcctgtgtatccaacacccaccctagcaggaggtcccaggacccagctttgagcccccccatacgtcagctccagctcccagggcctggagtggctaagagtaaagatggcatcctgggcttgcaggagctgacacctgctgcccagagccctccacgagtgaacccctcaggtctggaagggggcactgtggaaggagggaaggtggcctgtggccccgcccagggctccccagggggtgtgcaggtgacaactctccctgcagtggccggacatcagctggggctggaggcagatggacattggggcttgcttggccaagccgagaaaacccagggccaaggcacagccaaccagcttcagccagagaacggggtgagcccagggggcacggacaaccacgcctcagtcaatgccagtcccaaaacagcgctgaccggccccaccgagggtgcagtcctgctagagaaatgcaagggaagcagggcagccatgagccttcaggaggaggccgagcccaccccaagccccccgtcccctaatagggagtccctggcgctggccttgacagcagcccacagccgaagtggatctgagggccggactccagagagggcgtccagccccggcctgaacaagccactgctggccacaggggatagcccagcaccctctgtcggggacctggccgcctgcgccccctcacccacttcagccgcccacatgccctgcagccttgggcccctgccccgtgaagacccacttacctcgccttccagggcccaaggtgggctgggggggcagctgccagcatctccgtcctgcagggaccctcccggcccccagcagctgctggcctgttctcctgcctgggcacctctggaagaggcagatggcgtccaagccacgacagatactggggctgaggattccccggtggctcccccgtctttgacaacaagcccctgcgatcccaaggaagccctggctggttgccttctccagggggagggcagccccctggaagacccttcctcctggcctcctggctccgtcagtgctgtaacctgcactcacagtggggacacccccaaagacagcactttaagaattccagaggattccagaaaagagaagctgtgggagtctcctggccgagccacctctcctcctctggcaggggccgtctcccccagcgtggccgtcagggctactggcctgtccagcactcccaccggagatgaggcacaggcaggcaggggactcccagggccagacccccagagcaggggagccccgccccacaccaaccctgacaggatgcccaggggccactcctcgtattctccaagcaatactgcccgcctcggccacagggagggccaggctgtcacagctgtgcccactgagcctcccacgctacagggtgcagggccggactcccccgcctgcctggaaggtgagatggggaccagcagcaaggagccggaggacccagggacccctgagaccgggcgctctggtgctaccaagatgcccagggtcacctgcccttccacaggactgggcttgggaagaaccacagccccaagcagcacagccagtgacttccagtctgactccccccaaagccacagaaatgcctcccaccagactccccagggggaccccctcggcccccaagacctcaaacagaggtcccgtggctataaaaagaagcctgcatctacagagaacggccagtggaagggccaagctccacatgggcctgtgacctgtgaggtctgcgcagcctccttccgctccgggccgggcctgagccggcacaaggccaggaagcaccggccacacccgggagcccccgcggagccgagcccagcggccttgcctgctcagcagcctctagagcccctagcccaaaagtgccagccgcccaggaagaaaagccacagggtgtctgggaaggagagaccaaatcactcacggggagaccccagccacgtcacccagccaccgcctgcccagggctcaaaggaggttctcagagcaccggggtccccacacagccagcagctgcaccctccaagccctactgagcatgaggtagatgtgaagactccggcctccaagcccagaccagaccaggccagggaagatgagctgcatcccaaacaggcagaaaaaagagaaggccggaggtggcgccgagagcccaccgtggactctcctagccactcagaggggaagtcaaataagaaaaggggaaagctgagagggagaaggctccgggaggagagcattcttccagtctctgctgatgtgatttcagatgggcgcggctccagaccatcccctgcaatggccagttacgcagcctctccgagccactgcctctctgtggaaggagggcctgaggctgacggggagcagccgcctcgcttggccactctgggacctggggtgatggagggtgcagcggagactgaccaggaggctctgtgtgcaggggagactggggcccagaagccacctggagatcggatgctgtgtccagggaggatggatggtgcagctctgggggaacagccaactgggcagaagggagcctcggcaagggggttctggggaccaagagagaccaaggcgttgggtgtgtgcaaagagtctgggagcgagcctgcggaggacagcagcagggcccacagccgatcagaggaaggtgtctgggaggagaacacgccccccttgggccccctgggttttcccgagacttccagctctccggcggacagcaccaccagcagctgcctccagggcctcccggacaacccagacacccagggtggagtccaggggcctgaaggccccactcctgatgcctctggctccagtgccaaggatcctccaagcttgtttgatgatgaggtctctttctcccagctcttccctccaggcggtcgcttgactagaaagaggaacccgcatgtctacgggaagcgctgtgagaagccggtgctcccgctgccaacccagcccagctttgaggagggcggtgaccccacgctgggcccagcccgcctgcccacggacctcagcgactccagctccctctgcctctgccatgaggacccgtgggaggacgaggatcccgcaggtctgcccgagtccttcctcctggatgggttcctcaatagcagggtgcctggcattgacccctgggcccccggcctcagcctgtgggccctggagcccagcagggaagctggtgcagagaagctgccctcccactgccccgaggacgatcggccggaggccattcctgagctgcacatggtcccagcggcttggcgaggcctggagatgccggcccctgccgatgactcctcctcttctctcggagatgtgagccccgagccccccagcctggagagagaacgctgtgacggtgggcttcccgggaacacccacctgctgccgctccgtgccacggactttgaggtgctcagcaccaagtttgagatgcaagacctgtgctttctgggaccctttgaagaccccgtgggtctccccggccccagcttcttagacttcgagggcacggcgagctcacaggggccacagagccgaaggacagaggaggctgcaggggcagggagggcccaaggcagaggccggccggccaagggcaggcgggcctcctacaagtgcaaagtgtgcttccagcgcttccgcagcctgggcgagctggacctgcacaagctggcccacacgcccgcgccgccgcccacctgctacatgtgcgtggagcgcaggtttggctcgcgggagctgctgcgggggcacctgcaggagaggcacgcgcagagcaaggccgggccctgggcgtgcggcatgtgcctgaaggaggtggccgacgtctggatgtacaacgagcacctgcgtgagcacgcggtccgcttcgcccgcagggggcaggcgcggaggtccttgggggacctgcccggaggcctggagggcagcagcgctgtcgcccaccttctgaacagcatcacggaacccgcgcccaaacaccacaggggcaagcgctccgccggcaaggccgccgggagcccgggagacccgtgggggcaagagggagaagccaagaaagacagcccgggcgagagggcgaaaccccgggcacgcagcacccccagcaacccagacggggccgcgaccccagacagcgcctctgccaccgccctggctgacgccggcagcccgggcccccccaggacgacccccagcccgtcccccgacccctgggccggcggggagcccctcctgcaagccaccccggtgcacgaggcctgcaaggacccctcccgcgactgccaccactgcgggaagcgcttccccaagcccttcaagctgcagcgccacctggcggtgcacagcccgcagcgcgtctacctgtgcccccggtgcccccgggtctaccccgagcacggggagctgctggcacacctgggcggggcgcacgggctgctggagcggccggagctgcagcacacgccgctgtatgcctgcgagctctgcgccacggttatgcgcatcatcaagaagtccttcgcctgcagctcctgcaactacaccttcgccaagaaggagcagttcgaccgccacatgaacaagcacctcaggggggggcggcagcccttcgcgttccgcggcgtgcggaggccgggagcgccgggacagaaggcccgggccctcgagggcacactgcccagcaaacggcgcagggtggccatgcccggcagtgcccctgggcccggcgaggacaggcctcctccccggggaagcagccccatcctgagtgagggctctctcccggccctgctccacctgtgttcggaggtggctcccagcaccaccaagggatggcccgagaccctagagaggcctgtagaccccgtgacccacccgatcagaggttgtgagctgccatccaaccaccaggagtgtcccccgccgtctctgtctcccttcccagctgccttggctgatggcagaggagactgcgcgctggacggagccctggagaggccagagaacgaggcttccccaggcagccccgggcctcttctccagcaagctctccctctgggggcatctctgccgcggccgggagccagaggccaagatgcggagggaaagagggctcctctcgtgttctcagggaaacgcagggccccgggtgcccgtggcaggtgtgcccctgaccatttccaggaagaccacctacttcagaaagagaaggaggtgtcctcaagccacatggtgtctgagggggggccccgaggcaccttccacaagggcagcgccaccaagcctgcgggctgccagagctcatcaaaggacaggtcggcagcatccacccccagcaaagcactcaagttcccagtgcacccaaggaaggcggtggggagcctggcacccggggagctggcccgtggcacagagaatgggatgaagcccgccacccccaaagccaaacccggccccagctcccagggcagtggaagccctcgccccggcaccaagacaggaggtggcagccagccccagccagccagcgggcagctccagagcgagacagccaccaccccagccaagcccagcttccccagccggagccctgcaccagagaggctccccgctcgagcccaagccaagagctgcaccaaggggccaagggaagctggtgagcaggggccccacgggagcctaggtcccaaggagaagggagagagcagtacgaagaggaaaaagggccaggtcccagggccagccaggagtgaaagtgtggggagcttcgggagagccccctcagcccctgacaagcccccccggacccctcggaagcaggcaactcccagccgcgtgctcccgaccaagcccaagcccaacagccagaacaaacccaggccgccaccatcagagcagcggaaggcagagccgggccacacacagaggaaggacagactgggcaaggccttcccccaggggagacccctgctcaggccccccaagaggggcacagctgtccacggtgctgaacctgccgagccacacacccaccggacggccgaggcccagagtgacctcctcagccagctcttcgggcagagactaactggcttcaaaatccctttaaagaaagatgcttccgagtaatttctaggagcaagagcctgggaccggagctgggcgttcctgtctcggcctgcctccttggccagctccggctccctgagatggtccactctgtggccacttgacttcttgtgcaactgctcaggccttgatgtcagagctgaggtggtgatgctttgaacagggcccaggtgggcagcattccctttcttgctggaaggctgggggtgaaagacggggccactgcagcccttttgagaccacacagctgttttcttggtaccaagtacttgaagagacagcagcccatcccctcagcccacacccctgcgccctgtgggcaccgacaccacagaagccaatgtttggagatttgcacaacctcccgttcccccacatggagaagggaagtaagttgaggcagccgtgggatggtggtaggttccctcttagtcttgctgctgttgctggaattccaaagtgaccttagaaaccacgtgggggaaggcagtgctcactacttagaagggttgcttctgagccgcctggtcccccaagagcacaacaggcctcctccctctgaccacagggtcatgcctcctccctctgaccacagggtcatgccagcctccatttgctctgcgggagaaaagcccatctctagcacaccttgaccccaggaaccgggttcccgtatggaactgggaagaaaccgcccctgtgccagctcccgcgggccctcctcgttccctcccagcctccatggccgccctctagagcctccctgctgtacggagctctgggctccgcctatttgcaatgttactctgaagtttctggtgctatttttgtgttgtaatgtgaatacaggcttccttgatttttttttttaatgggggtattgggtgggacagacggggtcagggaggccccaccatggcttgtcgagggcacgggcacctgcatggcggcgctctccctgcctcccctgccgggctgcaagcctgaggtctgtgctgccagacggggatgctcagggctggggctgcagagccgctgccctggccagggcaccctcatgcaccgacccaacccaggcctgggacgcacgtgtcctctcacagcgtcgtgcctgtgaaggtgggtcaaagggtgagagggcttccttctcacccttctctccataagtatcttgaagatccatggtttgttttgctctattgtttagtttttacttgggtgcaatgtgtacgtcaaaagtttttattttgatatttgaaagagaccaaatcaggcccagaccgcctctctggaaggtgttgtaggccattcaaaacgcctccggagtgtcgcaaaccaagtgcggaggggccctgaggttgtactgtaaacatcatagtgacttgtcttttcaaatatattcccactattttcgcagaaaacctc

SEQ ID NO: 44982 - protein, 157 aa, Artificial Sequence
  derived and/or modified sequence
MATSVLCCLRCCRDGGTGHIPLKEMPAVQLDTQHMGIWGIGVATQKVNLNQIPLGRDMHSLVMRNDGALYHNNEEKNRLPANSLPQEGDVVGITYDHVELNVYLNGKNMHCPASGIRGTVYPVVYVDDSAILDCQFSEFYHTPPPGFEKILFEQQIF

SEQ ID NO: 44983 - DNA, 474 bp, Artificial Sequence
  derived and/or modified sequence
atggccaccagcgtgctgtgctgcctgagatgctgcagagacggcggcaccggccacatccccctgaaggagatgcccgccgtgcagctggacacccagcacatgggcatctggggcatcggcgtggccacccagaaggtgaacctgaaccagatccccctgggcagagacatgcacagcctggtgatgagaaacgacggcgccctgtaccacaacaacgaggagaagaacagactgcccgccaacagcctgccccaggagggcgacgtggtgggcatcacctacgaccacgtggagctgaacgtgtacctgaacggcaagaacatgcactgccccgccagcggcatcagaggcaccgtgtaccccgtggtgtacgtggacgacagcgccatcctggactgccagttcagcgagttctaccacacccccccccccggcttcgagaagatcctgttcgagcagcagatcttctag

SEQ ID NO: 44984 - DNA, 474 bp, Artificial Sequence
  derived and/or modified sequence
atggccaccagtgtgctctgctgtctgaggtgttgtagagacggtggcaccggacatattcccctgaaggagatgccggcagtgcagctcgacactcagcacatggggatatggggtattggagttgccacacagaaggtcaatctcaatcagatccctttgggccgcgatatgcactccttggtcatgagaaatgatggcgccttgtaccacaataacgaggaaaaaaatcggctacctgcgaactcgctgcctcaagagggcgacgtggtggggattacctatgaccacgtggagttgaacgtttacctgaacggtaagaacatgcactgcccagcttccggcatacgcggcactgtgtaccctgtggtttatgtcgacgacagtgcaatcctagattgccagttctcagagttttaccacactccccctcctggcttcgagaaaatcctgttcgagcagcagattttctag

SEQ ID NO: 44985 - DNA, 474 bp, Artificial Sequence
  derived and/or modified sequence
atggccacctctgtgctgtgctgcctgcgctgctgcagagatggcggcaccggccacatccccctgaaggagatgcctgctgtgcagctggacacccagcacatgggcatctggggcatcggcgtggccacccagaaggtgaacctgaaccagatccccctgggccgggacatgcacagcctggtgatgagaaatgatggagccctgtaccacaacaatgaggagaagaaccggctgcctgccaacagcctgccccaggagggagatgtggtgggcatcacctatgaccacgtggagctgaatgtgtacctgaatggcaagaacatgcactgcccagccagcggcatccggggcaccgtgtaccctgtggtgtatgtggatgattctgccatcctggactgccagttcagcgagttctaccacaccccacctcctggctttgagaagatcctgtttgagcagcagatcttctag

SEQ ID NO: 44986 - DNA, 474 bp, Artificial Sequence
  derived and/or modified sequence
atggccaccagcgtgctgtgctgcctgcggtgctgccgggacggcggaactgggcacattccgctcaaggagatgccagccgtgcaactggatacccaacatatggggatttggggaatcggggtggctacacagaaagtaaacttgaaccagattcccctcggccgcgatatgcacagtctggttatgcgaaatgatggcgccctctatcacaataacgaggaaaagaacagactgcctgccaactctctgcctcaggagggcgatgtggtgggcattacctatgaccacgtggaactgaacgtgtacctgaacgggaagaacatgcattgtccagcctcgggtatacgcggaactgtttaccccgtagtatacgtcgacgacagtgccatcttggactgccaattttccgaattctaccatactcctcctcccggattcgagaagattctgttcgagcagcaaatattttag

SEQ ID NO: 44987 - DNA, 474 bp, Artificial Sequence
  derived and/or modified sequence
atggctacaagtgtgttatgttgcctgcgctgctgtcgggacggtggaacgggacatatacctcttaaagagatgcccgctgtccaactggacacacaacacatgggcatctggggcataggcgtagcaacacagaaagtaaacctcaaccagattccgctggggcgagacatgcacagtttggtcatgaggaacgacggggctctttaccataacaacgaggagaagaatcggctgccagctaacagtctgccccaggagggcgatgtggtgggtatcacatatgaccacgtggaactcaatgtttatttaaacggaaagaacatgcactgtccagcttccggaatccggggaacagtgtaccctgtggtgtacgtagacgacagcgccattctggattgccagttttcagaattctaccacacccctcctccagggttcgaaaagatactgtttgagcagcagatattctag

SEQ ID NO: 44988 - DNA, 3086 bp, Artificial Sequence
  derived and/or modified sequence
ccgtctccccggcccagcccggccgctcgccctgtccggtctctccccggccccttgattctccgcgtcttcctcgcaggccagcctaagctcagcctgcattgcgccctcccggcctagggtgtcgctgtaccggcctccgagctccacatagacaagtccggacctcgggcgggggcaggagacggagctgagcggcggggggcagtgtcgcctcggtctagggacggcggcggagtcggtggtccctgcgcgatggccacctcggtgttgtgctgcctgcggtgctgcagagacggggggactggccacatccctctgaaggagatgccggccgtgcagctggacacgcagcacatgggaatctggggtattggtgttgcaactcagaaggttaacttgaatcagattcctcttggccgagatatgcacagtctggtgatgagaaatgatggagccctttaccacaacaatgaagagaaaaataggctgccagcaaacagtcttccgcaggaaggagatgtggtgggtattacttatgaccatgtcgaattaaatgtatacttgaatggaaaaaacatgcattgtccagcatcaggtatacgagggacagtgtatccagttgtttatgttgatgacagtgcaattttggattgccagttcagtgagttttatcatacgcctccacctggttttgaaaaaatattatttgaacagcaaatcttctgaatgtatttgtttttaaaacttgtatttctgcactgttaaaaaatgttcatcatttaataaaactttacctggcctatagatgaaaatatattcttaaaaatatgcttgttgatgctgtctaaggaaccaatgtattcagtataccaccctgaagttgtgatttaaaatactttatgttttgtgaaatgaaaataagcatttgggcagtttatttaattcttatttaaataaatagaattatgggtttaattaacagtataacatgactatatatacatatatatttaaagggaattctttcttacataatatatttgttttgatagagatgtagagttgggtgggtgtttttgtcactctgaagtttagacctcattaaatatttgacatctacagttggataattttgccgcttagtgtccttttttatatacaatataacaaagtgagagaaatttatattactggcaatttcatttttggcagtctatttctgtatcatgtaccgcttttcttaaaacttaaattgcttattttgttgtgtaatgtcattgcttttgatttgctttgtgaaaggagataaacgtttcagtaattgtcagagcattttgttgcctcaggctgtgttacctcaatttcagagtaagtagtggttgattagtaatgtagtatacactggcagacatctagaatagtatgatgctttacatttaaatgaggttattcttttaaggacttttatttgtatgttttctgtaaggaataataaaataattgtaattaaggaatataccatactatattaaacacattcttcctattttgttagttatacactaaattcacatcacccgtgattatttcagttcagagataagtgaatcctcttcatgaccctgagtctttgcctggttcttaagaatcactgtcctttagttaacgccctgtgacctgaaccaatcactctatacatctttagatacgttgtctgttttcaaatgagcatggcaaggatgcatacatttccctcctttatcaactagaaacagtacattgttcaggaaaacatgagtgttagaattagaaagagatccaaattgtagttttgctgctcatcctattttctcctctccaagtctcagattcccatttataaaaggagcaatcatactgacataagattctatgattaaataaggtaatacatatataacaccttaataatcataggcacttgcgccaggcgcggtggctcacacctgtaatcccagcactttgggaggctgaggcgggaggatcacaaggtcaggagatcgagaccatcgtggctaacatggtgaaaccctggctctactaaaaaaatacaaaaaaaattagccaggtgtggtggcgggcgcctgtagttctagctactctggaggctgaggcaggagaatggcttgaacccgggagacggcgcttgcagtgagccgagattgccccactgcactccagcctaggcaacagagtgagactctgtctcaaaaaaaattaaaataaaataaaataaaaatcataggcacttagtaagtgtagtttcctggatggtaaagtatcagggaaagtggttttctttctttttttttttttctcgttttttttttgagacagagtctcaccttgtcacccaggctagagtgcagtggcacgatcttggctcactgcaacctctgcttcccaggtttaagcgattctcttgcctcagcctcccgagtaggtgggactacaggtgcccgccaccacgcccgtgtaatttttgtatttttagtagagatggggtttcaccatgttgtccaggctggtctcaaactcctgacctcatgatccacctccctcagcctcccaaagtgctggaattataggcgtaagccaccacacccagccagaaagtggttctcatgatgcttctcagaccggcaacatcagcatcactggaacttgttaaaaatggacactctcagaacccacaccagacccaccaaatcagtttgagaactgccattcagtagagaattatttgcctactgtaaattttctaaggatttatgatgggctatttttgacccataggctcagagaatcctgcaaaatccttttttattgtttattctgcagacaaaaatgtgacaatatgctttgaaaacatagatatacttgagtaacatttatttacataaatcccaaattctacctctgaaggtatatgaaatttaactatgtatgtattatgcattttgtctggctttctatcataattttaatttgtaaagaatgtgcttacttgggaaagcaaattaaagtgactactgtttgctatc

SEQ ID NO: 44989 - protein, 2692 aa, Artificial Sequence
  derived and/or modified sequence
MMNNSGYSDAGLGLGDETDEMPSTEKDLAEDAPWKKIQQNTFTRWCNEHLKCVGKRLTDLQRDLSDGLRLIALLEVLSQKRMYRKFHPRPNFRQMKLENVSVALEFLEREHIKLVSIDSKAIVDGNLKLILGLIWTLILHYSISMPMWEDEDDEDARKQTPKQRLLGWIQNKVPQLPITNFNRDWQDGKALGALVDNCAPGLCPDWEAWDPNQPVENAREAMQQADDWLGVPQVIAPEEIVDPNVDEHSVMTYLSQFPKAKLKPGAPVRSKQLNPKKAIAYGPGIEPQGNTVLQPAHFTVQTVDAGVGEVLVYIEDPEGHTEEAKVVPNNDKDRTYAVSYVPKVAGLHKVTVLFAGQNIERSPFEVNVGMALGDANKVSARGPGLEPVGNVANKPTYFDIYTAGAGTGDVAVVIVDPQGRRDTVEVALEDKGDSTFRCTYRPAMEGPHTVHVAFAGAPITRSPFPVHVSEACNPNACRASGRGLQPKGVRVKEVADFKVFTKGAGSGELKVTVKGPKGTEEPVKVREAGDGVFECEYYPVVPGKYVVTITWGGYAIPRSPFEVQVSPEAGVQKVRAWGPGLETGQVGKSADFVVEAIGTEVGTLGFSIEGPSQAKIECDDKGDGSCDVRYWPTEPGEYAVHVICDDEDIRDSPFIAHILPAPPDCFPDKVKAFGPGLEPTGCIVDKPAEFTIDARAAGKGDLKLYAQDADGCPIDIKVIPNGDGTFRCSYVPTKPIKHTIIISWGGVNVPKSPFRVNVGEGSHPERVKVYGPGVEKTGLKANEPTYFTVDCSEAGQGDVSIGIKCAPGVVGPAEADIDFDIIKNDNDTFTVKYTPPGAGRYTIMVLFANQEIPASPFHIKVDPSHDASKVKAEGPGLNRTGVEVGKPTHFTVLTKGAGKAKLDVQFAGTAKGEVVRDFEIIDNHDYSYTVKYTAVQQGNMAVTVTYGGDPVPKSPFVVNVAPPLDLSKIKVQGLNSKVAVGQEQAFSVNTRGAGGQGQLDVRMTSPSRRPIPCKLEPGGGAEAQAVRYMPPEEGPYKVDITYDGHPVPGSPFAVEGVLPPDPSKVCAYGPGLKGGLVGTPAPFSIDTKGAGTGGLGLTVEGPCEAKIECQDNGDGSCAVSYLPTEPGEYTINILFAEAHIPGSPFKATIRPVFDPSKVRASGPGLERGKVGEAATFTVDCSEAGEAELTIEILSDAGVKAEVLIHNNADGTYHITYSPAFPGTYTITIKYGGHPVPKFPTRVHVQPAVDTSGVKVSGPGVEPHGVLREVTTEFTVDARSLTATGGNHVTARVLNPSGAKTDTYVTDNGDGTYRVQYTAYEEGVHLVEVLYDEVAVPKSPFRVGVTEGCDPTRVRAFGPGLEGGLVNKANRFTVETRGAGTGGLGLAIEGPSEAKMSCKDNKDGSCTVEYIPFTPGDYDVNITFGGRPIPGSPFRVPVKDVVDPGKVKCSGPGLGAGVRARVPQTFTVDCSQAGRAPLQVAVLGPTGVAEPVEVRDNGDGTHTVHYTPATDGPYTVAVKYADQEVPRSPFKIKVLPAHDASKVRASGPGLNASGIPASLPVEFTIDARDAGEGLLTVQILDPEGKPKKANIRDNGDGTYTVSYLPDMSGRYTITIKYGGDEIPYSPFRIHALPTGDASKCLVTVSIGGHGLGACLGPRIQIGQETVITVDAKAAGEGKVTCTVSTPDGAELDVDVVENHDGTFDIYYTAPEPGKYVITIRFGGEHIPNSPFHVLATEEPVVPVEPMESMLRPFNLVIPFAVQKGELTGEVRMPSGKTARPNITDNKDGTITVRYAPTEKGLHQMGIKYDGNHIPGSPLQFYVDAINSRHVSAYGPGLSHGMVNKPATFTIVTKDAGEGGLSLAVEGPSKAEITCKDNKDGTCTVSYLPTAPGDYSIIVRFDDKHIPGSPFTAKITGDDSMRTSQLNVGTSTDVSLKITESDLSQLTASIRAPSGNEEPCLLKRLPNRHIGISFTPKEVGEHVVSVRKSGKHVTNSPFKILVGPSEIGDASKVRVWGKGLSEGHTFQVAEFIVDTRNAGYGGLGLSIEGPSKVDINCEDMEDGTCKVTYCPTEPGTYIINIKFADKHVPGSPFTVKVTGEGRMKESITRRRQAPSIATIGSTCDLNLKIPGNWFQMVSAQERLTRTFTRSSHTYTRTERTEISKTRGGETKREVRVEESTQVGGDPFPAVFGDFLGRERLGSFGSITRQQEGEASSQDMTAQVTSPSGKVEAAEIVEGEDSAYSVRFVPQEMGPHTVAVKYRGQHVPGSPFQFTVGPLGEGGAHKVRAGGTGLERGVAGVPAEFSIWTREAGAGGLSIAVEGPSKAEIAFEDRKDGSCGVSYVVQEPGDYEVSIKFNDEHIPDSPFVVPVASLSDDARRLTVTSLQETGLKVNQPASFAVQLNGARGVIDARVHTPSGAVEECYVSELDSDKHTIRFIPHENGVHSIDVKFNGAHIPGSPFKIRVGEQSQAGDPGLVSAYGPGLEGGTTGVSSEFIVNTLNAGSGALSVTIDGPSKVQLDCRECPEGHVVTYTPMAPGNYLIAIKYGGPQHIVGSPFKAKVTGPRLSGGHSLHETSTVLVETVTKSSSSRGSSYSSIPKFSSDASKVVTRGPGLSQAFVGQKNSFTVDCSKAGTNMMMVGVHGPKTPCEEVYVKHMGNRVYNVTYTVKEKGDYILIVKWGDESVPGSPFKVKVP

SEQ ID NO: 44990 - DNA, 9042 bp, Artificial Sequence
  derived and/or modified sequence
cggccctggagggagagagagccagagagcggccgagcgcctaggaggcccgccgagcctcgccgagccccgccagccccggcgcgagagaagttggagaggagagcagcgcagcgcagcgagtcccgtggtcgcgccccaacagcgcccgacagcccccgatagcccaaaccgcggccctagccccggccgcacccccagcccgcgccagcatgatgaacaacagcggctactcagacgccggcctcggcctgggcgatgagacagacgagatgccgtccacggagaaggacctggcggaggacgcgccgtggaagaagatccagcagaacacattcacgcgctggtgcaatgagcacctcaagtgcgtgggcaagcgcctgaccgacctgcagcgcgacctcagcgacgggctccggctcatcgcgctgctcgaggtgctcagccagaagcgcatgtaccgcaagttccatccgcgccccaacttccgccaaatgaagctggagaacgtgtccgtggccctcgagttcctcgagcgcgagcacatcaagctcgtgtccatagacagcaaggccatcgtggatgggaacctgaagctgatcctgggcctgatctggacgctgatcctgcactactccatctccatgcccatgtgggaggatgaagatgatgaggatgcccgcaaacagacgcccaagcagcggctgcttggctggatccagaacaaggtgccccagctgcccatcaccaacttcaaccgtgactggcaggacggcaaagctctgggcgccctggtggacaactgcgcccccggtctctgccccgactgggaggcctgggaccccaaccagcccgtggagaacgcccgggaggccatgcagcaggccgacgactggcttggggtgccccaggtcattgcccctgaggagattgtggaccccaacgtggatgagcattctgttatgacctacctgtcccagttccccaaggccaagctcaaacctggtgcccctgttcgatccaagcagctgaaccccaagaaagccatcgcctatgggcctggcatcgagccacagggcaacaccgtgctgcagcctgcccacttcaccgtgcagacggtggacgcgggcgtgggcgaggtgctggtctacatcgaggaccctgaaggccacaccgaggaggctaaggtggttcccaacaatgacaaggatcgcacctatgctgtctcctatgtgcccaaggtcgctgggttacacaaggtgaccgtgctctttgctggccagaacattgaacgcagtccctttgaggtgaacgtgggcatggccctgggagatgccaacaaggtgtcagcccgtggccctggcctggaacctgtgggcaatgtggccaacaaacccacctactttgacatctacactgcgggggccggcactggcgatgttgctgtggtgatcgtggacccacagggccggcgggacacagtggaggtggccctggaggacaagggtgacagcacgttccgctgcacatacagacctgccatggaggggccacataccgtgcatgtggcctttgcgggtgcccccatcacccgcagtcccttccctgtccatgtgtcggaagcctgtaaccccaacgcctgccgcgcctctgggcgaggcctgcagcccaagggtgttcgcgtgaaagaggtggctgacttcaaggtgtttaccaagggtgccggcagcggggagctcaaggtcacggtcaaggggccaaagggcacagaggagccagtgaaggtgcgggaggctggggatggtgtgttcgagtgcgagtactacccggtggtgcctgggaagtatgtggtgaccatcacgtggggcggctacgccatccctcgcagcccctttgaggtacaggtgagcccagaggcaggagtgcaaaaggtccgggcctggggtcctggtttggagactggccaggtgggcaagtcagccgattttgtggtggaagccattggcaccgaggtggggacactgggcttctccatcgaggggccctcacaagccaagatcgaatgtgacgacaagggggatggctcctgcgatgtgcggtactggcccacggagcctggggagtacgctgtgcacgtcatctgtgacgatgaggacatccgagactcacccttcattgcccacatcctgcccgccccacctgactgcttcccagataaggtgaaggcctttgggcctggcctggagcctaccggctgcatcgtggacaagcccgctgagttcaccattgatgctcgtgcagctggcaagggagacctgaagctctatgcccaggacgccgacggctgtcccatcgacatcaaggtgatccccaacggcgacggcaccttccgctgctcctacgtgcccaccaagcccattaagcacaccatcatcatctcctggggaggcgtaaacgtgcccaagagccccttccgggtgaacgtgggcgagggcagccaccccgagcgggtaaaggtgtacggccccggagtggagaagacaggcctcaaggccaatgagcccacctacttcacggtggactgcagcgaggcggggcaaggcgacgtgagcatcggcatcaagtgcgccccaggcgtggtgggccctgcagaggctgacattgacttcgacatcatcaagaatgacaacgacaccttcaccgtcaagtacacgccaccaggggcgggccgctacaccatcatggtgctgtttgccaaccaggagatccccgccagccccttccacatcaaggtggacccatcccacgatgccagcaaagtcaaggccgagggccctgggctgaatcgcacaggtgtggaagtcgggaagcccacccacttcacggtgctgaccaagggagccggcaaggccaagctggatgtgcagtttgcagggacagccaagggcgaggttgtgcgggactttgagatcatagacaaccatgactactcctacactgtcaagtacaccgctgtccagcagggcaacatggcagtgacagtgacttatggcggggaccctgtccccaagagcccctttgtggtgaatgtggcacccccgctggacctcagcaaaatcaaagttcagggccttaatagcaaggtggctgtgggacaggaacaagcattctctgtgaacacacgaggggctggcggtcagggccaactggatgtgcggatgacttcgccctctcgccggcccatcccctgcaagctggagccaggcggtggagcggaagcccaggctgtgcgctacatgcccccggaggaggggccctacaaggtggatatcacctacgatggtcacccggtgcctggcagcccgtttgctgtggagggtgtcctgccccctgatccctccaaggtctgtgcttatggcccgggtctcaagggtggactggtaggcacccccgcgccattctccatcgacaccaagggggctggcacaggtggcctggggctgaccgtagagggcccctgcgaggccaagatcgagtgccaggacaatggtgatggctcatgtgctgtcagctacctgcccacggagcctggcgagtacaccatcaacatcctgtttgctgaggcccacatccctggctcgcccttcaaagccaccattcggcctgtgtttgacccgagcaaggtgcgggccagtggaccgggcctggagcgcggcaaggtcggtgaggcagccaccttcactgtggactgctcagaggcaggcgaggcggagctgaccattgagatcctgtcggatgccggggtcaaggccgaggtgctgatccacaacaacgcggatggcacctaccacatcacctacagccctgccttccctggcacctacaccattaccatcaagtatggcgggcatcccgtgcccaaattccccacccgtgtccatgtgcagcctgcggtcgataccagtggcgtcaaggtctcagggcctggtgttgagccacacggtgtcctgcgggaggtgaccactgagttcactgtggatgcaagatccctaacagccacaggcggcaaccacgtgacggctcgtgtgctcaacccctcgggggccaagacagacacctatgtgacagacaatggggacggcacctaccgagtgcagtacaccgcctacgaggagggcgtgcatctggtggaggtcctgtatgatgaggtcgctgtgcccaagagccccttccgagtgggcgtgaccgagggctgtgatcccacccgcgtccgagccttcgggccaggcctggagggtggcttggtcaacaaggccaaccgattcactgtggagaccaggggagcgggcaccgggggccttggcctagccatcgagggtccctcggaagccaagatgtcctgcaaggacaacaaggatggtagctgcaccgtggagtacatccccttcactcctggagactatgacgtcaacatcaccttcggggggcggcccatcccagggagcccgttccgcgtgccagtgaaggatgtggtggaccctgggaaggtgaagtgctcagggccagggctgggggctggtgtcagggcccgggttcctcagaccttcacagtggattgcagtcaagctggccgggcgcccctgcaggtggctgtgctgggccccacaggtgtggccgagcctgtggaggtgcgggacaatggagatggcacccacactgtccactacaccccagccactgacgggccctacacggtagccgtcaagtatgctgaccaggaggtgccacgcagccccttcaagatcaaggtcctcccagctcatgatgccagcaaggtgcgggccagcggcccaggcctcaacgcctctggcatccctgccagcctgcctgtggagttcaccatcgacgcacgggacgcgggcgaggggttgctcactgtccagatcttggaccccgagggtaagcccaagaaggccaacatccgggacaatggggatggcacgtacactgtgtcctacctgccggacatgagtggccggtacaccatcaccatcaagtatggcggtgatgagatcccctactcgcccttccgcatccatgctctgcccactggggatgccagcaagtgcctcgtcacagtgtccattggaggccatggcctgggtgcctgcctgggccctcgaatccagattgggcaggagacggtgatcacggtggatgccaaggcagccggtgaggggaaggtgacatgcacggtgtccacgccggatggggcagagctcgatgtggatgtggttgagaaccatgacggtacctttgacatctactacacagcgcccgagccgggcaagtacgtcatcaccatccgcttcgggggtgagcacatccccaacagccccttccacgtgctggccacagaggagccagtggtgcctgtggagccaatggagtccatgctgaggcccttcaacctggtcatccccttcgcggtgcagaaaggggagctcacaggagaggtgcggatgccctcggggaagacggcacggcccaacatcaccgacaacaaggacggcaccatcacggtgaggtatgcacccactgagaaaggcctgcaccagatggggatcaagtatgacggcaaccacatccctgggagccccttacagttctatgtggatgccatcaacagccgccatgtcagtgcctatgggccaggcctgagccatggcatggtcaacaagccagccaccttcactattgtcaccaaagatgctggagaagggggtctgtcactggccgtggagggcccatccaaggcagagatcacctgtaaggacaacaaggatggcacctgcaccgtgtcctatctgccgactgcgcctggagactacagcatcatcgtgcgcttcgatgacaagcacatcccggggagccccttcacagccaagatcacaggtgatgactccatgaggacctcacagctgaatgtgggcacctccacggacgtgtcactgaagatcaccgagagtgatctgagccagctgaccgccagcatccgtgccccctcgggcaacgaggagccctgcctgctgaagcgcctgcccaaccggcacattgggatctccttcacccccaaggaggtcggggagcacgtggtgagcgtgcgcaagagtggcaagcatgtcaccaacagccccttcaagatcctggtggggccatctgagatcggggacgccagcaaggtgcgggtctggggcaaggggctttccgagggacacacattccaggtggcagagttcatcgtggacactcgcaatgcaggttatgggggcttggggctgagtattgaaggcccaagcaaggtggacatcaactgtgaggacatggaggacgggacatgcaaagtcacctactgccccaccgagcccggcacctacatcatcaacatcaagtttgctgacaagcacgtgcctggaagccccttcactgtgaaggtgaccggcgagggccgcatgaaggagagcatcacccggcggagacaggcaccttccatcgccaccatcggcagcacctgtgacctcaacctcaagatcccaggaaactggttccagatggtgtctgcccaggagcgcctgacacgcaccttcacacgcagcagccacacctacacccgcacggagcgcacggagatcagcaagacgcggggcggggagacaaagcgcgaggtgcgggtggaggagtccacccaggtcggcggggaccccttccctgctgtgtttggggacttcctgggccgggagcgcctgggatccttcggcagcatcacccggcagcaggagggtgaggccagctctcaggacatgactgcacaggtgaccagcccatcgggcaaggtggaagccgcagagatcgtcgagggcgaggacagcgcctacagcgtgcgctttgtgccccaggaaatggggccccatacggtcgctgtcaagtaccgtggccagcacgtgcccggcagcccctttcagttcactgtggggccgctgggtgaaggtggtgcccacaaggtgcgggccggaggcacagggctggagcgaggtgtggccggcgtgccagccgagttcagcatctggacccgggaggctggcgctgggggcctgtccattgctgtggagggtcctagcaaagcggagattgcatttgaggatcgcaaagatggctcctgcggcgtctcctatgtcgtccaggaaccaggtgactatgaggtctccatcaagttcaatgatgagcacatcccagacagcccctttgtggtgcctgtggcctccctctcggatgacgctcgccgtctcactgtcaccagcctccaggagacggggctcaaggtgaaccagccagcgtcctttgccgtgcagctgaacggtgcccggggcgtgattgatgcccgggtgcacacaccctcgggggctgtggaggagtgctacgtctctgagctggacagtgacaagcacaccatccgcttcatcccccacgagaatggcgtccactccatcgatgtcaagttcaacggtgcccacatccctggaagtcccttcaagatccgcgttggggagcagagccaggctggggacccaggcttggtgtcagcctacggtcctgggctcgagggaggcactaccggtgtgtcatcagagttcatcgtgaacaccctgaatgccggctcgggggccttgtctgtcaccattgatggcccctccaaggtgcagctggactgtcgggagtgtcctgagggccatgtggtcacttatactcccatggcccctggcaactacctcattgccatcaagtacggtggcccccagcacatcgtgggcagccccttcaaggccaaggtcactggtccgaggctgtccggaggccacagccttcacgaaacatccacggttctggtggagactgtgaccaagtcctcctcaagccggggctccagctacagctccatccccaagttctcctcagatgccagcaaggtggtgactcggggccctgggctgtcccaggccttcgtgggccagaagaactccttcaccgtggactgcagcaaagcaggcaccaacatgatgatggtgggcgtgcacggccccaagaccccctgtgaggaggtgtacgtgaagcacatggggaaccgggtgtacaatgtcacctacactgtcaaggagaaaggggactacatcctcattgtcaagtggggtgacgaaagtgtccctggaagccccttcaaagtcaaggtcccttgaatcccaaaagtgcctccccagcctcagcccccacctccagccacacacacattacacacacacacacacacacacaaatgtgccacacccagacacgcacagaatcagacactacaaacacctgccttgggggtgaagtgaaggcccagcctccccaccccaccgcgccccaggggttggaggaccttgtctgtgtcaggacagtgtccctccctgggaatgtgacatgagggccgactggggccaggctcaggggcagaggctgggacacaaggggctggcgagggctgcgaggccagggaagccctgagtttctggcggggctgagcagtgggggagcattgtgttgtgggtgtctgtgtgtgaggtcaccctcaaactgcaccgccggccagataccctcctgaccccgaggacttggtctggtctctctggtggctacaaccccagagttttaaggacttggaaaggaaagcacaatcagagaagaaaacagcccccgaaccagcaggagtggcctggcacatggaccggcctgagcgatgtgcactccacccaagccaggctcccagggggcctgatttctctctcactgtctctttttttaaaatggttgcacggctctgccccatggggggccttttttacacactgcgaggcccagctttctaggggacttttgcacatgtcatgcagctcagctgggagctgcttaggtggaaaactccaaataaagtgcggctgtcgcaga

SEQ ID NO: 44991 - DNA, 8079 bp, Artificial Sequence
  derived and/or modified sequence
atgatgaacaattccggttattctgacgcaggactgggactcggtgacgaaactgatgaaatgccaagcacagagaaagatctggccgaggatgcaccctggaagaaaattcagcagaatactttcactaggtggtgcaatgagcatttgaaatgtgtgggaaagcggctgacagacctgcagagagatctcagcgacggactgcgcctgattgccctgctcgaagtactgtctcagaaaaggatgtatcgcaagttccacccacgaccaaatttcagacagatgaaactggaaaatgtcagtgttgccctcgagtttctggagcgggaacatatcaagctggtgagcattgacagtaaggccatcgttgacggcaatctgaagctcatcttgggccttatctggacactcatactccactacagtatttccatgcccatgtgggaagacgaagatgatgaagacgctagaaagcagacccccaagcagagattgctggggtggatccagaacaaagttccgcagctgcctattactaacttcaatagagattggcaggacggtaaagcactgggagcacttgttgacaactgtgcgccgggactgtgtcccgattgggaggcctgggatccaaaccagcctgtggagaacgccagagaagctatgcagcaggcagacgactggcttggggtcccccaagtgattgcccctgaagaaatcgtggacccgaatgtggatgagcacagcgtaatgacctatttaagccagttccccaaggctaagcttaagccaggtgccccggtacggtcaaagcagttgaaccccaaaaaggccattgcgtacgggccaggaatcgaaccacaggggaatacggtcttgcagccagcccatttcaccgtgcagacagtggatgccggcgtgggggaggttctggtgtacatcgaggacccagagggccatactgaagaggctaaagtggtgcctaacaatgataaggataggacctatgccgtgtcatacgtgccgaaggtggccgggcttcataaggtgacagtcttattcgctgggcagaatatagaacgctcacccttcgaagtgaatgtgggcatggcactgggcgatgcaaacaaggtaagcgccagaggcccagggttggaacctgttggaaatgtcgcaaacaagcctacttattttgatatttacactgctggagccggcacgggcgatgttgccgtcgtcattgtggacccccaagggcgccgggatacagtggaggtggcacttgaagacaagggcgatagcacattcaggtgtacttacaggcccgctatggagggaccgcacacagtccacgtcgcctttgcaggcgcacctattacacggagcccttttccggtgcatgtgtccgaggcctgcaatcctaatgcttgcagggctagtggaaggggtttacagccaaaaggtgtcagagtaaaagaggtggctgatttcaaggtgtttacgaagggcgccggctctggcgaattaaaggtgacagtgaaagggcctaaaggcacggaggagcccgtgaaagtgcgagaagctggtgatggcgtgttcgaatgcgaatactatccggtcgtgcccgggaaatacgtcgtaactatcacctggggcgggtacgccatcccacgaagcccctttgaggtgcaggtcagccccgaagcaggggtccagaaagtgcgcgcctggggaccaggcctcgagaccggccaggtgggcaagtcagctgattttgtcgtggaagccattggcactgaggtggggactctgggttttagcatcgagggcccttcacaagctaagatcgagtgtgacgacaagggcgatggctcttgcgatgtccgctattggccaactgagcccggcgaatacgcagttcatgtgatctgcgacgacgaagatatccgggacagcccatttatcgcacatatacttcccgcacctccagactgcttccccgacaaggtaaaagcctttggtccaggtctggaaccgaccggttgcatcgtggacaagccagccgagtttactatcgatgcccgcgccgccggcaaaggggacctgaagctgtacgcccaggacgccgatggctgtcccatcgacatcaaggtcattcctaatggggacggaacatttcggtgttcctatgtacctactaaaccgattaagcacaccattataatcagctggggcggagtaaatgttcccaagtcacccttcagggtgaatgtcggagagggctctcacccagagcgggtgaaggtgtacggcccaggagtggaaaagaccggcctgaaggcgaacgaacccacatattttacggtggactgcagtgaagccggccagggagacgtttcaattggcatcaaatgtgccccgggcgtggtcggacccgcagaggcagatatcgatttcgatatcataaaaaatgacaatgacacatttactgtcaagtatacacctccgggggccggccgatacactataatggtactgtttgccaaccaggaaatccccgctagtcccttccacatcaaagtggatcctagccatgacgccagcaaagtgaaggcagagggtccaggactgaaccggaccggggtcgaggtcggaaaacccacccacttcacagtgctgacgaaaggtgccgggaaggccaagcttgatgtgcagtttgcaggcaccgctaaaggggaggtcgtgcgcgacttcgagatcatcgataaccacgattactcttatacggtcaaatacacggcggtccaacaggggaacatggccgtaactgtgacatacgggggtgacccagtccccaaaagccccttcgtcgttaatgtggctcctccactcgatctgtccaagatcaaggttcagggtctcaactccaaggttgcggtgggacaggagcaggcgtttagcgtaaatactcggggggccggaggccagggtcagttagacgtacgcatgacaagcccctctaggcgaccaatcccatgtaaactggaaccgggaggaggagccgaagcccaggctgtgcgctatatgccccccgaggaaggaccctataaggtcgacatcacatatgacggtcatcccgtgccagggagcccttttgccgtggaaggggtgctgcctcctgatccttccaaggtctgcgcctatggtccaggtttgaagggcggcctagttgggacaccagcacccttctctatcgacaccaagggcgcgggaactggagggcttgggctgactgtcgaaggaccctgtgaggcaaagatcgagtgtcaggataacggcgacgggtcttgtgccgtctcctatcttccaacagaaccgggagagtataccatcaatatcctttttgctgaagctcatatcccgggcagccccttcaaagccacaatccggcctgtgttcgacccttccaaggttcgtgccagtggtcctgggctggagagagggaaggtgggtgaagcagctacatttacagtagactgctctgaagccggagaggcggagcttactattgagatcttgagcgacgccggagttaaagccgaggtccttatacacaataacgctgacggcacctaccacataacctactcccctgcatttccaggcacgtacaccataactatcaagtatggcggccatcccgtgcctaaattcccaacacgcgtacacgtgcagcctgctgttgacacatctggggtaaaggtgtccggtcccggagtggagccacatggggtcttaagagaggtaactacagagtttactgtggacgcgcggagtctgacagccactggtggcaaccacgtgacagcccgggtgctgaacccatctggagctaagactgatacctacgtcaccgataatggggatggcacctatcgggtgcaatacaccgcctacgaagaaggtgtgcacttggtggaagttctgtacgacgaggtcgctgtgcccaagagtccctttcgggttggggtgacggaagggtgcgatccgacaagggtccgagcttttgggcccggcctggaaggaggactggtgaataaagctaacaggttcacagttgaaacccggggggccggtacaggcggtctgggacttgctattgaggggccctccgaggccaaaatgtcctgcaaagataataaggacgggtcgtgcactgtcgagtacatccctttcacacctggagattacgatgttaatataacttttggggggcgtcctatccccggatctcctttccgagtccccgtcaaagacgtggtagatccaggcaaggttaaatgtagtgggccagggctgggcgccggcgtacgcgctagggtgcctcagacctttactgtggattgctctcaggctggccgcgctcccctccaagtggctgtgctgggccctactggcgtagccgaacccgtagaagtccgagacaacggggacggtactcatactgtacattacacaccagccacggatggtccttacacagtggccgtgaaatatgcagaccaggaagtgcccagatctccattcaaaataaaagtgctccccgctcacgatgcctctaaagtgcgggcttccgggcccgggctgaatgcgagcggcattccggccagcctaccagtggaattcaccattgacgctcgagatgcaggcgagggactgttaactgttcagatcttagatcccgaggggaagcccaagaaggccaacattcgggacaacggcgacgggacgtacacggtgtcctatctgcctgacatgagtggcagatacacgattaccatcaaatacggtggagatgaaatcccatacagcccattccgcattcacgcacttccaaccggtgacgctagcaagtgcctggtaacagtgtctatcggcggtcacggcttaggcgcatgccttggaccaagaatccaaatcggtcaggaaaccgtcatcactgttgacgccaaggccgctggcgagggtaaggttacttgcactgtcagcacgcccgacggagctgagctggatgtggatgtggtggaaaatcatgatggcactttcgacatatattacaccgcccctgaacctggaaagtatgtcattacaatcaggtttggcggcgagcatatacccaatagcccattccacgtgttggccaccgaggagccagtggtcccagtggagccaatggaatccatgcttcgcccctttaacctggtgattccattcgcagttcaaaaaggtgaactcaccggggaggtgaggatgcctagtggaaaaaccgccagacctaacattacagacaacaaggacggtaccatcactgtgaggtatgctcctaccgagaagggcttgcatcagatgggaattaagtacgatggcaaccacatacctggttctcctctgcagttttacgtggacgcaatcaactcgagacacgtgagtgcttacggcccgggactgtcacatggcatggtgaacaagcccgccacattcacaatcgtgaccaaggacgccggcgagggcggcctgagcctggccgtggagggcccgagtaaggctgagataacatgcaaagataataaggatggtacctgcaccgtgagttaccttcctaccgcccctggagactatagcattatcgtgagattcgatgacaagcacatacccgggtcaccgtttacagcaaaaatcactggcgacgacagcatgcggacctcccagctgaacgtgggcacatcgactgatgtctctctgaagattaccgagagcgacctcagccagctgactgccagtattagagcgcctagtgggaatgaggagccatgcttactgaagagactacctaaccgtcatatcgggataagcttcacccccaaagaggtaggtgagcatgtggtgtctgttcgcaaaagcggaaagcacgtgactaattcaccattcaaaattctcgtgggaccatcggaaattggggacgcatcgaaagttagagtctggggaaaaggtctcagcgaaggccacacctttcaggtggcagagttcatcgttgatactagaaatgccggctatggagggctggggctgagcatagagggtccgtcaaaagtcgacatcaactgcgaagatatggaggatggaacttgcaaagtgacttattgtcctacagaacccgggacatacattattaatatcaagttcgccgacaagcatgtacccggatccccctttaccgtgaaagtcacaggggagggaagaatgaaggaatctatcacccggagacgccaagctccttccattgcaacaatcgggagcacgtgtgatctgaacttaaagattcccggtaattggtttcaaatggtgagcgcacaagagcggctgacaaggacgttcactcggagcagccatacatacacccgcaccgaacggacagagatttcaaagaccaggggtggggaaactaagagggaagtgagagtagaagaatctacccaagtagggggggatccctttcctgccgtctttggagacttcctcggaagagagcgattggggtcatttgggagtataacacgccaacaggagggagaagcaagctcacaagacatgacggcacaggtcacaagcccatcaggcaaggtggaggcagccgagatagttgagggtgaagatagcgcctactctgtccggttcgtccctcaggagatgggacctcatacggtggccgtgaaataccgcgggcagcacgtgccaggaagtccttttcaatttaccgtgggccccctaggcgagggcggggcccacaaggtgagagccggtggaacgggactggaaagaggggtggcaggcgtgcccgccgaattttctatttggacccgggaagcgggggccggcgggctgtctattgctgtagagggtcctagtaaggctgagattgcgttcgaggacagaaaagacggatcatgcggagtctcgtacgtcgttcaagaaccaggcgactacgaggtctccatcaaattcaacgatgaacatatcccagactctccctttgttgtgcctgttgcatcgctcagtgatgacgccagaagactgacagtgacaagtcttcaggagacaggccttaaagttaatcagccagcttcatttgcagtccagctcaatggggccagaggggttattgatgcacgcgtccatactcctagcggagcagtggaagagtgctacgtgagtgagctggattcagacaaacatactatcaggttcatcccgcacgaaaacggggttcatagcattgacgttaaatttaatggcgctcacattcctggctcaccgttcaagattcgggtgggggaacaaagccaagctggggacccagggctcgtgagtgcgtatggcccgggtctcgagggcggaaccaccggtgtgtcaagcgagttcattgtcaacacactgaacgccggttcaggagcactgtcagtgaccatcgatggaccatccaaagtccagctggattgtcgggaatgccccgagggtcacgtcgtgacctacactccgatggcccccggcaactacctgattgcaatcaaatatgggggtcctcagcatatcgtaggatccccttttaaggctaaggtcaccggtcctcggttgtctggaggtcactcactccatgagacctccacagtgctcgtggaaaccgtgacaaaatcaagtagctctcggggtagctcctactcaagtatcccaaagttcagttctgatgcctcgaaggtggtgactcgaggcccaggactgagtcaagcatttgtgggccagaaaaactctttcaccgtggattgcagcaaggctggtacgaacatgatgatggtgggagtgcatggacctaagacgccgtgtgaagaagtgtacgttaaacatatgggtaacagagtgtacaatgtgacatatactgtgaaggagaagggagactacattcttatagttaaatggggtgatgagtcagtgcctgggtcccccttcaaggtgaaggttccctag

SEQ ID NO: 44992 - DNA, 8079 bp, Artificial Sequence
  derived and/or modified sequence
atgatgaacaacagcggctacagtgatgctggcctgggcctgggagatgaaacagatgagatgcccagcacagagaaggacctggccgaggatgccccctggaagaagatccagcagaacaccttcacccgctggtgcaatgagcacctgaagtgtgtgggcaagaggctgacagacctgcagagggacctgagtgatggcctgcggctgattgccctgctggaggtgctgagccagaagaggatgtacaggaagttccacccccggcccaacttccggcagatgaagctggagaatgtgtctgtggccctggagttcctggagcgggagcacatcaagctggtgtccattgacagcaaggccatcgtggatggcaacctgaagctgatcctgggcctcatctggaccctcatcctgcactacagcatctccatgcccatgtgggaggatgaagatgatgaagatgccaggaagcagacccccaagcagaggctgctgggctggatccagaacaaggtgccccagctgcccatcaccaacttcaacagagactggcaggacggcaaggccctgggcgccctggtggacaactgtgcccctggcctgtgcccagactgggaggcctgggaccccaaccagcctgtggagaatgcccgggaggccatgcagcaggctgatgactggctgggcgtgccccaggtgattgcccctgaggagatcgtggaccccaacgtggatgagcacagcgtgatgacctacctgagccagttccccaaggccaagctgaagccaggggcccctgtgcgcagcaagcagctgaaccccaagaaggccatcgcctacggccctggcatcgagccccagggcaacacagtgctgcagcctgcccacttcaccgtgcagacagtggatgctggggtgggggaggtgctggtgtacattgaagatcctgagggccacacagaggaggccaaggtggtgcccaacaatgacaaggacaggacctatgctgtgtcctatgtgcccaaggtggccggcctgcacaaggtgacagtgctgtttgctggccagaacatcgagaggagcccctttgaggtgaatgtgggcatggccctgggagatgccaacaaggtgtctgcccggggccctggcctggagcctgtgggcaatgtggccaacaagcccacctactttgacatctacacagctggagctggcactggagatgtggccgtggtgattgtggacccccagggccggcgggacacagtggaggtggccctggaggacaagggggacagcaccttccgctgcacctacagacctgccatggagggcccccacacagtgcacgtggcctttgctggggcccccatcaccaggagccccttccctgtgcacgtgtctgaggcctgcaaccccaatgcctgccgggccagcggccggggcctgcagcccaagggcgtgcgggtgaaggaggtggccgacttcaaggtgttcaccaagggggccggcagcggggagctgaaggtgacagtgaagggccccaagggcacagaggagcctgtgaaggtgcgggaggccggagatggagtgtttgaatgtgagtactaccctgtggtgcctgggaagtatgtggtgaccatcacctggggcggctacgccatccccaggagcccctttgaggtgcaggtgtccccagaggccggcgtgcagaaggtgcgggcctggggccctggcctggagaccggccaggtgggcaagtctgctgactttgtggtggaggccatcggcacagaggtgggcaccctgggcttcagcattgagggccccagccaggccaagattgaatgtgatgacaagggagatggcagctgtgatgtgcgctactggcccacagagcctggagaatatgctgtgcacgtgatctgtgatgatgaggacatccgggacagccccttcatcgcccacatcctgcctgcccccccagactgcttcccagacaaggtgaaggcctttggacctggcctggagcccaccggctgcatcgtggacaagccagctgagttcaccattgatgcccgggctgctggaaaaggagacctgaagctgtatgcccaggatgctgatggctgccccatcgacatcaaggtgatccccaatggagatggcaccttccgctgcagctatgtgcccaccaagcccatcaagcacaccatcatcatctcctggggcggcgtgaatgtgcccaagagccccttccgggtgaatgtgggggagggcagccaccctgagcgggtgaaggtgtatggccctggggtggagaagacaggcctgaaggccaatgagcccacctacttcaccgtggactgcagcgaggccggccagggagatgtgtccatcggcatcaagtgtgcccctggggtggtgggccctgctgaggccgacatcgactttgacatcatcaagaatgacaatgacaccttcaccgtgaagtacaccccacctggggccggccgctacaccatcatggtgctgtttgccaaccaggagatcccagccagccccttccacatcaaggtggaccccagccatgatgccagcaaggtgaaggccgagggccctggcctgaacagaactggagtggaggtgggcaagcccacccacttcaccgtgctgaccaagggagctgggaaggccaagctggatgtgcagtttgctggaacagccaagggggaggtggtgcgggactttgagatcatcgacaaccacgactacagctacacagtgaagtacacagctgtgcagcagggcaacatggctgtgacagtgacctacggcggggaccctgtgcccaagagcccctttgtggtgaatgtggccccacccctggacctgagcaagatcaaggtgcagggcctgaacagcaaggtggccgtgggccaggagcaggccttctctgtgaacaccagaggagctgggggccagggccagctggatgtgaggatgaccagccccagccggcggcccatcccctgcaagctggagcccggcggcggcgctgaggcccaggccgtgcgctacatgcctcctgaggagggcccctacaaggtggacatcacctatgatggccaccctgtgcccggcagcccctttgctgtggagggcgtgctgcccccagaccccagcaaggtgtgtgcctacggccctggcctgaagggcggcctggtgggcaccccagcccccttcagcattgacaccaagggggccggcaccggcggcctgggcctgactgtggagggcccctgtgaggccaagattgagtgccaggacaatggagatggcagctgtgctgtgtcctacctgcccacagagcccggggagtacaccatcaacatcctgtttgctgaggcccacatccctggcagccccttcaaggccaccatccggcctgtgtttgaccccagcaaggtgcgggccagcggccctggcctggagcggggcaaggtgggggaggccgccaccttcaccgtggactgcagcgaggccggggaggccgagctgaccatcgagatcctgagtgatgctggggtgaaggccgaggtgctgatccacaacaatgctgatggcacctaccacatcacctacagccctgccttccctggcacctacaccatcaccatcaagtatggaggccaccctgtgcccaagttccccaccagggtgcacgtgcagcctgctgtggacaccagcggcgtgaaggtgtctggccctggggtggagccccatggagtgctgcgggaggtgaccacagagttcaccgtggatgcccggagcctgacagccactggaggcaaccacgtgacagcccgggtgctgaaccccagcggggccaagacagacacctacgtgacagacaatggagatggcacctacagagtgcagtacacagcctatgaggagggcgtgcacctggtggaggtgctgtatgatgaggtggccgtgcccaagagccccttccgggtgggcgtgacagagggctgtgaccccaccagggtgcgggccttcggccctggcctggagggcggcctggtgaacaaggccaaccgcttcaccgtggagaccaggggggccggcaccggcggcctgggcctggccatcgagggccccagcgaggccaagatgagctgcaaggacaacaaggatggcagctgcaccgtggagtacatccccttcacccctggggactatgatgtgaacatcacctttggaggccggcccatccctggcagccccttccgggtgcctgtgaaggatgtggtggaccccgggaaggtgaagtgcagcggccctggcctgggcgccggcgtgcgggcccgggtgccccagaccttcaccgtggactgcagccaggccggccgggcccccctgcaggtggccgtgctgggccccactggagtggccgagcctgtggaggtgcgggacaatggagatggcacccacacagtgcactacaccccagccacagatggcccctacacagtggccgtgaagtatgctgaccaggaggtgcccaggagccccttcaagatcaaggtgctgcctgcccatgatgccagcaaggtgcgggccagcggccctggcctgaatgccagcggcatcccagccagcctgcctgtggagttcaccattgatgccagagatgctggggagggcctgctgactgtgcagatcctggaccctgagggcaagcccaagaaggccaacatccgggacaatggagatggcacctacacagtgtcctacctgcctgacatgagcggccgctacaccatcaccatcaagtatggaggagatgagatcccctacagccccttccgcatccacgccctgcccactggagatgccagcaagtgcctggtgacagtgtccattggaggccacggcctgggcgcctgcctgggcccccgcatccagatcggccaggagaccgtcatcaccgtggatgccaaggctgctggggagggcaaggtgacctgcaccgtgtccaccccagatggagctgagctggatgtggatgtggtggagaaccatgatggcacctttgacatctactacacagcccctgagcccgggaagtatgtgatcaccatccgctttggaggagagcacatccccaacagccccttccacgtgctggccacagaggagcctgtggtgcctgtggagcccatggagagcatgctgcggcccttcaacctggtgatcccctttgctgtgcagaagggggagctgaccggggaggtgaggatgcccagcggcaagacagcccggcccaacatcacagacaacaaggatggcaccatcaccgtgcgctatgcccccacagagaagggcctgcaccagatgggcatcaagtatgatggcaaccacatccctggcagccccctgcagttctacgtggatgccatcaacagccgccacgtgtctgcctacggccctggcctgagccacggcatggtgaacaagccagccaccttcaccatcgtgaccaaggatgctggggagggcggcctgagcctggccgtggagggccccagcaaggccgagatcacctgcaaggacaacaaggatggcacctgcaccgtgtcctacctgcccacagcccctggggactacagcatcatcgtgcgctttgatgacaagcacatccctggcagccccttcaccgccaagatcactggagatgacagcatgaggaccagccagctgaatgtgggcaccagcacagatgtgtccctgaagatcacagaaagtgacctgagccagctgacagccagcatccgggcccccagcggaaatgaggagccctgcctgctgaagaggctgcccaacagacacatcggcatctccttcacccccaaggaggtgggggagcacgtggtgtctgtgaggaagagcggcaagcacgtgaccaacagccccttcaagatcctggtgggccccagcgagattggagatgccagcaaggtgcgggtgtggggcaagggcctgtctgagggccacaccttccaggtggccgagttcatcgtggacaccagaaatgccggctacggcggcctgggcctgagcattgagggccccagcaaggtggacatcaactgtgaggacatggaggatggcacctgcaaggtgacctactgccccacagagcccggcacctacatcatcaacatcaagtttgctgacaagcacgtgcccggcagccccttcaccgtgaaggtgactggagagggccgcatgaaggagagcatcacccggcggcggcaggcccccagcatcgccaccatcggcagcacctgtgacctgaacctgaagatccctggcaactggttccagatggtgtctgcccaggagcggctgaccaggaccttcaccaggagcagccacacctacaccaggacagagaggacagagatcagcaagacccggggcggggagaccaagcgggaggtgcgggtggaggagagcacccaggtgggcggggaccccttccctgctgtgtttggagacttcctgggccgggagcggctgggcagctttggcagcatcacccggcagcaggagggggaggccagcagccaggacatgacagcccaggtgaccagccccagcggcaaggtggaggccgctgagatcgtggagggagaagattctgcctacagcgtgcgctttgtgccccaggagatgggcccccacacagtggccgtgaagtaccggggccagcacgtgcccggcagccccttccagttcaccgtgggccccctgggggagggcggggcccacaaggtgcgggccggcggcaccggcctggagcggggcgtggccggcgtgcctgctgagttcagcatctggacccgggaggccggggccggcggcctgagcattgctgtggagggccccagcaaggccgagatcgcctttgaggacaggaaggatggcagctgtggggtgtcctatgtggtgcaggagcccggggactatgaggtgtccatcaagttcaatgatgagcacatcccagacagcccctttgtggtgcctgtggccagcctgagtgatgatgcccggcggctgactgtgaccagcctgcaggagaccggcctgaaggtgaaccagcctgccagctttgctgtgcagctgaatggagcccggggcgtgattgatgcccgggtgcacaccccatctggagctgtggaggagtgctacgtgtctgagctggacagcgacaagcacaccatccgcttcatcccccatgaaaatggagtgcacagcattgatgtgaagttcaacggggcccacatccctggcagccccttcaagatccgggtgggggagcagagccaggccggggaccccggcctggtgtctgcctacggccctggcctggagggcggcaccactggagtgtcctctgagttcatcgtgaacaccctgaatgccggcagcggggccctgtctgtgaccattgatggccccagcaaggtgcagctggactgcagagaatgtcctgagggccacgtggtgacctacacccccatggcccctggcaactacctgattgccatcaagtatggaggcccccagcacatcgtgggcagccccttcaaggccaaggtgacaggcccccggctgagcggcggccacagcctgcacgagaccagcacagtgctggtggagaccgtgaccaagagcagcagcagccggggcagcagctacagcagcatccccaagttcagcagtgatgccagcaaggtggtgacccggggccctggcctgagccaggcctttgtgggccagaagaacagcttcaccgtggactgcagcaaggccggcaccaacatgatgatggtgggcgtgcacggccccaagaccccctgtgaggaggtgtatgtgaagcacatgggcaacagagtgtacaacgtgacctacacagtgaaggagaagggggactacatcctgattgtgaagtggggagatgaatctgtgcccggcagccccttcaaggtgaaggtgccctag

SEQ ID NO: 44993 - DNA, 8079 bp, Artificial Sequence
  derived and/or modified sequence
atgatgaacaacagcggctacagcgacgccggcctgggcctgggcgacgagactgatgaaatgccttcaaccgagaaagatctcgccgaagacgccccatggaagaagatccaacagaatacatttaccaggtggtgcaacgagcacctcaaatgtgtggggaaacggctgacagatctccaacgcgacttgagtgatggcctccggctgatcgctctcctggaggtgttgtctcagaaaaggatgtaccggaagttccacccgcgtccaaacttccgccaaatgaagttagagaacgtctcagtggcactggagtttttggaacgcgagcatataaaactcgttagtatcgatagcaaggccatcgtcgacgggaatctcaagcttatcctgggtcttatttggactctcatcctccactattctatctcaatgcccatgtgggaggacgaagatgatgaggatgctagaaagcagactcccaaacaacgacttttaggatggatacagaacaaagtgcctcagctgcctataaccaatttcaatcgcgactggcaggacgggaaggccttgggtgccctcgtggataactgcgcaccgggactttgtcccgactgggaggcctgggatcctaaccagcctgtggaaaatgcccgggaagctatgcagcaggcagatgattggctgggcgtaccgcaagtcatcgcccccgaggaaatagttgatccaaacgtggatgaacattctgtcatgacctacctgtcgcaattccctaaagccaaactcaagccgggcgcccccgtcaggtcaaaacagttgaaccccaaaaaggccatcgcatatggcccgggcatagagcctcagggaaataccgttttgcagcccgctcatttcacggtccagacggtggacgctggagtcggagaagtgctcgtatacattgaagaccctgaaggccatacggaagaagccaaggttgtgcctaataacgataaggaccggacatatgctgtcagctatgtgcccaaggtggccggactgcacaaagtcaccgtgctgttcgccgggcaaaacattgaacgctctcccttcgaagtaaatgtcggcatggccttgggcgacgcaaataaagtttccgcccgcggccccggcctggagccggtgggcaatgttgcaaataagcccacttactttgatatctataccgcaggagctgggacaggcgatgtagccgtggtaattgtcgaccctcagggcaggcgagataccgtagaagtggctctcgaggataagggagattccacctttcgctgtacataccggccagctatggaaggcccccatactgttcacgttgcattcgccggagcacccatcacccgttccccctttccagtgcacgtgtctgaagcatgcaatcccaacgcttgtcgcgcttcggggaggggcctacagccaaagggtgtgcgtgtgaaagaggtggcagacttcaaagtttttaccaaaggcgctgggtcaggggagctgaaggtgacagtaaaagggccaaaagggacagaggagccagtaaaagttcgagaggcaggtgatggagtgtttgaatgcgaatattatccagttgttcccggaaaatatgtcgtcacaatcacatggggtggctacgccattcctagatctcctttcgaagttcaagtgtcccccgaagctggagtgcagaaggtaagggcttgggggcctggcctggaaaccggtcaggtgggtaaatcggctgacttcgtggtggaggcaattggaacagaggtgggcacactgggtttttctattgaaggaccctcacaggcgaagatcgagtgtgacgacaagggagacggctcctgcgacgtgagatactggcctacagaacccggtgaatacgcagtgcacgtcatatgtgatgacgaagatattcgcgattctcccttcatagctcacattctcccggcaccccctgattgtttccctgacaaggttaaggcctttggacccggacttgagccaaccggctgtattgtggataaaccggccgagtttaccatcgatgcgcgggccgctggcaaaggtgacctgaaactttatgcacaggacgctgatgggtgtcccatcgacatcaaagtcatccccaatggcgacggaaccttccgctgctcttacgtgccaaccaagcccatcaagcacactataataattagctggggcggggtcaatgttcctaagtcaccattcagggtgaatgtgggcgaagggtcccacccagagcgcgtgaaggtctacgggcccggggttgagaaaaccggcctgaaagccaatgagccgacttatttcacagtggattgttctgaggcaggacagggggacgtttccattggtatcaagtgcgccccgggcgtcgtcggcccagccgaagccgacatcgattttgatatcatcaagaacgataatgacaccttcaccgtaaagtacacgcctccgggcgctggacgttacactatcatggtattatttgccaatcaggaaatacctgctagcccattccatataaaagttgacccgagtcacgacgctagcaaggtcaaggcagagggtccaggcctgaataggactggggttgaggttgggaagcctactcatttcacagtgcttacaaaaggggcgggcaaagctaagctggacgttcagtttgctggtactgctaagggagaggtggtcagagacttcgagatcatcgataatcacgactattcttacactgttaagtacacagcagtgcagcaagggaacatggccgtgactgtgacttatggaggagacccagtccccaagtctcctttcgtagtgaacgtggctcctccattagacttgtccaagatcaaagtccaagggctgaattcgaaggttgcagtcgggcaggagcaggctttcagcgtcaataccaggggggctggcggccaagggcagctggatgtgcgtatgacctcccccagccgaagacccatcccatgtaagctcgagcccggtggaggggccgaagcacaggctgtgcgatatatgcctcccgaagaagggccttacaaggttgacattacgtacgatggtcatccagttcctggttccccatttgctgtggaaggggttctgccgcctgaccccagtaaggtgtgtgcctacggaccaggcctgaaaggcgggctggtcggtactcctgcccctttctcaatagacactaaaggcgccggaaccggtggtctgggactaactgtcgaaggcccctgtgaagctaaaatcgagtgtcaggacaacggggatggctcgtgtgccgtatcttatctgcccaccgaacccggtgaatacacgatcaacatactgttcgccgaggcacacatccctggcagtccattcaaagccacaatccgccctgtcttcgatcccagcaaagtcagggcttcaggccccgggctggaacgcggcaaggtaggcgaagccgccactttcacagttgactgctcagaagcgggagaggcagagctcacgatcgaaatcttatctgacgcaggggtaaaagctgaggtgcttatccataacaatgccgatggaacatatcatatcacctactcacccgccttcccaggcacatacacaataacaatcaaatacggaggacatcccgtgcccaagtttcccacgcgggttcatgtacagcccgccgtggataccagcggagtgaaagtgagcggtccaggcgtcgagcctcacggggtgctaagagaggttactactgaatttaccgtggacgctcggtctctgaccgccaccggtggcaaccacgtcacggcccgagtgctcaatccttccggagcgaagaccgatacgtatgtaacagacaatggcgatgggacctatagagtccagtacaccgcctatgaggaaggagtgcaccttgtcgaagtgctctatgacgaagttgcagtgccaaaaagccctttccgggttggcgtgactgaaggctgcgatccaacaagagtacgtgcgtttggccccggattagaggggggcttagtaaataaggctaatcgtttcaccgtggagacgcgcggtgccgggaccggcggtctgggactcgcaattgagggccctagtgaggctaaaatgagctgcaaagataataaggatgggagttgcaccgtggagtatattccctttacacccggtgactacgatgtaaatatcactttcgggggcaggcctattcctgggtcccctttccgcgtccctgttaaagacgtcgtcgaccccgggaaggtcaagtgcagcggccctggactcggagcgggcgtgagggcacgagtccctcagacatttaccgttgactgctctcaggccgggcgcgccccactgcaggtggcagtcctcggccccaccggggtcgcggagcccgttgaggtgagagacaatggtgatgggacacacacagtccattacacacctgccactgatgggccctataccgtagccgtgaaatacgcagaccaggaggtcccccgcagcccgtttaagataaaggtactgcccgcccatgacgcgagtaaggttcgggcaagcgggccagggttgaatgcaagtgggatccccgccagcttgcctgtagagtttaccatcgatgcccgagatgctggcgagggactactcacagtccagattttggaccccgaagggaagcccaagaaggcgaatattagagataatggggacggcacatatacggtcagctatctgcccgacatgagtgggcggtatacaatcacaatcaaatacggaggggatgaaatcccctactcacctttcaggatacacgctctgcctacaggcgacgcctctaaatgtcttgtgactgtaagtatcgggggtcacggattaggagcgtgtttaggaccaaggattcagatcggccaggagaccgtgattaccgtggacgcgaaggcagccggagaaggcaaagtcacttgtactgtctcaacgccggacggcgccgagctggatgtcgacgtcgttgagaaccacgatggaaccttcgatatatattacaccgcgccagaaccggggaagtatgtcatcactataaggtttggcggggagcacatccccaattccccgtttcacgtgcttgcaacagaggaaccagttgtgcccgtggaacccatggagtcaatgttacggccttttaatctagttataccctttgccgtgcagaagggagagctcaccggcgaggtacgcatgccaagcggcaagactgctagacccaatatcaccgacaacaaggacgggaccattactgtgagatatgcgccgactgaaaaaggcctccaccagatgggcatcaagtatgacgggaatcacattcccggcagtccactccagttctacgtggatgccatcaacagccgccatgtatctgcatacgggcccggactatcacacggcatggtgaataagccagctaccttcactatcgtgaccaaagatgctggggaaggaggactgagcctggcagtggaaggaccgtcaaaagccgagataacttgcaaggataataaagacgggacttgcacagtctcttatttacccacggccccaggggattattctatcattgtcagattcgacgataaacacattcccgggtctcctttcaccgcgaaaattactggtgacgacagtatgcgcacctcccaacttaacgttggtaccagcactgatgtgtcccttaaaatcacagaaagcgacctgtctcagcttacggctagcatccgggccccttccggaaatgaggaaccctgcttgctgaagagattgccaaaccgccacattgggataagcttcacccccaaggaggtaggcgagcacgtggtctctgtgcggaaatcaggtaagcatgtaactaattcaccctttaaaatcctcgtggggccaagtgaaatcggagacgcaagcaaggtgcgggtctggggcaaaggtctgagtgagggtcacacttttcaggtcgccgagttcatagtcgataccaggaatgcaggctacgggggattaggtctgtcaattgagggaccttctaaggtggatataaattgtgaagatatggaggatggtacttgtaaggtaacttattgccccaccgagccaggaacatatatcatcaacatcaagtttgccgataaacacgtcccagggtcgccttttacagtgaaggtgaccggcgaaggccggatgaaggagtctataacccgcaggcgtcaagcccccagcattgcaacaataggctcaacatgcgacctcaatctcaaaatccccggcaactggtttcagatggtgtctgcccaggaacgcctgactaggaccttcacccgttcttcccacacctacactagaacggagcgtactgagataagcaagacccgggggggagagaccaaacgcgaggtgagagtggaagagagcacacaagtgggtggtgaccctttccccgctgtttttggtgacttccttggaagggagcgcttgggctcgttcggcagcattaccagacagcaggaaggcgaagcgtcttcacaggacatgactgcgcaggttacgtcccctagtgggaaggtagaggctgctgaaatcgtggagggtgaggatagcgcatattcagtgcgctttgttccgcaggagatgggcccacacaccgttgccgtgaagtatagaggacaacacgttccagggagcccatttcagtttactgtgggccccctaggggagggtggcgcacataaagtccgcgctgggggtaccggtctggagagaggagttgcaggggtgcctgctgagttttcgatctggactcgcgaggcgggggctggtggcctatcaatagccgttgagggaccctccaaggctgagatcgcattcgaggacagaaaagatggctcctgtggggttagctacgtcgtgcaggaacccggtgactacgaagtgtccattaaattcaacgacgagcacattccggacagtccgttcgttgtgccggtggctagtctgtcagatgacgctcggcgcctcaccgtaacctctctgcaagaaacggggctgaaggtcaatcaacctgctagctttgcagtccagctgaatggagcaaggggggtgatcgatgctcgggttcataccccaagcggagcagtggaggaatgctatgtgtcagagctggatagcgacaaacataccattaggttcatacctcatgagaacggagttcactccatcgacgtgaaatttaacggggcacatatccccggctcccccttcaagatccgcgtcggtgaacagagtcaggctggagatcccggcctggtgtccgcctacggacccggtctggagggtgggactaccggggtaagcagtgagtttatcgtgaatacattgaacgccggctctggggccctttccgtcaccatcgatgggcctagcaaagtgcaactggactgccgcgaatgccctgagggacacgttgtcacctatacccctatggcaccagggaattatctgatcgcaatcaaatacggcggccctcagcatattgtggggagcccctttaaagccaaagtgacagggccgcgtctgtccggcggccattctctgcatgaaactagtacagttctggtggagacagtgaccaaatccagctcatcacgaggctccagctactcctcaatccctaaattttccagcgacgcatctaaagtcgtgaccaggggccccggactgtcccaggctttcgttggtcagaagaatagcttcaccgtagactgttcgaaagctgggactaatatgatgatggtgggagtgcatggtcctaagacaccctgtgaagaggtttacgtgaaacatatggggaatagggtctataacgtgacctatacggtgaaagagaaaggagattacattctcattgtcaaatggggtgatgaatccgtgccaggctcccccttcaaagtgaaggtcccatag

SEQ ID NO: 44994 - DNA, 8078 bp, Artificial Sequence
  derived and/or modified sequence
atgatgaataattcaggctattctgacgcagggcttggattgggtgacgaaactgacgagatgcccagcaccgagaaggatttggccgaagacgccccttggaagaagatccagcagaacactttcactagatggtgcaacgagcacttgaaatgtgtgggcaagcggctgacagatctgcagagagacctcagcgatgggctgagactaatcgcccttcttgaagtgctgagtcagaagcgtatgtaccgcaaattccatcctaggcccaatttccgccaaatgaagctggagaacgtgtccgtggccctggaatttctggagagggaacatatcaagctcgtcagtatcgacagcaaagcaattgttgatggcaacttaaagctgatccttggcctgatatggactctgatcctgcactactctatttctatgcctatgtgggaggatgaggatgacgaggacgcccgtaagcagacccccaaacagagattactggggtggattcagaacaaggtccctcaactgcccattactaatttcaatcgggattggcaggacggcaaggctctgggcgctctagtagacaactgcgcacccggtctttgccctgactgggaggcctgggatcctaatcagccagtcgagaacgccagggaagctatgcaacaggctgatgactggcttggagttccccaggtgatagctcctgaggagatcgtggacccaaacgtcgacgagcactcagtgatgacatatttatctcagtttccaaaggccaaactgaagccgggagcccctgtgcggagcaagcagttgaatccaaagaaagccatagcttatgggcctggcattgagccccaaggcaacaccgtactgcagccagctcacttcaccgtacagaccgtcgacgccggagtaggtgaagttttggtctacatcgaggatcctgaggggcacaccgaagaggccaaggtggtgcctaacaacgataaagaccgcacgtacgctgtgtcttatgtgccaaaggtagccggtcttcataaagttactgtgctgtttgctgggcagaacatcgaacgcagtccattcgaagtgaacgtaggcatggccctgggagatgccaataaagtatcagccagagggccagggctagagcctgtgggtaatgtggccaataaacccacgtacttcgatatttacacagcaggtgccggaaccggggatgtcgctgttgtgatcgttgatcctcagggcagaagggacaccgtcgaggttgccctggaggacaaaggggactccacgttccggtgcacttacagaccagctatggaagggcctcacacagtgcacgtggcatttgccggagcacctattactcgctcaccgttccctgttcacgtgtcggaagcctgtaaccctaatgcttgccgcgctagtgggcgtggtctccagcccaagggcgtcagggtgaaagaggtggccgactttaaggtcttcaccaagggtgctggctctggcgaactgaaggtaaccgtaaaaggccctaaagggactgaggaacctgtgaaagttagagaggccggtgatggggtgtttgagtgcgaatattaccctgtggtgcctggcaagtacgtggtgacaatcacttgggggggttatgccattcccagatccccatttgaagtccaggtgtctcctgaggccggagttcaaaaggtaagggcttgggggcctggactagagacaggtcaggttggaaagtctgccgactttgttgtggaagcgatcgggacggaagtgggcacgttgggtttttccatcgagggcccaagccaggctaaaatcgaatgtgatgataagggagatgggagttgcgatgtgagatactggcccacggagcctggggaatatgccgtacatgtgatctgcgatgacgaggacatccgcgatagtccttttattgcacacatcctgccagctcccccagactgcttccctgataaagtgaaagcctttgggcctggtctagagcctactggctgcatagtagataagccggctgagtttacaatcgacgcgagagccgctggaaagggcgatctgaagctgtacgctcaggacgctgatggctgtcctattgatatcaaagtgattccaaacggcgatggcacgtttaggtgcagttatgtgcctaccaaacccataaagcatacaatcattataagctggggcggtgtgaatgtcccgaagagtccttttagagtgaacgtcggcgagggatcgcatcctgagcgggtgaaggtgtatggacctggcgtggagaagaccggcctcaaagcaaatgagcccacgtactttacagtcgattgctcagaggctggtcagggcgacgtctccatcggcataaagtgtgcacctggtgttgtggggcctgcagaagccgacatcgactttgatataattaaaaacgacaacgacactttcacagtgaaatacaccccaccgggtgccggacgctacacaataatggtgttattcgcgaaccaggagatcccagcttctcctttccacatcaaagtggacccctctcacgatgcttccaaggtcaaggccgagggtcctggactgaaccgcacaggggtggaggtcgggaaacccacacatttcacggtgttgaccaaaggggcaggcaaagccaagttggacgtgcagtttgcaggcactgccaaaggcgaggtagtgcgtgacttcgagatcattgacaaccatgactactcttacactgtgaaatacacagctgtacagcagggcaacatggccgtcacagtcacatacggcggtgaccctgtacctaaatctcctttcgtggtaaatgtggcccctccactggacctaagtaaaatcaaggttcagggccttaattccaaagtcgctgtcgggcaggagcaagcatttagtgtcaatactagaggcgcaggcggtcaggggcagctcgacgtgcggatgacgtctccctctcggcgtcccataccgtgcaagctcgagcctggcggtggggctgaagcccaggccgtccgctacatgccacccgaagaaggcccatataaggtcgacatcacttatgacgggcatcctgtgcctggaagtccgtttgcagtggagggcgtgctgcctcccgatccatcaaaggtgtgtgcatatggccctggcttaaagggcggtctcgtgggaacacccgctcccttctcaatcgatacgaaaggtgccggaaccgggggtttgggacttaccgtggaagggccttgcgaagcgaagatagagtgccaggataatggggatgggagctgtgccgttagctatctgcccaccgagcccggagaatacaccatcaacattctgtttgccgaagctcatattcctggcagtcccttcaaagcaacgatccggcctgtgtttgacccaagtaaggtcagggctagcggacctgggttggaaagaggtaaggtgggtgaggcagcaacctttacagtcgattgctccgaggcgggagaggctgagctgacaattgaaattctgtctgacgcaggcgttaaagccgaagtcttaattcacaacaatgccgatgggacctatcatatcacctactcccctgccttcccaggtacctatacaattacgatcaagtacggaggtcatcctgtgccgaaatttcccaccagggtacatgtacaaccagccgttgacacttcaggggttaaggtgagcggacccggagtagagccccacggcgttctgagagaggtcactaccgaattcacggtggatgccaggtcactgaccgcaaccggcggtaaccacgtaactgcccgtgtgctcaacccatccggcgcaaaaaccgacacctacgttaccgacaacggcgatggcacatacagggtgcagtatacagcctatgaagaaggcgtgcacttagttgaggtgttatacgacgaggtggcagttcccaagtcaccgtttcgggtgggggtaaccgaaggatgtgaccccacacgcgttcgggctttcgggccaggactcgaggggggtctggttaacaaggccaaccgctttacggttgaaactagaggagcaggaactggtggcctggggctcgcgatcgaggggccaagcgaggccaagatgagctgtaaagacaataaggatggttcttgcactgtcgagtatatcccctttacaccgggtgattacgacgttaatatcacatttggagggagacctatccccggatctcctttccgggttccagtgaaagacgtagtagatcctggcaaagtcaaatgttctgggccaggactgggcgctggagtgcgggctcgagtgccccagacctttacagttgattgctcccaggctggcagggccccacttcaggtcgctgtactcgggcctacgggggtggctgagccggtggaggtgagggacaatggggacgggacacataccgtgcactacacccccgcaacagatggcccttatactgtggctgtcaagtacgcggaccaggaagtgccccgatcaccctttaagattaaagtgctgcctgcgcatgacgcaagcaaagttcgggctagtggtcctgggctgaatgccagtggcattccagctagtctgccggtggaattcaccattgacgcccgagatgccggagagggtctactgacagttcagatccttgaccccgaaggaaagcccaaaaaggcaaacattcgggataatggagacggcacctatactgtcagctacctacctgacatgtccggcagatacaccataacgatcaagtacggtggtgacgaaattccctactcgcccttccgcattcatgctctgccaaccggcgatgccagcaagtgcttggtcactgtgagtataggaggccacggattgggggcatgcctgggccctagaatacagatcggccaggagaccgtgattaccgtagacgctaaggccgcaggagagggaaaagtgacttgtactgtctcaaccccagacggcgctgagttggatgtcgatgttgtcgaaaatcacgacggtactttcgacatatactataccgccccagaaccaggaaagtatgtgattaccatccgatttggcggagaacacatcccgaactcaccctttcacgtacttgcgactgaagaaccagtggtgcctgtcgaacctatggagagcatgctgcgcccatttaatttagttatcccttttgccgtgcagaagggagagttgaccggggaagtaagaatgccaagtgggaagacagcccgacccaacatcaccgacaacaaagacggtaccatcacagtgagatacgcaccgacagagaaaggcctgcaccagatgggcatcaagtatgacggcaaccatatcccaggcagccccctgcaattctatgttgatgctattaacagcagacatgtgagtgcttatggtcccggtttgtctcacgggatggtaaataagccagccaccttcacgatcgttacaaaggacgcaggtgaggggggactaagtcttgctgtagaggggcctagcaaggccgaaattacctgcaaggacaacaaggacggtacgtgtaccgtctcatatctgccaaccgctccaggcgactattctattatagtccggttcgacgataaacacatcccgggtagtccgtttacagccaaaatcactggggatgactctatgcggacctctcagctcaatgtgggtacctcaacagatgtgtccctaaagataacagaatcagacctcagccagcttaccgcgtcaattagagcgccttcgggcaatgaagaaccgtgcctgttaaaacgtctccctaacagacatattgggatcagcttcacccctaaagaagtgggggaacatgtggtttctgttcggaagtccggaaagcatgtcacaaactcccccttcaagatattagtggggccatctgaaatcggcgatgcaagcaaagtccgcgtatgggggaaagggctgagcgaaggtcacacatttcaggtggcagaattcatcgtggatacaagaaacgccggatatgggggactgggactcagcattgagggcccatctaaggttgatataaattgtgaggatatggaagatggaacctgtaaggtcacctactgtcccaccgaaccaggcacttatatcattaacatcaagtttgcggataaacatgtgcctggctctccgttcacagtgaaggttaccggagaaggccgtatgaaggaatcaattacccgcagaagacaggccccatccattgcgacaatcggctccacctgcgacttaaacctaaagatacctgggaactggttccaaatggtaagcgctcaggagcgcctcactcggacgtttacgcggagctcccacacctacacaagaacggagcgtacagaaatcagcaagactcggggaggcgagacaaagcgggaggtccgcgttgaagagtccactcaggtgggtggggatccctttccagcagtgtttggggattttttggggagagaaagactgggtagttttgggtcgataacaaggcaacaggaaggggaggctagctcacaggatatgactgcccaggtaacctcaccttccgggaaggtggaagcagccgaaattgtggaaggggaagattctgcctacagtgtccggtttgtgccacaagagatgggtccacataccgtggccgtcaagtacagaggccaacacgtgccgggatcgccatttcagtttacggtcggccctctgggcgaaggcggtgcccataaagtcagagcaggtggtactggcctcgaacgcggagtcgctggcgtcccagccgaattctccatttggacacgcgaggctggggcaggtggcctgtctattgcagtggaggggccatccaaggccgaaatagcttttgaagaccggaaggatggatcctgcggcgtgagctacgtggtgcaggagcccggtgattacgaggtttcaattaaattcaatgatgagcacattcctgactccccatttgtagtccccgtggcctccttgtccgatgacgcccgaagactgacagtcacaagtttgcaagagactgggctgaaagttaatcagcccgcaagctttgccgtacaattgaacggtgcacgcggagttatagatgccagagtgcacacaccatctggcgcagtcgaagaatgttatgtatccgagcttgactccgacaagcataccattcggttcattccgcatgagaacggtgttcactctatcgatgtgaagttcaacggagcccatatccctggctccccttttaaaatacgggtgggggaacaaagtcaagccggagaccctgggctggttagtgcatacggacccggacttgagggaggaacgactggcgttagcagcgaatttatagtcaacacactgaatgcaggatcaggagccctgtccgtgactatcgacggacccagtaaggtgcaactggattgccgggaatgcccagaaggacatgtcgtgacatataccccaatggcaccaggcaactatttaatcgccatcaagtacggcggtccacagcatatagtgggctccccttttaaggcgaaggtcacagggccacggctttccgggggacattcattgcacgaaacctccaccgtgctagttgaaaccgtcactaaatccagcagcagcaggggatcgagttatagcagcattcccaaattcagttcggacgcctccaaggtcgtcactcgaggcccagggctgtcacaagccttcgtgggacagaagaattcatttaccgtcgattgcagcaaggcaggaaccaacatgatgatggtaggtgttcacggccctaagactccctgcgaggaggtttacgtgaaacacatgggtaaccgagtctataacgtcacctacaccgttaaagaaaaaggggactatatactgatagttaaatggggcgacgagtctgtgccgggatccccatttaaggtcaaggtcccata

SEQ ID NO: 44995 - DNA, 8079 bp, Artificial Sequence
  derived and/or modified sequence
atgatgaacaacagcggctacagcgacgccggcctgggcctgggcgacgagaccgacgagatgcccagcaccgagaaggacctggccgaggacgccccctggaagaagatccagcagaacaccttcaccagatggtgcaacgagcacctgaagtgcgtgggcaagagactgaccgacctgcagagagacctgagcgacggcctgagactgatcgccctgctggaggtgctgagccagaagagaatgtacagaaagttccaccccagacccaacttcagacagatgaagctggagaacgtgagcgtggccctggagttcctggagagagagcacatcaagctggtgagcatcgacagcaaggccatcgtggacggcaacctgaagctgatcctgggcctgatctggaccctgatcctgcactacagcatcagcatgcccatgtgggaggacgaggacgacgaggacgccagaaagcagacccccaagcagagactgctgggctggatccagaacaaggtgccccagctgcccatcaccaacttcaacagagactggcaggacggcaaggccctgggcgccctggtggacaactgcgcccccggcctgtgccccgactgggaggcctgggaccccaaccagcccgtggagaacgccagagaggccatgcagcaggccgacgactggctgggcgtgccccaggtgatcgcccccgaggagatcgtggaccccaacgtggacgagcacagcgtgatgacctacctgagccagttccccaaggccaagctgaagcccggcgcccccgtgagaagcaagcagctgaaccccaagaaggccatcgcctacggccccggcatcgagccccagggcaacaccgtgctgcagcccgcccacttcaccgtgcagaccgtggacgccggcgtgggcgaggtgctggtgtacatcgaggaccccgagggccacaccgaggaggccaaggtggtgcccaacaacgacaaggacagaacctacgccgtgagctacgtgcccaaggtggccggcctgcacaaggtgaccgtgctgttcgccggccagaacatcgagagaagccccttcgaggtgaacgtgggcatggccctgggcgacgccaacaaggtgagcgccagaggccccggcctggagcccgtgggcaacgtggccaacaagcccacctacttcgacatctacaccgccggcgccggcaccggcgacgtggccgtggtgatcgtggacccccagggcagaagagacaccgtggaggtggccctggaggacaagggcgacagcaccttcagatgcacctacagacccgccatggagggcccccacaccgtgcacgtggccttcgccggcgcccccatcaccagaagccccttccccgtgcacgtgagcgaggcctgcaaccccaacgcctgcagagccagcggcagaggcctgcagcccaagggcgtgagagtgaaggaggtggccgacttcaaggtgttcaccaagggcgccggcagcggcgagctgaaggtgaccgtgaagggccccaagggcaccgaggagcccgtgaaggtgagagaggccggcgacggcgtgttcgagtgcgagtactaccccgtggtgcccggcaagtacgtggtgaccatcacctggggcggctacgccatccccagaagccccttcgaggtgcaggtgagccccgaggccggcgtgcagaaggtgagagcctggggccccggcctggagaccggccaggtgggcaagagcgccgacttcgtggtggaggccatcggcaccgaggtgggcaccctgggcttcagcatcgagggccccagccaggccaagatcgagtgcgacgacaagggcgacggcagctgcgacgtgagatactggcccaccgagcccggcgagtacgccgtgcacgtgatctgcgacgacgaggacatcagagacagccccttcatcgcccacatcctgcccgccccccccgactgcttccccgacaaggtgaaggccttcggccccggcctggagcccaccggctgcatcgtggacaagcccgccgagttcaccatcgacgccagagccgccggcaagggcgacctgaagctgtacgcccaggacgccgacggctgccccatcgacatcaaggtgatccccaacggcgacggcaccttcagatgcagctacgtgcccaccaagcccatcaagcacaccatcatcatcagctggggcggcgtgaacgtgcccaagagccccttcagagtgaacgtgggcgagggcagccaccccgagagagtgaaggtgtacggccccggcgtggagaagaccggcctgaaggccaacgagcccacctacttcaccgtggactgcagcgaggccggccagggcgacgtgagcatcggcatcaagtgcgcccccggcgtggtgggccccgccgaggccgacatcgacttcgacatcatcaagaacgacaacgacaccttcaccgtgaagtacaccccccccggcgccggcagatacaccatcatggtgctgttcgccaaccaggagatccccgccagccccttccacatcaaggtggaccccagccacgacgccagcaaggtgaaggccgagggccccggcctgaacagaaccggcgtggaggtgggcaagcccacccacttcaccgtgctgaccaagggcgccggcaaggccaagctggacgtgcagttcgccggcaccgccaagggcgaggtggtgagagacttcgagatcatcgacaaccacgactacagctacaccgtgaagtacaccgccgtgcagcagggcaacatggccgtgaccgtgacctacggcggcgaccccgtgcccaagagccccttcgtggtgaacgtggccccccccctggacctgagcaagatcaaggtgcagggcctgaacagcaaggtggccgtgggccaggagcaggccttcagcgtgaacaccagaggcgccggcggccagggccagctggacgtgagaatgaccagccccagcagaagacccatcccctgcaagctggagcccggcggcggcgccgaggcccaggccgtgagatacatgccccccgaggagggcccctacaaggtggacatcacctacgacggccaccccgtgcccggcagccccttcgccgtggagggcgtgctgccccccgaccccagcaaggtgtgcgcctacggccccggcctgaagggcggcctggtgggcacccccgcccccttcagcatcgacaccaagggcgccggcaccggcggcctgggcctgaccgtggagggcccctgcgaggccaagatcgagtgccaggacaacggcgacggcagctgcgccgtgagctacctgcccaccgagcccggcgagtacaccatcaacatcctgttcgccgaggcccacatccccggcagccccttcaaggccaccatcagacccgtgttcgaccccagcaaggtgagagccagcggccccggcctggagagaggcaaggtgggcgaggccgccaccttcaccgtggactgcagcgaggccggcgaggccgagctgaccatcgagatcctgagcgacgccggcgtgaaggccgaggtgctgatccacaacaacgccgacggcacctaccacatcacctacagccccgccttccccggcacctacaccatcaccatcaagtacggcggccaccccgtgcccaagttccccaccagagtgcacgtgcagcccgccgtggacaccagcggcgtgaaggtgagcggccccggcgtggagccccacggcgtgctgagagaggtgaccaccgagttcaccgtggacgccagaagcctgaccgccaccggcggcaaccacgtgaccgccagagtgctgaaccccagcggcgccaagaccgacacctacgtgaccgacaacggcgacggcacctacagagtgcagtacaccgcctacgaggagggcgtgcacctggtggaggtgctgtacgacgaggtggccgtgcccaagagccccttcagagtgggcgtgaccgagggctgcgaccccaccagagtgagagccttcggccccggcctggagggcggcctggtgaacaaggccaacagattcaccgtggagaccagaggcgccggcaccggcggcctgggcctggccatcgagggccccagcgaggccaagatgagctgcaaggacaacaaggacggcagctgcaccgtggagtacatccccttcacccccggcgactacgacgtgaacatcaccttcggcggcagacccatccccggcagccccttcagagtgcccgtgaaggacgtggtggaccccggcaaggtgaagtgcagcggccccggcctgggcgccggcgtgagagccagagtgccccagaccttcaccgtggactgcagccaggccggcagagcccccctgcaggtggccgtgctgggccccaccggcgtggccgagcccgtggaggtgagagacaacggcgacggcacccacaccgtgcactacacccccgccaccgacggcccctacaccgtggccgtgaagtacgccgaccaggaggtgcccagaagccccttcaagatcaaggtgctgcccgcccacgacgccagcaaggtgagagccagcggccccggcctgaacgccagcggcatccccgccagcctgcccgtggagttcaccatcgacgccagagacgccggcgagggcctgctgaccgtgcagatcctggaccccgagggcaagcccaagaaggccaacatcagagacaacggcgacggcacctacaccgtgagctacctgcccgacatgagcggcagatacaccatcaccatcaagtacggcggcgacgagatcccctacagccccttcagaatccacgccctgcccaccggcgacgccagcaagtgcctggtgaccgtgagcatcggcggccacggcctgggcgcctgcctgggccccagaatccagatcggccaggagaccgtgatcaccgtggacgccaaggccgccggcgagggcaaggtgacctgcaccgtgagcacccccgacggcgccgagctggacgtggacgtggtggagaaccacgacggcaccttcgacatctactacaccgcccccgagcccggcaagtacgtgatcaccatcagattcggcggcgagcacatccccaacagccccttccacgtgctggccaccgaggagcccgtggtgcccgtggagcccatggagagcatgctgagacccttcaacctggtgatccccttcgccgtgcagaagggcgagctgaccggcgaggtgagaatgcccagcggcaagaccgccagacccaacatcaccgacaacaaggacggcaccatcaccgtgagatacgcccccaccgagaagggcctgcaccagatgggcatcaagtacgacggcaaccacatccccggcagccccctgcagttctacgtggacgccatcaacagcagacacgtgagcgcctacggccccggcctgagccacggcatggtgaacaagcccgccaccttcaccatcgtgaccaaggacgccggcgagggcggcctgagcctggccgtggagggccccagcaaggccgagatcacctgcaaggacaacaaggacggcacctgcaccgtgagctacctgcccaccgcccccggcgactacagcatcatcgtgagattcgacgacaagcacatccccggcagccccttcaccgccaagatcaccggcgacgacagcatgagaaccagccagctgaacgtgggcaccagcaccgacgtgagcctgaagatcaccgagagcgacctgagccagctgaccgccagcatcagagcccccagcggcaacgaggagccctgcctgctgaagagactgcccaacagacacatcggcatcagcttcacccccaaggaggtgggcgagcacgtggtgagcgtgagaaagagcggcaagcacgtgaccaacagccccttcaagatcctggtgggccccagcgagatcggcgacgccagcaaggtgagagtgtggggcaagggcctgagcgagggccacaccttccaggtggccgagttcatcgtggacaccagaaacgccggctacggcggcctgggcctgagcatcgagggccccagcaaggtggacatcaactgcgaggacatggaggacggcacctgcaaggtgacctactgccccaccgagcccggcacctacatcatcaacatcaagttcgccgacaagcacgtgcccggcagccccttcaccgtgaaggtgaccggcgagggcagaatgaaggagagcatcaccagaagaagacaggcccccagcatcgccaccatcggcagcacctgcgacctgaacctgaagatccccggcaactggttccagatggtgagcgcccaggagagactgaccagaaccttcaccagaagcagccacacctacaccagaaccgagagaaccgagatcagcaagaccagaggcggcgagaccaagagagaggtgagagtggaggagagcacccaggtgggcggcgaccccttccccgccgtgttcggcgacttcctgggcagagagagactgggcagcttcggcagcatcaccagacagcaggagggcgaggccagcagccaggacatgaccgcccaggtgaccagccccagcggcaaggtggaggccgccgagatcgtggagggcgaggacagcgcctacagcgtgagattcgtgccccaggagatgggcccccacaccgtggccgtgaagtacagaggccagcacgtgcccggcagccccttccagttcaccgtgggccccctgggcgagggcggcgcccacaaggtgagagccggcggcaccggcctggagagaggcgtggccggcgtgcccgccgagttcagcatctggaccagagaggccggcgccggcggcctgagcatcgccgtggagggccccagcaaggccgagatcgccttcgaggacagaaaggacggcagctgcggcgtgagctacgtggtgcaggagcccggcgactacgaggtgagcatcaagttcaacgacgagcacatccccgacagccccttcgtggtgcccgtggccagcctgagcgacgacgccagaagactgaccgtgaccagcctgcaggagaccggcctgaaggtgaaccagcccgccagcttcgccgtgcagctgaacggcgccagaggcgtgatcgacgccagagtgcacacccccagcggcgccgtggaggagtgctacgtgagcgagctggacagcgacaagcacaccatcagattcatcccccacgagaacggcgtgcacagcatcgacgtgaagttcaacggcgcccacatccccggcagccccttcaagatcagagtgggcgagcagagccaggccggcgaccccggcctggtgagcgcctacggccccggcctggagggcggcaccaccggcgtgagcagcgagttcatcgtgaacaccctgaacgccggcagcggcgccctgagcgtgaccatcgacggccccagcaaggtgcagctggactgcagagagtgccccgagggccacgtggtgacctacacccccatggcccccggcaactacctgatcgccatcaagtacggcggcccccagcacatcgtgggcagccccttcaaggccaaggtgaccggccccagactgagcggcggccacagcctgcacgagaccagcaccgtgctggtggagaccgtgaccaagagcagcagcagcagaggcagcagctacagcagcatccccaagttcagcagcgacgccagcaaggtggtgaccagaggccccggcctgagccaggccttcgtgggccagaagaacagcttcaccgtggactgcagcaaggccggcaccaacatgatgatggtgggcgtgcacggccccaagaccccctgcgaggaggtgtacgtgaagcacatgggcaacagagtgtacaacgtgacctacaccgtgaaggagaagggcgactacatcctgatcgtgaagtggggcgacgagagcgtgcccggcagccccttcaaggtgaaggtgccctag

SEQ ID NO: 44996 - protein, 1863 aa, Artificial Sequence
  derived and/or modified sequence
MSHHIQRSDSNASFLRAARAGNLDKVVEYLKGGIDINTCNQNGLNALHLAAKEGHVGLVQELLGRGSSVDSATKKGNTALHIASLAGQAEVVKVLVKEGANINAQSQNGFTPLYMAAQENHIDVVKYLLENGANQSTATEDGFTPLAVALQQGHNQAVAILLENDTKGKVRLPALHIAARKDDTKSAALLLQNDHNADVQSKMMVNRTTESGFTPLHIAAHYGNVNVATLLLNRGAAVDFTARNGITPLHVASKRGNTNMVKLLLDRGGQIDAKTRDGLTPLHCAARSGHDQVVELLLERGAPLLARTKNGLSPLHMAAQGDHVECVKHLLQHKAPVDDVTLDYLTALHVAAHCGHYRVTKLLLDKRANPNARALNGFTPLHIACKKNRIKVMELLVKYGASIQAITESGLTPIHVAAFMGHLNIVLLLLQNGASPDVTNIRGETALHMAARAGQVEVVRCLLRNGALVDARAREEQTPLHIASRLGKTEIVQLLLQHMAHPDAATTNGYTPLHISAREGQVDVASVLLEAGAAHSLATKKGFTPLHVAAKYGSLDVAKLLLQRRAAADSAGKNGLTPLHVAAHYDNQKVALLLLEKGASPHATAKNGYTPLHIAAKKNQMQIASTLLNYGAETNIVTKQGVTPLHLASQEGHTDMVTLLLDKGANIHMSTKSGLTSLHLAAQEDKVNVADILTKHGADQDAHTKLGYTPLIVACHYGNVKMVNFLLKQGANVNAKTKNGYTPLHQAAQQGHTHIINVLLQHGAKPNATTANGNTALAIAKRLGYISVVDTLKVVTEEVTTTTTTITEKHKLNVPETMTEVLDVSDEEGDDTMTGDGGEYLRPEDLKELGDDSLPSSQFLDGMNYLRYSLEGGRSDSLRSFSSDRSHTLSHASYLRDSAVMDDSVVIPSHQVSTLAKEAERNSYRLSWGTENLDNVALSSSPIHSGRASPCLERDNSSFLVSFMVDARGGAMRGCRHNGLRIIIPPRKCTAPTRVTCRLVKRHRLATMPPMVEGEGLASRLIEVGPSGAQFLGKLHLPTAPPPLNEGESLVSRILQLGPPGTKFLGPVIVEIPHFAALRGKERELVVLRSENGDSWKEHFCDYTEDELNEILNGMDEVLDSPEDLEKKRICRIITRDFPQYFAVVSRIKQDSNLIGPEGGVLSSTVVPQVQAVFPEGALTKRIRVGLQAQPMHSELVKKILGNKATFSPIVTLEPRRRKFHKPITMTIPVPKASSDVMLNGFGGDAPTLRLLCSITGGTTPAQWEDITGTTPLTFVNECVSFTTNVSARFWLIDCRQIQESVTFASQVYREIICVPYMAKFVVFAKSHDPIEARLRCFCMTDDKVDKTLEQQENFAEVARSRDVEVLEGKPIYVDCFGNLVPLTKSGQHHIFSFFAFKENRLPLFVKVRDTTQEPCGRLSFMKEPKSTRGLVHQAICNLNITLPIYTKESESDQEQEEEIGQESRRYPQDEQERIEERLAYIADHLGFSWTELARELDFTEEQIHQIRIENPNSLQDQSHALLKYWLERDGKHATDTNLVECLTKINRMDIVHLMETNTEPLQERISHSYAEIEQTITLDHSEGFSVLQEELCTAQHKQKEEQAVSKESETCDHPPIVSEEDISVGYSTFQDGVPKTEGDSSATALFPQTHKEQVQQDFSGKMQDLPEESSLEYQQEYFVTTPGTETSETQKAMIVPSSPSKTPEEVSTPAEEEKLYLQTPTSSERGGSPIIQEPEEPSEHREESSPRKTSLVIVESADNQPETCERLDEDAAFEKGDDMPEIPPETVTEEEYIDEHGHTVVKKVTRKIIRRYVSSEGTEKEEIMVQGMPQEPVNIEEGDGYSKVIKRVVLKSDTEQSEDSME

SEQ ID NO: 44997 - protein, 1863 aa, Artificial Sequence
  derived and/or modified sequence
MTTMLQKSDSNASFLRAARAGNLDKVVEYLKGGIDINTCNQNGLNALHLAAKEGHVGLVQELLGRGSSVDSATKKGNTALHIASLAGQAEVVKVLVKEGANINAQSQNGFTPLYMAAQENHIDVVKYLLENGANQSTATEDGFTPLAVALQQGHNQAVAILLENDTKGKVRLPALHIAARKDDTKSAALLLQNDHNADVQSKMMVNRTTESGFTPLHIAAHYGNVNVATLLLNRGAAVDFTARNGITPLHVASKRGNTNMVKLLLDRGGQIDAKTRDGLTPLHCAARSGHDQVVELLLERGAPLLARTKNGLSPLHMAAQGDHVECVKHLLQHKAPVDDVTLDYLTALHVAAHCGHYRVTKLLLDKRANPNARALNGFTPLHIACKKNRIKVMELLVKYGASIQAITESGLTPIHVAAFMGHLNIVLLLLQNGASPDVTNIRGETALHMAARAGQVEVVRCLLRNGALVDARAREEQTPLHIASRLGKTEIVQLLLQHMAHPDAATTNGYTPLHISAREGQVDVASVLLEAGAAHSLATKKGFTPLHVAAKYGSLDVAKLLLQRRAAADSAGKNGLTPLHVAAHYDNQKVALLLLEKGASPHATAKNGYTPLHIAAKKNQMQIASTLLNYGAETNIVTKQGVTPLHLASQEGHTDMVTLLLDKGANIHMSTKSGLTSLHLAAQEDKVNVADILTKHGADQDAHTKLGYTPLIVACHYGNVKMVNFLLKQGANVNAKTKNGYTPLHQAAQQGHTHIINVLLQHGAKPNATTANGNTALAIAKRLGYISVVDTLKVVTEEVTTTTTTITEKHKLNVPETMTEVLDVSDEEGDDTMTGDGGEYLRPEDLKELGDDSLPSSQFLDGMNYLRYSLEGGRSDSLRSFSSDRSHTLSHASYLRDSAVMDDSVVIPSHQVSTLAKEAERNSYRLSWGTENLDNVALSSSPIHSGRASPCLERDNSSFLVSFMVDARGGAMRGCRHNGLRIIIPPRKCTAPTRVTCRLVKRHRLATMPPMVEGEGLASRLIEVGPSGAQFLGKLHLPTAPPPLNEGESLVSRILQLGPPGTKFLGPVIVEIPHFAALRGKERELVVLRSENGDSWKEHFCDYTEDELNEILNGMDEVLDSPEDLEKKRICRIITRDFPQYFAVVSRIKQDSNLIGPEGGVLSSTVVPQVQAVFPEGALTKRIRVGLQAQPMHSELVKKILGNKATFSPIVTLEPRRRKFHKPITMTIPVPKASSDVMLNGFGGDAPTLRLLCSITGGTTPAQWEDITGTTPLTFVNECVSFTTNVSARFWLIDCRQIQESVTFASQVYREIICVPYMAKFVVFAKSHDPIEARLRCFCMTDDKVDKTLEQQENFAEVARSRDVEVLEGKPIYVDCFGNLVPLTKSGQHHIFSFFAFKENRLPLFVKVRDTTQEPCGRLSFMKEPKSTRGLVHQAICNLNITLPIYTKESESDQEQEEEIDMTSEKNPQDEQERIEERLAYIADHLGFSWTELARELDFTEEQIHQIRIENPNSLQDQSHALLKYWLERDGKHATDTNLVECLTKINRMDIVHLMETNTEPLQERISHSYAEIEQTITLDHSEGFSVLQEELCTAQHKQKEEQAVSKESETCDHPPIVSEEDISVGYSTFQDGVPKTEGDSSATALFPQTHKEQVQQDFSGKMQDLPEESSLEYQQEYFVTTPGTETSETQKAMIVPSSPSKTPEEVSTPAEEEKLYLQTPTSSERGGSPIIQEPEEPSEHREESSPRKTSLVIVESADNQPETCERLDEDAAFEKGDDMPEIPPETVTEEEYIDEHGHTVVKKVTRKIIRRYVSSEGTEKEEIMVQGMPQEPVNIEEGDGYSKVIKRVVLKSDTEQSEDNNE

SEQ ID NO: 44998 - DNA, 8082 bp, Artificial Sequence
  derived and/or modified sequence
actggcccgccgaaagcacatggattacagtctgaggctgtaatgggaaagtcggttcctgggctgctgtctcatagacatcagcttgcagggaagctgggggctctccgaattgccctgctccggggcccctcctgctgcgtgactcacaggcacattgcagagagaagctgccgctcccagtaagtaatgaaaagagacatgaagaattggtatttcaaatgaccaccatgttgcaaaagtctgacagcaatgcaagcttcctccgtgctgccagagcaggcaacctggacaaagttgtggaatatctgaaggggggcatagacatcaatacctgcaatcagaatggactcaacgctctccatctggctgccaaggaaggccacgtggggctggtgcaggagctgctgggaagagggtcctctgtggattctgccactaagaagggaaataccgctcttcacattgcatctttggctggacaagcagaagttgtcaaagttcttgttaaggaaggagccaatattaatgcacagtctcagaatggctttactcctttatacatggctgcccaagagaatcacattgatgttgtaaaatatttgctggaaaatggagctaatcagagcactgctacagaggatggctttactcctctagctgtggcactccagcaaggacacaaccaggcggtggccatcctcttggagaatgacaccaaagggaaagtgaggctgccagctctgcatattgccgctaggaaagacgacaccaaatctgccgcacttctgcttcagaatgaccacaatgctgacgtacaatccaagatgatggtgaataggacaactgagagtggttttacccctttgcacatagctgcacattacggaaatgtcaacgtggcaactcttcttctaaaccggggagctgctgtggacttcacagccaggaatggaatcactcctctgcatgtggcttccaaaagaggaaatacaaacatggtgaagctcttactggatcgaggcggtcagatcgatgccaaaactagggatgggttgacaccacttcactgtgctgcacgaagtgggcatgaccaagtggtggaacttctgttggaacggggtgcccccttgctggcaaggactaagaatgggctgtctccactacacatggctgcccagggagaccacgtggaatgtgtgaagcacctgttacagcacaaggcacctgttgatgatgtcaccctagactacctgacagccctccacgttgctgcgcactgtggccactaccgtgtaaccaaactccttttagacaagagagccaatccgaacgccagagccctgaatggttttactccactgcacattgcctgcaagaaaaaccgcatcaaagtcatggaactgctggtgaaatatggggcttcaatccaagctataacagagtctggcctcacaccaatacatgtggctgccttcatgggccacttgaacattgtcctccttctgctgcagaacggagcctctccagatgtcactaacattcgtggtgagacggcactacacatggcagcccgagccgggcaggtggaagtggtccgatgcctcctgagaaatggtgcccttgttgatgccagagccagggaggaacagacacctttacatattgcctcccgcctgggtaagacagaaattgtccagctgcttctacaacatatggctcatccagatgcggccactacaaatgggtacacaccactgcacatctctgcccgggagggccaggtggatgtggcatcagtcctattggaagcaggagcagcccactccttagctaccaagaagggttttactcccctgcatgtagcagccaagtatggaagcctggatgtggcaaaacttctcttgcaacgccgtgctgccgcagattctgcagggaagaacggccttaccccgctccatgttgctgctcattatgacaaccagaaggtggcgctgctgttactggagaagggtgcttcccctcatgccactgccaagaatggctatactccgttacatattgctgccaagaagaatcaaatgcagatagcttccacactcctgaactatggagcagagacaaacattgtgacaaagcaaggagtaactccactccatctggcctcgcaggaggggcacacagatatggttaccttgcttctggataagggagccaatatccacatgtcaactaagagtggactcacatccttacaccttgcagcccaggaagataaagtgaatgttgctgatattctcaccaagcatggagctgatcaggatgctcatacaaagcttggttacacacctttaattgtggcctgtcactatggaaatgtgaaaatggtcaactttcttctgaagcagggagcaaatgttaacgcaaaaaccaagaacggctacacgcctttgcaccaggccgctcagcagggtcacacgcacatcatcaacgtcctgctccagcatggggccaagcccaacgccaccactgcgaatggcaacactgccttggcgattgctaagcgtctgggctacatctccgtggtcgacaccctgaaggttgtgactgaggaggtcaccaccaccaccacaactattacagaaaaacacaaactaaatgtacctgagacgatgactgaggttcttgatgtttctgatgaagagggtgatgacacaatgactggtgatgggggagaataccttaggcctgaggacctaaaagaactgggtgatgactcactacccagcagtcagttcctggatggtatgaattacctgcgatacagcttggagggaggacgatctgacagccttcgatccttcagttccgacaggtctcacactctgagccatgcctcctacctgagggacagtgccgtgatggatgactcagttgtgattcccagtcaccaggtgtcaactctagccaaggaggcagaaaggaattcttatcgcctaagctggggcactgagaacttagacaacgtggctctttcttctagtcctattcattcaggccgcgcctctccatgtcttgaacgtgacaacagcagtttcctggttagttttatggtggatgcccgaggtggtgctatgcgaggatgcagacacaatgggctccgaatcattattccacctcggaaatgtactgctccaacgcgagtcacctgccgactggtcaagcgccacagactggcaacaatgcctccaatggtggaaggagaaggcctggccagtcgcctgatcgaagttggaccttctggtgctcagttccttggtaaacttcacctgccaacggctcctcccccacttaatgagggagaaagtttggtcagccgcattcttcagctggggcctcctggaaccaaattccttgggcctgtgatcgtggagatccctcactttgcggcccttcgaggaaaggaaagggaactggtggtcctgcgcagtgagaatggggacagctggaaagagcatttctgtgactacactgaagatgaattgaatgaaattcttaacggcatggatgaagtactggatagcccagaagacctagaaaagaaacgaatctgccgcatcatcacccgagacttcccacagtactttgcagtggtgtctcgtatcaaacaggacagcaatctgattggcccagaaggaggtgtactgagcagcacagtggtgccccaggtgcaggccgtcttcccagagggggcactcaccaagcggatccgcgtaggcctgcaggctcaacctatgcacagtgagctggttaagaagatcctaggcaacaaagctaccttcagccctatagtcactttggaacctagaagaagaaaattccacaaaccaattaccatgaccattcctgtccccaaagcttcaagtgatgtcatgttgaatggttttgggggagatgcaccaaccttaagattactatgcagcataacaggtggaaccacccctgcccagtgggaagatattacaggaactacgccattaacatttgtcaatgaatgtgtttcctttacaacaaacgtgtctgccaggttctggctgatagattgtcgacagatccaggaatccgttacttttgcatcacaagtatacagagaaattatctgcgtaccttatatggccaaatttgtagtgtttgccaaatcacatgaccccattgaagccaggttgaggtgtttctgcatgactgatgataaagtggataagacccttgaacaacaagaaaattttgctgaggtggccagaagcagggatgtggaggtgttagaaggaaaacccatctacgttgattgtttcggcaacttggtaccattaactaaaagtggccagcatcatatattcagtttttttgccttcaaagaaaatagacttcctctatttgtcaaggtacgcgatacgactcaggaaccttgcggacgactatcatttatgaaggagccaaaatccacgagaggcctggtgcatcaagctatttgcaacttaaacatcactttgccgatttatacaaaggaatcagagtcagatcaagaacaggaggaagagatcgatatgacatcagaaaaaaatccacaggatgagcaggaacggatcgaggaaaggctggcttatattgctgatcaccttggcttcagctggacagaattagcaagagaactggatttcactgaggagcaaattcatcaaattcgaattgaaaatcccaactctcttcaagaccagagtcatgcactgttgaagtactggctagagagggatgggaaacatgctacagataccaacctcgttgaatgtctcaccaagatcaaccgaatggatattgttcatctcatggagaccaacacagaacctctccaggagcgcatcagtcatagttatgcagaaattgaacagaccattacactggatcatagtgaagggttctcggtacttcaagaggagttatgcactgcacagcacaagcagaaagaggagcaagctgtttctaaagaaagtgagacctgcgatcaccctcctatcgtctcagaggaagacatttctgttggttattccacttttcaggatggcgtccccaaaactgagggggacagctcagcaacagcactctttccccaaactcacaaggagcaagttcaacaggatttctcagggaaaatgcaagacctgcctgaagagtcatctctggaatatcagcaggaatattttgtgacaactccaggaacagaaacatcagagactcagaaggctatgatagtacccagctctcccagcaagacacctgaggaagttagcacccctgcagaggaggagaagctgtacctccagaccccaacatccagcgagcggggaggctctcccatcatacaagaacccgaagagccctcagagcacagagaggagagctctccgcggaaaaccagcctcgtaatagtggagtctgccgataaccagcctgagacctgtgaaagactcgatgaagatgcagcttttgaaaagggagacgatatgcctgaaatacccccagaaacagtcacagaagaagaatacattgatgagcatggacacaccgtggtaaagaaggttactaggaaaatcattaggcggtatgtatcctctgaaggcacagagaaagaagagattatggtgcagggaatgccacaggaacctgtcaacatcgaggaaggggatggctattccaaagttataaagcgtgttgtattgaagagtgacaccgagcagtcagaggacaacaatgagtaaagccatcacacagaagagggctgtggtgaaggaccagcatggaaaacgcattgacttggagcacctggaggatgtaccagaagcactagaccaggacgacctccagcgcgatctccagcagctccttcggcatttctgcaaggaggacttgaagcaagaggccaagtgaggggctgcccagttctcacaccagaaaccacacattcactcaatatgcagcttcctgtttcagtaggggagtgacctaactggcctaattaatgggataccccgacatttccactgttagcaaatatacggcattttgctttagttttcccccatcctctttaactataaagctaatttgtgaccaaagatggcatccttcatactggatgctgtatccaatactttgttgtgtctgtgctaacctgggaactggccacctccattgttctttgcttctgcacaagatccatgaaaatccattgatcagaagaacttcacctgcagacctcttcaagtgacactatgtaggaatccttccaaggaatatctatgtacaatgtatatagctgaaatgctcagatgaacaacatattaaaattaaaaccactgcctattgtaactacactgggcatcagaataaaaggcctctagaaattgctgaacaatggttaattaagatattgctaacacaatcgagtgataatacagttttactgcaaaagaagcacttcaaacctattatgtccttagaacttccagagtagccactgctcccagttaaaggtgggtcagtagccttgcagaactgtcctgagaagttattgctggtgctggccagccatggcttaggactccaacagccactctgagggaggggagaagggagcagaggccacgcagaatgaaccgatggggtattcagttgctggcagctacattgtgtggcattctagcatcttcaggtctttagatcttggacaagttggcagggtattttaaaagctataactactgtagttttccagttttcattgctgctttagcaaaccacgctgtcttacagtggtactttcttctggccactgcactgtagataattcattggaaacaagatttacccactacataaaaggttaaactccttcagtatgttggagtggtttctttttttttttctttctttcttttttttcttcaggtttatatcttctctaatacctgcatgtggcgtttaaaaatcaagaccacggtcaaacccctcttctaatcacattaattgtttccattctttttaccctgagtgagcacttttcactttccagctaggtctgtttttcagcttgcagacaagattgagaaatccttgaaaatttggttttggttaaaatttttggtttatttatttgaaatccacactcccttggaaactcttaagtgcatttgtgcacttctgtttgtttgtctcaaagaagggactgtaacaatctgagtaatttccatgtcctcttccttattcctctagtggttgaagctgtgtagcattttaacatatatatattcacaaatatattcatataaacagtatacattttgaatcagtcatttgttaaagaaaagtatattcaatgaagatgaaatttaaataaaaaaggacagagtctatcctccagggattgaacattttccaattatctggtcttttcctgttgtgcaaaaatgactcattgctccgaatgtcaaaaacaaatgcgacaaacaatggcacttcatcatttaaagtaatgttgccaagagaaaaaatttcctgggagggaggtttcccacaagccaaatctcctaagcctcaaatgctagcactttttggcagttggataggaaatgagacattctttggcagccaaaataagagaggccgatggtgaaactttttgagacaccctatggccttcttgtcaaaaccttcactggagctcaagaaaagcatttctgttgtgttatttgcagtgcagatgatgtctgtgtaacaacataatggttattcacctttttttgattttgatttttgctgtgttatcaaaaacttgaatactgtgagaagaagtgaattttcagttgacgaatcagcatcttgttcccatggtgataacactaattgaatatatctatgagggcatgtattagttaatggaaaaaaaaatacaacactaacaatacatagctgcaatgtgtacaatggctgatttaattaaataaaatgtacaagtgttaaatgtggcaa

SEQ ID NO: 44999 - DNA, 5592 bp, Artificial Sequence
  derived and/or modified sequence
atgtctcaccacatccagcggtccgattcaaacgcctctttcctgagggcggccagggccgggaacttagataaggtggtggagtatctgaaggggggtatcgatatcaacacttgtaatcagaacgggttaaacgctcttcatttagctgcaaaggaagggcacgtgggcctggtacaggaattgttaggccggggtagctcggttgactcagctacaaaaaagggtaacactgccctccacatcgctagtctggctggacaggccgaagtggtcaaggtgctggtgaaggagggcgcaaatatcaacgcccagagccagaatgggtttactcccctgtacatggccgctcaagaaaatcacattgatgtggtgaaataccttctcgagaatggcgctaaccaatctaccgctactgaagatgggttcacacctttggccgtagccctacagcagggccacaaccaggcagttgcaatactgcttgagaacgacacaaaaggcaaggtgcgactgcccgcactgcacattgccgcgcgaaaggatgatacaaaaagtgccgcccttctgcttcagaacgaccacaatgctgatgttcagtcgaaaatgatggtgaatcgtacaaccgagagcggctttactccgctgcatatcgccgctcactacggaaacgttaatgtcgcaaccttactgctaaaccgcggagcagcggttgacttcacagcccgtaatggcattaccccactgcatgttgcctcaaagagaggcaataccaacatggtgaaactgttgctagatagaggcggacagatcgatgctaaaaccagggacgggctgacgccccttcactgcgctgcaagatctgggcatgatcaagtagttgagctgctgctcgaacggggcgctccattgctggctagaacaaagaatggcctgagtcctctgcatatggcagctcagggcgaccatgtcgagtgtgtgaaacatctcctgcagcacaaggcccccgtggatgacgtgacgctggactacctgaccgcactgcatgtggctgcccactgtggccactatcgggttactaaactcctgctcgataagcgggctaaccctaacgcccgcgcgctcaatgggtttacccccctgcacatcgcttgcaagaaaaatagaatcaaggtgatggaactcctcgttaaatatggggcgagcatccaggcaatcacagaatctggcttaacacccatccacgttgccgctttcatgggtcatctgaatatcgtgctgctgcttctgcagaatggggcctcaccagacgtcaccaatatccgcggcgaaactgcactgcatatggcggctcgagccgggcaagttgaagtggtccggtgcctactgcgtaatggagcactggtggatgccagagcaagagaagagcaaactccattacacatagctagccgcctgggaaaaacagagattgtgcagctgttgttacaacatatggcgcatccggacgcagctaccacaaatggctatacgccattgcacatctcggccagggagggccaggtggacgtggccagcgtcttactggaggccggtgctgcccactctcttgccacaaaaaagggatttaccccattacatgtagccgcgaaatacggctctttagatgtggccaaactgctgcttcaacggagagcagctgccgattctgctggcaagaacggactgacgcctttacatgtggctgcccattatgacaaccagaaagtggccttactgctgttggagaagggtgcctcccctcatgcaactgctaaaaacggctacacaccccttcacattgccgcaaagaaaaaccagatgcagatcgcgtcaaccctgctgaactatggtgcagagacaaatattgtgaccaaacagggagtgacccctctacaccttgcctcccaggaagggcatacagatatggtgacactgctgctggataaaggcgcgaatatccatatgtccacaaaatcgggtctgacatccctgcacttagcagcccaggaggacaaagtgaatgtcgctgacatcctgacaaagcacggtgcggaccaggacgcccacaccaaactgggctacacccctctcatagtggcatgtcactacgggaatgtaaagatggtgaactttctattaaaacagggcgcgaatgtaaatgcgaagacaaagaatggctatacccctcttcatcaggccgctcagcagggccacacccatattatcaacgttctgctccagcacggagccaaacctaacgctaccaccgccaatggtaataccgccctggctatcgcaaagaggcttggatacattagtgttgttgatactctgaaggtggtcacggaagaggtgaccactactactacgaccatcacagagaagcacaaactgaatgttcccgagaccatgaccgaagttctggacgtttctgatgaggaaggggatgacacaatgaccggagacggtggagaatatttacggccagaggacctgaaagagctaggggacgactctttgcccagctctcagttcctggacggtatgaattatctgcgctacagcttggaagggggtaggagtgattctctgaggtcctttagcagcgacagatcacacaccctgtcacacgccagttacctgagagatagcgctgtcatggacgattccgtcgtcattccctctcaccaggtctcaacactggctaaagaggcagaacgcaactcttatcggctgtcctgggggactgagaatctagataatgtcgccctctctagtagcccaatccacagtgggagagcaagcccatgcctggagcgcgacaactccagctttttggtctctttcatggtggatgctcgagggggcgcgatgagggggtgccggcacaatggactgcgcatcattattccgccacgcaagtgcacagcaccaacgcgtgtgacgtgtcgcctggtgaagaggcaccggctcgccacaatgcccccaatggtggaaggggaagggctggcctctaggctcatcgaagtgggtccatccggggcccagtttttaggcaaactgcatctacctaccgccccacctcctctgaacgaaggggagtctcttgtatcgaggatccttcagttaggtcctcctggtacgaaatttctcgggcctgtgatcgtggaaatcccccattttgcagccctgaggggaaaggagcgagaacttgtggtgctgcgctccgagaacggggatagttggaaagagcacttttgtgattatactgaagacgagttgaatgaaattctcaatgggatggacgaggtactggattcacccgaagatctcgaaaagaagcgcatctgccgcatcattaccagagacttcccccagtacttcgccgtggtcagccgaatcaagcaagactccaacctgattgggccagaggggggcgtgctaagttcaacagtggtgcctcaggtgcaagccgtttttcccgagggtgccctcactaagcggatccgagtgggcctgcaggcccagcctatgcacagcgagctggtgaagaagattctaggaaacaaagccacattttcccctattgtaacactggagcctcggagacgcaagttccataagcctattactatgaccatcccagtgccaaaagccagctctgatgtcatgctcaatggattcggaggggacgcccccactcttaggttgctgtgttccatcacaggtggcacaacccctgcgcagtgggaggatatcacgggaacaactcccctgacattcgtgaatgagtgtgtaagcttcacgacgaatgtatccgctaggttctggctcatagactgtcgccaaattcaggagtcggttacatttgccagtcaggtctatcgggagattatttgtgtgccgtacatggcgaaattcgtggtgtttgccaagagccatgatcccatcgaggcaagacttagatgtttctgtatgaccgatgataaggttgataagaccttggagcagcaggagaactttgcagaagtagcgagatcaagggacgtggaggtgctcgagggaaagcccatatatgtggactgttttggcaacctggtgcctcttactaaaagtggacaacaccatatcttttccttctttgccttcaaagagaatcgactgcccctgtttgtgaaggtgagagacacgacccaggagccctgcgggcggctgtcgttcatgaaggaacccaagtcgactcgcggcctggtgcaccaggccatctgtaacttaaacataactcttccgatctacactaaagaaagtgaatcagatcaggagcaggaggaagagataggccaagaaagccgtcggtatcctcaggacgaacaggaaaggattgaagagcggctggcatacattgcagaccatctgggattttcatggaccgagctggcgagagagctggacttcactgaggagcagatacaccagatccgtattgaaaacccaaactctctccaggaccagtctcacgccttgctgaaatattggctggagcgggacggtaagcacgccaccgatacgaacctggtggaatgtctcacaaagataaaccggatggacatcgtccatctgatggagactaacactgagcccctccaggagcgcatctcccacagttacgcagaaattgaacagactattaccctggaccactccgaaggtttttctgtgttgcaagaggagttatgcacagctcagcataagcaaaaagaagaacaggctgtgagtaaggaaagcgaaacgtgcgatcaccccccgatcgtaagcgaagaagatatttccgtcggctacagcaccttccaagacggggtgccaaaaaccgaaggcgatagctccgccactgcgctctttccgcagacgcataaagagcaagttcaacaagacttttccggcaaaatgcaggaccttcccgaagagtctagcctggaatatcagcaggagtacttcgtgacaacccctggtacagaaacttccgaaacacagaaagctatgatcgttcctagtagcccttctaagacacctgaggaggtgagcacacctgcggaagaggagaagctgtatctccagacccccacgagttcggagcgtggggggtcccccataatacaggaacctgaggagccttccgaacacagggaagaatcgagtccaaggaagacatctctggtgattgtggagtccgctgacaaccagcccgaaacgtgcgagaggttagacgaggatgctgcattcgaaaaaggcgacgacatgcccgagattcccccggagacagttacagaagaggagtatatcgatgagcacgggcacactgttgttaagaaagtcacgcgaaagatcatcagacggtatgtctcatcggagggcacagagaaggaggagattatggtgcagggcatgccccaggagcccgtgaacattgaggagggggacggctatagtaaggtgatcaagagagtggttctcaaatccgacactgagcaatccgaggactccatggaatag

SEQ ID NO: 45000 - DNA, 3345 bp, Artificial Sequence
  derived and/or modified sequence
atgaccaccatgttgcagaagtccgacagtaacgcgtccttcctgcgggcggccagagccggaaatctggacaaggtggtggagtaccttaaggggggcatcgacattaatacctgcaatcagaacggtctgaacgctttacatctcgctgctaaggagggacacgtcgggctcgtgcaggagcttcttggcaggggctcaagcgtggactctgctacaaagaagggcaatactgcactgcacatagcttccctggctggccaagccgaggttgtgaaggtcttagtcaaagaaggcgccaacattaatgcgcagtcacaaaacggttttacccccctttatatggctgcacaggagaatcacattgatgtagtgaaatacttgcttgaaaacggcgcaaaccaatctaccgccacagaggatgggtttactcctctcgcagtcgctctgcagcagggccacaatcaggcggttgcaatcttgctcgagaacgacacaaaaggaaaagttcggctcccagctctgcacatagcagcccgaaaagacgacaccaaaagcgcggcactacttttgcagaatgaccataacgcagacgtccagagcaaaatgatggtgaatcgaaccaccgaaagcggcttcactcccctgcacatcgccgcccattacggtaacgtgaacgttgcgacacttctactcaaccgaggcgctgctgtggatttcaccgctcgcaacggaatcacacccctgcacgtcgccagcaagaggggcaacacaaacatggtgaagttgctgctggacagggggggtcaaatagacgcgaaaactagggacgggctaactccgttacactgcgccgctaggagcgggcacgatcaagtggtggagctgcttcttgaaaggggtgcccccctgctggcccggaccaagaatgggctgtcccctctacatatggctgctcagggggaccacgtcgagtgtgtaaagcacttactgcaacacaaagcccccgttgacgacgttacgctggattacttgaccgccctccatgtggccgctcactgcggacactatagggttaccaaattgttactggacaaacgggcaaacccgaacgccagggctctgaacggcttcaccccactccacatcgcttgcaagaaaaacagaattaaagtgatggagttacttgttaaatacggagcctcgattcaagctataaccgaatcaggcctgacccctatccatgtggccgcttttatgggccatctgaacatagtgctgttattgcttcagaatggagcttctcctgacgtgaccaacattcgcggcgaaactgcgcttcatatggccgcaagagcaggccaggtagaggtggtgcgatgtctcctgagaaacggcgccctggtcgatgcgagagcccgggaggaacagacgcccctgcatattgcctcgcgccttggtaagacagagatcgtgcagctgctactgcaacatatggcacacccagacgcggccactaccaatggctacaccccccttcacatttccgcccgggagggtcaggttgatgtagcgtccgtcttgctggaggccggtgcggctcattcgctggctaccaagaaaggctttacacccctccatgtcgctgccaaatacggctccctcgatgttgctaagctgttactgcagcgtagagccgccgcggacagtgctggtaagaacggcctgactcctctacatgttgcggcacattatgacaatcaaaaggtcgctttgttgctactcgaaaaaggggccagtcctcatgcgaccgcgaaaaacggctatacccctctccacatagcagctaaaaagaatcagatgcagatcgcaagcactctgcttaactacggtgcagagactaatatagtcactaagcagggcgtaacgcccctccacttagcaagccaggagggacacacagatatggtaacccttttgctagacaaaggcgctaatatacacatgtccacaaaatccgggctcacatcactgcacttagccgcccaggaggacaaagttaatgtggccgatatcctgacaaaacatggggctgatcaggacgcacacaccaagctggggtatacgcccttgatcgtggcttgtcattacggcaatgtgaaaatggtgaactttctgctcaagcagggtgctaacgtcaatgctaagacaaaaaatgggtacactcctctgcatcaggcagcacagcaaggccacacccacatcattaacgtgctcctccaacatggcgccaagccaaatgctactaccgcaaacgggaacaccgcactggcaattgccaagcggctcggatatataagcgtcgttgacacactgaaggtcgtcactgaagaggtgaccacgactacaacaacaattactgaaaagcataaactcaatgtcccggaaactatgacagaggtgttggacgtctcagacgaagagggcgatgacaccatgaccggggacggcggtgagtacttacgaccagaggacctgaaagaacttggtgacgattccctgccttcatcccagttcctagacggcatgaactatcttaggtactcactggagggtggacgaagcgatagcctaaggtccttttccagcgataggagtcataccctgtcccatgcttcatacctccgcgattccgccgtgatggatgactctgtggtgattccctctcaccaggtcagtactctggctaaggaagcagaacgtaatagctaccggctgagttgggggaccgaaaacttggataacgtcgcgcttagctctagtcctattcactctggctttcttgtgagtttcatggtcgatgctagaggaggcgcaatgcgaggatgccggcacaatggactgcgtatcataattcctccgaggaagtgcacagctccgacgcgcgtcacttgtagactggttaagcggcatcggttggcaacaatgccacctatggttgagggggaaggacttgcatcgcggctgatcgaggtgggtccatcgggggcacagtttctagggaagttgcacctccccaccgcccctcctccgctcaatgagggggaatctctggtaagccgtattctgcaactcgggccgccaggcacaaagtttctaggccccgtaatagtggaaattccccacttcgccgcccttcgaggcaaagaacgcgagctggttgttctccgctctgaaaatggagattcctggaaggagcatttctgtgactatacggaagatgagctgaatgagattctcaatggaatggatgaggtcctggacagccctgaagacctggagtag

SEQ ID NO: 45001 - DNA, 5592 bp, Artificial Sequence
  derived and/or modified sequence
atgaccacaatgctgcagaaatcggactcgaatgcaagttttcttcgcgccgcacgggcgggtaatctggataaagtagttgagtacctcaaagggggaatcgatattaacacatgcaatcagaacggcctaaatgcattacatttggccgcgaaggagggtcatgtgggcctagtccaggaactgctgggtaggggatcatcagtggacagcgccaccaagaaaggaaataccgccctccacatcgcctcactcgccggccaggcggaggtagttaaagtgctcgtaaaggaaggagccaacatcaacgcccaaagccagaatggcttcacccctctgtatatggccgcccaggaaaatcacattgatgtggtaaagtatcttctggagaacggcgctaaccagagtacggcgacggaagacgggtttacaccattagctgtggcactacaacagggtcacaatcaggctgtggccatcctattagagaacgatacaaagggcaaagtgagactcccagcactgcatatagccgcccggaaggacgacaccaagtccgccgccctactgttacagaacgatcataacgctgacgtacagtccaagatgatggtaaacagaacaaccgagagcggtttcacccctctacatatcgccgcccattatggaaatgttaacgtggcaacgctacttttgaataggggcgcggctgtagattttactgcacgaaatggtattacgcccctgcatgtggcctcaaagagggggaatactaacatggtgaagctcctgttggatcggggcggacagatcgacgctaagacgagggatgggctcacccctttgcattgcgccgcgcgctctggccacgaccaggttgttgaattgctgctcgaacgcggcgctccactccttgcccggaccaagaatggactgtctccattgcatatggctgcgcaaggggaccacgttgagtgcgtcaagcacctgctccagcacaaagccccagtagatgatgtgacattggactatttaactgcactgcatgtagcagctcactgtggccattatcgcgtcacaaaattgctcttggacaagagggccaaccccaatgcacgcgcacttaacggctttacccccttgcatatcgcttgtaagaagaatcgcataaaagtgatggaactcctagttaagtacggcgcttctatccaggctataacagaatccggtcttacccctattcatgtcgccgcctttatgggccacctaaacattgtgttactcttgttacagaatggcgccagtcccgatgtgacaaacattagaggcgaaactgctttgcatatggcagctcgggcaggacaagtcgaagtggtccgttgtttgctcaggaacggcgcgctggtggacgctagggcacgtgaggaacagaccccccttcatatcgctagtagactcggaaaaacagaaatcgtgcagttgctgttacaacacatggcacacccagacgccgccaccacaaatgggtacactcccttgcacatctcggccagggaggggcaggtggacgttgccagcgtgcttctggaggctggcgccgctcatagtctcgctacaaaaaaaggttttactcccctgcacgtggccgccaaatatggcagcctagacgtggccaaactgcttttgcagaggcgtgctgccgccgactctgcaggcaaaaacggcctcacaccactccacgttgccgcccactacgataatcaaaaggttgctctgctcttgttagagaagggtgcttccccacacgcaaccgctaagaacgggtatacaccgctgcatatcgctgctaagaagaatcagatgcagattgctagcaccctcttgaattacggcgctgaaacgaatatagttaccaagcagggcgtgacacctctgcatttagcttcgcaggagggccacacagacatggttactctgctgctagacaaaggtgccaacatccatatgagcactaagtctggtttgacctcccttcacctggctgcacaggaagacaaggtaaatgtggccgatatcttgacaaagcatggcgccgaccaggatgctcacaccaagctgggctacacacctctcattgttgcctgtcactacggtaatgttaagatggtgaacttcctcttgaagcaaggggccaacgtaaacgccaagaccaagaacggatacacacccctgcaccaggctgcccagcaggggcatacacacattatcaatgtgctcctccaacacggcgcaaagcctaacgccaccactgccaacgggaataccgcgctggcgatagctaaacgactgggctatatcagtgtggtggacaccttaaaggtggtcaccgaagaggtgacaactactacaactaccatcaccgagaaacataaactaaacgtccccgaaactatgactgaagttcttgatgtctctgatgaggagggtgatgacactatgacaggcgacggaggcgaatacctgaggccggaagacctgaaggagctgggagatgactcattgccttcaagtcaattcctggacggcatgaattacctccggtactctttggagggcggcaggtccgactcgctgaggtcattttcaagcgatcgcagtcacaccctgtcgcatgcttcttacctgagagacagcgcagtgatggacgatagcgttgtcattccctcacatcaggtgtcgacgctggctaaagaggctgaacgtaacagctatcgactatcttggggcacagagaacttggacaatgtggccctgagttcttcaccaatccattcaggcagggcctctccatgtctggagagggacaactcgtcttttctagtgtcgttcatggtggacgctagagggggagccatgaggggctgcaggcataatgggctgcggattattattccgcctcgtaaatgcactgcccccacccgtgtgacgtgtagactggtgaaacggcataggcttgccaccatgccgccaatggttgagggagagggcctcgccagcagactaatcgaggttgggccaagcggggcccagttccttggtaagttgcacctcccaacagcgccaccccctctgaatgaaggggagtccctcgtttcacgcatactgcagctgggacccccgggcactaagtttctggggcctgtaattgtggaaattcctcatttcgcagccctgaggggaaaggagcgcgaactcgtggtacttaggagtgagaatggagactcttggaaagagcacttttgcgattacaccgaggacgagttaaacgagatcttaaatggcatggatgaggttctggattcacccgaggacctggaaaaaaagagaatatgcaggataatcacaagagactttcctcagtattttgccgtggttagcagaattaagcaagatagcaatctgattggccctgaggggggtgttctgtccagtactgtggtacctcaagttcaagccgtgtttcctgagggggcactgaccaagcgcatcagagtgggtctgcaggcccagccgatgcacagtgagctcgtgaagaaaattcttgggaataaagcgaccttctccccaattgtcaccctagagcctaggcggcgcaaattccacaagcccataacaatgaccatccccgtgccaaaggcatcttccgatgtaatgcttaatggttttggcggggatgcaccgactcttcggctgctgtgctctatcacaggtgggacaaccccagcccagtgggaagatattaccggaacaaccccactgacatttgtcaatgagtgtgtgtcatttactaccaacgtttccgctagattctggttgattgattgccgacagattcaggagagtgtgaccttcgcctcgcaggtgtatcgagagatcatctgcgtcccctacatggcaaaattcgttgtctttgcgaagtctcacgatcccatcgaggccaggcttaggtgcttctgcatgaccgatgacaaagtggacaaaacactagagcaacaggagaattttgccgaagttgctcgatcaagggatgtcgaagtgcttgaaggtaagcccatctatgtagattgcttcggcaacctagtgccgttgacgaaatccgggcagcatcatatattctcctttttcgcattcaaagagaaccgtcttcctctgtttgttaaagtgcgggatacaactcaggagccatgtggtaggcttagcttcatgaaagaaccaaagagcacaagggggttggttcaccaggctatctgcaacctgaacatcactctgccaatctacacaaaggagtctgaatccgatcaggagcaagaggaggaaattgatatgaccagtgagaagaacccccaggacgaacaagaaaggatagaagagagactggcgtatatcgctgaccaccttggtttcagctggacggaattggcacgggaattggactttaccgaggagcagatacaccaaattagaattgagaacccaaattctcttcaggatcagtcccatgccctacttaagtattggcttgagagagatggaaaacacgcgacagatactaacttggtagaatgccttactaagattaatcgtatggatatcgttcacctcatggagactaatacagaaccacttcaagaaaggatttcgcacagttacgcggaaattgagcaaacaatcacattagaccacagcgagggtttctcagtgctgcaggaagaattgtgtactgcacagcacaaacagaaggaagagcaggcagtgtcaaaggaaagcgagacctgcgaccatccacccatcgtgtctgaagaagacatcagtgtgggctactcgacgtttcaggatggcgtgcccaagacagagggcgattccagcgccactgctttgttcccacaaactcacaaggaacaagtgcagcaggacttctctgggaaaatgcaggaccttcccgaggagtcaagcctggagtaccagcaagaatactttgtaaccaccccaggcacagagacgtctgaaacccagaaggctatgatcgtgccctcctcacccagcaagacacccgaagaagttagcacgcctgccgaggaagaaaaactgtacctccaaacccccacaagtagcgagcgcggcggatctcccataattcaggaaccggaagagccgagcgaacaccgcgaagagagctccccccgcaagacatctcttgtcatcgtcgagtctgccgataaccagccagaaacatgcgaacgactcgacgaggatgccgcattcgaaaaaggggatgacatgccagaaataccgccagagactgtgacggaggaagagtacattgatgagcatggccacactgttgttaagaaggtgacacgcaaaatcatcaggaggtacgtgagctcagaaggaaccgagaaagaggagatcatggtccaggggatgccgcaagaacccgtcaacatagaagagggggacggatactcgaaggttattaagcgagtagtcttaaagtccgacacggaacaatcagaagacaacaacgaatag

SEQ ID NO: 45002 - DNA, 5592 bp, Artificial Sequence
  derived and/or modified sequence
atgagccaccacatccagaggagtgacagcaatgccagcttcctgcgggccgcccgggccggcaacctggacaaggtggtggagtacctgaagggcggcatcgacatcaacacctgcaaccagaatggcctgaatgccctgcacctggccgccaaggagggccacgtgggcctggtgcaggagctgctgggccggggcagctctgtggacagcgccaccaagaagggcaacacagccctgcacatcgccagcctggccggccaggccgaggtggtgaaggtgctggtgaaggagggcgccaacatcaatgcccagagccagaatggcttcacccccctgtacatggccgcccaggagaaccacattgatgtggtgaagtacctgctggagaatggagccaaccagagcacagccacagaagatggcttcacccccctggccgtggccctgcagcagggccacaaccaggccgtggccatcctgctggagaatgacaccaagggcaaggtgcggctgcctgccctgcacatcgccgccaggaaggatgacaccaagtctgctgccctgctgctgcagaatgaccacaatgctgatgtgcagagcaagatgatggtgaacagaaccacagaaagtggcttcacccccctgcacatcgccgcccactatggaaatgtgaatgtggccaccctgctgctgaacagaggagctgctgtggacttcaccgccagaaatggcatcacccccctgcacgtggccagcaagaggggcaacaccaacatggtgaagctgctgctggaccggggcggccagattgatgccaagaccagagatggcctgacccccctgcactgtgccgcccggagcggccatgaccaggtggtggagctgctgctggagcggggggcccccctgctggcccggaccaagaatggcctgagccccctgcacatggccgcccagggcgaccacgtggagtgtgtgaagcacctgctgcagcacaaggcccctgtggatgatgtgaccctggactacctgacagccctgcacgtggccgcccactgcggccactacagagtgaccaagctgctgctggacaagagggccaaccccaatgcccgggccctgaatggcttcacccccctgcacatcgcctgcaagaagaaccgcatcaaggtgatggagctgctggtgaagtatggagccagcatccaggccatcacagaaagtggcctgacccccatccacgtggccgccttcatgggccacctgaacatcgtgctgctgctgctgcagaatggagccagcccagatgtgaccaacatccggggggagacagccctgcacatggccgcccgggccggccaggtggaggtggtgcgctgcctgctgagaaatggagccctggtggatgcccgggcccgggaggagcagacccccctgcacatcgccagccggctgggcaagacagaaattgtgcagctgctgctgcagcacatggcccacccagatgctgccaccaccaacggctacacccccctgcacatcagcgcccgggagggccaggtggatgtggcctctgtgctgctggaggccggggccgcccacagcctggccaccaagaagggcttcacccccctgcacgtggccgccaagtatggcagcctggatgtggccaagctgctgctgcagaggagagctgctgctgacagcgctgggaagaatggcctgacccccctgcacgtggccgcccactatgacaaccagaaggtggccctgctgctgctggagaagggggccagcccccacgccacagccaagaatggctacacccccctgcacatcgccgccaagaagaaccagatgcagatcgccagcaccctgctgaactacggggctgagaccaacatcgtgaccaagcagggcgtgacccccctgcacctggccagccaggagggccacacagacatggtgaccctgctgctggacaagggggccaacatccacatgagcaccaagagcggcctgaccagcctgcacctggccgcccaggaggacaaggtgaatgtggccgacatcctgaccaagcacggggctgaccaggatgcccacaccaagctgggctacacccccctcatcgtggcctgccactatggaaatgtgaagatggtgaacttcctgctgaagcagggcgccaacgtgaatgccaagaccaagaatggctacacccccctgcaccaggccgcccagcagggccacacccacatcatcaacgtgctgctgcagcacggggccaagcccaatgccaccacagccaacggcaacacagccctggccatcgccaagaggctgggctacatctctgtggtggacaccctgaaggtggtgacagaggaggtgaccaccaccaccaccaccatcacagagaagcacaagctgaatgtgcctgagaccatgacagaggtgctggatgtgtctgatgaggagggagatgacaccatgactggagatggaggagagtacctgcggcctgaggacctgaaggagctgggagatgacagcctgcccagcagccagttcctggatggcatgaactacctgcgctacagcctggagggcggccgcagtgacagcctgcggagcttcagcagtgacaggagccacaccctgagccacgccagctacctgcgggacagcgctgtgatggatgacagcgtggtgatccccagccaccaggtgtccaccctggccaaggaggccgagagaaattcctaccgcctgtcctggggcacagagaacctggacaacgtggccctgagcagcagccccatccacagcggccgggccagcccctgcctggagcgggacaacagcagcttcctggtgtccttcatggtggatgcccggggcggggccatgaggggctgccgccacaacggcctgcgcatcatcatcccccccaggaagtgcacagcccccaccagggtgacctgccgcctggtgaagaggcaccggctggccaccatgccacccatggtggagggggagggcctggccagccgcctcatcgaggtgggccccagcggggcccagttcctgggcaagctgcacctgcccacagcccccccacccctgaatgaaggagagagcctggtgagccgcatcctgcagctgggccccccaggcaccaagttcctgggccctgtgattgtggagatcccccactttgctgccctgcggggcaaggagcgggagctggtggtgctgcggagtgaaaatggagacagctggaaggagcacttctgtgactacacagaagatgagctgaatgagatcctgaatggcatggatgaggtgctggacagccctgaggacctggagaagaagaggatctgccgcatcatcacccgggacttcccccagtactttgctgtggtgagccgcatcaagcaggacagcaacctgattggccctgagggcggcgtgctgagcagcacagtggtgccccaggtgcaggccgtgtttcctgagggcgccctgaccaagaggatccgggtgggcctgcaggcccagcccatgcacagcgagctggtgaagaagatcctgggcaacaaggccaccttcagccccatcgtgaccctggagcccaggaggaggaagttccacaagcccatcaccatgaccatccctgtgcccaaggccagcagtgatgtgatgctgaatggatttggaggagatgcccccaccctgcggctgctgtgcagcatcaccggcggcaccaccccagcccagtgggaggacatcaccggcaccacccccctgacctttgtgaatgaatgtgtgtccttcaccaccaacgtgtctgcccgcttctggctgattgactgccggcagatccaggagagcgtgacctttgccagccaggtgtaccgggagatcatctgtgtgccctacatggccaagtttgtggtgtttgccaagagccatgaccccatcgaggcccggctgcgctgcttctgcatgacagatgacaaggtggacaagaccctggagcagcaggagaactttgctgaggtggcccggagcagagatgtggaggtgctggagggcaagcccatctacgtggactgctttggaaacctggtgcccctgaccaagagcggccagcaccacatcttctccttctttgccttcaaggaaaatcggctgcccctgtttgtgaaggtgcgggacaccacccaggagccctgtggccgcctgtccttcatgaaggagcccaagagcacccggggcctggtgcaccaggccatctgcaacctgaacatcaccctgcccatctacaccaaggagagcgagagtgaccaggagcaggaggaggagatcggccaggagagccgccgctacccccaggatgagcaggagagaattgaggagcggctggcctacatcgctgaccacctgggcttctcctggacagagctggcccgggagctggacttcacagaggagcagatccaccagatcagaattgagaaccccaacagcctgcaggaccagagccacgccctgctgaagtactggctggagagagatggcaagcacgccacagacaccaacctggtggagtgcctgaccaagatcaacaggatggacatcgtgcacctgatggagaccaacacagagcccctgcaggagcgcatcagccacagctatgcagaaattgagcagaccatcaccctggaccacagcgagggcttctctgtgctgcaggaggagctgtgcacagcccagcacaagcagaaggaggagcaggccgtgtccaaggagagcgagacctgtgaccacccccccatcgtgtctgaggaggacatctctgtgggctacagcaccttccaggatggagtgcccaagacagaaggagacagcagcgccacagccctcttcccccagacccacaaggagcaggtgcagcaggacttcagcggcaagatgcaggacctgcctgaggagagcagcctggagtaccagcaggagtactttgtgaccaccccaggcacagagaccagcgagacccagaaggccatgattgtgcccagcagccccagcaagaccccagaggaggtgtccaccccagctgaggaggagaagctgtacctgcagacccccaccagcagcgagcggggcggcagccccatcatccaggagcctgaggagcccagcgagcaccgggaggagagcagccccaggaagaccagcctggtgattgtggagagcgctgacaaccagcctgagacctgtgagcggctggatgaagatgctgcctttgagaagggagatgacatgcctgagatccccccagagaccgtgacagaggaggagtacattgatgaacatggccacacagtggtgaagaaggtgaccaggaagatcatcagaagatatgtgagcagcgagggcacagagaaggaggagatcatggtgcagggcatgccccaggagcctgtgaacatcgaggagggagatggctacagcaaggtgatcaagagggtggtgctgaagagtgacacagagcagagtgaagattccatggagtag

SEQ ID NO: 45003 - DNA, 3345 bp, Artificial Sequence
  derived and/or modified sequence
atgaccaccatgctgcagaagagtgacagcaatgccagcttcctgcgggccgcccgggccggcaacctggacaaggtggtggagtacctgaagggcggcatcgacatcaacacctgcaaccagaatggcctgaatgccctgcacctggccgccaaggagggccacgtgggcctggtgcaggagctgctgggccggggcagctctgtggacagcgccaccaagaagggcaacacagccctgcacatcgccagcctggccggccaggccgaggtggtgaaggtgctggtgaaggagggcgccaacatcaatgcccagagccagaatggcttcacccccctgtacatggccgcccaggagaaccacattgatgtggtgaagtacctgctggagaatggagccaaccagagcacagccacagaagatggcttcacccccctggccgtggccctgcagcagggccacaaccaggccgtggccatcctgctggagaatgacaccaagggcaaggtgcggctgcctgccctgcacatcgccgccaggaaggatgacaccaagtctgctgccctgctgctgcagaatgaccacaatgctgatgtgcagagcaagatgatggtgaacagaaccacagaaagtggcttcacccccctgcacatcgccgcccactatggaaatgtgaatgtggccaccctgctgctgaacagaggagctgctgtggacttcaccgccagaaatggcatcacccccctgcacgtggccagcaagaggggcaacaccaacatggtgaagctgctgctggaccggggcggccagattgatgccaagaccagagatggcctgacccccctgcactgtgccgcccggagcggccatgaccaggtggtggagctgctgctggagcggggggcccccctgctggcccggaccaagaatggcctgagccccctgcacatggccgcccagggcgaccacgtggagtgtgtgaagcacctgctgcagcacaaggcccctgtggatgatgtgaccctggactacctgacagccctgcacgtggccgcccactgcggccactacagagtgaccaagctgctgctggacaagagggccaaccccaatgcccgggccctgaatggcttcacccccctgcacatcgcctgcaagaagaaccgcatcaaggtgatggagctgctggtgaagtatggagccagcatccaggccatcacagaaagtggcctgacccccatccacgtggccgccttcatgggccacctgaacatcgtgctgctgctgctgcagaatggagccagcccagatgtgaccaacatccggggggagacagccctgcacatggccgcccgggccggccaggtggaggtggtgcgctgcctgctgagaaatggagccctggtggatgcccgggcccgggaggagcagacccccctgcacatcgccagccggctgggcaagacagaaattgtgcagctgctgctgcagcacatggcccacccagatgctgccaccaccaacggctacacccccctgcacatcagcgcccgggagggccaggtggatgtggcctctgtgctgctggaggccggggccgcccacagcctggccaccaagaagggcttcacccccctgcacgtggccgccaagtatggcagcctggatgtggccaagctgctgctgcagaggagagctgctgctgacagcgctgggaagaatggcctgacccccctgcacgtggccgcccactatgacaaccagaaggtggccctgctgctgctggagaagggggccagcccccacgccacagccaagaatggctacacccccctgcacatcgccgccaagaagaaccagatgcagatcgccagcaccctgctgaactacggggctgagaccaacatcgtgaccaagcagggcgtgacccccctgcacctggccagccaggagggccacacagacatggtgaccctgctgctggacaagggggccaacatccacatgagcaccaagagcggcctgaccagcctgcacctggccgcccaggaggacaaggtgaatgtggccgacatcctgaccaagcacggggctgaccaggatgcccacaccaagctgggctacacccccctcatcgtggcctgccactatggaaatgtgaagatggtgaacttcctgctgaagcagggcgccaacgtgaatgccaagaccaagaatggctacacccccctgcaccaggccgcccagcagggccacacccacatcatcaacgtgctgctgcagcacggggccaagcccaatgccaccacagccaacggcaacacagccctggccatcgccaagaggctgggctacatctctgtggtggacaccctgaaggtggtgacagaggaggtgaccaccaccaccaccaccatcacagagaagcacaagctgaatgtgcctgagaccatgacagaggtgctggatgtgtctgatgaggagggagatgacaccatgactggagatggaggagagtacctgcggcctgaggacctgaaggagctgggagatgacagcctgcccagcagccagttcctggatggcatgaactacctgcgctacagcctggagggcggccgcagtgacagcctgcggagcttcagcagtgacaggagccacaccctgagccacgccagctacctgcgggacagcgctgtgatggatgacagcgtggtgatccccagccaccaggtgtccaccctggccaaggaggccgagagaaattcctaccgcctgtcctggggcacagagaacctggacaacgtggccctgagcagcagccccatccacagcggcttcctggtgtccttcatggtggatgcccggggcggggccatgaggggctgccgccacaacggcctgcgcatcatcatcccccccaggaagtgcacagcccccaccagggtgacctgccgcctggtgaagaggcaccggctggccaccatgccacccatggtggagggggagggcctggccagccgcctcatcgaggtgggccccagcggggcccagttcctgggcaagctgcacctgcccacagcccccccacccctgaatgaaggagagagcctggtgagccgcatcctgcagctgggccccccaggcaccaagttcctgggccctgtgattgtggagatcccccactttgctgccctgcggggcaaggagcgggagctggtggtgctgcggagtgaaaatggagacagctggaaggagcacttctgtgactacacagaagatgagctgaatgagatcctgaatggcatggatgaggtgctggacagccctgaggacctggagtag

SEQ ID NO: 45004 - DNA, 5592 bp, Artificial Sequence
  derived and/or modified sequence
atgaccaccatgctgcagaagagtgacagcaatgccagcttcctgcgggccgcccgggccggcaacctggacaaggtggtggagtacctgaagggcggcatcgacatcaacacctgcaaccagaatggcctgaatgccctgcacctggccgccaaggagggccacgtgggcctggtgcaggagctgctgggccggggcagctctgtggacagcgccaccaagaagggcaacacagccctgcacatcgccagcctggccggccaggccgaggtggtgaaggtgctggtgaaggagggcgccaacatcaatgcccagagccagaatggcttcacccccctgtacatggccgcccaggagaaccacattgatgtggtgaagtacctgctggagaatggagccaaccagagcacagccacagaagatggcttcacccccctggccgtggccctgcagcagggccacaaccaggccgtggccatcctgctggagaatgacaccaagggcaaggtgcggctgcctgccctgcacatcgccgccaggaaggatgacaccaagtctgctgccctgctgctgcagaatgaccacaatgctgatgtgcagagcaagatgatggtgaacagaaccacagaaagtggcttcacccccctgcacatcgccgcccactatggaaatgtgaatgtggccaccctgctgctgaacagaggagctgctgtggacttcaccgccagaaatggcatcacccccctgcacgtggccagcaagaggggcaacaccaacatggtgaagctgctgctggaccggggcggccagattgatgccaagaccagagatggcctgacccccctgcactgtgccgcccggagcggccatgaccaggtggtggagctgctgctggagcggggggcccccctgctggcccggaccaagaatggcctgagccccctgcacatggccgcccagggcgaccacgtggagtgtgtgaagcacctgctgcagcacaaggcccctgtggatgatgtgaccctggactacctgacagccctgcacgtggccgcccactgcggccactacagagtgaccaagctgctgctggacaagagggccaaccccaatgcccgggccctgaatggcttcacccccctgcacatcgcctgcaagaagaaccgcatcaaggtgatggagctgctggtgaagtatggagccagcatccaggccatcacagaaagtggcctgacccccatccacgtggccgccttcatgggccacctgaacatcgtgctgctgctgctgcagaatggagccagcccagatgtgaccaacatccggggggagacagccctgcacatggccgcccgggccggccaggtggaggtggtgcgctgcctgctgagaaatggagccctggtggatgcccgggcccgggaggagcagacccccctgcacatcgccagccggctgggcaagacagaaattgtgcagctgctgctgcagcacatggcccacccagatgctgccaccaccaacggctacacccccctgcacatcagcgcccgggagggccaggtggatgtggcctctgtgctgctggaggccggggccgcccacagcctggccaccaagaagggcttcacccccctgcacgtggccgccaagtatggcagcctggatgtggccaagctgctgctgcagaggagagctgctgctgacagcgctgggaagaatggcctgacccccctgcacgtggccgcccactatgacaaccagaaggtggccctgctgctgctggagaagggggccagcccccacgccacagccaagaatggctacacccccctgcacatcgccgccaagaagaaccagatgcagatcgccagcaccctgctgaactacggggctgagaccaacatcgtgaccaagcagggcgtgacccccctgcacctggccagccaggagggccacacagacatggtgaccctgctgctggacaagggggccaacatccacatgagcaccaagagcggcctgaccagcctgcacctggccgcccaggaggacaaggtgaatgtggccgacatcctgaccaagcacggggctgaccaggatgcccacaccaagctgggctacacccccctcatcgtggcctgccactatggaaatgtgaagatggtgaacttcctgctgaagcagggcgccaacgtgaatgccaagaccaagaatggctacacccccctgcaccaggccgcccagcagggccacacccacatcatcaacgtgctgctgcagcacggggccaagcccaatgccaccacagccaacggcaacacagccctggccatcgccaagaggctgggctacatctctgtggtggacaccctgaaggtggtgacagaggaggtgaccaccaccaccaccaccatcacagagaagcacaagctgaatgtgcctgagaccatgacagaggtgctggatgtgtctgatgaggagggagatgacaccatgactggagatggaggagagtacctgcggcctgaggacctgaaggagctgggagatgacagcctgcccagcagccagttcctggatggcatgaactacctgcgctacagcctggagggcggccgcagtgacagcctgcggagcttcagcagtgacaggagccacaccctgagccacgccagctacctgcgggacagcgctgtgatggatgacagcgtggtgatccccagccaccaggtgtccaccctggccaaggaggccgagagaaattcctaccgcctgtcctggggcacagagaacctggacaacgtggccctgagcagcagccccatccacagcggccgggccagcccctgcctggagcgggacaacagcagcttcctggtgtccttcatggtggatgcccggggcggggccatgaggggctgccgccacaacggcctgcgcatcatcatcccccccaggaagtgcacagcccccaccagggtgacctgccgcctggtgaagaggcaccggctggccaccatgccacccatggtggagggggagggcctggccagccgcctcatcgaggtgggccccagcggggcccagttcctgggcaagctgcacctgcccacagcccccccacccctgaatgaaggagagagcctggtgagccgcatcctgcagctgggccccccaggcaccaagttcctgggccctgtgattgtggagatcccccactttgctgccctgcggggcaaggagcgggagctggtggtgctgcggagtgaaaatggagacagctggaaggagcacttctgtgactacacagaagatgagctgaatgagatcctgaatggcatggatgaggtgctggacagccctgaggacctggagaagaagaggatctgccgcatcatcacccgggacttcccccagtactttgctgtggtgagccgcatcaagcaggacagcaacctgattggccctgagggcggcgtgctgagcagcacagtggtgccccaggtgcaggccgtgtttcctgagggcgccctgaccaagaggatccgggtgggcctgcaggcccagcccatgcacagcgagctggtgaagaagatcctgggcaacaaggccaccttcagccccatcgtgaccctggagcccaggaggaggaagttccacaagcccatcaccatgaccatccctgtgcccaaggccagcagtgatgtgatgctgaatggatttggaggagatgcccccaccctgcggctgctgtgcagcatcaccggcggcaccaccccagcccagtgggaggacatcaccggcaccacccccctgacctttgtgaatgaatgtgtgtccttcaccaccaacgtgtctgcccgcttctggctgattgactgccggcagatccaggagagcgtgacctttgccagccaggtgtaccgggagatcatctgtgtgccctacatggccaagtttgtggtgtttgccaagagccatgaccccatcgaggcccggctgcgctgcttctgcatgacagatgacaaggtggacaagaccctggagcagcaggagaactttgctgaggtggcccggagcagagatgtggaggtgctggagggcaagcccatctacgtggactgctttggaaacctggtgcccctgaccaagagcggccagcaccacatcttctccttctttgccttcaaggaaaatcggctgcccctgtttgtgaaggtgcgggacaccacccaggagccctgtggccgcctgtccttcatgaaggagcccaagagcacccggggcctggtgcaccaggccatctgcaacctgaacatcaccctgcccatctacaccaaggagagcgagagtgaccaggagcaggaggaggagattgacatgaccagcgagaagaacccccaggatgagcaggagagaattgaggagcggctggcctacatcgctgaccacctgggcttctcctggacagagctggcccgggagctggacttcacagaggagcagatccaccagatcagaattgagaaccccaacagcctgcaggaccagagccacgccctgctgaagtactggctggagagagatggcaagcacgccacagacaccaacctggtggagtgcctgaccaagatcaacaggatggacatcgtgcacctgatggagaccaacacagagcccctgcaggagcgcatcagccacagctatgcagaaattgagcagaccatcaccctggaccacagcgagggcttctctgtgctgcaggaggagctgtgcacagcccagcacaagcagaaggaggagcaggccgtgtccaaggagagcgagacctgtgaccacccccccatcgtgtctgaggaggacatctctgtgggctacagcaccttccaggatggagtgcccaagacagaaggagacagcagcgccacagccctcttcccccagacccacaaggagcaggtgcagcaggacttcagcggcaagatgcaggacctgcctgaggagagcagcctggagtaccagcaggagtactttgtgaccaccccaggcacagagaccagcgagacccagaaggccatgattgtgcccagcagccccagcaagaccccagaggaggtgtccaccccagctgaggaggagaagctgtacctgcagacccccaccagcagcgagcggggcggcagccccatcatccaggagcctgaggagcccagcgagcaccgggaggagagcagccccaggaagaccagcctggtgattgtggagagcgctgacaaccagcctgagacctgtgagcggctggatgaagatgctgcctttgagaagggagatgacatgcctgagatccccccagagaccgtgacagaggaggagtacattgatgaacatggccacacagtggtgaagaaggtgaccaggaagatcatcagaagatatgtgagcagcgagggcacagagaaggaggagatcatggtgcagggcatgccccaggagcctgtgaacatcgaggagggagatggctacagcaaggtgatcaagagggtggtgctgaagagtgacacagagcagagcgaggacaacaatgaatag

SEQ ID NO: 45005 - DNA, 5592 bp, Artificial Sequence
  derived and/or modified sequence
atgagccaccacatccagcggagcgacagcaacgccagcttcctgagggctgcgcgggccggcaacctcgataaagtggtggagtacctcaaaggggggatcgacatcaacacatgcaatcagaacggcttgaacgccctgcacctagcagccaaagaaggccacgtgggcctcgttcaagaactgcttggaagggggtcatcagtggatagcgcaactaagaaaggcaataccgcactacacatagcatcgctggcaggacaggccgaggtagttaaggtgctggtgaaggaaggtgccaacatcaacgcgcagtcccaaaatggtttcacgccgctttatatggccgcccaggagaaccacatcgatgtggtgaagtaccttctggagaacggggcgaatcagagcacagcaaccgaggatgggtttactcccctcgcggtggccctacagcagggccacaatcaggctgttgccatcctgcttgagaacgataccaagggcaaggtgcgcttgccggccttgcacatagcagccagaaaggatgacacaaagtctgcagccttgctactgcagaatgaccacaatgcagatgtgcagtctaaaatgatggtcaaccgcactaccgaaagtggattcacacctctgcatatcgcggcccattacgggaacgtgaacgtcgcaacactgctgctgaaccgtggggccgcagttgatttcactgccagaaacgggattactcccctgcatgtcgctagtaagagggggaacacaaatatggtaaagttgctgctggatagaggtggccaaatcgacgcaaagacccgcgatggtctcaccccccttcattgtgcagccagatcaggacatgaccaggtagttgaattgctcctggagagaggagcaccacttttggcccggaccaagaacgggctgtcccccctgcacatggccgcccagggcgaccacgtggaatgcgtgaaacatctcttgcagcacaaagctcccgtggacgatgtcacacttgattatctgactgctttacacgtggcagctcactgtggacattatcgggttacgaaactgcttctggacaagcgcgccaacccaaatgcaagagcccttaatggctttaccccactccatatcgcctgcaagaagaacaggatcaaagtgatggagctgttagtgaagtatggggcttccatacaggcgattactgaatccgggcttacccccatccacgtcgctgccttcatgggtcatctgaacatcgtactgctgttgctccaaaatggcgcctcccctgacgtgactaatatccgtggggagaccgctcttcatatggccgctagggccggacaggtggaagtggtgaggtgcctgctgcggaatggggccctggtggatgctagggccagagaagagcagacaccactgcacattgccagcagactgggtaaaacagaaattgtccaattactgctgcagcacatggcccaccccgatgccgccacgacgaacggatacaccccgctccacatttccgctcgtgagggacaggtcgacgtggcctcggtgctcttggaggcaggggctgctcactcgctcgccaccaaaaagggctttacccctctgcatgtcgcggccaaatacggctcactggatgttgccaagcttctgctccagaggcgcgctgccgccgacagcgctggcaagaatgggctcacccctctccatgttgccgcccattacgacaaccaaaaagtggcgctgttgcttctggagaagggcgcttcaccacacgccacagcaaagaatgggtacactcccttacatattgctgcaaaaaagaaccagatgcagatcgcatctacgcttctaaattacggcgctgagaccaatatcgtgaccaagcaaggggtcactcccctacatctcgcgagccaagagggtcataccgatatggtcacacttcttttagataagggggccaatatacacatgagcacgaagagtgggctgacttccctgcacctggcagcacaagaggacaaagttaatgtggccgacatccttacaaagcacggggctgaccaggatgcccacaccaagctaggttacacgccactcatagtcgcatgtcactacgggaatgtaaagatggtaaactttctgctgaagcaaggagccaacgtgaatgccaagacaaagaatggttatacgcctctgcaccaggcggcccaacagggacatacccatattattaacgtactgctccagcacggagcgaagccaaacgccaccacggccaacggcaataccgccttggccattgctaagcgacttggctacatctccgtcgttgacacgttaaaagtggtcaccgaagaggtgacgacaactactacaactatcaccgaaaaacataaactgaatgtcccggagacaatgacggaggtcctggacgtctcagacgaagagggcgacgatacaatgaccggggacggcggggagtatctgcggcctgaggacctcaaagaactgggcgacgattcgctgccatccagtcagttcctcgacggtatgaattacctgcgctatagcctggaaggcggcaggtcagatagcctgcggagcttctcatcagataggtcgcataccctgtctcacgcttcatacttacgagacagtgcagtgatggatgattcggtggtaattcccagtcatcaagtcagcacactcgcaaaggaggcagagaggaactcataccgtttgagttggggcactgagaacctggataacgtggctctgtctagcagccctatacattccggacgggctagcccttgcctcgagcgcgacaactcatcattcctagtttcctttatggtggacgccagaggcggagctatgcgggggtgtaggcacaacggcctgaggattatcataccaccccggaaatgtaccgcacccacacgagtgacatgcagacttgtcaagaggcaccgcctggcaacaatgccaccgatggtggagggagagggccttgcttctcgtcttatcgaggttggcccctctggtgcacagttcttgggaaagctccacctccctactgcgcccccacctctcaacgagggagaatcacttgtgagtaggatcttacagctgggaccccccggtaccaaattcctggggcctgttatcgtcgagatcccgcactttgcggcccttagaggcaaggagcgggagttagtggtgctccgatccgagaacggggacagctggaaagaacatttttgtgattatacagaagacgaattaaatgaaattttgaatgggatggatgaggtgctggattcgcctgaagatctggagaaaaaacgaatctgcagaatcatcacccgggacttccctcaatatttcgctgtggtgagtcgcatcaagcaagattcgaacctgattgggcccgaggggggagtgttatcctcgaccgtggttccccaggttcaggctgtgttccccgagggggcccttaccaaaagaatcagagttggacttcaggcgcaacccatgcattccgaattggtgaaaaagatccttgggaataaggctacgttctcccctattgtgacgctggagccaagacgaagaaaatttcataaacccattacgatgaccatccccgtccctaaggcctcatccgacgttatgctgaacgggttcgggggcgacgctcccacactacgtctgttgtgtagcataacaggcggaaccacccctgcacaatgggaggatattactggaacaacccctctgacgtttgttaacgaatgcgtgagctttaccaccaatgtcagtgcccggttctggttgattgactgccggcagattcaagaaagtgtcacattcgcgtcccaggtctacagagagatcatctgcgtgccctacatggccaaattcgtcgtgtttgccaaaagccacgaccctattgaagctcggcttcggtgcttctgtatgaccgacgataaagtggataagacccttgaacaacaggagaactttgcagaagtggcacgcagcagagacgtcgaggtactggagggaaaacctatttacgtagattgtttcggtaatctcgttccattaacaaagtccggacagcaccacatcttttctttctttgcatttaaggagaatcgccttcccctgttcgtcaaggtgcgtgatacaactcaggagccgtgtggccgcttatcttttatgaaggagcctaaatctactaggggcctggtgcaccaggcgatctgcaatctgaacatcaccctaccaatctacaccaaggaatcggaatcagaccaggaacaggaggaagaaattgggcaggaatcccgaaggtatccgcaggatgagcaggagcgtatcgaggaacggttagcatacatcgcggaccacttaggctttagctggactgagctcgccagagaattggactttacagaggaacagatccatcaaatccggatcgagaatcctaatagcctccaggatcagtcccacgcacttcttaagtactggctggagcgggacggcaaacatgccacagacactaacctcgtggagtgccttacgaagataaatcgtatggacatcgtccacctgatggagaccaatactgaacccctacaggagcgcataagtcattcttatgcagagatcgagcagacgataacactggaccattcagagggtttctccgtgctgcaagaggagctgtgtacagcccagcacaagcaaaaggaggaacaggctgtctctaaggagtccgagacctgcgaccacccacccatagtgtccgaggaggacatatcagtgggatatagcacattccaagatggagttccgaaaaccgaaggggattcaagtgcaactgccctctttcctcagactcataaggagcaggtgcagcaagattttagcgggaaaatgcaggacctgccggaggaatcctcattggaataccagcaggagtacttcgttacaacccctggtaccgagacctctgagacccaaaaggccatgatagtacctagcagtcccagcaaaaccccagaagaagtctccactccggctgaggaggaaaagctgtatctgcagacaccaacctcaagcgagcggggtggctcccctatcatccaggagccagaagaaccctccgaacacagagaggaatcaagcccacgcaaaacatcactggtgattgtggaatccgccgataaccagcctgagacatgtgaaaggcttgacgaggatgcagcattcgagaaaggcgacgacatgccggagattccccctgaaaccgtcaccgaagaggagtatattgacgagcatggtcataccgtggtcaaaaaggtcacacggaaaatcattaggcgctatgtcagttcagaggggacagagaaggaggagatcatggttcaaggaatgcctcaggaaccagtgaatattgaggaaggagacgggtattccaaagtgattaagagggtcgttcttaagtctgacaccgagcaaagcgaggactctatggagtag

SEQ ID NO: 45006 - DNA, 3345 bp, Artificial Sequence
  derived and/or modified sequence
atgaccaccatgctgcagaagagcgacagcaacgccagcttcctgcgcgccgctagagccggtaatctagacaaagttgtagagtacctcaagggggggatagatattaacacatgcaatcagaatgggctgaacgctctgcacctcgctgcaaaggaggggcatgtagggttggttcaagaactccttggcaggggaagctcagtggattctgccactaagaaggggaacacggctctgcacattgcatccctggctggccaggctgaggtcgttaaagtcttggtgaaggaaggagccaatatcaacgctcagtcacaaaacggctttacccctctatacatggcagcccaggaaaaccacatagacgtggtgaaatatctcctagagaatggcgccaatcagtccactgctaccgaagacggttttacaccattagccgttgctctgcagcagggtcataaccaggcagtcgccatcctgctcgaaaatgataccaagggaaaagtccggctgcctgcccttcacatagcagctagaaaagacgacactaaatctgcagctctgcttctgcagaacgatcataatgctgacgtccagagtaagatgatggtaaacagaaccacagaatccggctttacgcccctgcatattgccgcccattacggcaacgtcaacgttgctactctgttgctgaatcggggagcggccgtcgattttaccgcaagaaacgggataacccccctgcatgtagcctcgaaacgcggaaacacaaatatggtgaagttactcctcgaccgggggggacagatcgatgccaagaccagggatggattgactccccttcactgtgcagcccgcagcgggcacgatcaagtagtagagttgttgctcgaaaggggagccccactgttagctagaaccaagaacggcttgagcccactgcacatggcagcccagggagatcacgttgagtgcgtcaaacacctgctgcagcataaagcacctgtggatgacgtgactcttgactatcttacggcgctccacgtagccgctcattgcggccactatcgtgttaccaaactgctgctggataaacgtgccaaccccaatgctagagccttaaacggtttcactccactgcatattgcctgcaagaaaaataggatcaaggtgatggagttgttggtgaaatacggtgcctctatccaagccattactgagtctgggctgacccccatacatgtggctgcttttatgggacatctgaatatcgtgttgctgctcttgcagaatggcgcatctcccgatgttaccaacattaggggggaaacagcccttcacatggccgccagagctggccaggtcgaggtagtacgctgtttgctcagaaatggggcccttgtggatgcgcgagcacgggaagaacaaacacctcttcacattgccagtagactagggaagaccgagattgtacagcttctactgcagcatatggcgcaccctgacgcggccactaccaatgggtacacaccattacatatcagcgcaagggaaggtcaggtggatgtggcctccgtgctgctcgaggctggagcagctcattcactggccacgaaaaagggattcacgccacttcacgtggcggctaagtacggttccctcgatgtggccaagctcctactgcaacggagagcggccgcggacagtgcaggcaaaaacgggcttactccactgcatgtcgcagcccattacgacaaccagaaagtggccctgcttctactagaaaagggcgccagcccccacgccaccgccaagaacggttacactccactgcacatcgcagcgaagaagaaccagatgcaaattgcctctaccctgttgaactatggggcagagaccaacatagtcacaaagcagggcgtgactcctctgcatttagcatctcaggagggacacactgatatggtgaccctgttgctggataagggggcaaatatccacatgtctacaaagagtggacttactagcttacacctcgccgcacaggaagacaaagtgaacgtagctgatattctgacaaaacacggcgctgatcaggatgctcataccaaactcggatatacaccactgattgtggcctgtcactacgggaacgtcaagatggtgaactttctacttaaacaaggggctaacgtcaatgccaaaactaagaatggatatactcccctgcatcaggctgctcagcagggacacacccacattattaacgtgctgctacaacacggagcaaaacctaatgctaccaccgctaacggaaataccgccctcgcaatcgccaaaagactaggttacatcagtgtcgttgacactctgaaagtcgtgacagaagaggtgacaacgacgactacaactatcacagaaaaacacaaattgaatgtgcctgaaactatgactgaagttctggatgttagtgacgaagaaggagatgacaccatgactggcgacggtggagagtacctaaggcccgaagacctcaaagaacttggagacgattcgctccctagctcgcaatttctcgacggcatgaattatcttcggtatagccttgagggaggcagatccgactcccttagaagctttagcagtgatcgatcccacaccttgagccatgcctcttatctgagggactccgcagtgatggacgactccgttgtgatcccctcccatcaggtcagcacactggcaaaggaggcggagcgcaactcgtacaggctttcatggggtacagaaaacctagataatgtggctctgagctcaagtcccatacacagcggttttctcgttagcttcatggtggatgccagagggggggccatgagggggtgtcgacataacggactgcggataattatacccccacgtaagtgcaccgctcctacgcgtgtgacctgccgcctggttaagaggcaccgcctggccactatgccaccaatggtcgaaggagaaggtctggccagcagactgattgaagtcgggccatccggggctcagtttctgggcaagctacatcttcctactgcaccaccacctcttaatgagggcgaatcattggtgtctaggattctgcagctagggcctcccggcaccaagtttctcggtcctgttatcgtcgaaattcctcactttgccgcactacgcggtaaggaacgtgagctcgtggtgctgagaagtgaaaacggcgactcctggaaggaacacttctgtgattacacggaagatgagctcaatgaaattttgaacgggatggacgaggtcctggacagccctgaggacctggaatag

SEQ ID NO: 45007 - DNA, 5592 bp, Artificial Sequence
  derived and/or modified sequence
atgaccaccatgctgcagaagagcgacagcaacgccagcttcctgcgcgccgcccgggctggaaatttagataaagtagttgagtacctgaaaggtggtatcgatattaacacttgtaaccagaatgggctgaatgccctgcatctggcggctaaagagggacatgtggggctggtgcaggagctccttggcaggggaagcagtgtggattcagctacgaaaaagggtaacactgcactgcatatcgcttcgctcgccggccaagccgaagtcgtaaaggtgctggtcaaagagggcgccaacatcaatgctcagagccagaacggtttcactcctttgtatatggcagcacaggagaaccatattgacgtcgtaaagtaccttctcgagaatggcgcgaaccaatctacggctacagaagatggcttcactcccttagccgtggcgttacaacagggccacaaccaagccgtggcaatccttttggagaatgacacaaagggcaaagtccgcctgcctgctctccacattgcggctagaaaggatgatacgaaaagcgctgcccttcttctccagaatgaccataatgccgatgtgcagagcaaaatgatggttaacagaactactgagtctggcttcacccccttgcacatcgccgcacactacggtaatgtcaatgtagctaccctgctgctgaatagaggagccgctgtcgattttaccgcccgaaatggtatcacccccttacatgttgcaagcaaacgcggaaatactaatatggtgaagctgctccttgaccgcggcggacagatcgacgccaaaactcgagatgggctgacccctttgcattgcgccgctcggtccggtcatgaccaggtcgtcgagttactgctggagagaggagccccgctgctagcgaggaccaagaatggcctctcgccactgcatatggcggcacaaggcgatcacgttgaatgcgttaagcatctccttcagcacaaggcccctgttgatgatgtcacactggactacctgaccgccctgcacgtggccgcccattgtggtcactatcgggtaacaaagcttttgctcgataagcgggcaaacccaaatgctcgggcactgaacggatttacccccttgcacatcgcctgtaaaaagaatagaatcaaggtgatggaactcttggttaagtatggggcctctatccaggcgattacagaatctggtcttacacccatccatgttgctgcctttatggggcacctcaatatcgttcttttgttgctacagaatggtgcttctcccgatgtgaccaatataaggggcgaaacggccctgcacatggcagccagagccgggcaagtggaggttgtgcggtgtcttctgagaaacggggcattggtcgacgcacgggcgcgcgaagaacagacacccttacatatcgctagtcggttaggaaagaccgagatcgtgcagcttctcctgcaacacatggcacatccagatgccgccacaacgaacggttatacacccctgcacatttccgcccgagagggccaggttgacgttgcctctgtacttctggaagcaggcgcggcacacagcctcgccacaaagaaagggttcacccctttgcacgtcgcagctaaatatggatccctggacgtggctaaactgctgctccaacggagagccgcggcggattcagccggtaagaacggacttaccccgctccacgtcgccgctcattatgacaaccagaaagtagccttattgctgctagagaagggcgcatctccacatgctaccgccaagaacggttatacgcccctacatatcgcggccaagaagaatcaaatgcaaatagcatcaacactgctgaactacggtgctgagactaacattgtgaccaagcagggcgttaccccattacatttagcgtcacaggaagggcataccgatatggttaccctgctgctcgacaaaggagcgaatatacatatgtccacaaagtcagggctgacctcgctccacctcgctgctcaggaggataaggtaaacgtagccgacattttaaccaaacacggcgccgaccaggacgcccacactaagctggggtacacaccacttatcgtggcgtgtcattatggaaacgtgaagatggtcaacttcctgcttaagcagggcgctaacgtgaacgcaaagactaaaaacggatataccccacttcaccaggccgcacaacaaggacatacccacatcattaatgtccttttgcagcatggagctaaacctaacgctactactgccaatgggaataccgctctggctatagcaaagcgcctgggttacatcagtgtcgtagacaccctcaaagtcgtgactgaggaggtcacgactaccactacaactattaccgaaaagcacaaacttaacgtccccgagaccatgaccgaagtgctagatgtctcagatgaggagggagacgatacaatgactggcgacggtggcgaatatctgaggccagaggatctcaaggagctcggagatgacagcctgccctcctctcaattcttggacggtatgaattatctcaggtactctcttgaaggaggtcgctctgacagcctgcgaagcttcagcagtgaccgttcccacaccctctcccacgcctcctacctgcgtgatagcgcagtcatggatgactctgtcgtgataccgagccaccaggtctcaaccttggccaaggaggcagaacggaacagttatcggttaagttggggaaccgaaaatctggacaacgtggccctctccagcagccctatccactcaggccgagctagcccatgcctggaaagagacaacagctccttcctcgtcagcttcatggtcgacgctaggggaggagcaatgcgtggttgccgtcacaacggtctaagaatcattatcccgcccaggaagtgtacggcacctacccgggtgacctgtagattggtcaaacggcacaggttagccactatgccacccatggtcgaaggagagggcctggcatcccgcttaattgaggtaggaccaagtggggctcagttccttggcaaacttcacctccccacagctccaccgcccctcaacgagggcgagtccctggtaagtaggattctgcagctcggccctcctggtacaaagtttttgggccctgtgatcgttgagattccccacttcgctgccctgcgtggaaaagaaagagaacttgtcgtgctacggagtgaaaacggagattcttggaaggaacatttctgcgattacaccgaggatgagcttaatgaaatcctgaacggtatggacgaggtgttagattccccggaagatctggagaagaagcgaatttgcagaattatcacacgcgatttccctcagtattttgccgttgtgagccggatcaaacaggattctaatttgatcgggcccgaaggtggtgtgctcagcagtacggtagtaccccaggtccaggcagtgtttccagagggcgccttgacaaaaaggattcgagtcgggctccaggcccagcctatgcatagtgaactcgttaagaaaatcctcggcaataaagccacattcagtccaatagtcacgcttgaaccaaggagaagaaagttccacaaacctatcactatgactattcctgtgcctaaggcttcttctgacgttatgctcaatggcttcgggggtgatgcccctacgctgcgcctgctctgtagcattaccggaggcactactccggctcagtgggaagacatcacaggcaccacccccctgacttttgtcaatgagtgcgtgtctttcacgaccaacgtgtcagctcggttttggctcattgactgcagacaaattcaggaatcagtcacctttgcgtctcaggtttatcgcgaaatcatctgtgtgccctacatggccaaatttgtggtcttcgctaagtctcatgacccaattgaggcccggttgagatgcttttgcatgaccgatgataaggtagataagactctggaacagcaggagaattttgcagaggttgcacgatcacgggatgtagaggttctggagggaaaaccaatctatgttgattgcttcggcaacttggttcccctcacaaagtccggacagcaccatattttctcctttttcgcctttaaggagaaccgccttcccctgtttgtgaaggtgcgcgacacaactcaggagccgtgcggccgcctgtcattcatgaaggaaccaaaatccactagaggcttggtgcatcaggctatctgcaacctcaacatcaccctgcccatctataccaaggaatcagaatcggaccaggaacaggaagaggaaatagatatgacaagcgagaagaacccgcaggacgagcaggagcgaattgaggaacgcctagcctatatcgctgaccacctggggttctcatggaccgagctcgcaagggaacttgacttcactgaagagcagattcaccagattagaatcgaaaatcctaacagcctgcaggatcagtcccatgctctgctgaagtactggctcgagcgcgacggtaagcacgccactgatactaacctggttgaatgtttgacaaaaatcaataggatggacatcgtgcacctcatggagactaacacagaaccgttgcaagagcgaatttctcacagctatgcagaaatcgaacagactatcaccctggatcattctgagggattctccgtgctgcaggaagagttgtgtacagcccagcacaagcagaaagaagagcaggccgtctccaaagagagtgaaacctgcgaccatccacccatcgtgtcagaagaggacatctctgtggggtatagtaccttccaggatggtgtgcctaagactgaaggcgatagctccgcgacggccctcttcccccagacccacaaggagcaggttcagcaggacttctcaggaaagatgcaagatcttcccgaagagagttctctggagtatcagcaggaatatttcgtgacaactcccggcaccgagacctcagagacacaaaaagccatgatcgtgccaagctctcccagcaaaacccctgaggaagtgtccactcccgctgaggaagagaaactttacttgcagacgccaacttcaagtgagcgcggcggatccccgatcattcaggaacccgaggagccttctgagcatagagaagagtcctcgccccgcaagacttcacttgtgattgtcgagagtgccgacaatcaaccagaaacatgcgagagactggacgaagacgccgcttttgaaaagggtgatgatatgccagaaatcccccctgaaacagtaacagaggaggaatacattgatgagcacggccacacggtggtgaagaaggttaccaggaaaatcattagacggtacgtatcatctgagggtactgaaaaggaggagataatggtccagggcatgccacaggaacctgtaaatatcgaagagggcgatggatacagtaaagttattaagagagtggtgttgaagtccgacactgagcagtccgaagacaacaatgagtag

SEQ ID NO: 45008 - DNA, 5589 bp, Artificial Sequence
  derived and/or modified sequence
atgagtcaccacatccagcggtctgacagcaatgcaagcttcctccgtgctgccagagcaggcaacctggacaaagttgtggaatatctgaaggggggcatagacatcaatacctgcaatcagaatggactcaacgctctccatctggctgccaaggaaggccacgtggggctggtgcaggagctgctgggaagagggtcctctgtggattctgccactaagaagggaaataccgctcttcacattgcatctttggctggacaagcagaagttgtcaaagttcttgttaaggaaggagccaatattaatgcacagtctcagaatggctttactcctttatacatggctgcccaagagaatcacattgatgttgtaaaatatttgctggaaaatggagctaatcagagcactgctacagaggatggctttactcctctagctgtggcactccagcaaggacacaaccaggcggtggccatcctcttggagaatgacaccaaagggaaagtgaggctgccagctctgcatattgccgctaggaaagacgacaccaaatctgccgcacttctgcttcagaatgaccacaatgctgacgtacaatccaagatgatggtgaataggacaactgagagtggttttacccctttgcacatagctgcacattacggaaatgtcaacgtggcaactcttcttctaaaccggggagctgctgtggacttcacagccaggaatggaatcactcctctgcatgtggcttccaaaagaggaaatacaaacatggtgaagctcttactggatcgaggcggtcagatcgatgccaaaactagggatgggttgacaccacttcactgtgctgcacgaagtgggcatgaccaagtggtggaacttctgttggaacggggtgcccccttgctggcaaggactaagaatgggctgtctccactacacatggctgcccagggagaccacgtggaatgtgtgaagcacctgttacagcacaaggcacctgttgatgatgtcaccctagactacctgacagccctccacgttgctgcgcactgtggccactaccgtgtaaccaaactccttttagacaagagagccaatccgaacgccagagccctgaatggttttactccactgcacattgcctgcaagaaaaaccgcatcaaagtcatggaactgctggtgaaatatggggcttcaatccaagctataacagagtctggcctcacaccaatacatgtggctgccttcatgggccacttgaacattgtcctccttctgctgcagaacggagcctctccagatgtcactaacattcgtggtgagacggcactacacatggcagcccgagccgggcaggtggaagtggtccgatgcctcctgagaaatggtgcccttgttgatgccagagccagggaggaacagacacctttacatattgcctcccgcctgggtaagacagaaattgtccagctgcttctacaacatatggctcatccagatgcggccactacaaatgggtacacaccactgcacatctctgcccgggagggccaggtggatgtggcatcagtcctattggaagcaggagcagcccactccttagctaccaagaagggttttactcccctgcatgtagcagccaagtatggaagcctggatgtggcaaaacttctcttgcaacgccgtgctgccgcagattctgcagggaagaacggccttaccccgctccatgttgctgctcattatgacaaccagaaggtggcgctgctgttactggagaagggtgcttcccctcatgccactgccaagaatggctatactccgttacatattgctgccaagaagaatcaaatgcagatagcttccacactcctgaactatggagcagagacaaacattgtgacaaagcaaggagtaactccactccatctggcctcgcaggaggggcacacagatatggttaccttgcttctggataagggagccaatatccacatgtcaactaagagtggactcacatccttacaccttgcagcccaggaagataaagtgaatgttgctgatattctcaccaagcatggagctgatcaggatgctcatacaaagcttggttacacacctttaattgtggcctgtcactatggaaatgtgaaaatggtcaactttcttctgaagcagggagcaaatgttaacgcaaaaaccaagaacggctacacgcctttgcaccaggccgctcagcagggtcacacgcacatcatcaacgtcctgctccagcatggggccaagcccaacgccaccactgcgaatggcaacactgccttggcgattgctaagcgtctgggctacatctccgtggtcgacaccctgaaggttgtgactgaggaggtcaccaccaccaccacaactattacagaaaaacacaaactaaatgtacctgagacgatgactgaggttcttgatgtttctgatgaagagggtgatgacacaatgactggtgatgggggagaataccttaggcctgaggacctaaaagaactgggtgatgactcactacccagcagtcagttcctggatggtatgaattacctgcgatacagcttggagggaggacgatctgacagccttcgatccttcagttccgacaggtctcacactctgagccatgcctcctacctgagggacagtgccgtgatggatgactcagttgtgattcccagtcaccaggtgtcaactctagccaaggaggcagaaaggaattcttatcgcctaagctggggcactgagaacttagacaacgtggctctttcttctagtcctattcattcaggccgcgcctctccatgtcttgaacgtgacaacagcagtttcctggttagttttatggtggatgcccgaggtggtgctatgcgaggatgcagacacaatgggctccgaatcattattccacctcggaaatgtactgctccaacgcgagtcacctgccgactggtcaagcgccacagactggcaacaatgcctccaatggtggaaggagaaggcctggccagtcgcctgatcgaagttggaccttctggtgctcagttccttggtaaacttcacctgccaacggctcctcccccacttaatgagggagaaagtttggtcagccgcattcttcagctggggcctcctggaaccaaattccttgggcctgtgatcgtggagatccctcactttgcggcccttcgaggaaaggaaagggaactggtggtcctgcgcagtgagaatggggacagctggaaagagcatttctgtgactacactgaagatgaattgaatgaaattcttaacggcatggatgaagtactggatagcccagaagacctagaaaagaaacgaatctgccgcatcatcacccgagacttcccacagtactttgcagtggtgtctcgtatcaaacaggacagcaatctgattggcccagaaggaggtgtactgagcagcacagtggtgccccaggtgcaggccgtcttcccagagggggcactcaccaagcggatccgcgtaggcctgcaggctcaacctatgcacagtgagctggttaagaagatcctaggcaacaaagctaccttcagccctatagtcactttggaacctagaagaagaaaattccacaaaccaattaccatgaccattcctgtccccaaagcttcaagtgatgtcatgttgaatggttttgggggagatgcaccaaccttaagattactatgcagcataacaggtggaaccacccctgcccagtgggaagatattacaggaactacgccattaacatttgtcaatgaatgtgtttcctttacaacaaacgtgtctgccaggttctggctgatagattgtcgacagatccaggaatccgttacttttgcatcacaagtatacagagaaattatctgcgtaccttatatggccaaatttgtagtgtttgccaaatcacatgaccccattgaagccaggttgaggtgtttctgcatgactgatgataaagtggataagacccttgaacaacaagaaaattttgctgaggtggccagaagcagggatgtggaggtgttagaaggaaaacccatctacgttgattgtttcggcaacttggtaccattaactaaaagtggccagcatcatatattcagtttttttgccttcaaagaaaatagacttcctctatttgtcaaggtacgcgatacgactcaggaaccttgcggacgactatcatttatgaaggagccaaaatccacgagaggcctggtgcatcaagctatttgcaacttaaacatcactttgccgatttatacaaaggaatcagagtcagatcaagaacaggaggaagagattggtcaagaatccagacgatatccacaggatgagcaggaacggatcgaggaaaggctggcttatattgctgatcaccttggcttcagctggacagaattagcaagagaactggatttcactgaggagcaaattcatcaaattcgaattgaaaatcccaactctcttcaagaccagagtcatgcactgttgaagtactggctagagagggatgggaaacatgctacagataccaacctcgttgaatgtctcaccaagatcaaccgaatggatattgttcatctcatggagaccaacacagaacctctccaggagcgcatcagtcatagttatgcagaaattgaacagaccattacactggatcatagtgaagggttctcggtacttcaagaggagttatgcactgcacagcacaagcagaaagaggagcaagctgtttctaaagaaagtgagacctgcgatcaccctcctatcgtctcagaggaagacatttctgttggttattccacttttcaggatggcgtccccaaaactgagggggacagctcagcaacagcactctttccccaaactcacaaggagcaagttcaacaggatttctcagggaaaatgcaagacctgcctgaagagtcatctctggaatatcagcaggaatattttgtgacaactccaggaacagaaacatcagagactcagaaggctatgatagtacccagctctcccagcaagacacctgaggaagttagcacccctgcagaggaggagaagctgtacctccagaccccaacatccagcgagcggggaggctctcccatcatacaagaacccgaagagccctcagagcacagagaggagagctctccgcggaaaaccagcctcgtaatagtggagtctgccgataaccagcctgagacctgtgaaagactcgatgaagatgcagcttttgaaaagggagacgatatgcctgaaatacccccagaaacagtcacagaagaagaatacattgatgagcatggacacaccgtggtaaagaaggttactaggaaaatcattaggcggtatgtatcctctgaaggcacagagaaagaagagattatggtgcagggaatgccacaggaacctgtcaacatcgaggaaggggatggctattccaaagttataaagcgtgttgtattgaagagtgacaccgagcagtcagaggattctatggaa

SEQ ID NO: 45009 - DNA, 3537 bp, Artificial Sequence
  derived and/or modified sequence
acagtctgaggctgtaatgggaaagtcggttcctgggctgctgtctcatagacatcagcttgcagggaagctgggggctctccgaattgccctgctccggggcccctcctgctgcgtgactcacaggcacattgcagagagaagctgccgctcccagtaagtaatgaaaagagacatgaagaattggtatttcaaatgaccaccatgttgcaaaagtctgacagcaatgcaagcttcctccgtgctgccagagcaggcaacctggacaaagttgtggaatatctgaaggggggcatagacatcaatacctgcaatcagaatggactcaacgctctccatctggctgccaaggaaggccacgtggggctggtgcaggagctgctgggaagagggtcctctgtggattctgccactaagaagggaaataccgctcttcacattgcatctttggctggacaagcagaagttgtcaaagttcttgttaaggaaggagccaatattaatgcacagtctcagaatggctttactcctttatacatggctgcccaagagaatcacattgatgttgtaaaatatttgctggaaaatggagctaatcagagcactgctacagaggatggctttactcctctagctgtggcactccagcaaggacacaaccaggcggtggccatcctcttggagaatgacaccaaagggaaagtgaggctgccagctctgcatattgccgctaggaaagacgacaccaaatctgccgcacttctgcttcagaatgaccacaatgctgacgtacaatccaagatgatggtgaataggacaactgagagtggttttacccctttgcacatagctgcacattacggaaatgtcaacgtggcaactcttcttctaaaccggggagctgctgtggacttcacagccaggaatggaatcactcctctgcatgtggcttccaaaagaggaaatacaaacatggtgaagctcttactggatcgaggcggtcagatcgatgccaaaactagggatgggttgacaccacttcactgtgctgcacgaagtgggcatgaccaagtggtggaacttctgttggaacggggtgcccccttgctggcaaggactaagaatgggctgtctccactacacatggctgcccagggagaccacgtggaatgtgtgaagcacctgttacagcacaaggcacctgttgatgatgtcaccctagactacctgacagccctccacgttgctgcgcactgtggccactaccgtgtaaccaaactccttttagacaagagagccaatccgaacgccagagccctgaatggttttactccactgcacattgcctgcaagaaaaaccgcatcaaagtcatggaactgctggtgaaatatggggcttcaatccaagctataacagagtctggcctcacaccaatacatgtggctgccttcatgggccacttgaacattgtcctccttctgctgcagaacggagcctctccagatgtcactaacattcgtggtgagacggcactacacatggcagcccgagccgggcaggtggaagtggtccgatgcctcctgagaaatggtgcccttgttgatgccagagccagggaggaacagacacctttacatattgcctcccgcctgggtaagacagaaattgtccagctgcttctacaacatatggctcatccagatgcggccactacaaatgggtacacaccactgcacatctctgcccgggagggccaggtggatgtggcatcagtcctattggaagcaggagcagcccactccttagctaccaagaagggttttactcccctgcatgtagcagccaagtatggaagcctggatgtggcaaaacttctcttgcaacgccgtgctgccgcagattctgcagggaagaacggccttaccccgctccatgttgctgctcattatgacaaccagaaggtggcgctgctgttactggagaagggtgcttcccctcatgccactgccaagaatggctatactccgttacatattgctgccaagaagaatcaaatgcagatagcttccacactcctgaactatggagcagagacaaacattgtgacaaagcaaggagtaactccactccatctggcctcgcaggaggggcacacagatatggttaccttgcttctggataagggagccaatatccacatgtcaactaagagtggactcacatccttacaccttgcagcccaggaagataaagtgaatgttgctgatattctcaccaagcatggagctgatcaggatgctcatacaaagcttggttacacacctttaattgtggcctgtcactatggaaatgtgaaaatggtcaactttcttctgaagcagggagcaaatgttaacgcaaaaaccaagaacggctacacgcctttgcaccaggccgctcagcagggtcacacgcacatcatcaacgtcctgctccagcatggggccaagcccaacgccaccactgcgaatggcaacactgccttggcgattgctaagcgtctgggctacatctccgtggtcgacaccctgaaggttgtgactgaggaggtcaccaccaccaccacaactattacagaaaaacacaaactaaatgtacctgagacgatgactgaggttcttgatgtttctgatgaagagggtgatgacacaatgactggtgatgggggagaataccttaggcctgaggacctaaaagaactgggtgatgactcactacccagcagtcagttcctggatggtatgaattacctgcgatacagcttggagggaggacgatctgacagccttcgatccttcagttccgacaggtctcacactctgagccatgcctcctacctgagggacagtgccgtgatggatgactcagttgtgattcccagtcaccaggtgtcaactctagccaaggaggcagaaaggaattcttatcgcctaagctggggcactgagaacttagacaacgtggctctttcttctagtcctattcattcaggtttcctggttagttttatggtggatgcccgaggtggtgctatgcgaggatgcagacacaatgggctccgaatcattattccacctcggaaatgtactgctccaacgcgagtcacctgccgactggtcaagcgccacagactggcaacaatgcctccaatggtggaaggagaaggcctggccagtcgcctgatcgaagttggaccttctggtgctcagttccttggtaaacttcacctgccaacggctcctcccccacttaatgagggagaaagtttggtcagccgcattcttcagctggggcctcctggaaccaaattccttgggcctgtgatcgtggagatccctcactttgcggcccttcgaggaaaggaaagggaactggtggtcctgcgcagtgagaatggggacagctggaaagagcatttctgtgactacactgaagatgaattgaatgaaattcttaacggcatggatgaagtactggatagcccagaagacctagaa

SEQ ID NO: 45010 - DNA, 8051 bp, Artificial Sequence
  derived and/or modified sequence
acagtctgaggctgtaatgggaaagtcggttcctgggctgctgtctcatagacatcagcttgcagggaagctgggggctctccgaattgccctgctccggggcccctcctgctgcgtgactcacaggcacattgcagagagaagctgccgctcccagtaagtaatgaaaagagacatgaagaattggtatttcaaatgaccaccatgttgcaaaagtctgacagcaatgcaagcttcctccgtgctgccagagcaggcaacctggacaaagttgtggaatatctgaaggggggcatagacatcaatacctgcaatcagaatggactcaacgctctccatctggctgccaaggaaggccacgtggggctggtgcaggagctgctgggaagagggtcctctgtggattctgccactaagaagggaaataccgctcttcacattgcatctttggctggacaagcagaagttgtcaaagttcttgttaaggaaggagccaatattaatgcacagtctcagaatggctttactcctttatacatggctgcccaagagaatcacattgatgttgtaaaatatttgctggaaaatggagctaatcagagcactgctacagaggatggctttactcctctagctgtggcactccagcaaggacacaaccaggcggtggccatcctcttggagaatgacaccaaagggaaagtgaggctgccagctctgcatattgccgctaggaaagacgacaccaaatctgccgcacttctgcttcagaatgaccacaatgctgacgtacaatccaagatgatggtgaataggacaactgagagtggttttacccctttgcacatagctgcacattacggaaatgtcaacgtggcaactcttcttctaaaccggggagctgctgtggacttcacagccaggaatggaatcactcctctgcatgtggcttccaaaagaggaaatacaaacatggtgaagctcttactggatcgaggcggtcagatcgatgccaaaactagggatgggttgacaccacttcactgtgctgcacgaagtgggcatgaccaagtggtggaacttctgttggaacggggtgcccccttgctggcaaggactaagaatgggctgtctccactacacatggctgcccagggagaccacgtggaatgtgtgaagcacctgttacagcacaaggcacctgttgatgatgtcaccctagactacctgacagccctccacgttgctgcgcactgtggccactaccgtgtaaccaaactccttttagacaagagagccaatccgaacgccagagccctgaatggttttactccactgcacattgcctgcaagaaaaaccgcatcaaagtcatggaactgctggtgaaatatggggcttcaatccaagctataacagagtctggcctcacaccaatacatgtggctgccttcatgggccacttgaacattgtcctccttctgctgcagaacggagcctctccagatgtcactaacattcgtggtgagacggcactacacatggcagcccgagccgggcaggtggaagtggtccgatgcctcctgagaaatggtgcccttgttgatgccagagccagggaggaacagacacctttacatattgcctcccgcctgggtaagacagaaattgtccagctgcttctacaacatatggctcatccagatgcggccactacaaatgggtacacaccactgcacatctctgcccgggagggccaggtggatgtggcatcagtcctattggaagcaggagcagcccactccttagctaccaagaagggttttactcccctgcatgtagcagccaagtatggaagcctggatgtggcaaaacttctcttgcaacgccgtgctgccgcagattctgcagggaagaacggccttaccccgctccatgttgctgctcattatgacaaccagaaggtggcgctgctgttactggagaagggtgcttcccctcatgccactgccaagaatggctatactccgttacatattgctgccaagaagaatcaaatgcagatagcttccacactcctgaactatggagcagagacaaacattgtgacaaagcaaggagtaactccactccatctggcctcgcaggaggggcacacagatatggttaccttgcttctggataagggagccaatatccacatgtcaactaagagtggactcacatccttacaccttgcagcccaggaagataaagtgaatgttgctgatattctcaccaagcatggagctgatcaggatgctcatacaaagcttggttacacacctttaattgtggcctgtcactatggaaatgtgaaaatggtcaactttcttctgaagcagggagcaaatgttaacgcaaaaaccaagaacggctacacgcctttgcaccaggccgctcagcagggtcacacgcacatcatcaacgtcctgctccagcatggggccaagcccaacgccaccactgcgaatggcaacactgccttggcgattgctaagcgtctgggctacatctccgtggtcgacaccctgaaggttgtgactgaggaggtcaccaccaccaccacaactattacagaaaaacacaaactaaatgtacctgagacgatgactgaggttcttgatgtttctgatgaagagggtgatgacacaatgactggtgatgggggagaataccttaggcctgaggacctaaaagaactgggtgatgactcactacccagcagtcagttcctggatggtatgaattacctgcgatacagcttggagggaggacgatctgacagccttcgatccttcagttccgacaggtctcacactctgagccatgcctcctacctgagggacagtgccgtgatggatgactcagttgtgattcccagtcaccaggtgtcaactctagccaaggaggcagaaaggaattcttatcgcctaagctggggcactgagaacttagacaacgtggctctttcttctagtcctattcattcaggccgcgcctctccatgtcttgaacgtgacaacagcagtttcctggttagttttatggtggatgcccgaggtggtgctatgcgaggatgcagacacaatgggctccgaatcattattccacctcggaaatgtactgctccaacgcgagtcacctgccgactggtcaagcgccacagactggcaacaatgcctccaatggtggaaggagaaggcctggccagtcgcctgatcgaagttggaccttctggtgctcagttccttggtaaacttcacctgccaacggctcctcccccacttaatgagggagaaagtttggtcagccgcattcttcagctggggcctcctggaaccaaattccttgggcctgtgatcgtggagatccctcactttgcggcccttcgaggaaaggaaagggaactggtggtcctgcgcagtgagaatggggacagctggaaagagcatttctgtgactacactgaagatgaattgaatgaaattcttaacggcatggatgaagtactggatagcccagaagacctagaaaagaaacgaatctgccgcatcatcacccgagacttcccacagtactttgcagtggtgtctcgtatcaaacaggacagcaatctgattggcccagaaggaggtgtactgagcagcacagtggtgccccaggtgcaggccgtcttcccagagggggcactcaccaagcggatccgcgtaggcctgcaggctcaacctatgcacagtgagctggttaagaagatcctaggcaacaaagctaccttcagccctatagtcactttggaacctagaagaagaaaattccacaaaccaattaccatgaccattcctgtccccaaagcttcaagtgatgtcatgttgaatggttttgggggagatgcaccaaccttaagattactatgcagcataacaggtggaaccacccctgcccagtgggaagatattacaggaactacgccattaacatttgtcaatgaatgtgtttcctttacaacaaacgtgtctgccaggttctggctgatagattgtcgacagatccaggaatccgttacttttgcatcacaagtatacagagaaattatctgcgtaccttatatggccaaatttgtagtgtttgccaaatcacatgaccccattgaagccaggttgaggtgtttctgcatgactgatgataaagtggataagacccttgaacaacaagaaaattttgctgaggtggccagaagcagggatgtggaggtgttagaaggaaaacccatctacgttgattgtttcggcaacttggtaccattaactaaaagtggccagcatcatatattcagtttttttgccttcaaagaaaatagacttcctctatttgtcaaggtacgcgatacgactcaggaaccttgcggacgactatcatttatgaaggagccaaaatccacgagaggcctggtgcatcaagctatttgcaacttaaacatcactttgccgatttatacaaaggaatcagagtcagatcaagaacaggaggaagagatcgatatgacatcagaaaaaaatccacaggatgagcaggaacggatcgaggaaaggctggcttatattgctgatcaccttggcttcagctggacagaattagcaagagaactggatttcactgaggagcaaattcatcaaattcgaattgaaaatcccaactctcttcaagaccagagtcatgcactgttgaagtactggctagagagggatgggaaacatgctacagataccaacctcgttgaatgtctcaccaagatcaaccgaatggatattgttcatctcatggagaccaacacagaacctctccaggagcgcatcagtcatagttatgcagaaattgaacagaccattacactggatcatagtgaagggttctcggtacttcaagaggagttatgcactgcacagcacaagcagaaagaggagcaagctgtttctaaagaaagtgagacctgcgatcaccctcctatcgtctcagaggaagacatttctgttggttattccacttttcaggatggcgtccccaaaactgagggggacagctcagcaacagcactctttccccaaactcacaaggagcaagttcaacaggatttctcagggaaaatgcaagacctgcctgaagagtcatctctggaatatcagcaggaatattttgtgacaactccaggaacagaaacatcagagactcagaaggctatgatagtacccagctctcccagcaagacacctgaggaagttagcacccctgcagaggaggagaagctgtacctccagaccccaacatccagcgagcggggaggctctcccatcatacaagaacccgaagagccctcagagcacagagaggagagctctccgcggaaaaccagcctcgtaatagtggagtctgccgataaccagcctgagacctgtgaaagactcgatgaagatgcagcttttgaaaagggagacgatatgcctgaaatacccccagaaacagtcacagaagaagaatacattgatgagcatggacacaccgtggtaaagaaggttactaggaaaatcattaggcggtatgtatcctctgaaggcacagagaaagaagagattatggtgcagggaatgccacaggaacctgtcaacatcgaggaaggggatggctattccaaagttataaagcgtgttgtattgaagagtgacaccgagcagtcagaggacaacaatgagtaaagccatcacacagaagagggctgtggtgaaggaccagcatggaaaacgcattgacttggagcacctggaggatgtaccagaagcactagaccaggacgacctccagcgcgatctccagcagctccttcggcatttctgcaaggaggacttgaagcaagaggccaagtgaggggctgcccagttctcacaccagaaaccacacattcactcaatatgcagcttcctgtttcagtaggggagtgacctaactggcctaattaatgggataccccgacatttccactgttagcaaatatacggcattttgctttagttttcccccatcctctttaactataaagctaatttgtgaccaaagatggcatccttcatactggatgctgtatccaatactttgttgtgtctgtgctaacctgggaactggccacctccattgttctttgcttctgcacaagatccatgaaaatccattgatcagaagaacttcacctgcagacctcttcaagtgacactatgtaggaatccttccaaggaatatctatgtacaatgtatatagctgaaatgctcagatgaacaacatattaaaattaaaaccactgcctattgtaactacactgggcatcagaataaaaggcctctagaaattgctgaacaatggttaattaagatattgctaacacaatcgagtgataatacagttttactgcaaaagaagcacttcaaacctattatgtccttagaacttccagagtagccactgctcccagttaaaggtgggtcagtagccttgcagaactgtcctgagaagttattgctggtgctggccagccatggcttaggactccaacagccactctgagggaggggagaagggagcagaggccacgcagaatgaaccgatggggtattcagttgctggcagctacattgtgtggcattctagcatcttcaggtctttagatcttggacaagttggcagggtattttaaaagctataactactgtagttttccagttttcattgctgctttagcaaaccacgctgtcttacagtggtactttcttctggccactgcactgtagataattcattggaaacaagatttacccactacataaaaggttaaactccttcagtatgttggagtggtttctttttttttttctttctttcttttttttcttcaggtttatatcttctctaatacctgcatgtggcgtttaaaaatcaagaccacggtcaaacccctcttctaatcacattaattgtttccattctttttaccctgagtgagcacttttcactttccagctaggtctgtttttcagcttgcagacaagattgagaaatccttgaaaatttggttttggttaaaatttttggtttatttatttgaaatccacactcccttggaaactcttaagtgcatttgtgcacttctgtttgtttgtctcaaagaagggactgtaacaatctgagtaatttccatgtcctcttccttattcctctagtggttgaagctgtgtagcattttaacatatatatattcacaaatatattcatataaacagtatacattttgaatcagtcatttgttaaagaaaagtatattcaatgaagatgaaatttaaataaaaaaggacagagtctatcctccagggattgaacattttccaattatctggtcttttcctgttgtgcaaaaatgactcattgctccgaatgtcaaaaacaaatgcgacaaacaatggcacttcatcatttaaagtaatgttgccaagagaaaaaatttcctgggagggaggtttcccacaagccaaatctcctaagcctcaaatgctagcactttttggcagttggataggaaatgagacattctttggcagccaaaataagagaggccgatggtgaaactttttgagacaccctatggccttcttgtcaaaaccttcactggagctcaagaaaagcatttctgttgtgttatttgcagtgcagatgatgtctgtgtaacaacataatggttattcacctttttttgattttgatttttgctgtgttatcaaaaacttgaatactgtgagaagaagtgaattttcagttgacgaatcagcatcttgttcccatggtgataacactaattgaatatatctatgagggcatgtattagttaatggaaaaaaaaatacaacactaacaatacatagctgcaatgtgtacaatggctgatttaattaaataaaatgtacaagtgttaaatgt

SEQ ID NO: 45011 - DNA, 5591 bp, Artificial Sequence
  derived and/or modified sequence
atgtcacaccacattcaaaggtcggacagcaatgcctccttcctgagagctgccagggcaggcaacctggataaagtggtcgagtatttgaagggcggtatcgacattaatacatgcaaccaaaacggactgaacgccctgcatctggcggctaaggaggggcatgtgggcctggtgcaggagttactgggccgtggctcttccgttgattctgcgactaaaaagggtaataccgccctccacattgcctctttagcgggacaggcagaggtggttaaggtcctggtgaaggagggggcaaatattaatgcccaaagccaaaacggatttacacctctctatatggcagcgcaagaaaatcatattgatgtggtcaagtaccttctggagaacggagccaaccagtcgacagccacggaggacggttttactcccctggccgtggccctgcagcagggccataaccaggctgtagctattctgctggaaaatgacaccaagggcaaagtgcgcttgcccgcactgcacatcgctgcacggaaggacgacactaaaagcgcagctctattattacaaaacgatcacaatgcagatgtgcagagcaagatgatggttaatcggacaaccgagagcggattcacacccttacacatcgctgcccattacggtaatgtgaatgtggccactctgctgttgaatagaggcgcagccgtcgatttcacagcgcgaaatggcattaccccccttcacgtcgcctcaaaaagaggaaacacaaatatggtgaagctcctccttgaccgtgggggacagatagacgccaaaaccagggacggactgacgcctctgcactgtgctgcaagatctggacacgaccaggtggtggagctcctgctggagcggggtgctcccctgctggcaagaaccaagaacggcctcagtcctttgcacatggcggctcagggggatcatgtggaatgcgtaaaacaccttctgcagcacaaggccccagtggatgatgttaccctggactatctgaccgcactgcacgttgctgcacattgtggccactatagagtaacaaaactactgcttgacaagagggcaaacccaaatgccagggccctaaacggcttcacaccactgcacatcgcctgtaagaagaacaggattaaagtgatggaactcctggtgaagtatggggctagcatacaggcaatcactgaaagcgggctgactcctatacatgtcgcggcattcatggggcatctgaatattgttctgctgctgctacagaacggagcgagtcctgatgtgactaatatcaggggggaaactgccctacacatggccgctcgtgctgggcaagtggaagtagtgagatgtcttttgagaaacggagccctggtagacgcaagagcgagggaggagcagacgccactgcacatcgccagccgtctgggaaaaaccgagatagtccaactgctccttcaacacatggcccatccagatgcagctaccaccaacgggtacactccacttcatatctcagcgcgtgagggtcaagtagacgttgctagtgtgcttctggaggccggtgccgcacacagcctcgccaccaaaaagggcttcactcctctacacgttgccgctaagtacggatctctggatgtcgccaagttactacttcagcggagagctgctgctgacagtgccggaaaaaacggtctcacccctctccacgttgccgcacattatgataatcagaaagtcgcattacttcttctagaaaagggcgcatccccccatgctactgctaaaaacggatacacgccactgcatatcgccgcaaagaaaaaccagatgcagattgcaagcaccctactgaattatggagctgaaaccaacatcgtgactaaacaaggagtgactcctcttcatctcgctagccaagaggggcacacggacatggtaaccttactgctggacaaaggcgcaaacatccacatgagcacaaaatccggccttacatctctgcacctggctgctcaagaggataaggtcaacgtagccgatatccttacaaaacatggagccgaccaggatgctcacacaaaactgggttacactccactgatcgtggcgtgccattatggaaacgtcaagatggtgaattttcttctgaagcagggagccaacgtcaatgctaagaccaagaacggttatacccctctgcatcaagccgcacagcaaggacatacacatattattaacgtcctcttgcaacacggagccaagccaaacgcaactactgccaatgggaataccgccctggctatcgccaaaagactcggatacatctccgtcgtggacactttaaaggttgtgacagaggaagtcaccactacaaccactaccataacggaaaagcacaaactgaacgtccccgaaactatgacagaggttctggatgtgagtgacgaggaaggtgacgacacaatgaccggtgacggcggagagtaccttaggcccgaggatctgaaagaacttggcgatgactcacttcccagcagccagttcctcgacgggatgaactacctgaggtatagtctggagggcggacgaagtgatagtctgaggagctttagttcagacagatctcatactctgtctcatgcctcgtatctcagggactccgctgtgatggacgacagcgtggtgataccctctcatcaggtgtcaacactagctaaagaagccgagagaaacagttacaggctctcctggggcaccgagaacctcgacaacgttgcgctatcatctagccctatccattcggggcgagcttcaccctgcctggaacgggacaattccagctttctagtcagttttatggtggatgctcgcggaggggctatgcgcggttgcagacacaatggtctgagaatcatcattccgccacgcaagtgtacagcccctacgagagttacctgtagactcgtgaaaagacatcggctcgcaacgatgcctccaatggtggagggtgagggcctggccagccgcctgattgaggtaggccctagcggggctcagttcctaggcaagttgcatttaccaacagcaccaccgcctctcaacgagggcgagtcactggtgagtaggattctccagcttggacccccaggcactaaattcctcgggccagtgatcgttgaaattccccattttgctgccctgcgcggtaaggaaagagagctggtggtattacggagtgaaaacggcgatagctggaaggaacacttttgtgactacaccgaagacgaattgaatgagattctgaatggtatggacgaggttctggactctccagaagacctcgagaaaaaacgcatctgtcgaatcataacacgagactttcctcagtacttcgccgttgtgagcaggattaaacaggacagtaacctaataggccctgagggcggagtcttatcttcgactgtcgtcccccaagtgcaggccgtttttcctgagggggcattaacgaagagaattagagtgggtttgcaggctcagcctatgcatagcgagctagtcaaaaagatcttgggcaataaagccacgttcagcccaatcgtgacccttgaaccccgacggaggaaattccataagccgatcaccatgacaatccccgtccccaaggcctcctccgatgtgatgctcaacggtttcgggggagatgccccaaccctgaggctcctctgtagtataaccgggggaacaacacctgcgcagtgggaggatatcacgggcactacccctctgacattcgtgaatgagtgtgtgagtttcacaaccaatgtgtccgcgcgtttctggttgattgactgccgccaaattcaagaatcggtcacgtttgcctcccaggtgtacagagaaataatttgtgtgccatacatggctaagtttgtagtctttgctaagagtcatgacccaatcgaggcaaggctgaggtgcttctgcatgacagatgataaggtggataagaccctagaacagcaggagaacttcgctgaggttgcaaggagccgtgacgtggaggtgctcgaaggtaagccaatctatgtcgattgtttcgggaacctggtccctttaacaaagtccgggcagcaccacatattttccttcttcgcgtttaaagagaaccgattaccattgttcgtcaaggtccgagatacaacccaggagccttgcggcaggctgtcttttatgaaggagccaaagtccaccagggggctggtccatcaggccatttgcaatctcaatataaccttacctatttacacaaaggagtctgagagcgatcaggagcaggaagaagagattgggcaagagtcccggaggtatccacaggacgagcaagagaggattgaggagagactggcttacattgctgaccatctgggcttctcctggacggagctggccagagagcttgatttcactgaagaacagattcatcagattaggatagaaaatccaaactccttgcaggaccagagccatgccctgttgaaatactggctggagcgcgacggaaaacacgctaccgataccaacctcgttgaatgcttaacgaagatcaaccgcatggacattgtgcacctaatggagactaacaccgaacctttgcaggagaggatctctcactcctatgccgagatcgaacagaccattacactcgatcactccgagggtttctcagtccttcaggaggagctgtgcaccgcacaacacaagcaaaaggaagagcaagccgtaagtaaagagtctgaaacctgtgaccatcccccaattgtgagtgaagaggatatatccgtaggttactctactttccaagacggggtgccaaagacagaaggtgactctagcgccacagctctgttcccccaaacacacaaggagcaggttcaacaggatttctcgggaaaaatgcaagaccttcctgaggaaagctcgcttgaatatcaacaagagtactttgtcacgacccccggtaccgagacgagtgagacccagaaagcaatgatcgtgccttcaagcccttctaaaacacctgaagaagttagcacaccagccgaggaggagaaactgtatctccagacccccaccagctctgaacgcggagggtctcccatcattcaggagcctgaggagccctccgagcaccgcgaagaatccagtccacgtaaaactagtctggtcattgttgagtccgccgacaatcagcccgaaacatgtgaacgactcgatgaggacgcggcattcgaaaaaggcgacgacatgcctgaaatcccaccagaaaccgtgactgaagaagaatacatcgatgagcatggccatactgttgttaaaaaggtgacccgaaagattatacggaggtatgtctcctcagaggggacagagaaggaggaaattatggtgcagggcatgccccaagagccagttaatatcgaggaaggcgatggctatagcaaggtgattaagagagttgtgctgaagagcgatacagagcaatctgaggattccatggagta

SEQ ID NO: 45012 - DNA, 3345 bp, Artificial Sequence
  derived and/or modified sequence
atgacgacaatgctgcaaaaatccgacagcaacgccagctttctccgcgcagctagagctggcaacctggacaaggttgtggaatacctgaagggaggcattgatatcaacacttgtaatcagaatggactcaatgcactgcaccttgccgcaaaggaaggtcatgtcgggttagtgcaggaactgctgggcagaggctcctcagtggacagcgccaccaagaagggtaacactgctctgcacatagcgtcacttgccggacaggcggaagtcgtgaaggtactggtgaaagaaggtgcaaatatcaacgcccagagtcaaaacggattcacccccctgtacatggctgcacaagaaaaccacatcgatgtggttaaatacctgctggaaaacggcgctaatcagtcaaccgcaacagaggatggctttactcctctggctgtcgccctccagcagggacacaaccaagccgttgccattctactagagaatgacactaagggcaaggttcgcctcccagctctgcacattgccgcaaggaaagacgacacgaagtccgcggcattactcctgcagaatgatcataacgcagacgtccagtccaaaatgatggtgaatcggactacagagagcggatttacgcccttacacatagccgctcattatggtaacgtgaacgtcgccacactgctccttaatcgcggagccgcagtagacttcaccgcgagaaacggcatcacccctcttcatgtagcctccaagaggggtaatacgaatatggtgaagctgctcctggacaggggaggtcagatagatgctaaaacaagggacggtctgacacctttgcattgcgctgccaggagcggccacgatcaggtggtagagctcctgctggagcgcggagcgcctctcttggctcggacaaagaatggtctgagtccactgcacatggccgctcagggtgatcacgtcgagtgtgtaaagcacttgctacaacacaaggcaccagtggacgatgtaactctggactacctgacagccctgcacgtagcggctcactgtgggcattatagggtgactaagctactgctggacaagagagctaatcctaacgcacgggctctcaacggtttcacacctctgcatatcgcctgcaagaagaataggattaaggtcatggaattgcttgtgaaatacggagcttccattcaggccatcactgaatctggtctgacccctatccatgtcgctgccttcatgggacacctaaacattgtgttactcttgttgcagaacggagcttcaccagatgtcacaaatattcggggagaaaccgccctgcatatggcagcccgtgctggccaggtggaggtggtacgctgcctgctgcgtaatggcgctttagtcgacgctagggccagggaagaacagacccccctccacatagcatcccgtttggggaagaccgaaattgtgcagctgttgctccagcacatggcgcacccggatgccgcaaccaccaacgggtacacaccactgcacattagtgcacgggagggccaagtcgatgtggccagcgttcttctagaagctggagcagcccactccctcgctactaagaagggcttcactccattgcacgtggccgctaagtacggcagcctggacgttgctaaactgctgcttcagaggcgcgctgcagctgactctgctggtaagaatggcctgacaccactgcacgtggctgcccattacgacaatcagaaggtggcccttcttcttctagagaagggagcatctccacacgccaccgccaagaatggctacacacccctccacattgccgcaaagaagaaccagatgcaaatagcctctacactgctaaactacggggctgaaactaatattgtgacaaagcaaggtgtgacccccctgcacctcgctagtcaggagggtcatactgacatggtgactctccttctcgataagggcgctaacatccatatgtccaccaaaagcggtttgaccagtctccacttagcagctcaggaggataaggtaaatgttgccgatattctgacgaaacacggggctgatcaggacgcccatacgaagctcggctacactcctctcatcgtcgcctgccactacggaaatgtcaagatggtaaactttttgcttaagcagggcgctaacgtcaacgcaaagaccaaaaatggctacacacctctgcaccaggccgcacagcagggccacacccacatcattaatgttctccttcagcacggggctaaaccgaacgcgaccactgcgaacgggaataccgcactggctatcgcaaagcggctgggatatataagcgtcgttgacaccttgaaggtggtgacagaagaagtgactacaacgacaaccactattactgagaagcataagctgaatgtgcctgagactatgactgaggtcctcgacgtctctgatgaggaaggagacgataccatgaccggagacggcggtgagtatctgaggccggaggacttgaaagagttaggggacgatagcctgcctagctcccagttcctggatggaatgaattacttgagatactccctggaggggggtcgatccgactctctgagaagcttctctagtgacagatcccacaccctttcacatgccagctacttgcgggattcagctgtaatggacgactccgtagtgattccaagccaccaagtgtcaacgcttgccaaagaagctgagcgaaacagctaccgcctatcgtggggaacagagaacttagataacgtagccctgtcgtcttcacccattcatagcgggtttctggtatcatttatggtcgatgccagaggaggggcaatgaggggctgcagacataacggtcttcgcatcattatccccccacggaaatgtaccgccccaacccgcgtgacctgtagattggtaaaacgccataggctcgccactatgccacccatggtcgagggtgaaggcctggcaagcagattaatcgaagtgggcccaagcggcgcacaatttctcggaaagctgcacctccccacagcccctcccccactgaacgaaggtgagagtctggtctcacgcatcttacagctcggtcctccgggtactaaatttctaggaccagtgatagtagagattccgcatttcgcagctttgcggggtaaggagagggagctggtggtgctccggtccgaaaacggggacagctggaaggaacacttttgcgattatactgaggatgagctcaatgaaatactcaatggcatggacgaggtccttgattcgcctgaagatttggaatag

SEQ ID NO: 45013 - DNA, 5591 bp, Artificial Sequence
  derived and/or modified sequence
atgaccaccatgttgcagaaatccgattctaacgcctcatttctgcgggcagccagggccggtaatttggataaggtggttgaatacctgaagggaggcatcgacataaacacctgcaaccagaatgggctgaacgcgctccacctggccgctaaggaggggcacgtgggtctggtgcaggaactgcttggtcgtgggtcctcagtcgatagcgctacaaaaaagggcaacaccgcccttcatattgcaagcctggccggacaggcagaggttgtgaaggtgctcgttaaagagggtgctaacattaatgcgcaatctcagaatggctttacaccgttgtatatggccgctcaggaaaaccatattgacgtagttaagtatctccttgagaacggagcaaatcagtctacggcaactgaagacggatttacacccttagctgtggcacttcagcagggccataatcaggcggtggccatcctgttggaaaatgacactaaagggaaggtccgcctgcccgctctgcatatcgctgcaagaaaggatgacactaagtctgccgctttgttgctgcagaacgatcacaatgcggacgtccagtcaaagatgatggtaaacagaacaacagagtctggctttacacccttacatattgctgcgcattatggaaacgtcaacgttgcaactctgttgctgaatcgtggagccgcagtggatttcacagcacgtaacggcatcacccctctacacgtagctagtaagaggggcaataccaatatggtcaaacttctccttgaccgagggggacagatcgacgccaaaactcgagatggacttacccctctacactgcgcagcgaggtcaggccacgatcaagttgtcgagctgttgctggagagaggcgcacccttgctggccagaactaagaacgggttgagcccactgcacatggctgcccagggcgaccacgttgagtgtgtgaagcatcttctacagcacaaagctccagttgacgatgtcactcttgattatctaacagcgctccacgtcgcagcgcactgcgggcactatagagtcacaaaactgctccttgacaagagagccaaccctaacgccagggccctgaatgggttcacaccacttcatatcgcttgcaagaaaaacagaatcaaagttatggagctgcttgtgaagtatggagcctcaatacaagctatcaccgagagtggacttacacctatccatgttgccgcttttatgggtcatctcaacattgtgctgctgctgctccagaatggcgctagccctgacgtaactaacatccgcggtgaaactgcgctccacatggcagcccgagcagggcaggtcgaggttgtgagatgtcttttgcgcaatggcgcattggttgatgctagggccagggaagagcagacacccctgcacatcgcctcccggctaggcaaaacggagattgtgcagttgctcctccaacacatggcacatcctgacgctgctactacaaatggctacacacctttgcacatctcagcccgtgagggccaggttgacgtggcttccgtgctgctagaggcaggggctgctcatagccttgccacaaaaaaggggtttactcctctacacgtcgcagctaagtatgggagcctggacgtggcaaagctgttgttgcaacgaagggccgctgctgacagcgctggcaagaatggtctcacacccttgcacgtggctgctcattacgacaatcaaaaagtcgcacttcttctgcttgagaaaggagcatccccccacgccaccgcaaaaaacggctacacgcccctgcacatcgctgccaaaaaaaatcagatgcaaatcgcatccacactgctgaattacggggctgaaactaacattgtgacaaaacagggcgtgacacctctccatctggcttcccaagaagggcacacagatatggtgacactgctccttgacaaaggcgctaatattcatatgtcaacaaaaagcggtttgacaagcctgcacttagccgctcaggaggataaagtcaatgtggcggacatactcacaaaacacggagccgaccaggatgctcatacaaaattaggctacacccctctcattgttgcatgtcactatggcaacgtaaaaatggttaatttcctgcttaaacagggggctaacgtaaacgccaaaacaaagaatggatatacacccttgcatcaggcggcacagcaggggcacacccacattattaacgtgctgctccaacacggagccaagcccaatgctaccactgcgaatggaaatacggcattggcgattgcaaagcggctcggctatattagtgttgtggataccctgaaggtggtcaccgaagaagttacaaccactacaacgacgatcaccgagaaacataaactaaatgtgcctgagacgatgaccgaggtgctggacgtgagcgatgaggaaggtgatgacaccatgactggtgacggaggcgagtatctgcgacccgaggacctcaaagagctgggcgacgatagtctgccgtcaagtcagtttctggacggtatgaattacttaaggtactctctagagggaggtcgttcagattccctgaggtcctttagttcggatcgtagtcacacactctcccacgccagttatctgagggactcggcggtcatggacgacagcgttgttatcccctctcaccaggtcagcacccttgctaaggaggcagaacgaaattcttaccgcttaagctgggggacggagaacctggacaatgtggccctgtccagctcaccaatacactcaggcagagctagcccttgcctcgaaagggataattcctcattccttgtgtccttcatggtagatgccagggggggagcaatgagaggatgccggcacaatggtcttaggatcataatccctcccaggaaatgtacagccccaactcgcgttacatgcagattagtaaaacggcatcgattagcaaccatgccccctatggtggagggagaggggctggcttcacgcttaattgaagtgggcccatcaggcgctcagttcctagggaagctgcatctgccaactgctcctccgcctctgaacgagggcgagagcctcgtgagcagaattctacaactgggaccaccagggaccaaattcctgggacccgtgatcgtcgaaatcccccacttcgcagccctgcgcggtaaggaaagagaactggtggtgttgcggagtgagaacggtgattcgtggaaggaacacttctgtgactataccgaggacgagctgaacgagattctgaacggtatggacgaggtcctggattctcctgaagatttagagaaaaagagaatatgccggatcatcaccagggattttccacaatacttcgctgtcgtctcccgcatcaagcaggattccaacctgatcggacctgagggaggtgtgctaagcagcaccgtcgtgcctcaggtccaagcagtgttccctgagggtgccctgacgaagaggattcgcgtgggcttgcaggcgcagccaatgcactctgaattggtgaaaaagatccttggcaataaggccactttcagcccgattgtgaccctcgaacctagacgccgtaaattccacaaacccattacgatgacaatccctgtgcctaaggccagcagcgacgttatgctcaatggatttgggggagacgcgccaacgctcaggctgctgtgctccatcacaggaggcaccacaccagcccagtgggaggacattaccggcaccacccccctcacctttgtgaacgagtgtgtgagcttcactacaaatgtctctgctaggttttggctgattgattgtcgacagattcaagagtctgtgacatttgccagccaagtctatcgtgaaatcatttgcgtgccctacatggccaagtttgtggtgtttgctaaaagccacgatcctattgaggcaaggctgcggtgtttctgtatgaccgacgataaggtagataagactctggaacaacaggaaaacttcgcagaagttgccagatcccgtgatgtcgaggtgttggaggggaaaccaatctatgtcgactgcttcggcaaccttgttccgctgacaaaatctgggcagcaccatatcttttcgttctttgcgttcaaagagaaccgtttacctctgttcgtcaaggtgagggacactacacaggaaccgtgtggaagactgagctttatgaaagaaccaaagtctacgaggggactcgtgcaccaagccatctgcaacctgaacatcacgctgccaatatacactaaggaaagcgaatccgatcaggaacaagaagaagagattgatatgaccagcgagaaaaatcctcaggacgaacaggaaaggattgaggaaagactggcttacatcgcagaccaccttggattcagctggaccgagttagctcgagagctggactttacagaggagcaaatacaccaaatcagaattgagaatcctaacagcctgcaggaccaaagccatgcactgctgaaatactggctggagcgggatggcaagcatgccacagacaccaacttagttgagtgcctgacgaaaatcaatagaatggacatcgtccacttaatggagaccaatacagagcctctgcaggagcgaataagtcacagttatgccgagatagagcaaacaataaccctggaccacagtgaaggattttctgtgctccaggaggagctatgcaccgcccagcacaaacagaaggaggagcaggccgtgtctaaggaatctgagacctgcgatcaccccccaatagtttctgaagaagacatctccgtgggctactcaactttccaagatggagtccccaagactgaaggcgacagttctgccactgctttgtttcctcaaactcacaaggagcaagtccaacaggatttctcaggcaagatgcaggacctgcccgaagaatcctctctcgagtatcagcaggagtacttcgtgacgactcccggtaccgagacctccgaaactcagaaggctatgatcgtcccttcgtctccttctaaaacccccgaggaagtatccactccagccgaggaggaaaagctttacctacaaacccccacaagctctgaaagggggggttccccgatcatccaagagccagaagagccaagtgagcacagggaggaatcgagtcctaggaaaacatccctggttattgtcgaatcagcagataatcagcccgagacttgtgaaaggctggacgaggatgcagcctttgagaaaggtgatgacatgccagagatccctcccgaaactgtgacagaggaggaatacattgacgaacatggccataccgtggtaaaaaaggtgacgcgaaaaataatcagacgctatgtatccagtgagggaactgagaaggaggagataatggtgcagggaatgccgcaagaacccgtaaatattgaagagggagatggatactccaaggttataaagagagtcgtgcttaaaagtgataccgagcagtctgaggataataatgagta

SEQ ID NO: 45014 - DNA, 5592 bp, Artificial Sequence
  derived and/or modified sequence
atgagccaccacatccagagaagcgacagcaacgccagcttcctgagagccgccagagccggcaacctggacaaggtggtggagtacctgaagggcggcatcgacatcaacacctgcaaccagaacggcctgaacgccctgcacctggccgccaaggagggccacgtgggcctggtgcaggagctgctgggcagaggcagcagcgtggacagcgccaccaagaagggcaacaccgccctgcacatcgccagcctggccggccaggccgaggtggtgaaggtgctggtgaaggagggcgccaacatcaacgcccagagccagaacggcttcacccccctgtacatggccgcccaggagaaccacatcgacgtggtgaagtacctgctggagaacggcgccaaccagagcaccgccaccgaggacggcttcacccccctggccgtggccctgcagcagggccacaaccaggccgtggccatcctgctggagaacgacaccaagggcaaggtgagactgcccgccctgcacatcgccgccagaaaggacgacaccaagagcgccgccctgctgctgcagaacgaccacaacgccgacgtgcagagcaagatgatggtgaacagaaccaccgagagcggcttcacccccctgcacatcgccgcccactacggcaacgtgaacgtggccaccctgctgctgaacagaggcgccgccgtggacttcaccgccagaaacggcatcacccccctgcacgtggccagcaagagaggcaacaccaacatggtgaagctgctgctggacagaggcggccagatcgacgccaagaccagagacggcctgacccccctgcactgcgccgccagaagcggccacgaccaggtggtggagctgctgctggagagaggcgcccccctgctggccagaaccaagaacggcctgagccccctgcacatggccgcccagggcgaccacgtggagtgcgtgaagcacctgctgcagcacaaggcccccgtggacgacgtgaccctggactacctgaccgccctgcacgtggccgcccactgcggccactacagagtgaccaagctgctgctggacaagagagccaaccccaacgccagagccctgaacggcttcacccccctgcacatcgcctgcaagaagaacagaatcaaggtgatggagctgctggtgaagtacggcgccagcatccaggccatcaccgagagcggcctgacccccatccacgtggccgccttcatgggccacctgaacatcgtgctgctgctgctgcagaacggcgccagccccgacgtgaccaacatcagaggcgagaccgccctgcacatggccgccagagccggccaggtggaggtggtgagatgcctgctgagaaacggcgccctggtggacgccagagccagagaggagcagacccccctgcacatcgccagcagactgggcaagaccgagatcgtgcagctgctgctgcagcacatggcccaccccgacgccgccaccaccaacggctacacccccctgcacatcagcgccagagagggccaggtggacgtggccagcgtgctgctggaggccggcgccgcccacagcctggccaccaagaagggcttcacccccctgcacgtggccgccaagtacggcagcctggacgtggccaagctgctgctgcagagaagagccgccgccgacagcgccggcaagaacggcctgacccccctgcacgtggccgcccactacgacaaccagaaggtggccctgctgctgctggagaagggcgccagcccccacgccaccgccaagaacggctacacccccctgcacatcgccgccaagaagaaccagatgcagatcgccagcaccctgctgaactacggcgccgagaccaacatcgtgaccaagcagggcgtgacccccctgcacctggccagccaggagggccacaccgacatggtgaccctgctgctggacaagggcgccaacatccacatgagcaccaagagcggcctgaccagcctgcacctggccgcccaggaggacaaggtgaacgtggccgacatcctgaccaagcacggcgccgaccaggacgcccacaccaagctgggctacacccccctgatcgtggcctgccactacggcaacgtgaagatggtgaacttcctgctgaagcagggcgccaacgtgaacgccaagaccaagaacggctacacccccctgcaccaggccgcccagcagggccacacccacatcatcaacgtgctgctgcagcacggcgccaagcccaacgccaccaccgccaacggcaacaccgccctggccatcgccaagagactgggctacatcagcgtggtggacaccctgaaggtggtgaccgaggaggtgaccaccaccaccaccaccatcaccgagaagcacaagctgaacgtgcccgagaccatgaccgaggtgctggacgtgagcgacgaggagggcgacgacaccatgaccggcgacggcggcgagtacctgagacccgaggacctgaaggagctgggcgacgacagcctgcccagcagccagttcctggacggcatgaactacctgagatacagcctggagggcggcagaagcgacagcctgagaagcttcagcagcgacagaagccacaccctgagccacgccagctacctgagagacagcgccgtgatggacgacagcgtggtgatccccagccaccaggtgagcaccctggccaaggaggccgagagaaacagctacagactgagctggggcaccgagaacctggacaacgtggccctgagcagcagccccatccacagcggcagagccagcccctgcctggagagagacaacagcagcttcctggtgagcttcatggtggacgccagaggcggcgccatgagaggctgcagacacaacggcctgagaatcatcatcccccccagaaagtgcaccgcccccaccagagtgacctgcagactggtgaagagacacagactggccaccatgccccccatggtggagggcgagggcctggccagcagactgatcgaggtgggccccagcggcgcccagttcctgggcaagctgcacctgcccaccgcccccccccccctgaacgagggcgagagcctggtgagcagaatcctgcagctgggcccccccggcaccaagttcctgggccccgtgatcgtggagatcccccacttcgccgccctgagaggcaaggagagagagctggtggtgctgagaagcgagaacggcgacagctggaaggagcacttctgcgactacaccgaggacgagctgaacgagatcctgaacggcatggacgaggtgctggacagccccgaggacctggagaagaagagaatctgcagaatcatcaccagagacttcccccagtacttcgccgtggtgagcagaatcaagcaggacagcaacctgatcggccccgagggcggcgtgctgagcagcaccgtggtgccccaggtgcaggccgtgttccccgagggcgccctgaccaagagaatcagagtgggcctgcaggcccagcccatgcacagcgagctggtgaagaagatcctgggcaacaaggccaccttcagccccatcgtgaccctggagcccagaagaagaaagttccacaagcccatcaccatgaccatccccgtgcccaaggccagcagcgacgtgatgctgaacggcttcggcggcgacgcccccaccctgagactgctgtgcagcatcaccggcggcaccacccccgcccagtgggaggacatcaccggcaccacccccctgaccttcgtgaacgagtgcgtgagcttcaccaccaacgtgagcgccagattctggctgatcgactgcagacagatccaggagagcgtgaccttcgccagccaggtgtacagagagatcatctgcgtgccctacatggccaagttcgtggtgttcgccaagagccacgaccccatcgaggccagactgagatgcttctgcatgaccgacgacaaggtggacaagaccctggagcagcaggagaacttcgccgaggtggccagaagcagagacgtggaggtgctggagggcaagcccatctacgtggactgcttcggcaacctggtgcccctgaccaagagcggccagcaccacatcttcagcttcttcgccttcaaggagaacagactgcccctgttcgtgaaggtgagagacaccacccaggagccctgcggcagactgagcttcatgaaggagcccaagagcaccagaggcctggtgcaccaggccatctgcaacctgaacatcaccctgcccatctacaccaaggagagcgagagcgaccaggagcaggaggaggagatcggccaggagagcagaagatacccccaggacgagcaggagagaatcgaggagagactggcctacatcgccgaccacctgggcttcagctggaccgagctggccagagagctggacttcaccgaggagcagatccaccagatcagaatcgagaaccccaacagcctgcaggaccagagccacgccctgctgaagtactggctggagagagacggcaagcacgccaccgacaccaacctggtggagtgcctgaccaagatcaacagaatggacatcgtgcacctgatggagaccaacaccgagcccctgcaggagagaatcagccacagctacgccgagatcgagcagaccatcaccctggaccacagcgagggcttcagcgtgctgcaggaggagctgtgcaccgcccagcacaagcagaaggaggagcaggccgtgagcaaggagagcgagacctgcgaccacccccccatcgtgagcgaggaggacatcagcgtgggctacagcaccttccaggacggcgtgcccaagaccgagggcgacagcagcgccaccgccctgttcccccagacccacaaggagcaggtgcagcaggacttcagcggcaagatgcaggacctgcccgaggagagcagcctggagtaccagcaggagtacttcgtgaccacccccggcaccgagaccagcgagacccagaaggccatgatcgtgcccagcagccccagcaagacccccgaggaggtgagcacccccgccgaggaggagaagctgtacctgcagacccccaccagcagcgagagaggcggcagccccatcatccaggagcccgaggagcccagcgagcacagagaggagagcagccccagaaagaccagcctggtgatcgtggagagcgccgacaaccagcccgagacctgcgagagactggacgaggacgccgccttcgagaagggcgacgacatgcccgagatcccccccgagaccgtgaccgaggaggagtacatcgacgagcacggccacaccgtggtgaagaaggtgaccagaaagatcatcagaagatacgtgagcagcgagggcaccgagaaggaggagatcatggtgcagggcatgccccaggagcccgtgaacatcgaggagggcgacggctacagcaaggtgatcaagagagtggtgctgaagagcgacaccgagcagagcgaggacagcatggagtag

SEQ ID NO: 45015 - DNA, 3345 bp, Artificial Sequence
  derived and/or modified sequence
atgaccaccatgctgcagaagagcgacagcaacgccagcttcctgagagccgccagagccggcaacctggacaaggtggtggagtacctgaagggcggcatcgacatcaacacctgcaaccagaacggcctgaacgccctgcacctggccgccaaggagggccacgtgggcctggtgcaggagctgctgggcagaggcagcagcgtggacagcgccaccaagaagggcaacaccgccctgcacatcgccagcctggccggccaggccgaggtggtgaaggtgctggtgaaggagggcgccaacatcaacgcccagagccagaacggcttcacccccctgtacatggccgcccaggagaaccacatcgacgtggtgaagtacctgctggagaacggcgccaaccagagcaccgccaccgaggacggcttcacccccctggccgtggccctgcagcagggccacaaccaggccgtggccatcctgctggagaacgacaccaagggcaaggtgagactgcccgccctgcacatcgccgccagaaaggacgacaccaagagcgccgccctgctgctgcagaacgaccacaacgccgacgtgcagagcaagatgatggtgaacagaaccaccgagagcggcttcacccccctgcacatcgccgcccactacggcaacgtgaacgtggccaccctgctgctgaacagaggcgccgccgtggacttcaccgccagaaacggcatcacccccctgcacgtggccagcaagagaggcaacaccaacatggtgaagctgctgctggacagaggcggccagatcgacgccaagaccagagacggcctgacccccctgcactgcgccgccagaagcggccacgaccaggtggtggagctgctgctggagagaggcgcccccctgctggccagaaccaagaacggcctgagccccctgcacatggccgcccagggcgaccacgtggagtgcgtgaagcacctgctgcagcacaaggcccccgtggacgacgtgaccctggactacctgaccgccctgcacgtggccgcccactgcggccactacagagtgaccaagctgctgctggacaagagagccaaccccaacgccagagccctgaacggcttcacccccctgcacatcgcctgcaagaagaacagaatcaaggtgatggagctgctggtgaagtacggcgccagcatccaggccatcaccgagagcggcctgacccccatccacgtggccgccttcatgggccacctgaacatcgtgctgctgctgctgcagaacggcgccagccccgacgtgaccaacatcagaggcgagaccgccctgcacatggccgccagagccggccaggtggaggtggtgagatgcctgctgagaaacggcgccctggtggacgccagagccagagaggagcagacccccctgcacatcgccagcagactgggcaagaccgagatcgtgcagctgctgctgcagcacatggcccaccccgacgccgccaccaccaacggctacacccccctgcacatcagcgccagagagggccaggtggacgtggccagcgtgctgctggaggccggcgccgcccacagcctggccaccaagaagggcttcacccccctgcacgtggccgccaagtacggcagcctggacgtggccaagctgctgctgcagagaagagccgccgccgacagcgccggcaagaacggcctgacccccctgcacgtggccgcccactacgacaaccagaaggtggccctgctgctgctggagaagggcgccagcccccacgccaccgccaagaacggctacacccccctgcacatcgccgccaagaagaaccagatgcagatcgccagcaccctgctgaactacggcgccgagaccaacatcgtgaccaagcagggcgtgacccccctgcacctggccagccaggagggccacaccgacatggtgaccctgctgctggacaagggcgccaacatccacatgagcaccaagagcggcctgaccagcctgcacctggccgcccaggaggacaaggtgaacgtggccgacatcctgaccaagcacggcgccgaccaggacgcccacaccaagctgggctacacccccctgatcgtggcctgccactacggcaacgtgaagatggtgaacttcctgctgaagcagggcgccaacgtgaacgccaagaccaagaacggctacacccccctgcaccaggccgcccagcagggccacacccacatcatcaacgtgctgctgcagcacggcgccaagcccaacgccaccaccgccaacggcaacaccgccctggccatcgccaagagactgggctacatcagcgtggtggacaccctgaaggtggtgaccgaggaggtgaccaccaccaccaccaccatcaccgagaagcacaagctgaacgtgcccgagaccatgaccgaggtgctggacgtgagcgacgaggagggcgacgacaccatgaccggcgacggcggcgagtacctgagacccgaggacctgaaggagctgggcgacgacagcctgcccagcagccagttcctggacggcatgaactacctgagatacagcctggagggcggcagaagcgacagcctgagaagcttcagcagcgacagaagccacaccctgagccacgccagctacctgagagacagcgccgtgatggacgacagcgtggtgatccccagccaccaggtgagcaccctggccaaggaggccgagagaaacagctacagactgagctggggcaccgagaacctggacaacgtggccctgagcagcagccccatccacagcggcttcctggtgagcttcatggtggacgccagaggcggcgccatgagaggctgcagacacaacggcctgagaatcatcatcccccccagaaagtgcaccgcccccaccagagtgacctgcagactggtgaagagacacagactggccaccatgccccccatggtggagggcgagggcctggccagcagactgatcgaggtgggccccagcggcgcccagttcctgggcaagctgcacctgcccaccgcccccccccccctgaacgagggcgagagcctggtgagcagaatcctgcagctgggcccccccggcaccaagttcctgggccccgtgatcgtggagatcccccacttcgccgccctgagaggcaaggagagagagctggtggtgctgagaagcgagaacggcgacagctggaaggagcacttctgcgactacaccgaggacgagctgaacgagatcctgaacggcatggacgaggtgctggacagccccgaggacctggagtag

SEQ ID NO: 45016 - DNA, 5592 bp, Artificial Sequence
  derived and/or modified sequence
atgaccaccatgctgcagaagagcgacagcaacgccagcttcctgagagccgccagagccggcaacctggacaaggtggtggagtacctgaagggcggcatcgacatcaacacctgcaaccagaacggcctgaacgccctgcacctggccgccaaggagggccacgtgggcctggtgcaggagctgctgggcagaggcagcagcgtggacagcgccaccaagaagggcaacaccgccctgcacatcgccagcctggccggccaggccgaggtggtgaaggtgctggtgaaggagggcgccaacatcaacgcccagagccagaacggcttcacccccctgtacatggccgcccaggagaaccacatcgacgtggtgaagtacctgctggagaacggcgccaaccagagcaccgccaccgaggacggcttcacccccctggccgtggccctgcagcagggccacaaccaggccgtggccatcctgctggagaacgacaccaagggcaaggtgagactgcccgccctgcacatcgccgccagaaaggacgacaccaagagcgccgccctgctgctgcagaacgaccacaacgccgacgtgcagagcaagatgatggtgaacagaaccaccgagagcggcttcacccccctgcacatcgccgcccactacggcaacgtgaacgtggccaccctgctgctgaacagaggcgccgccgtggacttcaccgccagaaacggcatcacccccctgcacgtggccagcaagagaggcaacaccaacatggtgaagctgctgctggacagaggcggccagatcgacgccaagaccagagacggcctgacccccctgcactgcgccgccagaagcggccacgaccaggtggtggagctgctgctggagagaggcgcccccctgctggccagaaccaagaacggcctgagccccctgcacatggccgcccagggcgaccacgtggagtgcgtgaagcacctgctgcagcacaaggcccccgtggacgacgtgaccctggactacctgaccgccctgcacgtggccgcccactgcggccactacagagtgaccaagctgctgctggacaagagagccaaccccaacgccagagccctgaacggcttcacccccctgcacatcgcctgcaagaagaacagaatcaaggtgatggagctgctggtgaagtacggcgccagcatccaggccatcaccgagagcggcctgacccccatccacgtggccgccttcatgggccacctgaacatcgtgctgctgctgctgcagaacggcgccagccccgacgtgaccaacatcagaggcgagaccgccctgcacatggccgccagagccggccaggtggaggtggtgagatgcctgctgagaaacggcgccctggtggacgccagagccagagaggagcagacccccctgcacatcgccagcagactgggcaagaccgagatcgtgcagctgctgctgcagcacatggcccaccccgacgccgccaccaccaacggctacacccccctgcacatcagcgccagagagggccaggtggacgtggccagcgtgctgctggaggccggcgccgcccacagcctggccaccaagaagggcttcacccccctgcacgtggccgccaagtacggcagcctggacgtggccaagctgctgctgcagagaagagccgccgccgacagcgccggcaagaacggcctgacccccctgcacgtggccgcccactacgacaaccagaaggtggccctgctgctgctggagaagggcgccagcccccacgccaccgccaagaacggctacacccccctgcacatcgccgccaagaagaaccagatgcagatcgccagcaccctgctgaactacggcgccgagaccaacatcgtgaccaagcagggcgtgacccccctgcacctggccagccaggagggccacaccgacatggtgaccctgctgctggacaagggcgccaacatccacatgagcaccaagagcggcctgaccagcctgcacctggccgcccaggaggacaaggtgaacgtggccgacatcctgaccaagcacggcgccgaccaggacgcccacaccaagctgggctacacccccctgatcgtggcctgccactacggcaacgtgaagatggtgaacttcctgctgaagcagggcgccaacgtgaacgccaagaccaagaacggctacacccccctgcaccaggccgcccagcagggccacacccacatcatcaacgtgctgctgcagcacggcgccaagcccaacgccaccaccgccaacggcaacaccgccctggccatcgccaagagactgggctacatcagcgtggtggacaccctgaaggtggtgaccgaggaggtgaccaccaccaccaccaccatcaccgagaagcacaagctgaacgtgcccgagaccatgaccgaggtgctggacgtgagcgacgaggagggcgacgacaccatgaccggcgacggcggcgagtacctgagacccgaggacctgaaggagctgggcgacgacagcctgcccagcagccagttcctggacggcatgaactacctgagatacagcctggagggcggcagaagcgacagcctgagaagcttcagcagcgacagaagccacaccctgagccacgccagctacctgagagacagcgccgtgatggacgacagcgtggtgatccccagccaccaggtgagcaccctggccaaggaggccgagagaaacagctacagactgagctggggcaccgagaacctggacaacgtggccctgagcagcagccccatccacagcggcagagccagcccctgcctggagagagacaacagcagcttcctggtgagcttcatggtggacgccagaggcggcgccatgagaggctgcagacacaacggcctgagaatcatcatcccccccagaaagtgcaccgcccccaccagagtgacctgcagactggtgaagagacacagactggccaccatgccccccatggtggagggcgagggcctggccagcagactgatcgaggtgggccccagcggcgcccagttcctgggcaagctgcacctgcccaccgcccccccccccctgaacgagggcgagagcctggtgagcagaatcctgcagctgggcccccccggcaccaagttcctgggccccgtgatcgtggagatcccccacttcgccgccctgagaggcaaggagagagagctggtggtgctgagaagcgagaacggcgacagctggaaggagcacttctgcgactacaccgaggacgagctgaacgagatcctgaacggcatggacgaggtgctggacagccccgaggacctggagaagaagagaatctgcagaatcatcaccagagacttcccccagtacttcgccgtggtgagcagaatcaagcaggacagcaacctgatcggccccgagggcggcgtgctgagcagcaccgtggtgccccaggtgcaggccgtgttccccgagggcgccctgaccaagagaatcagagtgggcctgcaggcccagcccatgcacagcgagctggtgaagaagatcctgggcaacaaggccaccttcagccccatcgtgaccctggagcccagaagaagaaagttccacaagcccatcaccatgaccatccccgtgcccaaggccagcagcgacgtgatgctgaacggcttcggcggcgacgcccccaccctgagactgctgtgcagcatcaccggcggcaccacccccgcccagtgggaggacatcaccggcaccacccccctgaccttcgtgaacgagtgcgtgagcttcaccaccaacgtgagcgccagattctggctgatcgactgcagacagatccaggagagcgtgaccttcgccagccaggtgtacagagagatcatctgcgtgccctacatggccaagttcgtggtgttcgccaagagccacgaccccatcgaggccagactgagatgcttctgcatgaccgacgacaaggtggacaagaccctggagcagcaggagaacttcgccgaggtggccagaagcagagacgtggaggtgctggagggcaagcccatctacgtggactgcttcggcaacctggtgcccctgaccaagagcggccagcaccacatcttcagcttcttcgccttcaaggagaacagactgcccctgttcgtgaaggtgagagacaccacccaggagccctgcggcagactgagcttcatgaaggagcccaagagcaccagaggcctggtgcaccaggccatctgcaacctgaacatcaccctgcccatctacaccaaggagagcgagagcgaccaggagcaggaggaggagatcgacatgaccagcgagaagaacccccaggacgagcaggagagaatcgaggagagactggcctacatcgccgaccacctgggcttcagctggaccgagctggccagagagctggacttcaccgaggagcagatccaccagatcagaatcgagaaccccaacagcctgcaggaccagagccacgccctgctgaagtactggctggagagagacggcaagcacgccaccgacaccaacctggtggagtgcctgaccaagatcaacagaatggacatcgtgcacctgatggagaccaacaccgagcccctgcaggagagaatcagccacagctacgccgagatcgagcagaccatcaccctggaccacagcgagggcttcagcgtgctgcaggaggagctgtgcaccgcccagcacaagcagaaggaggagcaggccgtgagcaaggagagcgagacctgcgaccacccccccatcgtgagcgaggaggacatcagcgtgggctacagcaccttccaggacggcgtgcccaagaccgagggcgacagcagcgccaccgccctgttcccccagacccacaaggagcaggtgcagcaggacttcagcggcaagatgcaggacctgcccgaggagagcagcctggagtaccagcaggagtacttcgtgaccacccccggcaccgagaccagcgagacccagaaggccatgatcgtgcccagcagccccagcaagacccccgaggaggtgagcacccccgccgaggaggagaagctgtacctgcagacccccaccagcagcgagagaggcggcagccccatcatccaggagcccgaggagcccagcgagcacagagaggagagcagccccagaaagaccagcctggtgatcgtggagagcgccgacaaccagcccgagacctgcgagagactggacgaggacgccgccttcgagaagggcgacgacatgcccgagatcccccccgagaccgtgaccgaggaggagtacatcgacgagcacggccacaccgtggtgaagaaggtgaccagaaagatcatcagaagatacgtgagcagcgagggcaccgagaaggaggagatcatggtgcagggcatgccccaggagcccgtgaacatcgaggagggcgacggctacagcaaggtgatcaagagagtggtgctgaagagcgacaccgagcagagcgaggacaacaacgagtag

SEQ ID NO: 45017 - protein, 1408 aa, Artificial Sequence
  derived and/or modified sequence
MKAPAVLAPGILVLLFTLVQRSNGECKEALAKSEMNVNMKYQLPNFTAETPIQNVILHEHHIFLGATNYIYVLNEEDLQKVAEYKTGPVLEHPDCFPCQDCSSKANLSGGVWKDNINMALVVDTYYDDQLISCGSVNRGTCQRHVFPHNHTADIQSEVHCIFSPQIEEPSQCPDCVVSALGAKVLSSVKDRFINFFVGNTINSSYFPDHPLHSISVRRLKETKDGFMFLTDQSYIDVLPEFRDSYPIKYVHAFESNNFIYFLTVQRETLDAQTFHTRIIRFCSINSGLHSYMEMPLECILTEKRKKRSTKKEVFNILQAAYVSKPGAQLARQIGASLNDDILFGVFAQSKPDSAEPMDRSAMCAFPIKYVNDFFNKIVNKNNVRCLQHFYGPNHEHCFNRTLLRNSSGCEARRDEYRTEFTTALQRVDLFMGQFSEVLLTSISTFIKGDLTIANLGTSEGRFMQVVVSRSGPSTPHVNFLLDSHPVSPEVIVEHTLNQNGYTLVITGKKITKIPLNGLGCRHFQSCSQCLSAPPFVQCGWCHDKCVRSEECLSGTWTQQICLPAIYKVFPNSAPLEGGTRLTICGWDFGFRRNNKFDLKKTRVLLGNESCTLTLSESTMNTLKCTVGPAMNKHFNMSIIISNGHGTTQYSTFSYVDPVITSISPKYGPMAGGTLLTLTGNYLNSGNSRHISIGGKTCTLKSVSNSILECYTPAQTISTEFAVKLKIDLANRETSIFSYREDPIVYEIHPTKSFISTWWKEPLNIVSFLFCFASGGSTITGVGKNLNSVSVPRMVINVHEAGRNFTVACQHRSNSEIICCTTPSLQQLNLQLPLKTKAFFMLDGILSKYFDLIYVHNPVFKPFEKPVMISMGNENVLEIKGNDIDPEAVKGEVLKVGNKSCENIHLHSEAVLCTVPNDLLKLNSELNIEWKQAISSTVLGKVIVQPDQNFTGLIAGVVSISTALLLLLGFFLWLKKRKQIKDLGSELVRYDARVHTPHLDRLVSARSVSPTTEMVSNESVDYRATFPEDQFPNSSQNGSCRQVQYPLTDMSPILTSGDSDISSPLLQNTVHIDLSALNPELVQAVQHVVIGPSSLIVHFNEVIGRGHFGCVYHGTLLDNDGKKIHCAVKSLNRITDIGEVSQFLTEGIIMKDFSHPNVLSLLGICLRSEGSPLVVLPYMKHGDLRNFIRNETHNPTVKDLIGFGLQVAKGMKYLASKKFVHRDLAARNCMLDEKFTVKVADFGLARDMYDKEYYSVHNKTGAKLPVKWMALESLQTQKFTTKSDVWSFGVLLWELMTRGAPPYPDVNTFDITVYLLQGRRLLQPEYCPDPLYEVMLKCWHPKAEMRPSFSELVSRISAIFSTFIGEHYVHVNATYVNVKCVAPYPSLLSSEDNADDEVDTRPASFWETS

SEQ ID NO: 45018 - DNA, 4227 bp, Artificial Sequence
  derived and/or modified sequence
atgaaggcccccgccgtgctggcccccggcatcctggtgctgctgttcaccctggtgcagagaagcaacggcgagtgcaaggaggccctggccaagagcgagatgaacgtgaacatgaagtaccagctgcccaacttcaccgccgagacccccatccagaacgtgatcctgcacgagcaccacatcttcctgggcgccaccaactacatctacgtgctgaacgaggaggacctgcagaaggtggccgagtacaagaccggccccgtgctggagcaccccgactgcttcccctgccaggactgcagcagcaaggccaacctgagcggcggcgtgtggaaggacaacatcaacatggccctggtggtggacacctactacgacgaccagctgatcagctgcggcagcgtgaacagaggcacctgccagagacacgtgttcccccacaaccacaccgccgacatccagagcgaggtgcactgcatcttcagcccccagatcgaggagcccagccagtgccccgactgcgtggtgagcgccctgggcgccaaggtgctgagcagcgtgaaggacagattcatcaacttcttcgtgggcaacaccatcaacagcagctacttccccgaccaccccctgcacagcatcagcgtgagaagactgaaggagaccaaggacggcttcatgttcctgaccgaccagagctacatcgacgtgctgcccgagttcagagacagctaccccatcaagtacgtgcacgccttcgagagcaacaacttcatctacttcctgaccgtgcagagagagaccctggacgcccagaccttccacaccagaatcatcagattctgcagcatcaacagcggcctgcacagctacatggagatgcccctggagtgcatcctgaccgagaagagaaagaagagaagcaccaagaaggaggtgttcaacatcctgcaggccgcctacgtgagcaagcccggcgcccagctggccagacagatcggcgccagcctgaacgacgacatcctgttcggcgtgttcgcccagagcaagcccgacagcgccgagcccatggacagaagcgccatgtgcgccttccccatcaagtacgtgaacgacttcttcaacaagatcgtgaacaagaacaacgtgagatgcctgcagcacttctacggccccaaccacgagcactgcttcaacagaaccctgctgagaaacagcagcggctgcgaggccagaagagacgagtacagaaccgagttcaccaccgccctgcagagagtggacctgttcatgggccagttcagcgaggtgctgctgaccagcatcagcaccttcatcaagggcgacctgaccatcgccaacctgggcaccagcgagggcagattcatgcaggtggtggtgagcagaagcggccccagcaccccccacgtgaacttcctgctggacagccaccccgtgagccccgaggtgatcgtggagcacaccctgaaccagaacggctacaccctggtgatcaccggcaagaagatcaccaagatccccctgaacggcctgggctgcagacacttccagagctgcagccagtgcctgagcgccccccccttcgtgcagtgcggctggtgccacgacaagtgcgtgagaagcgaggagtgcctgagcggcacctggacccagcagatctgcctgcccgccatctacaaggtgttccccaacagcgcccccctggagggcggcaccagactgaccatctgcggctgggacttcggcttcagaagaaacaacaagttcgacctgaagaagaccagagtgctgctgggcaacgagagctgcaccctgaccctgagcgagagcaccatgaacaccctgaagtgcaccgtgggccccgccatgaacaagcacttcaacatgagcatcatcatcagcaacggccacggcaccacccagtacagcaccttcagctacgtggaccccgtgatcaccagcatcagccccaagtacggccccatggccggcggcaccctgctgaccctgaccggcaactacctgaacagcggcaacagcagacacatcagcatcggcggcaagacctgcaccctgaagagcgtgagcaacagcatcctggagtgctacacccccgcccagaccatcagcaccgagttcgccgtgaagctgaagatcgacctggccaacagagagaccagcatcttcagctacagagaggaccccatcgtgtacgagatccaccccaccaagagcttcatcagcacctggtggaaggagcccctgaacatcgtgagcttcctgttctgcttcgccagcggcggcagcaccatcaccggcgtgggcaagaacctgaacagcgtgagcgtgcccagaatggtgatcaacgtgcacgaggccggcagaaacttcaccgtggcctgccagcacagaagcaacagcgagatcatctgctgcaccacccccagcctgcagcagctgaacctgcagctgcccctgaagaccaaggccttcttcatgctggacggcatcctgagcaagtacttcgacctgatctacgtgcacaaccccgtgttcaagcccttcgagaagcccgtgatgatcagcatgggcaacgagaacgtgctggagatcaagggcaacgacatcgaccccgaggccgtgaagggcgaggtgctgaaggtgggcaacaagagctgcgagaacatccacctgcacagcgaggccgtgctgtgcaccgtgcccaacgacctgctgaagctgaacagcgagctgaacatcgagtggaagcaggccatcagcagcaccgtgctgggcaaggtgatcgtgcagcccgaccagaacttcaccggcctgatcgccggcgtggtgagcatcagcaccgccctgctgctgctgctgggcttcttcctgtggctgaagaagagaaagcagatcaaggacctgggcagcgagctggtgagatacgacgccagagtgcacaccccccacctggacagactggtgagcgccagaagcgtgagccccaccaccgagatggtgagcaacgagagcgtggactacagagccaccttccccgaggaccagttccccaacagcagccagaacggcagctgcagacaggtgcagtaccccctgaccgacatgagccccatcctgaccagcggcgacagcgacatcagcagccccctgctgcagaacaccgtgcacatcgacctgagcgccctgaaccccgagctggtgcaggccgtgcagcacgtggtgatcggccccagcagcctgatcgtgcacttcaacgaggtgatcggcagaggccacttcggctgcgtgtaccacggcaccctgctggacaacgacggcaagaagatccactgcgccgtgaagagcctgaacagaatcaccgacatcggcgaggtgagccagttcctgaccgagggcatcatcatgaaggacttcagccaccccaacgtgctgagcctgctgggcatctgcctgagaagcgagggcagccccctggtggtgctgccctacatgaagcacggcgacctgagaaacttcatcagaaacgagacccacaaccccaccgtgaaggacctgatcggcttcggcctgcaggtggccaagggcatgaagtacctggccagcaagaagttcgtgcacagagacctggccgccagaaactgcatgctggacgagaagttcaccgtgaaggtggccgacttcggcctggccagagacatgtacgacaaggagtactacagcgtgcacaacaagaccggcgccaagctgcccgtgaagtggatggccctggagagcctgcagacccagaagttcaccaccaagagcgacgtgtggagcttcggcgtgctgctgtgggagctgatgaccagaggcgcccccccctaccccgacgtgaacaccttcgacatcaccgtgtacctgctgcagggcagaagactgctgcagcccgagtactgccccgaccccctgtacgaggtgatgctgaagtgctggcaccccaaggccgagatgagacccagcttcagcgagctggtgagcagaatcagcgccatcttcagcaccttcatcggcgagcactacgtgcacgtgaacgccacctacgtgaacgtgaagtgcgtggccccctaccccagcctgctgagcagcgaggacaacgccgacgacgaggtggacaccagacccgccagcttctgggagaccagctag

SEQ ID NO: 45019 - DNA, 2295 bp, Artificial Sequence
  derived and/or modified sequence
atgaaggcccccgccgtgctggcccccggcatcctggtgctgctgttcaccctggtgcagagaagcaacggcgagtgcaaggaggccctggccaagagcgagatgaacgtgaacatgaagtaccagctgcccaacttcaccgccgagacccccatccagaacgtgatcctgcacgagcaccacatcttcctgggcgccaccaactacatctacgtgctgaacgaggaggacctgcagaaggtggccgagtacaagaccggccccgtgctggagcaccccgactgcttcccctgccaggactgcagcagcaaggccaacctgagcggcggcgtgtggaaggacaacatcaacatggccctggtggtggacacctactacgacgaccagctgatcagctgcggcagcgtgaacagaggcacctgccagagacacgtgttcccccacaaccacaccgccgacatccagagcgaggtgcactgcatcttcagcccccagatcgaggagcccagccagtgccccgactgcgtggtgagcgccctgggcgccaaggtgctgagcagcgtgaaggacagattcatcaacttcttcgtgggcaacaccatcaacagcagctacttccccgaccaccccctgcacagcatcagcgtgagaagactgaaggagaccaaggacggcttcatgttcctgaccgaccagagctacatcgacgtgctgcccgagttcagagacagctaccccatcaagtacgtgcacgccttcgagagcaacaacttcatctacttcctgaccgtgcagagagagaccctggacgcccagaccttccacaccagaatcatcagattctgcagcatcaacagcggcctgcacagctacatggagatgcccctggagtgcatcctgaccgagaagagaaagaagagaagcaccaagaaggaggtgttcaacatcctgcaggccgcctacgtgagcaagcccggcgcccagctggccagacagatcggcgccagcctgaacgacgacatcctgttcggcgtgttcgcccagagcaagcccgacagcgccgagcccatggacagaagcgccatgtgcgccttccccatcaagtacgtgaacgacttcttcaacaagatcgtgaacaagaacaacgtgagatgcctgcagcacttctacggccccaaccacgagcactgcttcaacagaaccctgctgagaaacagcagcggctgcgaggccagaagagacgagtacagaaccgagttcaccaccgccctgcagagagtggacctgttcatgggccagttcagcgaggtgctgctgaccagcatcagcaccttcatcaagggcgacctgaccatcgccaacctgggcaccagcgagggcagattcatgcaggtggtggtgagcagaagcggccccagcaccccccacgtgaacttcctgctggacagccaccccgtgagccccgaggtgatcgtggagcacaccctgaaccagaacggctacaccctggtgatcaccggcaagaagatcaccaagatccccctgaacggcctgggctgcagacacttccagagctgcagccagtgcctgagcgccccccccttcgtgcagtgcggctggtgccacgacaagtgcgtgagaagcgaggagtgcctgagcggcacctggacccagcagatctgcctgcccgccatctacaaggtgttccccaacagcgcccccctggagggcggcaccagactgaccatctgcggctgggacttcggcttcagaagaaacaacaagttcgacctgaagaagaccagagtgctgctgggcaacgagagctgcaccctgaccctgagcgagagcaccatgaacaccctgaagtgcaccgtgggccccgccatgaacaagcacttcaacatgagcatcatcatcagcaacggccacggcaccacccagtacagcaccttcagctacgtggaccccgtgatcaccagcatcagccccaagtacggccccatggccggcggcaccctgctgaccctgaccggcaactacctgaacagcggcaacagcagacacatcagcatcggcggcaagacctgcaccctgaagagcgtgagcaacagcatcctggagtgctacacccccgcccagaccatcagcaccgagttcgccgtgaagctgaagatcgacctggccaacagagagaccagcatcttcagctacagagaggaccccatcgtgtacgagatccaccccaccaagagcttcatcagacacgtgaacatcgccctgatccagagatag

SEQ ID NO: 45020 - DNA, 4227 bp, Artificial Sequence
  derived and/or modified sequence
atgaaggcaccagcagtccttgcacccggaattctggttctactctttaccttagtgcagcgttcaaatggagaatgtaaagaggcgcttgccaaaagcgaaatgaatgtgaatatgaagtaccagctacctaatttcacggccgagacccccattcagaatgtgattcttcatgaacaccatatctttctaggagccactaattacatttacgttctgaatgaagaggacctccagaaagtcgctgagtacaagaccggccctgttctcgagcatccagactgctttccttgccaggattgtagtagcaaggctaacctgtccgggggtgtttggaaagacaacattaacatggctctcgtggtggacacgtattacgacgaccagctgattagctgcggcagcgtgaacaggggaacatgtcagcgacacgtgtttccacataatcacaccgccgacattcagtccgaggtacactgcatcttttctccgcagatcgaagagccctcccagtgtcctgactgcgtggtctcagcgttgggagcgaaggtgttgagctcagttaaagataggtttattaatttcttcgttgggaatactattaactcctcctactttccagaccaccccctgcattctataagcgtcaggcggctgaaggaaacaaaagatggcttcatgtttctgacggatcagtcgtacattgacgtgctgcccgaatttcgtgatagttaccctatcaaatacgttcacgcgtttgaatcgaacaacttcatctatttcctcaccgtccagagggaaacgttggatgcccaaacctttcatacacgcattatcaggttctgttccattaattcagggctgcactcgtacatggagatgccgctggagtgcattcttactgaaaagcgcaaaaaacgaagtactaaaaaggaagtcttcaatattcttcaggccgcctatgtaagcaagcccggcgcccagctggcccgtcagattggggcttcgcttaacgacgacatcctttttggagtgtttgcacagtcaaaacccgattcagcagaaccgatggaccgctctgctatgtgcgcattcccgattaaatatgtgaatgacttttttaataaaattgtgaacaagaacaatgtgagatgtctgcagcatttctacggccctaatcacgagcactgtttcaacagaaccctgctgcgcaattccagtggctgtgaggcccgcagagatgagtatcggaccgagttcactacagctttgcaaagggtagatcttttcatgggccagttttcagaagtgcttctgacctcgatcagtactttcattaaaggagatctcaccattgctaacttaggaacaagcgaggggaggtttatgcaagtcgtagtgagccggagcggaccctcaacaccccatgttaactttctgctggatagccatccagtgtcacccgaggtgatcgtagagcatactctgaatcagaacgggtacaccctggttataaccggcaagaaaattaccaaaataccattaaatggtctgggctgtagacatttccaaagctgctcccagtgtctttctgctccccccttcgtgcagtgcgggtggtgccatgacaagtgtgtcagatccgaagaatgtctgtcaggaacttggacgcagcagatctgtcttcccgccatttacaaggtgtttcccaactctgcgcccttggagggtggcactcgactaactatctgcgggtgggattttggtttccggagaaacaataaattcgacctgaaaaaaacaagagtgcttcttggcaatgaaagttgtactctcacactatccgagtcgacaatgaacacactgaaatgcacggtcgggccagccatgaataaacatttcaatatgagtataattatatcaaatgggcatggcactacacaatattccacattttcatatgtggacccagtgatcacaagcatctcccctaaatatgggccaatggccggcggtaccctgctaactctgacaggaaactacctgaatagtgggaatagtaggcacatttctatcggcgggaagacttgtactctgaaaagcgtcagcaactctattctagagtgctacacgcccgcgcagactatcagcacagagtttgccgtgaagctcaagatagatctggcaaacagagaaacgagtatcttttcctatagagaagacccgattgtatacgaaatacacccaaccaaatcttttatttctacttggtggaaagagcctctcaacattgtttcttttttgttttgctttgcctcaggggggtctaccattaccggcgtggggaagaatctcaactccgtgtcagtgccaagaatggtgatcaatgttcatgaagctgggcgtaacttcaccgtcgcctgccagcatagaagcaacagtgagatcatatgctgcaccactcccagtctgcagcaactgaatttgcagctccctctgaagacaaaagctttttttatgctagatgggatactgtcgaaatactttgatctaatctacgtgcacaatcctgtttttaagcctttcgagaagccagtgatgattagtatggggaatgagaatgttttagagatcaaaggaaacgacatcgatcccgaagccgttaaaggcgaagttctcaaagtgggcaacaagtcttgtgagaatattcaccttcacagtgaagctgtgctgtgcacggttccaaacgacttattgaagttgaactcggagttgaacattgaatggaaacaagctatatcctctaccgtgttaggaaaggtcattgtgcagcccgaccaaaacttcacaggattgatcgctggcgttgtgagtattagtacagcgctacttctactcctaggcttctttctgtggctgaagaagcgcaaacagatcaaggatctggggtccgagctcgtgcggtatgacgcaagggtccatacacctcatttagatagattggtgtccgccagatccgtttccccaacgactgaaatggtttccaatgaaagcgtggattacagagctacattccccgaagaccagttcccaaattcaagccagaatggatcctgccgccaggtgcagtacccgctaacggacatgtccccaatcctgactagcggcgacagcgacatctccagccccttgctccagaacacagtgcacatcgacctttctgcacttaaccctgagttagtccaggcagttcagcatgtggtcataggtccaagcagtttgatcgtccatttcaacgaggttattgggaggggacactttggatgcgtgtaccacggtacactgctggataacgatggcaagaagatccattgtgccgttaagagcttgaaccggatcaccgatattggtgaagtctcccagttcctgaccgagggaatcatcatgaaggacttctctcacccaaacgttctctcactcctcggaatctgtcttcgcagcgaggggtcgcccctcgtggtgctcccatatatgaaacatggcgacctcagaaatttcatccgaaacgagacacataaccctaccgtaaaagacctgattggcttcggcctgcaggttgccaaaggaatgaagtatcttgcttctaagaagttcgtacatcgtgatctagccgcccgcaattgcatgctggacgagaagttcactgtgaaagtagctgacttcgggttggcccgagacatgtatgataaggagtattatagcgtgcacaataagacaggggccaagttgcctgtgaaatggatggccctggaatccctccagacacaaaagttcactaccaaatcagatgtatggagttttggagttctgctgtgggagctcatgacgagaggagcaccaccatacccggacgtgaacacattcgatatcacagtgtatctacttcagggacgcagactcttacagccagagtactgccctgatcccctctacgaggtgatgctgaagtgttggcatcctaaggcggaaatgaggccaagcttctccgaactcgttagccggattagcgctatcttttctacctttattggcgaacactatgtgcatgtgaatgctacgtacgttaacgtgaagtgcgtggccccatacccatcattgctgtcctcagaggacaacgccgatgatgaggtggatacaagacctgcaagcttttgggaaacctcttag

SEQ ID NO: 45021 - DNA, 2295 bp, Artificial Sequence
  derived and/or modified sequence
atgaaagctcccgctgttctggctcctgggatactggtgttgttatttacacttgtgcagcgctccaacggcgagtgcaaggaggcattggccaagagcgagatgaatgtgaatatgaaataccagctccctaattttacggccgaaacccccattcagaatgtgattctgcacgagcatcatatcttcttgggagctactaattacatatatgttctgaacgaggaggatctgcagaaggtggccgaatacaaaaccgggccggtcctggaacacccggattgcttcccgtgccaggactgcagtagtaaagccaacctgtcagggggggtctggaaggataacattaacatggccttggtggtcgacacctactatgatgaccagctcattagttgcggtagtgttaaccggggcacctgccaaagacacgtcttcccccataatcacaccgccgatatccagtcggaggtgcactgcatttttagcccccagatcgaggaaccaagccagtgccccgattgtgtcgtttccgccttgggcgcaaaggttctttcctcagtcaaggacagattcatcaatttcttcgtcggtaacaccatcaacagttcatacttcccagatcaccctttacatagcatcagcgtgcgcagactgaaggagaccaaggacggttttatgtttttgaccgaccagagctacattgacgtgttgccagaattccgcgattcttaccctataaaatacgtccacgcctttgagtccaacaactttatctatttcttgacagtccagagagagacgttggacgctcagacgtttcatactaggattattaggttttgcagtataaacagtgggctccatagctatatggagatgcctctggagtgcattctgactgagaagagaaagaagcggtcgactaaaaaagaggtgttcaacatcctgcaggccgcctatgtgtctaaaccaggggcgcagctagccagacagattggggcatccctgaacgacgatatactcttcggcgtcttcgctcagtctaaacccgactccgccgaacccatggaccgctccgcgatgtgcgccttccccataaaatacgttaacgatttcttcaataagatcgtcaataaaaataacgtgagatgcctgcagcatttttatgggcctaaccacgagcactgtttcaaccgcactctactgcgcaactcttcaggctgtgaggcaaggcgcgacgagtaccgcaccgagttcaccacagcgctccaaagggtcgacctattcatgggacagttttcagaggtgctgctgacaagtatctctaccttcatcaagggcgacttgaccattgcgaacctgggcaccagtgagggccgcttcatgcaggttgtagtgtccaggtcagggccctcgaccccccacgtgaatttcctcttagattcacaccctgtgagccccgaggttatcgtggagcacaccctcaaccagaacggctacaccctcgtgattacaggcaagaaaataacaaagatcccgctaaacgggctcggctgcaggcattttcagtcatgctcgcagtgcctgtccgcacctccctttgttcagtgtggctggtgccatgataaatgcgtgaggagtgaggagtgtcttagtggaacctggacacagcaaatatgcttgccagcgatctacaaagtttttcccaacagcgccccactagagggcggcactcgactcacaatttgcggctgggattttggctttcgaagaaacaacaagttcgatcttaaaaagactcgtgtgctcttgggtaatgagagctgcactctgacactgtcagaaagtacaatgaacaccctgaagtgcaccgtaggccccgctatgaacaaacacttcaatatgtcaatcatcataagcaacggtcatggaactacccagtattcaactttcagctacgtagatcccgtgatcacttcaatttccccgaaatatggaccgatggctggcggcaccctgctgaccctgactgggaactacttgaattcaggaaatagcagacatatctctatcggcggcaagacatgcactctcaagagtgtgagcaattccatcctcgagtgctacactcccgcgcaaaccatttctactgagtttgcagtcaaactgaagattgatctggctaacagagagacctcaatcttctcatatagagaagatcctatcgtctacgagatccaccctacaaagagcttcattcgccacgtgaatatcgctttgatccagagatag

SEQ ID NO: 45022 - DNA, 4227 bp, Artificial Sequence
  derived and/or modified sequence
atgaaggccccagctgtgctggcccctggcatcctggtgctgctcttcaccctggtgcagaggagcaatggagagtgcaaggaggccctggccaagtctgagatgaatgtgaacatgaagtaccagctgcccaacttcaccgctgagacccccatccagaatgtcatcctgcacgagcaccacatcttcctgggcgccaccaactacatctacgtgctgaatgaggaggacctgcagaaggtggccgagtacaagacaggccctgtgctggagcacccagactgcttcccctgccaggactgcagcagcaaggccaacctgagcggcggcgtgtggaaggacaacatcaacatggccctggtggtggacacctactatgatgaccagctgatcagctgtggctctgtgaacagaggcacctgccagagacatgtgttcccccacaaccacacagctgacatccagagcgaggtgcactgcatcttcagcccccagatcgaggagcccagccagtgcccagactgtgtggtgtctgccctgggcgccaaggtgctgagctctgtgaaggaccgcttcatcaacttctttgtgggcaacaccatcaacagcagctacttcccagaccaccccctgcacagcatctctgtgcggcggctgaaggagaccaaggatggcttcatgttcctgacagaccagagctacattgatgtgctgcctgagttccgggacagctaccccatcaagtatgtgcacgcctttgagagcaacaacttcatctacttcctgactgtgcagcgggagaccctggatgcccagaccttccacacccgcatcatccgcttctgcagcatcaacagcggcctgcacagctacatggagatgcccctggagtgcatcctgacagagaagaggaagaagaggagcaccaagaaggaggtgttcaacatcctgcaggccgcctacgtgtccaagccaggggcccagctggcccggcagattggagccagcctgaatgatgacatcctgtttggagtgtttgcccagagcaagccagattctgctgagcccatggacagaagtgccatgtgtgccttccccatcaagtatgtgaatgacttcttcaacaagatcgtgaacaagaacaacgtgcgctgcctgcagcacttctacggccccaaccacgagcactgcttcaacagaaccctgctgaggaacagcagcggctgtgaggccaggagagatgagtacagaacagagttcaccacagccctgcagagggtggacctcttcatgggccagttcagcgaggtgctgctgaccagcatcagcaccttcatcaagggggacctgaccatcgccaacctgggcaccagcgagggccgcttcatgcaggtggtggtgagccgcagcggccccagcaccccccacgtgaacttcctgctggacagccaccctgtgtccccagaggtgattgtggagcacaccctgaaccagaatggctacaccctggtgatcaccgggaagaagatcaccaagatccccctgaatggcctgggctgccgccacttccagagctgcagccagtgcctgagcgcccccccatttgtgcagtgtggctggtgccacgacaagtgtgtgcgctctgaggagtgcctgagcggcacctggacccagcagatctgcctgcctgccatctacaaggtgttccccaacagcgcccccctggagggcggcacccggctgaccatctgtggctgggactttggcttcagaagaaacaacaagtttgacctgaagaagaccagggtgctgctgggcaatgaaagctgcaccctgaccctgtctgagagcaccatgaacaccctgaagtgcaccgtgggccctgccatgaacaagcacttcaacatgagcatcatcatcagcaatggccacggcaccacccagtacagcaccttctcctatgtggaccctgtgatcaccagcatcagccccaagtatggccccatggccggcggcaccctgctgaccctgaccggcaactacctgaacagcggcaacagccgccacatcagcatcggcggcaagacctgcaccctgaagtctgtgagcaacagcatcctggagtgctacaccccagcccagaccatcagcacagaatttgctgtgaagctgaagattgacctggccaaccgggagaccagcatcttctcctaccgggaggaccccatcgtgtatgagatccaccccaccaagagcttcatcagcacctggtggaaggagcccctgaacatcgtgtccttcctgttctgctttgccagcggcggcagcaccatcactggagtgggcaagaacctgaacagcgtgtctgtgcccaggatggtgatcaacgtgcatgaggccggcaggaacttcaccgtggcctgccagcacaggagcaacagcgagatcatctgctgcaccacccccagcctgcagcagctgaacctgcagctgcccctgaagaccaaggccttcttcatgctggatggcatcctgagcaagtactttgacctgatctacgtgcacaaccctgtgttcaagccctttgagaagcctgtgatgatctccatgggaaatgaaaatgtgctggagatcaagggaaatgacattgatcctgaggccgtgaagggggaggtgctgaaggtgggcaacaagagctgtgagaacatccacctgcacagcgaggccgtgctgtgcaccgtgcccaatgacctgctgaagctgaacagcgagctgaacatcgagtggaagcaggccatcagcagcacagtgctgggcaaggtgattgtgcagcctgaccagaacttcaccggcctgattgctggggtggtgtccatcagcacagccctgctgctgctgctgggcttcttcctgtggctgaagaagaggaagcagatcaaggacctgggcagcgagctggtgcgctatgatgcccgggtgcacaccccccacctggaccggctggtgtctgcccggtctgtgagccccaccacagagatggtgtccaatgaatctgtggactaccgggccaccttccctgaggaccagttccccaacagcagccagaatggcagctgccggcaggtgcagtaccccctgacagacatgagccccatcctgaccagcggggacagcgacatcagcagccccctgctgcagaacacagtgcacatcgacctgagcgccctgaaccctgagctggtgcaggccgtgcagcacgtggtgattggccccagcagcctgattgtgcacttcaatgaagtcatcggccggggccacttcggctgtgtgtaccacggcaccctgctggacaatgatggcaagaagatccactgtgctgtgaagagcctgaaccgcatcacagacatcggggaggtgtcccagttcctgacagagggcatcatcatgaaggacttcagccaccccaacgtgctgagcctgctgggcatctgcctgcggtctgagggcagccccctggtggtgctgccctacatgaagcacggggacctgaggaacttcatcagaaatgagacccacaaccccaccgtgaaggacctgattggcttcggcctgcaggtggccaagggcatgaagtacctggccagcaagaagtttgtgcaccgggacctggccgccaggaactgcatgctggatgagaagttcaccgtgaaggtggccgactttggcctggcccgggacatgtatgacaaggagtactacagcgtgcacaacaagacaggagccaagctgcctgtgaagtggatggccctggagagcctgcagacccagaagttcaccaccaagagtgatgtgtggagctttggagtgctgctgtgggagctgatgaccaggggggccccaccctacccagatgtgaacacctttgacatcaccgtgtacctgctgcagggccggcggctgctgcagcctgagtactgcccagaccccctgtatgaggtgatgctgaagtgctggcaccccaaggccgagatgaggcccagcttcagcgagctggtgagccgcatcagcgccatcttcagcaccttcatcggggagcactacgtgcacgtgaatgccacctacgtgaatgtgaagtgtgtggccccctaccccagcctgctgagcagcgaggacaatgctgatgatgaggtggacaccaggcctgccagcttctgggagaccagctag

SEQ ID NO: 45023 - DNA, 2295 bp, Artificial Sequence
  derived and/or modified sequence
atgaaggccccagctgtgctggcccctggcatcctggtgctgctcttcaccctggtgcagaggagcaatggagagtgcaaggaggccctggccaagtctgagatgaatgtgaacatgaagtaccagctgcccaacttcaccgctgagacccccatccagaatgtcatcctgcacgagcaccacatcttcctgggcgccaccaactacatctacgtgctgaatgaggaggacctgcagaaggtggccgagtacaagacaggccctgtgctggagcacccagactgcttcccctgccaggactgcagcagcaaggccaacctgagcggcggcgtgtggaaggacaacatcaacatggccctggtggtggacacctactatgatgaccagctgatcagctgtggctctgtgaacagaggcacctgccagagacatgtgttcccccacaaccacacagctgacatccagagcgaggtgcactgcatcttcagcccccagatcgaggagcccagccagtgcccagactgtgtggtgtctgccctgggcgccaaggtgctgagctctgtgaaggaccgcttcatcaacttctttgtgggcaacaccatcaacagcagctacttcccagaccaccccctgcacagcatctctgtgcggcggctgaaggagaccaaggatggcttcatgttcctgacagaccagagctacattgatgtgctgcctgagttccgggacagctaccccatcaagtatgtgcacgcctttgagagcaacaacttcatctacttcctgactgtgcagcgggagaccctggatgcccagaccttccacacccgcatcatccgcttctgcagcatcaacagcggcctgcacagctacatggagatgcccctggagtgcatcctgacagagaagaggaagaagaggagcaccaagaaggaggtgttcaacatcctgcaggccgcctacgtgtccaagccaggggcccagctggcccggcagattggagccagcctgaatgatgacatcctgtttggagtgtttgcccagagcaagccagattctgctgagcccatggacagaagtgccatgtgtgccttccccatcaagtatgtgaatgacttcttcaacaagatcgtgaacaagaacaacgtgcgctgcctgcagcacttctacggccccaaccacgagcactgcttcaacagaaccctgctgaggaacagcagcggctgtgaggccaggagagatgagtacagaacagagttcaccacagccctgcagagggtggacctcttcatgggccagttcagcgaggtgctgctgaccagcatcagcaccttcatcaagggggacctgaccatcgccaacctgggcaccagcgagggccgcttcatgcaggtggtggtgagccgcagcggccccagcaccccccacgtgaacttcctgctggacagccaccctgtgtccccagaggtgattgtggagcacaccctgaaccagaatggctacaccctggtgatcaccgggaagaagatcaccaagatccccctgaatggcctgggctgccgccacttccagagctgcagccagtgcctgagcgcccccccatttgtgcagtgtggctggtgccacgacaagtgtgtgcgctctgaggagtgcctgagcggcacctggacccagcagatctgcctgcctgccatctacaaggtgttccccaacagcgcccccctggagggcggcacccggctgaccatctgtggctgggactttggcttcagaagaaacaacaagtttgacctgaagaagaccagggtgctgctgggcaatgaaagctgcaccctgaccctgtctgagagcaccatgaacaccctgaagtgcaccgtgggccctgccatgaacaagcacttcaacatgagcatcatcatcagcaatggccacggcaccacccagtacagcaccttctcctatgtggaccctgtgatcaccagcatcagccccaagtatggccccatggccggcggcaccctgctgaccctgaccggcaactacctgaacagcggcaacagccgccacatcagcatcggcggcaagacctgcaccctgaagtctgtgagcaacagcatcctggagtgctacaccccagcccagaccatcagcacagaatttgctgtgaagctgaagattgacctggccaaccgggagaccagcatcttctcctaccgggaggaccccatcgtgtatgagatccaccccaccaagagcttcatccgccacgtgaacatcgccctgatccagaggtag

SEQ ID NO: 45024 - DNA, 4632 bp, Artificial Sequence
  derived and/or modified sequence
gccctcgccgcccgcggcgccccgagcgctttgtgagcagatgcggagccgagtggagggcgcgagccagatgcggggcgacagctgacttgctgagaggaggcggggaggcgcggagcgcgcgtgtggtccttgcgccgctgacttctccactggttcctgggcaccgaaagataaacctctcataatgaaggcccccgctgtgcttgcacctggcatcctcgtgctcctgtttaccttggtgcagaggagcaatggggagtgtaaagaggcactagcaaagtccgagatgaatgtgaatatgaagtatcagcttcccaacttcaccgcggaaacacccatccagaatgtcattctacatgagcatcacattttccttggtgccactaactacatttatgttttaaatgaggaagaccttcagaaggttgctgagtacaagactgggcctgtgctggaacacccagattgtttcccatgtcaggactgcagcagcaaagccaatttatcaggaggtgtttggaaagataacatcaacatggctctagttgtcgacacctactatgatgatcaactcattagctgtggcagcgtcaacagagggacctgccagcgacatgtctttccccacaatcatactgctgacatacagtcggaggttcactgcatattctccccacagatagaagagcccagccagtgtcctgactgtgtggtgagcgccctgggagccaaagtcctttcatctgtaaaggaccggttcatcaacttctttgtaggcaataccataaattcttcttatttcccagatcatccattgcattcgatatcagtgagaaggctaaaggaaacgaaagatggttttatgtttttgacggaccagtcctacattgatgttttacctgagttcagagattcttaccccattaagtatgtccatgcctttgaaagcaacaattttatttacttcttgacggtccaaagggaaactctagatgctcagacttttcacacaagaataatcaggttctgttccataaactctggattgcattcctacatggaaatgcctctggagtgtattctcacagaaaagagaaaaaagagatccacaaagaaggaagtgtttaatatacttcaggctgcgtatgtcagcaagcctggggcccagcttgctagacaaataggagccagcctgaatgatgacattcttttcggggtgttcgcacaaagcaagccagattctgccgaaccaatggatcgatctgccatgtgtgcattccctatcaaatatgtcaacgacttcttcaacaagatcgtcaacaaaaacaatgtgagatgtctccagcatttttacggacccaatcatgagcactgctttaataggacacttctgagaaattcatcaggctgtgaagcgcgccgtgatgaatatcgaacagagtttaccacagctttgcagcgcgttgacttattcatgggtcaattcagcgaagtcctcttaacatctatatccaccttcattaaaggagacctcaccatagctaatcttgggacatcagagggtcgcttcatgcaggttgtggtttctcgatcaggaccatcaacccctcatgtgaattttctcctggactcccatccagtgtctccagaagtgattgtggagcatacattaaaccaaaatggctacacactggttatcactgggaagaagatcacgaagatcccattgaatggcttgggctgcagacatttccagtcctgcagtcaatgcctctctgccccaccctttgttcagtgtggctggtgccacgacaaatgtgtgcgatcggaggaatgcctgagcgggacatggactcaacagatctgtctgcctgcaatctacaaggttttcccaaatagtgcaccccttgaaggagggacaaggctgaccatatgtggctgggactttggatttcggaggaataataaatttgatttaaagaaaactagagttctccttggaaatgagagctgcaccttgactttaagtgagagcacgatgaatacattgaaatgcacagttggtcctgccatgaataagcatttcaatatgtccataattatttcaaatggccacgggacaacacaatacagtacattctcctatgtggatcctgtaataacaagtatttcgccgaaatacggtcctatggctggtggcactttacttactttaactggaaattacctaaacagtgggaattctagacacatttcaattggtggaaaaacatgtactttaaaaagtgtgtcaaacagtattcttgaatgttataccccagcccaaaccatttcaactgagtttgctgttaaattgaaaattgacttagccaaccgagagacaagcatcttcagttaccgtgaagatcccattgtctatgaaattcatccaaccaaatcttttattagtacttggtggaaagaacctctcaacattgtcagttttctattttgctttgccagtggtgggagcacaataacaggtgttgggaaaaacctgaattcagttagtgtcccgagaatggtcataaatgtgcatgaagcaggaaggaactttacagtggcatgtcaacatcgctctaattcagagataatctgttgtaccactccttccctgcaacagctgaatctgcaactccccctgaaaaccaaagcctttttcatgttagatgggatcctttccaaatactttgatctcatttatgtacataatcctgtgtttaagccttttgaaaagccagtgatgatctcaatgggcaatgaaaatgtactggaaattaagggaaatgatattgaccctgaagcagttaaaggtgaagtgttaaaagttggaaataagagctgtgagaatatacacttacattctgaagccgttttatgcacggtccccaatgacctgctgaaattgaacagcgagctaaatatagagtggaagcaagcaatttcttcaaccgtccttggaaaagtaatagttcaaccagatcagaatttcacaggattgattgctggtgttgtctcaatatcaacagcactgttattactacttgggtttttcctgtggctgaaaaagagaaagcaaattaaagatctgggcagtgaattagttcgctacgatgcaagagtacacactcctcatttggataggcttgtaagtgcccgaagtgtaagcccaactacagaaatggtttcaaatgaatctgtagactaccgagctacttttccagaagatcagtttcctaattcatctcagaacggttcatgccgacaagtgcagtatcctctgacagacatgtcccccatcctaactagtggggactctgatatatccagtccattactgcaaaatactgtccacattgacctcagtgctctaaatccagagctggtccaggcagtgcagcatgtagtgattgggcccagtagcctgattgtgcatttcaatgaagtcataggaagagggcattttggttgtgtatatcatgggactttgttggacaatgatggcaagaaaattcactgtgctgtgaaatccttgaacagaatcactgacataggagaagtttcccaatttctgaccgagggaatcatcatgaaagattttagtcatcccaatgtcctctcgctcctgggaatctgcctgcgaagtgaagggtctccgctggtggtcctaccatacatgaaacatggagatcttcgaaatttcattcgaaatgagactcataatccaactgtaaaagatcttattggctttggtcttcaagtagccaaaggcatgaaatatcttgcaagcaaaaagtttgtccacagagacttggctgcaagaaactgtatgctggatgaaaaattcacagtcaaggttgctgattttggtcttgccagagacatgtatgataaagaatactatagtgtacacaacaaaacaggtgcaaagctgccagtgaagtggatggctttggaaagtctgcaaactcaaaagtttaccaccaagtcagatgtgtggtcctttggcgtgctcctctgggagctgatgacaagaggagccccaccttatcctgacgtaaacacctttgatataactgtttacttgttgcaagggagaagactcctacaacccgaatactgcccagaccccttatatgaagtaatgctaaaatgctggcaccctaaagccgaaatgcgcccatccttttctgaactggtgtcccggatatcagcgatcttctctactttcattggggagcactatgtccatgtgaacgctacttatgtgaacgtaaaatgtgtcgctccgtatccttctctgttgtcatcagaagataacgctgatgatgaggtggacacacgaccagcctccttctgggagacatcatagtgctagtactatgtcaaagcaacagtccacactttgtccaatggttttttcactgcctgacctttaaaaggccatcgatattctttgctcttgccaaaattgcactattataggacttgtattgttatttaaattactggattctaaggaatttcttatctgacagagcatcagaaccagaggcttggtcccacaggccacggaccaatggcctgcag

SEQ ID NO: 45025 - DNA, 2295 bp, Artificial Sequence
  derived and/or modified sequence
atgaaggcccccgctgtgcttgcacctggcatcctcgtgctcctgtttaccttggtgcagaggagcaatggggagtgtaaagaggcactagcaaagtccgagatgaatgtgaatatgaagtatcagcttcccaacttcaccgcggaaacacccatccagaatgtcattctacatgagcatcacattttccttggtgccactaactacatttatgttttaaatgaggaagaccttcagaaggttgctgagtacaagactgggcctgtgctggaacacccagattgtttcccatgtcaggactgcagcagcaaagccaatttatcaggaggtgtttggaaagataacatcaacatggctctagttgtcgacacctactatgatgatcaactcattagctgtggcagcgtcaacagagggacctgccagcgacatgtctttccccacaatcatactgctgacatacagtcggaggttcactgcatattctccccacagatagaagagcccagccagtgtcctgactgtgtggtgagcgccctgggagccaaagtcctttcatctgtaaaggaccggttcatcaacttctttgtaggcaataccataaattcttcttatttcccagatcatccattgcattcgatatcagtgagaaggctaaaggaaacgaaagatggttttatgtttttgacggaccagtcctacattgatgttttacctgagttcagagattcttaccccattaagtatgtccatgcctttgaaagcaacaattttatttacttcttgacggtccaaagggaaactctagatgctcagacttttcacacaagaataatcaggttctgttccataaactctggattgcattcctacatggaaatgcctctggagtgtattctcacagaaaagagaaaaaagagatccacaaagaaggaagtgtttaatatacttcaggctgcgtatgtcagcaagcctggggcccagcttgctagacaaataggagccagcctgaatgatgacattcttttcggggtgttcgcacaaagcaagccagattctgccgaaccaatggatcgatctgccatgtgtgcattccctatcaaatatgtcaacgacttcttcaacaagatcgtcaacaaaaacaatgtgagatgtctccagcatttttacggacccaatcatgagcactgctttaataggacacttctgagaaattcatcaggctgtgaagcgcgccgtgatgaatatcgaacagagtttaccacagctttgcagcgcgttgacttattcatgggtcaattcagcgaagtcctcttaacatctatatccaccttcattaaaggagacctcaccatagctaatcttgggacatcagagggtcgcttcatgcaggttgtggtttctcgatcaggaccatcaacccctcatgtgaattttctcctggactcccatccagtgtctccagaagtgattgtggagcatacattaaaccaaaatggctacacactggttatcactgggaagaagatcacgaagatcccattgaatggcttgggctgcagacatttccagtcctgcagtcaatgcctctctgccccaccctttgttcagtgtggctggtgccacgacaaatgtgtgcgatcggaggaatgcctgagcgggacatggactcaacagatctgtctgcctgcaatctacaaggttttcccaaatagtgcaccccttgaaggagggacaaggctgaccatatgtggctgggactttggatttcggaggaataataaatttgatttaaagaaaactagagttctccttggaaatgagagctgcaccttgactttaagtgagagcacgatgaatacattgaaatgcacagttggtcctgccatgaataagcatttcaatatgtccataattatttcaaatggccacgggacaacacaatacagtacattctcctatgtggatcctgtaataacaagtatttcgccgaaatacggtcctatggctggtggcactttacttactttaactggaaattacctaaacagtgggaattctagacacatttcaattggtggaaaaacatgtactttaaaaagtgtgtcaaacagtattcttgaatgttataccccagcccaaaccatttcaactgagtttgctgttaaattgaaaattgacttagccaaccgagagacaagcatcttcagttaccgtgaagatcccattgtctatgaaattcatccaaccaaatcttttattaggcatgtcaacatcgctctaattcagagataa

SEQ ID NO: 45026 - DNA, 4227 bp, Artificial Sequence
  derived and/or modified sequence
atgaaggcccccgccgtgctggcccccggcatcctggtgctgctgttcacacttgtgcagaggtcaaatggcgagtgcaaagaagcgctcgccaaatctgagatgaacgtcaatatgaaataccagctcccaaattttaccgctgagaccccgattcaaaacgtgattctccacgaacaccacatttttctgggggccacaaattacatttatgttcttaacgaggaagacctgcagaaagtcgcggaatacaaaaccggccccgtgctggaacacccggactgtttcccctgtcaggattgctcctctaaggcgaacctttctgggggtgtatggaaggacaatatcaacatggctctcgtggtcgatacctattatgacgaccagctcatctcctgcggcagcgtgaatagggggacctgccaaaggcatgtctttccacataatcacacagccgacatccagtcagaagttcactgcatattctcacctcaaatagaagaaccctcccaatgccctgactgcgttgtgtcggccctgggagccaaggtgctgtctagtgtgaaagatcggtttatcaatttcttcgtcggaaacacaatcaattcatcatattttccagatcatcccctgcactcaatttctgtgcggcgcctcaaagagacaaaggacggtttcatgtttttaacagaccagagctatatcgacgtcttgcccgagtttagggactcatatcctatcaagtacgtccatgccttcgaatctaataatttcatctatttcttgacagtacagcgcgagacactcgacgctcagacttttcatactcgaatcattcgtttttgctccataaattctggattgcactcctacatggagatgcctctcgaatgtatcctcactgagaaacgaaagaagcgtagtactaaaaaagaggtgtttaacatcctgcaggccgcttatgtgagtaaacccggcgctcagcttgcgcggcagataggagcctcgctcaacgacgatatcctgtttggcgttttcgcccagtcaaagcctgacagtgccgagcccatggataggtctgcaatgtgcgcctttcctataaagtatgtcaatgacttcttcaacaaaatagtcaacaaaaataatgtccggtgcctccagcatttttatggccctaaccatgagcattgcttcaaccggacgctgctgcggaattcttccggatgcgaagcccgcagagatgagtacaggacagagttcacaaccgcactgcagagggtggatctgttcatgggtcagttttcagaggtcctactgactagcatctccacctttatcaagggtgacctgactatcgcaaacctcggtacaagcgaggggcgatttatgcaagtggtggtcagtagaagcggtccttctacacctcatgttaattttctgctcgattctcacccagtgtctcccgaagtgatcgtcgagcacaccctgaaccaaaatggctacaccctcgtgattactggaaagaagatcacaaaaatacctctgaacgggctgggctgtcgccattttcagagctgctctcagtgtctgtccgcaccgccattcgtccagtgcgggtggtgccatgataagtgcgtacgatctgaagaatgccttagtgggacctggactcaacagatctgtctaccggccatatacaaagtctttccaaacagcgcccctctggaagggggtactcgcctgactatctgtggctgggattttggattccggcgcaacaataaatttgatctcaagaagacgcgcgtactgttaggcaatgaaagttgcacactcacgctctccgaaagtactatgaacacactgaagtgcactgtgggacctgcaatgaataagcactttaacatgtccattatcatctctaacggacacggaaccacccagtatagtacattctcctacgtggaccctgtgatcactagcattagccccaagtacggtcctatggccgggggtaccctcctaaccctaactggtaactatttgaactctgggaactctagacacatttccatcggaggaaagacatgtaccctgaaatccgtttcaaatagcatcctggaatgctacacccctgcccagacgatttccaccgagtttgccgttaaacttaagatcgatctggccaatagagagacttccattttttcctatcgtgaagaccccatcgtatacgaaattcaccctaccaaatctttcatttccacttggtggaaagagccactgaatatcgtgagcttcttgttttgtttcgccagcggcggaagcaccatcaccggcgtggggaaaaatcttaacagcgttagcgtgcccagaatggtcattaatgtgcacgaggctgggcgcaatttcacagtagcctgtcaacatagatctaatagcgagatcatttgctgtacaaccccaagcctgcagcaactgaacctgcaactgcccttaaagaccaaggccttcttcatgctggatggaattctgtcaaagtacttcgatctcatttacgttcataatcccgtattcaaaccttttgaaaaaccggtgatgattagcatggggaacgagaacgtgctggaaatcaaaggaaatgatattgatcctgaggccgtgaagggggaggtgctcaaggtgggcaacaagtcctgcgaaaacatccatttacacagcgaggcagtgctttgcacagtgcccaatgatctgctaaaacttaattcagagctgaatatcgagtggaaacaggctatctcctcgacagtgttggggaaagtcatcgtccaacccgaccagaatttcacagggctcatcgcaggggtcgtgtcgattagcaccgccctcttgctgctgctgggctttttcctctggctcaaaaaacgtaagcaaattaaggatctgggtagcgaacttgtacgctatgacgccagagttcacacccctcaccttgaccgtctggtgtctgccaggagcgtgtctccgaccacagagatggtgtctaacgagtctgtagactatcgcgcaacattccccgaagaccagttccctaattcaagccaaaacggctcttgcaggcaggtgcagtaccccctgactgacatgagccccatccttacttctggagactctgatatatccagcccactccttcaaaacacggttcacatcgaccttagcgctttgaacccagagttagtccaggccgtgcagcatgtagtgattggtccctctagcttaattgtgcacttcaatgaagtgattgggcgtggtcatttcggttgcgtttatcacggtactctgcttgacaacgatggaaaaaagattcattgcgcagtaaagtcactcaaccgaataacggacatcggtgaagtgtctcagttcctcacggaggggattattatgaaggacttttcacaccccaatgtgctgtcactgctcgggatctgtctccgatctgagggatctccactggtggttcttccttacatgaagcacggtgacttgcgcaacttcatacgtaatgagacccacaacccgaccgtaaaggacctcataggttttggcctccaggtggccaaggggatgaaatatctggcgagtaagaaatttgtccaccgagatctggccgctcggaactgcatgcttgatgagaagttcacagtgaaggtagctgacttcggccttgccagagatatgtatgataaagagtattacagcgtacacaataaaactggagctaaactgcctgttaaatggatggcccttgagtcattacagacccagaagttcacaactaagtcagatgtctggagcttcggcgtcctgctttgggaactcatgaccaggggagccccaccttaccccgacgttaatacctttgacatcactgtctacctgctgcagggacgccggctgctgcaaccggaatattgtcctgatccattgtatgaggtcatgttaaagtgttggcaccccaaggctgaaatgaggccatctttctcggaactagtcagccgtatcagcgctatattctccacattcattggggaacactatgtacatgtcaacgccacctatgtcaacgtgaaatgtgtggcaccgtacccatctttactgtcttccgaagacaatgcggacgacgaggtagatacgaggccagcctctttttgggaaacgagctag

SEQ ID NO: 45027 - DNA, 2295 bp, Artificial Sequence
  derived and/or modified sequence
atgaaggcccccgccgtgctggcccccggcatcctggtgctgctgttcaccctggttcaacggtccaatggagagtgtaaagaggctctcgccaaatctgagatgaatgtgaatatgaagtaccagctgcccaacttcaccgcggaaactcctatccagaatgtgattttacacgagcatcatatattcctcggggccacaaactatatctacgtgctgaatgaagaagacctgcaaaaggtagcagaatataagaccggacccgtgctcgagcatcccgattgttttccctgccaagattgtagctctaaagcgaatctcagtgggggggtgtggaaggataacattaatatggccctggtggtcgacacgtattacgacgaccaactgatatcttgtgggtcagttaatcgtgggacatgccaaagacatgtttttcctcacaaccacaccgccgacattcagtcggaagtacactgtattttttcccctcaaatagaagaacctagccaatgccctgattgcgtggtgtcagcactcggagcgaaagttctgtcttcagtaaaggatcgatttatcaatttcttcgttgggaacaccatcaactccagttatttccctgaccatccgctgcactcaatttcagtgcggcggttaaaggaaactaaggacggctttatgttcctcaccgaccagtcttacatagacgtcctgcctgaattcagagactcctaccccattaaatatgtgcacgcttttgagagcaataatttcatttacttcctcaccgtgcagagagaaactctggatgcacaaacatttcatactagaatcatccggttctgttccatcaacagcggactacattcatacatggaaatgccgctggagtgcatccttacggagaagaggaagaagcgttctacaaagaaggaagtcttcaacatccttcaggctgcctatgtttccaaacccggggcacaactcgcacgccagatcggcgcgagtctgaacgacgatattcttttcggcgttttcgcccagtccaagccagattcagccgagccgatggaccgctcggcaatgtgtgcgttccctattaaatacgtcaatgacttcttcaacaaaattgtgaataaaaataacgtgaggtgtttacaacatttttacggaccgaatcatgagcactgctttaacagaacactcttgcgaaattcaagcggctgtgaagcacgcagggacgaatacagaacagaatttactactgccctgcaacgggtcgatttatttatggggcagttttcggaggtgttactgacttccattagcacgtttatcaagggggatctgactatcgccaatctgggtacttccgagggtcggtttatgcaggtggttgtttctaggagcgggccctcaacacctcacgtcaatttcctgctcgattcccacccagtgagtcctgaggtgattgtggagcacaccttgaaccagaacgggtataccttggttattacgggcaaaaagatcactaaaattccgcttaacggcctgggttgtaggcactttcagtcgtgcagccaatgtctttcagcgccaccttttgttcagtgcggttggtgccacgacaaatgcgtccgatcagaagagtgtctgagtggcacttggacccagcaaatctgtctccccgctatttacaaggtgttccccaattccgcccccctggaaggaggcacccgcttaacgatctgtggatgggactttggcttccggagaaacaacaagtttgacctgaagaagaccagagtcctgcttggcaatgaatcctgcactctgactctgtctgagagtaccatgaacactctgaaatgcaccgtcggcccagctatgaataaacatttcaacatgtcgatcattatctcaaacggtcacgggacaactcaatactctactttcagttacgtggaccctgtgattacctcgatatcccccaagtacggtccgatggctggaggcacactattaaccttgacaggtaattacctgaactcagggaactcccggcatatttctataggtggcaagacctgtaccctgaagtccgtgtccaattccatcctagagtgttacacgcctgcccagacaatttccactgagtttgcagtgaaactaaaaatcgacctggccaatagggaaacctccatcttttcctatagggaggatcccatagtatatgaaatacatccaacaaagagtttcatccggcatgtgaatattgcgctgatacagaggtag

SEQ ID NO: 45028 - DNA, 4227 bp, Artificial Sequence
  derived and/or modified sequence
atgaaggccccagccgttctggctcctggcatcctcgtactgcttttcaccctggttcagcgcagcaacggtgagtgtaaggaggccctggcaaagtcagagatgaacgtgaacatgaaatatcagctcccaaatttcaccgcggaaaccccaatccagaacgtgatcctccacgagcatcatatatttctcggcgcaactaattacatttacgtcctcaacgaggaagatctgcagaaggtcgccgagtacaagactggacccgtgctggaacatccagattgctttccgtgccaggattgtagctccaaggctaatttatcaggaggagtatggaaggataatatcaatatggccctcgtcgtcgacacctactacgatgaccagttaatttcttgcggctccgtcaaccggggaacatgtcagcgccatgtgtttcctcataatcacaccgctgatatccagagcgaggtccattgcattttcagcccgcagatcgaggaaccctcccagtgtcctgactgcgttgtttctgcgctgggagcaaaggtcttgagtagcgtgaaggataggttcatcaattttttcgttggtaacaccataaattccagttactttccagatcaccctttacacagcatctctgttcggaggcttaaggagaccaaggatggattcatgttcctgaccgaccagtcctatatcgacgttctccccgaattcagagacagttaccctatcaagtacgtgcacgccttcgagtcaaacaacttcatttatttcttaacagtgcagcgagaaaccttggatgcacagacctttcatactcgcattatacgtttttgctcaatcaatagcgggctccacagttacatggagatgcctttggaatgtattttaaccgagaaacgtaagaagcggtccacaaagaaggaggtcttcaatatcctacaggcagcgtacgttagtaaacctggagcccaactggcgagacagattggcgcatcgctcaacgatgatattctgtttggcgtatttgctcagtctaaacccgacagcgccgagcctatggacaggagtgcaatgtgcgccttccctattaaatacgtgaatgactttttcaacaaaatcgtgaacaagaacaacgtgaggtgtctgcagcatttctatggccctaaccacgagcactgtttcaaccgcactttactgagaaatagttccggctgtgaggcccgaagagacgaatacagaaccgaattcactactgccctgcagcgggtggacctattcatgggacaattcagcgaggtgctgctcacttccatcagtacctttattaagggagacctcaccattgctaacttgggcaccagcgagggacgattcatgcaagttgtcgtgtctcggtctggaccaagcacacctcacgtgaactttcttctggattcccatccggtcagtcctgaggtgattgtggagcataccctgaaccagaacggatatacattggttatcacaggaaagaagattaccaagatccccctcaacggcctgggctgccgccattttcaatcatgtagccagtgtcttagcgctcctcctttcgttcagtgtggctggtgccacgacaaatgcgtgaggagtgaagaatgtctcagcggcacctggactcaacagatttgtctccctgcaatctacaaagtgtttccaaattccgccccactggagggagggacaaggctaactatctgtggttgggacttcggctttaggcgaaataacaagtttgatctgaaaaaaaccagagtcctgctaggcaacgaatcatgtaccctcacacttagtgaaagcacaatgaataccctgaagtgcactgttggacctgccatgaataaacacttcaacatgtctattatcatttcaaatggccacggaacaacgcagtactcgacattcagttatgtggacccagtcataacctctatctcacccaagtacggacccatggctggcggtaccctgctgacattgactggcaactatctcaatagcggtaactctaggcacattagcataggtgggaaaacctgtacgctgaagtctgtctcaaatagcatactggagtgctacaccccagcacaaaccatttcgacggagtttgccgtgaaattaaagattgacctcgcaaatagagaaacatcaatcttctcttacagggaggacccgatcgtctacgaaattcaccctaccaaaagctttatctccacatggtggaaagagcctttaaatatcgtttcattcttgttttgtttcgcatcaggaggaagcacgattactggagtgggtaagaacctgaattccgtaagtgtgccccgaatggttataaacgtgcacgaggccggacgcaacttcactgtagcgtgtcagcacagaagtaacagtgaaattatttgctgtacaacaccctccttacagcagctgaatcttcagcttccccttaagaccaaagcattttttatgttggacggaatcctatcaaaatactttgatctcatttacgtgcacaatccggtcttcaagccttttgaaaagcctgtgatgatcagcatgggcaatgagaacgtcctcgagattaagggaaacgacatcgaccctgaggcagtgaagggagaagttcttaaggtcggcaacaaaagctgtgagaacatccacctccacagtgaggccgttctctgcactgtgccaaatgatctgctgaaacttaattcggaattaaacatcgaatggaaacaggctatctcttccaccgtcttggggaaagtcatagtgcagcctgaccagaacttcactggcctgatcgccggtgttgtatcaatctctaccgccctcttactgctgctgggtttcttcctgtggctgaagaagcggaaacagatcaaagatctggggtccgaattggttcgatacgacgctagggtgcacacccctcatcttgatcgactcgtaagcgctagaagcgtctctcccacgacagagatggtgtccaatgaaagcgtggattacagggccacctttccagaagatcagtttcctaactcatctcaaaacggcagctgtcgtcaagtgcagtacccattgaccgatatgagtcctatcctcacaagtggcgatagcgacatcagctcacccctgctccagaacactgtgcatattgacctgtcggcactcaatcccgagttggtccaggccgtgcagcacgtggtgataggcccaagtagcctcatcgtgcatttcaacgaggttatcggaaggggccactttggctgcgtataccacggcactttgctcgacaacgatggtaagaagatccactgtgctgtaaagagtctaaaccgaatcaccgacatcggcgaggtgtctcagtttttgactgagggaatcatcatgaaagacttttctcaccctaacgtgcttagcctgctgggaatttgtctccgtagtgaagggagtccactggtagtcctgccctacatgaagcacggagacctgagaaatttcatccgcaatgaaacacacaaccccacggtcaaggatcttattggttttggcttacaagtggcaaaaggcatgaagtacttagcctctaagaaattcgtgcatcgagacctggccgctagaaactgcatgcttgatgagaagtttacagtgaaggttgccgatttcggtttggcacgagacatgtacgacaaggagtactacagtgtgcacaacaaaacgggcgctaagctacctgtgaagtggatggcgcttgagagtctacagacacagaaattcactacaaagagtgacgtgtggtccttcggagtgctgctttgggagcttatgaccagaggtgcacctccttatccggatgtgaacacttttgatattacggtgtacttattgcagggcagaaggctgcttcagccagaatactgcccagacccactgtacgaagtcatgctgaagtgttggcaccctaaagctgaaatgagaccaagcttcagcgagttggtgagcaggatcagcgcaatcttcagtacattcatcggcgaacactacgttcatgtgaatgctacatacgtaaacgtcaagtgcgtggcgccttatccttcgctactatccagcgaagataatgctgatgatgaggtggatacccgaccagctagtttttgggagacgagttag

SEQ ID NO: 45029 - DNA, 2295 bp, Artificial Sequence
  derived and/or modified sequence
atgaaggccccagccgtcctggcccctggaatactggtcctgctctttacactcgttcagcggagcaacggagaatgtaaggaggcactcgccaaatctgagatgaacgtaaacatgaaataccaactacctaatttcactgcagagactccaattcaaaacgtgatactgcacgagcatcacattttcttgggcgctactaactacatttatgtgcttaatgaagaagacctgcagaaggtggccgagtacaagacgggccctgttctggagcacccagactgctttccctgccaggattgtagcagtaaggctaacctttcaggcggtgtgtggaaggacaacataaatatggctttggttgtggacacttattacgatgaccaactgataagttgcggtagtgtgaatcggggtacatgtcaaagacacgtcttccctcacaaccacaccgcggacatccagtccgaagtgcattgcattttctcccctcagattgaggaacccagccaatgcccagactgcgtggtctccgccttgggtgccaaagtgctctcgtctgtcaaggatcggtttataaatttcttcgtgggcaacacaatcaactctagctattttccagaccaccccctccactctatctccgtgcggcgactcaaggagactaaggacggattcatgttcctcactgatcagtcctatatcgatgtcctacctgaattccgagattcatatcctatcaaatatgtgcatgcatttgaaagtaataattttatctactttttgacagtccagcgcgagactttggacgcccagacgtttcatactagaattattagattctgctctattaactccggactgcatagctacatggagatgccattggagtgcatcctgacagagaagagaaaaaaacggtctaccaaaaaagaggtgttcaatatcctgcaagcggcatacgtatccaaaccgggtgcacagcttgcaagacagatcggagcatcccttaatgacgatatcctgttcggcgtctttgcccagtcaaaacccgacagtgccgaaccgatggatagaagtgccatgtgcgctttccccatcaagtacgtgaacgattttttcaacaaaatcgttaacaagaacaacgttcggtgtctgcaacatttctacggccctaaccacgaacattgtttcaataggacactcctgcggaattcaagcggctgtgaggcccgacgggacgagtacaggaccgagttcaccaccgcactgcagcgggtggacctgtttatggggcaattcagtgaagtgctcctcaccagcatttctacttttatcaagggagacctgaccattgctaatctcgggaccagtgagggccgattcatgcaggtcgttgtcagtcggagcggcccatccacgccccatgtgaactttctgttagactcgcaccctgtgagtccagaagtgatcgtggagcataccttgaatcagaatggttataccttagtgatcacagggaagaaaatcacgaaaataccgctgaatgggcttggctgccgacacttccagagctgtagccagtgtcttagcgcgccacccttcgtgcagtgtggatggtgtcatgacaagtgcgtgagatcagaggaatgtcttagtgggacatggacacagcaaatttgtttaccagccatctataaggtgtttcccaattctgcccctttggaagggggaacgcgcctgacaatctgcggctgggattttggttttagacggaacaacaaatttgatttaaagaagacaagggtactgctaggaaacgaatcctgcacgttaactttgtcggaatccaccatgaacacactgaagtgcacagtcggccctgctatgaataagcacttcaacatgtccataattatcagcaatggtcatggaacaacccagtactcgacattttcttacgtagacccggttatcaccagtatatctccaaaatacggcccaatggctggcggaacactcctgaccttgactggtaattatctaaactcaggaaatagtaggcacatctccatcggaggtaagacctgcaccctgaagtccgtgtcaaatagtatccttgaatgttacaccccagctcagaccatctccactgaatttgccgtgaagctaaagattgacctggccaaccgcgagacctcaatcttcagctacagggaagacccaattgtgtacgagattcaccctacaaagtccttcatccgccacgtgaatatcgcgctcattcagcggtag

SEQ ID NO: 45030 - protein, 389 aa, Artificial Sequence
  derived and/or modified sequence
MNCCIGLGEKARGSHRASYPSLSALFTEASILGFGSFAVKAQWTEDCRKSTYPPSGPTVFPAVIRYRGAVPWYTINLDLPPYKRWHELMLDKAPVPGLLGNFPGPFEEEMKGIAAVTDIPLGEIISFNIFYELFTICTSIVAEDKKGHLIHGRNMDFGVFLGWNINNDTWVITEQLKPLTVNLDFQRNNKTVFKASSFAGYVGMLTGFKPGLFSLTLNERFSINGGYLGILEWILGKKDVMWIGFLTRTVLENSTSYEEAKNLLTKTKILAPAYFILGGNQSGEGCVITRDRKESLDVYELDAKQGRWYVVQTNYDRWKHPFFLDDRRTPAKMCLNRTSQENISFETMYDVLSTKPVLNKLTVYTTLIDVTKGQFETYLRDCPDPCIGW

SEQ ID NO: 45031 - DNA, 1167 bp, Artificial Sequence
  derived and/or modified sequence
atgaactgctgcatcggcctgggcgagaaggcccgcggcagccaccgcgccagctaccccagcctgagcgccctgttcaccgaggccagcatcctgggcttcggcagcttcgccgtgaaggcccagtggaccgaggactgccgcaagagcacctacccccccagcggccccaccgtgttccccgccgtgatccgctaccgcggcgccgtgccctggtacaccatcaacctggacctgcccccctacaagcgctggcacgagctgatgctggacaaggcccccgtgcccggcctgctgggcaacttccccggccccttcgaggaggagatgaagggcatcgccgccgtgaccgacatccccctgggcgagatcatcagcttcaacatcttctacgagctgttcaccatctgcaccagcatcgtggccgaggacaagaagggccacctgatccacggccgcaacatggacttcggcgtgttcctgggctggaacatcaacaacgacacctgggtgatcaccgagcagctgaagcccctgaccgtgaacctggacttccagcgcaacaacaagaccgtgttcaaggccagcagcttcgccggctacgtgggcatgctgaccggcttcaagcccggcctgttcagcctgaccctgaacgagcgcttcagcatcaacggcggctacctgggcatcctggagtggatcctgggcaagaaggacgtgatgtggatcggcttcctgacccgcaccgtgctggagaacagcaccagctacgaggaggccaagaacctgctgaccaagaccaagatcctggcccccgcctacttcatcctgggcggcaaccagagcggcgagggctgcgtgatcacccgcgaccgcaaggagagcctggacgtgtacgagctggacgccaagcagggccgctggtacgtggtgcagaccaactacgaccgctggaagcaccccttcttcctggacgaccgccgcacccccgccaagatgtgcctgaaccgcaccagccaggagaacatcagcttcgagaccatgtacgacgtgctgagcaccaagcccgtgctgaacaagctgaccgtgtacaccaccctgatcgacgtgaccaagggccagttcgagacctacctgcgcgactgccccgacccctgcatcggctgg

SEQ ID NO: 45032 - DNA, 1170 bp, Artificial Sequence
  derived and/or modified sequence
atgaactgctgcatcggcctgggcgagaaggccagaggcagccacagagccagctaccccagcctgagcgccctgttcaccgaggccagcatcctgggcttcggcagcttcgccgtgaaggcccagtggaccgaggactgcagaaagagcacctacccccccagcggccccaccgtgttccccgccgtgatcagatacagaggcgccgtgccctggtacaccatcaacctggacctgcccccctacaagagatggcacgagctgatgctggacaaggcccccgtgcccggcctgctgggcaacttccccggccccttcgaggaggagatgaagggcatcgccgccgtgaccgacatccccctgggcgagatcatcagcttcaacatcttctacgagctgttcaccatctgcaccagcatcgtggccgaggacaagaagggccacctgatccacggcagaaacatggacttcggcgtgttcctgggctggaacatcaacaacgacacctgggtgatcaccgagcagctgaagcccctgaccgtgaacctggacttccagagaaacaacaagaccgtgttcaaggccagcagcttcgccggctacgtgggcatgctgaccggcttcaagcccggcctgttcagcctgaccctgaacgagagattcagcatcaacggcggctacctgggcatcctggagtggatcctgggcaagaaggacgtgatgtggatcggcttcctgaccagaaccgtgctggagaacagcaccagctacgaggaggccaagaacctgctgaccaagaccaagatcctggcccccgcctacttcatcctgggcggcaaccagagcggcgagggctgcgtgatcaccagagacagaaaggagagcctggacgtgtacgagctggacgccaagcagggcagatggtacgtggtgcagaccaactacgacagatggaagcaccccttcttcctggacgacagaagaacccccgccaagatgtgcctgaacagaaccagccaggagaacatcagcttcgagaccatgtacgacgtgctgagcaccaagcccgtgctgaacaagctgaccgtgtacaccaccctgatcgacgtgaccaagggccagttcgagacctacctgagagactgccccgacccctgcatcggctggtag

SEQ ID NO: 45033 - DNA, 1170 bp, Artificial Sequence
  derived and/or modified sequence
atgaactgctgcatcggccttggtgagaaggctcgcggatcacatcgtgcctcctaccccagcttgtcggctcttttcacagaggcttcaattctaggcttcggctctttcgctgtgaaagcccagtggacagaggactgcagaaaaagcacgtatccacctagtggtcccaccgtttttccagccgtaattaggtatcgaggagctgtgccttggtacacaatcaatcttgacctcccgccttataagaggtggcatgagctgatgctggacaaagctcctgtgcccgggctactgggaaactttcctgggcccttcgaggaggagatgaaaggcatcgccgcggttaccgacattcccttgggagagatcatcagtttcaatattttctacgagctcttcactatctgcaccagcatcgtggccgaagataaaaaaggacacctcatccacggccgtaatatggatttcggcgtttttctgggatggaacatcaataacgatacatgggtcattaccgagcagctcaagcctctaaccgtaaatctggattttcaacggaacaacaaaaccgtctttaaggcttcctctttcgcaggttatgtcgggatgctgacgggatttaaaccagggctgttcagtcttaccttaaacgagcggttttctataaatgggggctatcttggcatacttgaatggatcctgggtaagaaggatgtgatgtggatcggtttcttaacccgaactgtgttggagaactctacttcctacgaggaggcaaaaaatctgctgaccaaaaccaagatcctggcacccgcctattttatcctgggaggcaatcagtctggcgaggggtgcgtgatcaccagagacagaaaagagtctctcgatgtatacgagttggatgcaaagcagggcaggtggtacgtcgtccaaaccaattacgatagatggaaacatcccttctttctggatgacaggcgaacacccgcaaaaatgtgtctgaaccgcacatcccaggaaaacatttcattcgagacgatgtatgatgtcctgtctaccaaacccgtgctgaacaaattgacagtctataccaccttaattgacgtgacaaagggccagttcgagacatacctccgtgattgtcccgatccttgcatcggatggtag

SEQ ID NO: 45034 - DNA, 1170 bp, Artificial Sequence
  derived and/or modified sequence
atgaactgctgcatcggcctgggggagaaggcccggggcagccaccgggccagctaccccagcctgagcgccctcttcacagaggccagcatcctgggcttcggcagctttgctgtgaaggcccagtggacagaggactgcaggaagagcacctacccaccttctggccccaccgtcttccctgctgtgatccgctacagaggagctgtgccctggtacaccatcaacctggacctgcccccctacaagcgctggcatgagctgatgctggacaaggcccctgtgcccggcctgctgggcaacttccctggcccctttgaggaggagatgaagggcattgctgctgtgacagacatccccctgggggagatcatctccttcaacatcttctatgagctgttcaccatctgcaccagcatcgtggccgaggacaagaagggccacctgattcatggaagaaacatggactttggagtcttcctgggctggaacatcaacaatgacacctgggtgatcacagagcagctgaagcccctgactgtgaacctggacttccagaggaacaacaagacagtgttcaaggccagcagctttgctggctacgtgggcatgctgaccggcttcaagccaggcctcttcagcctgaccctgaatgaacgcttcagcatcaatggaggctacctgggcatcctggagtggatcctgggcaagaaggatgtgatgtggattggcttcctgaccaggacagtgctggagaacagcaccagctatgaggaggccaagaacctgctgaccaagaccaagatcctggccccagcctacttcatcctgggcggcaaccagagcggggagggctgcgtcatcacccgggacaggaaggagagcctggatgtgtatgagctggatgccaagcagggccgctggtacgtggtgcagaccaactatgaccgctggaagcaccccttcttcctggatgacaggaggaccccagccaagatgtgcctgaacagaaccagccaggagaacatcagctttgagaccatgtatgatgtgctgagcaccaagcctgtgctgaacaagctgactgtgtacaccaccctgattgatgtgaccaagggccagtttgagacctacctgcgggactgcccagacccctgcatcggctggtag

SEQ ID NO: 45035 - DNA, 1170 bp, Artificial Sequence
  derived and/or modified sequence
atgaactgctgcatcggcctgggcgagaaggcccggggcagccacagagctagttacccatccctctccgcgctgtttaccgaagcaagtatcctcggctttggcagcttcgccgtcaaagctcaatggacagaagattgtcggaagagtacttatcccccctccgggcccacagtgtttcctgcagttatccgctatagaggggctgtgccatggtatacaattaatctagacctgcctccatacaagcgatggcatgaattgatgctagataaggcgccagtccctggcttgctggggaatttccctggacccttcgaggaggaaatgaaaggcattgctgccgtaacggacatccccttgggcgaaataatatctttcaatatcttttacgagttgttcacgatttgcactagcatcgttgccgaggataagaagggccatctcatacacggaagaaatatggacttcggagtctttctcggctggaatataaataacgacacctgggttatcaccgagcaactgaagcctctcaccgtaaatctggatttccaaagaaataacaaaacagttttcaaagcatccagctttgccggctacgtgggcatgttgactggattcaaaccagggctgttcagccttactcttaatgaacgcttctcaattaacggaggctatctgggaattctggagtggatcctggggaaaaaggacgtgatgtggatcgggtttctgactcgcacggttctggaaaacagcacttcctatgaagaagccaaaaacttgctgaccaaaaccaagatcctggccccagcttacttcattctcggcggcaaccagagtggtgaaggctgtgtaattaccagagatcggaaagaatccctagacgtttatgaactggatgccaagcagggcagatggtatgtggttcagacaaattacgatagatggaagcaccctttctttctggacgaccggcgcacgccggccaaaatgtgcctgaaccgcaccagccaggagaatatatcttttgagacaatgtacgatgtgctgagcactaaaccagtcctgaataagctgacggtttacacaacactaatcgatgtgaccaagggccagttcgagacgtatttacgcgattgtccagatccatgtattggatggtag

SEQ ID NO: 45036 - DNA, 1170 bp, Artificial Sequence
  derived and/or modified sequence
atgaattgttgtattggacttggcgaaaaggctagaggtagtcacagggcctcctacccttcacttagcgctctcttcacagaggcgagcatcctgggcttcggcagttttgctgtcaaggctcagtggaccgaggattgtcggaaatctacttatccgccaagtggcccaaccgtgtttcctgccgtgattcgctacaggggagccgtgccatggtacaccattaacctggaccttcccccttataagcggtggcacgaactgatgttggacaaagccccagtacctggactcctcggaaattttccagggccatttgaagaagagatgaagggaatcgccgcagtgacagacatcccgctgggcgagatcattagcttcaacatcttttatgaacttttcaccatctgcacaagtatcgtggcagaagataaaaaaggacacctgatccatgggagaaacatggatttcggggtctttctgggttggaacataaataacgacacttgggtcattaccgagcagctaaaaccgctgactgtgaacttggatttccagcggaacaataagaccgtttttaaggcaagctcatttgcaggctacgtgggaatgctcactggttttaaacccggacttttcagcctcaccctcaatgagagattttctatcaatgggggttatctgggtatcctggagtggattttaggtaagaaggatgtaatgtggattggctttcttactaggaccgtgctagaaaacagtactagctacgaggaggcaaagaatctcctgacaaaaacaaagattctcgccccagcgtatttcatcttggggggtaaccaaagtggtgaaggctgcgtcattacaagagacaggaaggaatccttggacgtatatgagctggacgccaagcaagggaggtggtatgtggtgcagactaactacgaccgatggaaacaccctttttttctagacgatcggaggaccccagcaaagatgtgtttaaatcggacttcacaggagaacatttccttcgagaccatgtatgatgtactgagtactaagcctgtgctcaataagctcacggtctataccaccctcattgatgtcactaaaggacagttcgaaacctatttgcgtgattgccctgatccgtgcatcggatggtag

SEQ ID NO: 45037 - DNA, 1690 bp, Artificial Sequence
  derived and/or modified sequence
gggcaggatttcctgctggactttgaaatccaacccggtcacctacccgcgcgactgtgtccacggatggcacgaaagccaagcgagtccccctgccgagctactcgcgtccgcctcctcccaagctgagctctgctccgcccacctgagtccttcgccagttaggaggaaacacagccgcttaatgaactgctgcatcgggctgggagagaaagctcgcgggtcccaccgggcctcctacccaagtctcagcgcgcttttcaccgaggcctcaattctgggatttggcagctttgctgtgaaagcccaatggacagaggactgcagaaaatcaacctatcctccttcaggaccaactgtcttccctgctgttataaggtacagaggtgcagttccatggtacaccataaatcttgacttaccaccctacaaaagatggcatgaattgatgcttgacaaggcaccagtgcctggcctacttggcaactttcctggcccttttgaagaggaaatgaagggtattgccgctgttactgatatacctttaggagagattatttcattcaatattttttatgaattatttaccatttgtacttcaatagtagcagaagacaaaaaaggtcatctaatacatgggagaaacatggattttggagtatttcttgggtggaacataaataatgatacctgggtcataactgagcaactaaaacctttaacagtgaatttggatttccaaagaaacaacaaaactgtcttcaaggcttcaagctttgctggctatgtgggcatgttaacaggattcaaaccaggactgttcagtcttacactgaatgaacgtttcagtataaatggtggttatctgggtattctagaatggattctgggaaagaaagatgtcatgtggatagggttcctcactagaacagttctggaaaatagcacaagttatgaagaagccaagaatttattgaccaagaccaagatattggccccagcctactttatcctgggaggcaaccagtctggggaaggttgtgtgattacacgagacagaaaggaatcattggatgtatatgaactcgatgctaagcagggtagatggtatgtggtacaaacaaattatgaccgttggaaacatcccttcttccttgatgatcgcagaacgcctgcaaagatgtgtctgaaccgcaccagccaagagaatatctcatttgaaaccatgtatgatgtcctgtcaacaaaacctgtcctcaacaagctgaccgtatacacaaccttgatagatgttaccaaaggtcaattcgaaacttacctgcgggactgccctgacccttgtataggttggtgagcacacgtctggcctacagaatgcggcctctgagacatgaagacaccatctccatgtgaccgaacactgcagctgtctgaccttccaaagactaagactcgcggcaggttctctttgagtcaatagcttgtcttcgtccatctgttgacaaatgacagatcttttttttttccccctatcagttgatttttcttatttacagataacttctttaggggaagtaaaacagtcatctagaattcactgagttttgtttcactttgacatttggggatctggtgggcagtcgaaccatggtgaactccacctccgtggaataaatggagattcagcgtg

SEQ ID NO: 45038 - protein, 652 aa, Artificial Sequence
  derived and/or modified sequence
MLPAAPGKGLGSPDPAPCGPAPPDSEDYFEVNIPTDLRAKHSGEISERKEIEELSEASRNTIPLAVVLPTEIPCENPGEIFIILRDEVIGDTVEVEFTSSNKRIRTRPALWNKKVWCMKALEFPAGSVHVNVYCDGIVKATTKIKYYPTAKAKECLFRMADSGESLCQNSIEELDGVLTSIFKHEIPYYEFQSLQTEICSQNKYTHFKELPTLLHCAAKFGLKNLAIHLLQCSGATWASKMKNMEGSDPAHIAERHGHKELKKIFEDFSIQEIDINNEQENDYEEDIASFSTYIPSTQNPAFHHESRKTYGQSADGAEANEMEGEGKQNGSGMETKHSPLEVGSESSEDQYDDLYVFIPGADPENNSQEPLMSSRPPLPPPRPVANAFQLERPHFTLPGTMVEGQMERSQNWGHPGVRQETGDEPKGEKEKKEEEKEQEEEEDPYTFAEIDDSEYDMILANLSIKKKTGSRSFIINRPPAPTPRPTSIPPKEETTPYIAQVFQQKTARRQSDDDKFCGLPKKQDRARIESPAFSTLRGCLTDGQEELILLQEKVKNGKMSMDEALEKFKHWQMGKSGLEMIQQEKLRQLRDCIIGKRPEEENVYNKLTIVHHPGGKETAHNENKFYNVHFSNKLPARPQVEKEFGFCCKKDH

SEQ ID NO: 45039 - DNA, 1959 bp, Artificial Sequence
  derived and/or modified sequence
atgctgcctgccgcacccgggaaaggccttggctcccccgacccagcaccctgcggtcccgctccgcctgattccgaggattatttcgaggtgaatattccaactgatctacgggcaaagcactcgggtgagatttccgagcgcaaggagatcgaggagttgagcgaagcttcccgcaacaccatcccgctagccgtggtccttcctacagagataccttgtgagaatccaggggaaatttttatcatcctgcgggacgaggtgatcggggacaccgtggaggtcgagttcactagttctaataaacgcattaggaccagaccagcgttgtggaacaagaaggtttggtgcatgaaagccctcgagttccctgctggcagtgtgcacgtgaacgtctactgcgatgggatagtcaaggccacaaccaaaatcaagtactacccgaccgccaaggcgaaagaatgtttgttcaggatggccgacagcggggaaagcctgtgccagaactccatcgaggaactcgacggcgtgctaaccagtatcttcaagcacgaaatcccatattacgaatttcaatccctgcagactgaaatatgtagccagaataaatacacccacttcaaggagcttccgacactgttgcactgcgccgccaaattcggacttaagaatctggccatccacttattacaatgtagtggcgcaacatgggcttcgaagatgaaaaacatggaagggtcggaccctgcacatatcgcagagagacatggacacaaggagctgaagaaaattttcgaagatttttccatacaggagatcgacatcaacaacgagcaggagaatgattatgaggaagatattgcttccttctcgacctatatcccttccacacagaaccctgctttccatcacgaaagtcggaagacatacggtcagtctgccgatggggcggaggctaacgagatggaaggcgaaggaaagcagaatggaagcggaatggaaacgaaacactcgcctttagaggtgggtagcgaaagcagtgaggatcagtacgacgatctatacgtgtttatcccgggagccgaccctgagaacaattctcaagaacctttaatgtcttcccggcctcctctaccgcctccaaggcccgttgccaatgccttccagctcgaacgaccccacttcacccttcctggcacaatggttgagggccaaatggagcgaagccagaattgggggcacccaggtgtgcgtcaggagaccggcgatgagcccaagggagagaaagaaaaaaaagaggaggagaaggaacaggaggaggaagaggacccatacaccttcgccgagatcgatgacagcgaatacgacatgatattagctaacctgagcatcaagaagaagaccggaagccggtctttcatcattaaccggcctcctgctccaaccccacgacctaccagcattcctccgaaagaagaaaccaccccctacatcgcacaggtattccaacagaaaactgcccggagacaatctgacgacgacaaattctgtggtctgcccaaaaagcaggatcgggcgcgaattgagtctcccgccttttctaccctccgtggctgcctgactgacggacaagaggaactgattctgctgcaagagaaggtaaagaacggcaagatgtcaatggatgaggcacttgaaaaatttaagcactggcagatgggtaaatcaggccttgaaatgattcaacaggagaaactgagacagctgagggactgtatcatagggaaacggcctgaggaagaaaatgtgtataacaagttaacaattgtgcatcaccctggcgggaaggagactgcccacaatgagaacaaattctacaacgtgcacttctccaacaagctgcctgcccggccccaagtggaaaaggagttcgggttctgctgtaaaaaggatcattag

SEQ ID NO: 45040 - DNA, 1959 bp, Artificial Sequence
  derived and/or modified sequence
atgctgcccgctgccccaggtaaaggcctcgggtccccagatccagctccctgcggcccagctccgcctgactccgaggattattttgaggtcaacatcccaactgatctccgcgcaaaacattccggcgaaatctcagaacgcaaagagatcgaagagctgtcagaagcatctaggaataccattcccctcgccgtggtcctgccaaccgagataccatgtgagaatcctggggaaatctttattattctgcgcgatgaagtgattggggatacagtggaagtcgagttcacatctagcaataagagaataagaacaagaccagcactttggaataagaaggtgtggtgcatgaaagccttggagttcccagccggcagcgtgcacgtaaacgtatactgcgacggcatcgtaaaagctaccacaaaaatcaaatactaccccacagccaaagccaaagagtgtctattcagaatggccgacagcggagaatccctgtgccagaattctattgaagagctcgacggagtcttaactagtatctttaaacacgagatcccgtactacgaattccagagcctgcagaccgagatttgttcccagaacaagtatacccactttaaagagctccctacgttattacattgtgccgcaaagttcgggctgaaaaacttggccatacatttgttgcagtgtagcggagctacttgggcatcaaaaatgaagaatatggaggggagtgatcccgcccacatcgcagagagacatggccacaaagaactgaagaagattttcgaggactttagtatacaggagatcgacatcaataacgaacaagaaaatgactacgaggaggacatcgcaagtttttccacctacataccttccactcaaaaccctgcctttcaccatgaaagccgcaaaacctacggtcagtctgctgatggagctgaagccaatgaaatggagggagagggtaaacagaatggcagtggaatggagaccaaacactctcctctggaggttggctcggaatcctcagaagatcaatacgacgacctctacgtgttcatacctggcgctgatccagaaaacaattcacaggagcctttaatgagttctcgaccgccactgcctcccccaagacctgttgccaatgcatttcaactggaacgcccgcactttacccttccaggaaccatggtggaaggacaaatggaacgatcacaaaactggggccaccctggggtcaggcaggagacaggggatgaaccaaagggcgagaaagagaaaaaggaagaggaaaaggagcaggaagaggaggaagacccctacacgtttgctgagatcgatgattccgagtacgatatgattttggcaaatctttcaatcaagaaaaagaccggcagtcgatcattcatcatcaataggccccctgcaccaactcctcgaccaacatccattccacctaaagaagagactacaccttatatcgcacaggtgtttcaacaaaagactgcccgccgacagtccgatgatgacaaattctgtggactccctaaaaagcaagatagagcacggatcgaaagcccagccttcagtaccctgcgaggttgcctgaccgatggtcaggaggaactcatccttctgcaggaaaaggtcaagaacggcaagatgtccatggatgaggccctggaaaagtttaaacactggcagatgggcaagtcaggactggagatgatccaacaggagaaattgaggcaactgagggactgtataattggcaaacgaccagaggaagagaacgtttacaacaagctgaccatagtacatcatccaggcggtaaggagacagctcataacgagaataaattttacaacgtccatttcagcaacaagcttcctgctcgcccccaggtcgagaaggaatttggcttctgttgtaaaaaggatcattag

SEQ ID NO: 45041 - DNA, 1959 bp, Artificial Sequence
  derived and/or modified sequence
atgctgcctgctgcccctgggaagggcctgggcagcccagaccctgccccctgtggccctgcccccccagattctgaggactactttgaggtgaacatccccacagacctgcgggccaagcacagcggggagatcagcgagaggaaggagattgaggagctgtctgaggccagcaggaacaccatccccctggccgtggtgctgcccacagagatcccctgtgaaaatcctggagagatcttcatcatcctgagagatgaggtgattggagacacagtggaggtggagttcaccagcagcaacaagaggatccgcaccaggcctgccctgtggaacaagaaggtgtggtgcatgaaggccctggagttccctgctggctctgtgcacgtgaatgtgtactgtgatggcatcgtgaaggccaccaccaagatcaagtactaccccacagccaaggccaaggagtgcctcttcaggatggctgacagcggggagagcctgtgccagaacagcattgaggagctggatggagtgctgaccagcatcttcaagcatgagatcccctactatgagttccagagcctgcagacagagatctgcagccagaacaagtacacccacttcaaggagctgcccaccctgctgcactgtgccgccaagtttggcctgaagaacctggccatccacctgctgcagtgcagcggggccacctgggccagcaagatgaagaacatggagggcagtgaccctgcccacatcgccgagcggcacggccacaaggagctgaagaagatctttgaggacttcagcatccaggagattgacatcaacaatgagcaggagaatgactatgaagaagatattgccagcttcagcacctacatccccagcacccagaacccagccttccaccacgagagcaggaagacctacggccagagcgcagatggagctgaggccaatgagatggagggggagggcaagcagaatggaagtggcatggagaccaagcacagccccctggaggtgggcagcgagagcagcgaggaccagtatgatgacctgtatgtgttcatccctggagctgaccctgagaacaacagccaggagcccctgatgagcagccggccccccctgcccccacccaggcctgtggccaatgccttccagctggagcggccccacttcaccctgcccggcaccatggtggagggccagatggagaggagccagaactggggccaccctggggtgcggcaggagactggagatgagcccaagggggagaaggagaagaaggaggaggagaaggagcaggaggaggaggaggacccctacacctttgctgagattgatgattctgaatatgacatgatcctggccaacctgagcatcaagaagaagacaggcagccgctccttcatcatcaaccggcccccagcccccaccccccggcccaccagcatcccccccaaggaggagaccaccccctacatcgcccaggtgttccagcagaagacagcccggcggcagagtgatgatgacaagttctgtggcctgcccaagaagcaggaccgggcccgcatcgagagccctgccttcagcaccctgcggggctgcctgacagatggccaggaggagctgatcctgctgcaggagaaggtgaagaatggcaagatgtccatggatgaggccctggagaagttcaagcactggcagatgggcaagagcggcctggagatgatccagcaggagaagctgcggcagctgcgggactgcatcatcggcaagaggcctgaggaggagaatgtgtacaacaagctgaccatcgtgcaccaccctgggggcaaggagacagcccacaatgaaaacaagttctacaacgtgcacttcagcaacaagctgcctgcccggccccaggtggagaaggagtttggcttctgctgcaagaaggaccactag

SEQ ID NO: 45042 - DNA, 1959 bp, Artificial Sequence
  derived and/or modified sequence
atgctgcccgccgcccccggcaagggcctgggcagccccgaccccgccccctgtggcccagcccccccagattcagaggattactttgaagtgaatattcccacagatctccgcgcaaaacatagcggagagatcagcgaacggaaggaaattgaggaactgagcgaggcatccaggaacactatcccactagcagtggtactgcctacagaaatcccatgcgagaaccccggagagatttttatcatcctacgggacgaggtgatcggcgatacagtggaggtcgaatttacttccagcaataagcggattcgcactaggccggccttgtggaataagaaggtgtggtgcatgaaagctctggagttccccgccggatcagtccacgttaatgtctactgtgatggaatcgtcaaggccactacgaagatcaaatactatcccactgcaaaggccaaagaatgcttattcagaatggctgattcgggggaatccctttgtcagaattccattgaggaacttgacggagtcctaaccagcatattcaagcatgaaattccatactatgagttccagagcctgcagacggaaatttgctcacagaacaagtacacacatttcaaagagctacccactctgttgcattgcgcagctaaatttgggctgaaaaacctggctatccatctcttacagtgttccggtgcgacatgggcctccaagatgaaaaatatggaggggtcagatcctgcgcacattgctgaacggcacggacacaaagagctgaaaaagatttttgaggatttctctatccaggaaatcgacattaataacgagcaggagaacgattatgaggaagacatcgcaagttttagcacctacattccctcgacacagaacccagccttccatcacgaaagtcggaaaacgtacggtcaatctgctgatggcgccgaagccaacgaaatggagggagaaggaaaacagaacggctccggaatggagacaaagcacagtcctttagaagtggggtctgagagctctgaagatcagtacgatgacctgtacgtatttataccaggtgctgatcccgagaataacagccaggagcctcttatgtcaagtagacctcccctgccccccccacgccccgtggccaatgcattccagttagagcggcctcacttcacccttcctggcacaatggtggagggccagatggagagatcacagaactggggacatccaggcgtaagacaggaaactggtgacgagccgaaaggcgagaaggagaagaaggaagaggagaaggagcaagaggaggaggaagacccctacacgttcgccgagatcgatgacagtgagtatgatatgatcctagccaacctcagtataaaaaagaagacagggtcgcggtcctttatcatcaatcgaccgccagcacctaccccacgcccaacatcgattccacctaaggaggagactactccctacatcgcgcaagtctttcagcagaagacagccaggagacagtcagacgatgacaagttctgtgggttgccaaagaaacaggaccgcgcccgaatcgagtctcccgcctttagtaccctgagggggtgtctcacagacggacaggaggagctcatcctgctgcaggaaaaggttaagaatgggaagatgtccatggatgaagccctggagaagtttaagcattggcagatgggaaagtcgggccttgaaatgatccaacaggagaaattgagacagttgcgggattgcatcatcgggaaacgacccgaggaagagaatgtctataacaaactgaccatcgttcatcatcctgggggaaaagagactgcccataatgagaacaagttttacaatgtgcacttctccaacaaactgccagctcgcccccaggtggaaaaggaattcggcttctgttgcaagaaggaccactag

SEQ ID NO: 45043 - DNA, 1959 bp, Artificial Sequence
  derived and/or modified sequence
atgctgcccgccgcccccggcaagggcctgggcagccccgaccccgcaccctgcggtcctgccccccctgactctgaggactactttgaagtcaatattcccacggatctaagggctaagcattcaggggaaatatccgagcgcaaggagattgaagagcttagcgaggcttccaggaacactatccctttagctgtggtgctcccaacagaaattccctgtgagaacccaggtgaaatattcattatacttcgcgatgaggttatcggtgataccgtcgaggttgagtttactagctcaaataaacgtatccgcacccggcctgccctctggaataaaaaagtttggtgtatgaaagcactcgaattccccgctggatctgtacacgttaatgtgtattgcgacggcattgtaaaggctactaccaaaattaaatactaccccaccgctaaggctaaagagtgtttattcaggatggcagatagtggagagtctctttgtcagaatagtatagaggagctggatggcgtgttaacctctattttcaagcacgagatcccgtactatgaattccagtcactgcagactgagatatgctctcaaaacaagtacacacacttcaaggaactacccacgcttttacattgcgccgcgaagtttggacttaagaatctggcgatacacctgttgcaatgcagtggcgccacgtgggctagcaagatgaaaaatatggagggctccgaccccgcacacattgctgaacgccacgggcacaaggagctgaaaaaaatatttgaagacttttcgatacaggagatcgacattaacaacgagcaggagaacgactacgaagaggatatcgcgtccttcagcacctatatccctagcactcaaaatcctgccttccatcatgaaagtagaaaaacctacggccagtcagctgacggcgctgaggcaaacgagatggagggcgaaggtaagcaaaacggatctggtatggagacaaagcatagcccattggaagtcgggtccgagagcagcgaggaccagtatgacgacctttatgtattcattcccggggcggatccagagaataactcacaggaaccacttatgagctcacgacccccactgcctcctcctagaccggtagcaaatgcgtttcaattggaacgtccacattttacccttcctggcaccatggtagagggtcagatggaacggtcccagaactggggacatccgggcgtcagacaggaaactggggacgagccaaaaggggagaaagagaaaaaggaggaggagaaagagcaggaggaagaggaggatccatacacatttgcagagatcgatgactccgaatatgatatgatcttggctaatctgtctatcaagaaaaaaacaggaagcaggtccttcataataaaccggccaccagctcccaccccacgcccaacaagcatccctcctaaggaagagacaacaccctatatcgcacaggtgtttcaacaaaaaaccgcaaggcggcagagcgacgacgacaaattctgtggcctgcctaagaagcaggacagggcacggatagagagccccgctttttcaacactgcgaggatgcctgactgatggccaggaagagctgattctactccaggagaaggtgaaaaatggaaagatgagtatggacgaggccctggaaaaattcaaacattggcaaatgggcaagtccggcctcgagatgatccagcaggaaaaactgaggcagctgcgggattgcattatcgggaagcgtcccgaagaagagaatgtttataacaagctgaccatcgttcatcaccccgggggtaaggaaactgctcacaatgagaacaagttctacaacgtgcatttttccaacaagctccccgctagaccgcaggtggagaaggaattcggcttctgttgtaaaaaagatcattag

SEQ ID NO: 45044 - DNA, 1959 bp, Artificial Sequence
  derived and/or modified sequence
atgctccccgctgcgccaggcaaggggttagggtcgccagatcccgctccatgcggccctgccccacctgactctgaggactattttgaggtgaacattcctaccgatcttcgtgccaaacactcaggtgagatctccgagcgcaaggaaatcgaagagctgtcggaggcaagccggaataccatacctctggccgtggtgctccccacggaaatcccttgtgagaacccaggcgaaatatttataatcctcagggatgaggtgatcggcgataccgtggaggtggagtttacctcctctaacaagcgaatcagaacgcggccagcactttggaacaaaaaggtttggtgcatgaaggccctcgagtttcccgcaggttcggttcacgtcaatgtgtattgcgatggaattgtcaaagcaactacaaagatcaagtattatcccactgccaaagccaaggagtgtctgttcaggatggccgattctggagaaagcttgtgtcaaaacagtatagaggagctggatggtgtcctaaccagtatatttaagcacgagatcccttattacgaattccagtcattgcaaactgaaatttgctcacagaacaaatatacgcatttcaaggaactgcccacccttctgcactgcgcggctaaattcgggctgaagaatctagctatccacttactgcaatgctctggtgcgacgtgggcttccaagatgaaaaacatggaaggaagcgacccggcacacatagctgagagacacggacacaaagaattaaagaaaatttttgaggattttagcattcaggaaatcgacattaataatgagcaggagaacgattatgaggaggacattgcgtctttctccacatacattcccagtactcagaatcccgcatttcaccacgaaagccgtaaaacttacggccaatcggctgacggtgctgaggcaaacgagatggagggagagggcaaacaaaatggtagcggtatggagactaagcactcccccctggaagtaggcagcgaaagctctgaagaccagtacgacgacctatacgtcttcatcccaggcgcagatcctgaaaacaacagccaggaacctctgatgagtagcaggcccccactgccaccacctaggcccgtcgctaacgcatttcagctggaaaggcctcattttacccttcctgggactatggtcgagggacagatggagagatcgcagaactggggacacccaggggtgaggcaagaaacaggagacgagcctaagggggaaaaggagaagaaggaggaagaaaaagaacaggaagaggaggaggacccttatacgttcgcagagatcgatgactccgagtacgatatgatactcgccaatttgtccatcaagaagaaaaccgggtcacgttcattcattattaatagaccacctgcacccaccccacgtcccacctcgatcccacctaaagaggagacaaccccatacatcgcccaagtcttccagcagaagactgccagacgccagtcagatgacgacaagttctgcgggctgccaaagaaacaggaccgcgcacgcattgaaagtccagcattttctacgctgcgtggctgtctgaccgacggccaggaggagctgatccttctccaagagaaggtgaaaaacggaaagatgtctatggacgaggctttggagaagttcaagcactggcagatgggtaaatcaggccttgagatgattcagcaggagaagctgagacagctccgtgattgtataattgggaagagacccgaggaggaaaatgtgtataataaactgaccatagtgcaccatcctgggggtaaagagaccgcacacaacgagaacaaattttacaatgtgcacttttccaacaagctgcctgctagaccccaagtggagaaggaattcggattctgctgcaagaaggaccattag

SEQ ID NO: 45045 - DNA, 1959 bp, Artificial Sequence
  derived and/or modified sequence
atgctaccggcagctccgggaaaagggctgggctctcctgaccctgccccatgtggtccagcccctcccgacagcgaagattatttcgaggtaaatatccccaccgatctgagagcgaaacatagtggagaaatttcggaaagaaaagagattgaggaactcagtgaggcaagccgaaatacaataccactggcagttgtgctgccaactgagatcccatgtgagaatcccggagaaattttcatcatcctgcgcgacgaagtgatcggtgacacggtagaagttgagttcacttcatcaaacaagaggatcaggacccggcctgcactgtggaataaaaaagtttggtgcatgaaggctcttgaattccccgctggctcagtgcacgttaatgtctactgtgatgggatagtcaaagctactaccaagatcaaatactatcctacagctaaagccaaagagtgcctgttcaggatggctgacagtggcgagtctctctgccagaactcaattgaggagttggatggagttctcaccagcatatttaagcacgaaattccatactatgagtttcagtctctgcagaccgagatctgttcccagaacaaatatacccattttaaggagcttcctacactgctccattgcgccgcaaaatttggacttaagaacttggcgatacatcttctacagtgctcaggtgctacgtgggccagcaaaatgaagaatatggaagggtccgaccctgctcatatcgccgaaagacacgggcataaggaactgaagaagatctttgaggatttctcaattcaagagatcgacataaacaacgaacaagagaatgattacgaggaggacatcgccagcttttcaacatacatacccagcactcagaaccccgcttttcaccatgaatctagaaaaacttatggtcagagcgctgatggggcagaggcgaatgaaatggaaggcgagggcaagcagaatggttcaggcatggaaaccaagcactctcctctggaagtggggtcagagtcctcagaagaccagtatgacgacctgtacgtgttcatcccaggcgcagaccctgaaaacaacagccaggaacctctgatgtctagccgccctcccctacccccacccagacctgtggccaatgctttccagttggaacggcctcacttcacactgcccggtacaatggtcgaggggcaaatggagcggtctcagaattgggggcacccgggagtgcgacaggaaacaggcgatgaacctaaaggagaaaaggagaagaaggaggaggagaaggaacaagaagaggaggaggacccatatacctttgcagaaatcgatgactccgagtatgatatgatcctcgccaatttgtccattaaaaaaaaaacgggaagtcgaagctttattatcaacaggccccctgccccaactccacgacctacgtccattcctcctaaggaggaaaccactccctacattgcccaggtcttccagcagaagaccgctcgtcgtcaatcagatgatgataagttctgtgggcttccgaaaaagcaggatagggccaggattgagagtcccgcattttccaccctccggggttgcctgactgatggccaagaggagttaatactcctgcaggagaaggtcaaaaatgggaagatgtccatggacgaagctcttgagaaatttaaacactggcaaatggggaaaagcgggttggagatgattcaacaggagaagctcagacagctgcgcgactgcattatcggcaaaaggcctgaggaggagaatgtgtataacaagcttacaatagtgcaccatccaggcggtaaggagactgcccacaacgaaaacaagttctacaatgtacacttctccaacaaactcccggctcgcccacaggtagaaaaagaattcggcttttgttgcaaaaaagaccactag

SEQ ID NO: 45046 - DNA, 3044 bp, Artificial Sequence
  derived and/or modified sequence
aaaccaaagcggccttttgagaagggatgtaagagcaggcccctgagcagtttcacttcctctgggcgcccagcagagcggagccctggccttgcgggcatgagccccggggctgcgtttcctgagacctggccgcagcctccgcgggtggcaagcgggctggggagagccgagggccaaaggaagagaaaatcgcggggagtctctggccgggagagtccaggtagcgctcggcgggcagcagtgcgcaggcccctcggcttcaaccgccacaatgctgccagcagcgccaggcaaggggcttgggagcccggaccccgccccctgcggcccagcgcccccagattctgaagactactttgaggtcaacattccaacagacctacgagcaaaacattctggggaaataagtgagagaaaggaaattgaagaactatcagaagcttcaagaaacaccataccactagcagtggtgcttcccactgaaattccatgtgagaatcctggtgaaatattcataattttgagagatgaagtaattggtgatactgtagaggttgaatttacatcaagtaataagcgcattagaacacggccagccctttggaataagaaagtctggtgcatgaaagctttagagtttcctgctggttcagtccatgtcaatgtctactgtgatggaatcgttaaagctacaaccaaaattaagtactacccaacagcaaaggcaaaggaatgcctattcagaatggcagattcaggagagagtttgtgccagaatagcattgaagaacttgatggtgtccttacatccatattcaaacatgagataccatattatgagttccagtctcttcaaactgaaatttgttctcaaaacaaatatactcatttcaaagaacttccaactcttctccactgtgcagcaaaatttggcttaaagaacctggctattcatttgcttcaatgttcaggagcaacctgggcatctaagatgaaaaatatggagggttcagaccccgcacatattgctgaaaggcatggtcacaaagaactcaagaaaatcttcgaagacttttcaatccaagaaattgacataaataatgagcaagaaaatgattatgaagaggatattgcctcattttccacatatattccttccacacagaacccagcatttcatcatgaaagcaggaagacatacgggcagagtgcagatggagctgaggcaaatgaaatggaaggggaaggaaaacagaatggatcaggcatggagaccaaacacagcccactagaggttggcagtgagagttctgaagaccagtatgatgacttgtatgtgttcattcctggtgctgatccagaaaataattcacaagagccactcatgagcagcagacctcctctccccccgccgcgacctgtagctaatgccttccaactggaaagacctcacttcaccttaccagggacaatggtggaaggccaaatggaaagaagtcaaaactggggtcatcctggtgttagacaagaaacaggagatgaacccaaaggagaaaaagagaagaaagaagaggaaaaagagcaggaggaggaagaagacccatatacttttgctgagattgatgacagtgaatatgacatgatattggccaatctgagtataaagaaaaaaactgggagtcggtctttcattataaatagacctcctgcccccacaccccgacccacaagtatacctccaaaagaggaaactacaccttacatagctcaagtgtttcaacaaaagacagccagaagacaatctgatgatgacaagttctgtggtcttcctaagaaacaagacagagctcggatagagagtccagccttttctactctcaggggctgtctaactgatggtcaggaagaactcatcctcctgcaggagaaagtaaagaatgggaaaatgtctatggatgaagctctggagaaatttaaacactggcagatgggaaaaagtggcctggaaatgattcagcaggagaaattacgacaactacgagactgcattattgggaaaaggccagaagaagaaaatgtctataataaactcaccattgtgcaccatccaggtggtaaggaaactgcccacaatgaaaataagttttataatgtacacttcagcaataagcttcctgctcgaccccaagttgaaaaggaatttggtttctgttgcaagaaagatcattaaagaaggttattataatgaaactcacgaatctacggacattttgctttcagggtgaagcaagcttgaatttggattgcctgctctctttaaagcgaattcatactatgacagcagaaacaaaacttcagatttcagaatttgttattggcaaaatttattctcattatacctgcttcatatgggtatattactattaaaacagaataccatagagtaattgcattatttgaaaattctctcattttacaatgcacttcaccaatgaaacagctaatttccattttgaaaattaaaagaaaacagcacagagaagttaaatgcggtgtagcaaagttatggggtctgcttgagggcactaacctcaacagattattcctcctctccttagaataaccatgaaaatacaaatttacttagcacatttttgctttttaagtagctggttcattttctgaatttctcacattcagagttccagtcattattgttacatcatgtttgcagaaaccttgtcttatttagtgtctatttgcatataaccctgaaaacattattatttgaaaacttttctatatctcaaattaatatacattttcataacctacctttgtattaagacttgcaattttatcaatctattatttcttagaaacaatttactagcttagaatagaaagcaatgttatcgtcatataattttcatgtacaaatgccacaaataaattgaatgtttaaagctatgtctgagtttttaaagtaaatttataagaattagccaataaaattgcttctcggccttttggctaagatc

SEQ ID NO: 45047 - DNA, 2115 bp, Artificial Sequence
  derived and/or modified sequence
gagacctggccgcagcctccgcgggtggcaagcgggctggggagagccgagggccaaaggaagagaaaatcgcggggagtctctggccgggagagtccaggtagcgctcggcgggcagcagtgcgcaggcccctcggcttcaaccgccacaatgctgccagcagcgccaggcaaggggcttgggagcccggaccccgccccctgcggcccagcgcccccagattctgaagactactttgaggtcaacattccaacagacctacgagcaaaacattctggggaaataagtgagagaaaggaaattgaagaactatcagaagcttcaagaaacaccataccactagcagtggtgcttcccactgaaattccatgtgagaatcctggtgaaatattcataattttgagagatgaagtaattggtgatactgtagaggttgaatttacatcaagtaataagcgcattagaacacggccagccctttggaataagaaagtctggtgcatgaaagctttagagtttcctgctggttcagtccatgtcaatgtctactgtgatggaatcgttaaagctacaaccaaaattaagtactacccaacagcaaaggcaaaggaatgcctattcagaatggcagattcaggagagagtttgtgccagaatagcattgaagaacttgatggtgtccttacatccatattcaaacatgagataccatattatgagttccagtctcttcaaactgaaatttgttctcaaaacaaatatactcatttcaaagaacttccaactcttctccactgtgcagcaaaatttggcttaaagaacctggctattcatttgcttcaatgttcaggagcaacctgggcatctaagatgaaaaatatggagggttcagaccccgcacatattgctgaaaggcatggtcacaaagaactcaagaaaatcttcgaagacttttcaatccaagaaattgacataaataatgagcaagaaaatgattatgaagaggatattgcctcattttccacatatattccttccacacagaacccagcatttcatcatgaaagcaggaagacatacgggcagagtgcagatggagctgaggcaaatgaaatggaaggggaaggaaaacagaatggatcaggcatggagaccaaacacagcccactagaggttggcagtgagagttctgaagaccagtatgatgacttgtatgtgttcattcctggtgctgatccagaaaataattcacaagagccactcatgagcagcagacctcctctccccccgccgcgacctgtagctaatgccttccaactggaaagacctcacttcaccttaccagggacaatggtggaaggccaaatggaaagaagtcaaaactggggtcatcctggtgttagacaagaaacaggagatgaacccaaaggagaaaaagagaagaaagaagaggaaaaagagcaggaggaggaagaagacccatatacttttgctgagattgatgacagtgaatatgacatgatattggccaatctgagtataaagaaaaaaactgggagtcggtctttcattataaatagacctcctgcccccacaccccgacccacaagtatacctccaaaagaggaaactacaccttacatagctcaagtgtttcaacaaaagacagccagaagacaatctgatgatgacaagttctgtggtcttcctaagaaacaagacagagctcggatagagagtccagccttttctactctcaggggctgtctaactgatggtcaggaagaactcatcctcctgcaggagaaagtaaagaatgggaaaatgtctatggatgaagctctggagaaatttaaacactggcagatgggaaaaagtggcctggaaatgattcagcaggagaaattacgacaactacgagactgcattattgggaaaaggccagaagaagaaaatgtctataataaactcaccattgtgcaccatccaggtggtaaggaaactgcccacaatgaaaataagttttataatgtacacttcagcaataagcttcctgctcgaccccaagttgaaaaggaatttggtttctgttgcaagaaagatcattaaagaag

SEQ ID NO: 45048 - DNA, 1959 bp, Artificial Sequence
  derived and/or modified sequence
atgctgcccgccgcccccggcaagggcctgggcagccccgaccccgccccctgcggccccgccccccccgacagcgaggactacttcgaggtgaacatccccaccgacctgagagccaagcacagcggcgagatcagcgagagaaaggagatcgaggagctgagcgaggccagcagaaacaccatccccctggccgtggtgctgcccaccgagatcccctgcgagaaccccggcgagatcttcatcatcctgagagacgaggtgatcggcgacaccgtggaggtggagttcaccagcagcaacaagagaatcagaaccagacccgccctgtggaacaagaaggtgtggtgcatgaaggccctggagttccccgccggcagcgtgcacgtgaacgtgtactgcgacggcatcgtgaaggccaccaccaagatcaagtactaccccaccgccaaggccaaggagtgcctgttcagaatggccgacagcggcgagagcctgtgccagaacagcatcgaggagctggacggcgtgctgaccagcatcttcaagcacgagatcccctactacgagttccagagcctgcagaccgagatctgcagccagaacaagtacacccacttcaaggagctgcccaccctgctgcactgcgccgccaagttcggcctgaagaacctggccatccacctgctgcagtgcagcggcgccacctgggccagcaagatgaagaacatggagggcagcgaccccgcccacatcgccgagagacacggccacaaggagctgaagaagatcttcgaggacttcagcatccaggagatcgacatcaacaacgagcaggagaacgactacgaggaggacatcgccagcttcagcacctacatccccagcacccagaaccccgccttccaccacgagagcagaaagacctacggccagagcgccgacggcgccgaggccaacgagatggagggcgagggcaagcagaacggcagcggcatggagaccaagcacagccccctggaggtgggcagcgagagcagcgaggaccagtacgacgacctgtacgtgttcatccccggcgccgaccccgagaacaacagccaggagcccctgatgagcagcagaccccccctgcccccccccagacccgtggccaacgccttccagctggagagaccccacttcaccctgcccggcaccatggtggagggccagatggagagaagccagaactggggccaccccggcgtgagacaggagaccggcgacgagcccaagggcgagaaggagaagaaggaggaggagaaggagcaggaggaggaggaggacccctacaccttcgccgagatcgacgacagcgagtacgacatgatcctggccaacctgagcatcaagaagaagaccggcagcagaagcttcatcatcaacagaccccccgcccccacccccagacccaccagcatcccccccaaggaggagaccaccccctacatcgcccaggtgttccagcagaagaccgccagaagacagagcgacgacgacaagttctgcggcctgcccaagaagcaggacagagccagaatcgagagccccgccttcagcaccctgagaggctgcctgaccgacggccaggaggagctgatcctgctgcaggagaaggtgaagaacggcaagatgagcatggacgaggccctggagaagttcaagcactggcagatgggcaagagcggcctggagatgatccagcaggagaagctgagacagctgagagactgcatcatcggcaagagacccgaggaggagaacgtgtacaacaagctgaccatcgtgcaccaccccggcggcaaggagaccgcccacaacgagaacaagttctacaacgtgcacttcagcaacaagctgcccgccagaccccaggtggagaaggagttcggcttctgctgcaagaaggaccactag

SEQ ID NO: 45049 - protein, 2843 aa, Artificial Sequence
  derived and/or modified sequence
MAAASYDQLLKQVEALKMENSNLRQELEDNSNHLTKLETEASNMKEVLKQLQGSIEDEAMASSGQIDLLERLKELNLDSSNFPGVKLRSKMSLRSYGSREGSVSSRSGECSPVPMGSFPRRGFVNGSRESTGYLEELEKERSLLLADLDKEEKEKDWYYAQLQNLTKRIDSLPLTENFSLQTDMTRRQLEYEARQIRVAMEEQLGTCQDMEKRAQRRIARIQQIEKDILRIRQLLQSQATEAERSSQNKHETGSHDAERQNEGQGVGEINMATSGNGQGSTTRMDHETASVLSSSSTHSAPRRLTSHLGTKVEMVYSLLSMLGTHDKDDMSRTLLAMSSSQDSCISMRQSGCLPLLIQLLHGNDKDSVLLGNSRGSKEARARASAALHNIIHSQPDDKRGRREIRVLHLLEQIRAYCETCWEWQEAHEPGMDQDKNPMPAPVEHQICPAVCVLMKLSFDEEHRHAMNELGGLQAIAELLQVDCEMYGLTNDHYSITLRRYAGMALTNLTFGDVANKATLCSMKGCMRALVAQLKSESEDLQQVIASVLRNLSWRADVNSKKTLREVGSVKALMECALEVKKESTLKSVLSALWNLSAHCTENKADICAVDGALAFLVGTLTYRSQTNTLAIIESGGGILRNVSSLIATNEDHRQILRENNCLQTLLQHLKSHSLTIVSNACGTLWNLSARNPKDQEALWDMGAVSMLKNLIHSKHKMIAMGSAAALRNLMANRPAKYKDANIMSPGSSLPSLHVRKQKALEAELDAQHLSETFDNIDNLSPKASHRSKQRHKQSLYGDYVFDTNRHDDNRSDNFNTGNMTVLSPYLNTTVLPSSSSSRGSLDSSRSEKDRSLERERGIGLGNYHPATENPGTSSKRGLQISTTAAQIAKVMEEVSAIHTSQEDRSSGSTTELHCVTDERNALRRSSAAHTHSNTYNFTKSENSNRTCSMPYAKLEYKRSSNDSLNSVSSSDGYGKRGQMKPSIESYSEDDESKFCSYGQYPADLAHKIHSANHMDDNDGELDTPINYSLKYSDEQLNSGRQSPSQNERWARPKHIIEDEIKQSEQRQSRNQSTTYPVYTESTDDKHLKFQPHFGQQECVSPYRSRGANGSETNRVGSNHGINQNVSQSLCQEDDYEDDKPTNYSERYSEEEQHEEEERPTNYSIKYNEEKRHVDQPIDYSLKYATDIPSSQKQSFSFSKSSSGQSSKTEHMSSSSENTSTPSSNAKRQNQLHPSSAQSRSGQPQKAATCKVSSINQETIQTYCVEDTPICFSRCSSLSSLSSAEDEIGCNQTTQEADSANTLQIAEIKEKIGTRSAEDPVSEVPAVSQHPRTKSSRLQGSSLSSESARHKAVEFSSGAKSPSKSGAQTPKSPPEHYVQETPLMFSRCTSVSSLDSFESRSIASSVQSEPCSGMVSGIISPSDLPDSPGQTMPPSRSKTPPPPPQTAQTKREVPKNKAPTAEKRESGPKQAAVNAAVQRVQVLPDADTLLHFATESTPDGFSCSSSLSALSLDEPFIQKDVELRIMPPVQENDNGNETESEQPKESNENQEKEAEKTIDSEKDLLDDSDDDDIEILEECIISAMPTKSSRKAKKPAQTASKLPPPVARKPSQLPVYKLLPSQNRLQPQKHVSFTPGDDMPRVYCVEGTPINFSTATSLSDLTIESPPNELAAGEGVRGGAQSGEFEKRDTIPTEGRSTDEAQGGKTSSVTIPELDDNKAEEGDILAECINSAMPKGKSHKPFRVKKIMDQVQQASASSSAPNKNQLDGKKKKPTSPVKPIPQNTEYRTRVRKNADSKNNLNAERVFSDNKDSKKQNLKNNSKVFNDKLPNNEDRVRGSFAFDSPHHYTPIEGTPYCFSRNDSLSSLDFDDDDVDLSREKAELRKAKENKESEAKVTSHTELTSNQQSANKTQAIAKQPINRGQPKPILQKQSTFPQSSKDIPDRGAATDEKLQNFAIENTPVCFSHNSSLSSLSDIDQENNNKENEPIKETEPPDSQGEPSKPQASGYAPKSFHVEDTPVCFSRNSSLSSLSIDSEDDLLQECISSAMPKKKKPSRLKGDNEKHSPRNMGGILGEDLTLDLKDIQRPDSEHGLSPDSENFDWKAIQEGANSIVSSLHQAAAAACLSRQASSDSDSILSLKSGISLGSPFHLTPDQEEKPFTSNKGPRILKPGEKSTLETKKIESESKGIKGGKKVYKSLITGKVRSNSEISGQMKQPLQANMPSISRGRTMIHIPGVRNSSSSTSPVSKKGPPLKTPASKSPSEGQTATTSPRGAKPSVKSELSPVARQTSQIGGSSKAPSRSGSRDSTPSRPAQQPLSRPIQSPGRNSISPGRNGISPPNKLSQLPRTSSPSTASTKSSGSGKMSYTSPGRQMSQQNLTKQTGLSKNASSIPRSESASKGLNQMNNGNGANKKVELSRMSSTKSSGSESDRSERPVLVRQSTFIKEAPSPTLRRKLEESASFESLSPSSRPASPTRSQAQTPVLSPSLPDMSLSTHSSVQAGGWRKLPPNLSPTIEYNDGRPAKRHDIARSHSESPSRLPINRSGTWKREHSKHSSSLPRVSTWRRTGSSSSILSASSESSEKAKSEDEKHVNSISGTKQSKENQVSAKGTWRKIKENEFSPTNSTSQTVSSGATNGAESKTLIYQMAPAVSKTEDVWVRIEDCPINNPRSGRSPTGNTPPVIDSVSEKANPNIKDSKDNQAKQNVGNGSVPMRTVGLENRLNSFIQVDAPDQKGTEIKPGQNNPVPVSETNESSIVERTPFSSSSSSKHSSPSGTVAARVTPFNYNPSPRKSSADSTSARPSQIPTPVNNNTKKRDSKTDSTESSGTQSPKRHSGSYLVTSV

SEQ ID NO: 45050 - protein, 287 aa, Artificial Sequence
  derived and/or modified sequence
MAAASYDQLLKQVEALKMENSNLRQELEDNSNHLTKLETEASNMKEVLKQLQGSIEDEAMASSGQIDLLERLKELNLDSSNFPGVKLRSKMSLRSYGSREGSVSSRSGECSPVPMGSFPRRGFVNGSRESTGYLEELEKERSLLLADLDKEEKEKDWYYAQLQNLTKRIDSLPLTENFSLQTDMTRRQLEYEARQIRVAMEEQLGTCQDMEKRAQRRIARIQQIEKDILRIRQLLQSQATEAERSSQNKHETGSHDAERQNEGQGVGEINMATSGNGQIEKMRMFEC

SEQ ID NO: 45051 - protein, 118 aa, Artificial Sequence
  derived and/or modified sequence
MAAASYDQLLKQVEALKMENSNLRQELEDNSNHLTKLETEASNMKEVLKQLQGSIEDEAMASSGQIDLLERLKELNLDSSNFPGVKLRSKMSLRSYGSREGSVSSRSGECSPVPMGSF

SEQ ID NO: 45052 - protein, 1305 aa, Artificial Sequence
  derived and/or modified sequence
MAAASYDQLLKQVEALKMENSNLRQELEDNSNHLTKLETEASNMKEVLKQLQGSIEDEAMASSGQIDLLERLKELNLDSSNFPGVKLRSKMSLRSYGSREGSVSSRSGECSPVPMGSFPRRGFVNGSRESTGYLEELEKERSLLLADLDKEEKEKDWYYAQLQNLTKRIDSLPLTENFSLQTDMTRRQLEYEARQIRVAMEEQLGTCQDMEKRAQRRIARIQQIEKDILRIRQLLQSQATEAERSSQNKHETGSHDAERQNEGQGVGEINMATSGNGQGSTTRMDHETASVLSSSSTHSAPRRLTSHLGTKVEMVYSLLSMLGTHDKDDMSRTLLAMSSSQDSCISMRQSGCLPLLIQLLHGNDKDSVLLGNSRGSKEARARASAALHNIIHSQPDDKRGRREIRVLHLLEQIRAYCETCWEWQEAHEPGMDQDKNPMPAPVEHQICPAVCVLMKLSFDEEHRHAMNELGGLQAIAELLQVDCEMYGLTNDHYSITLRRYAGMALTNLTFGDVANKATLCSMKGCMRALVAQLKSESEDLQQVIASVLRNLSWRADVNSKKTLREVGSVKALMECALEVKKESTLKSVLSALWNLSAHCTENKADICAVDGALAFLVGTLTYRSQTNTLAIIESGGGILRNVSSLIATNEDHRQILRENNCLQTLLQHLKSHSLTIVSNACGTLWNLSARNPKDQEALWDMGAVSMLKNLIHSKHKMIAMGSAAALRNLMANRPAKYKDANIMSPGSSLPSLHVRKQKALEAELDAQHLSETFDNIDNLSPKASHRSKQRHKQSLYGDYVFDTNRHDDNRSDNFNTGNMTVLSPYLNTTVLPSSSSSRGSLDSSRSEKDRSLERERGIGLGNYHPATENPGTSSKRGLQISTTAAQIAKVMEEVSAIHTSQEDRSSGSTTELHCVTDERNALRRSSAAHTHSNTYNFTKSENSNRTCSMPYAKLEYKRSSNDSLNSVSSSDGYGKRGQMKPSIESYSEDDESKFCSYGQYPADLAHKIHSANHMDDNDGELDTPINYSLKYSDEQLNSGRQSPSQNERWARPKHIIEDEIKQSEQRQSRNQSTTYPVYTESTDDKHLKFQPHFGQQECVSPYRSRGANGSETNRVGSNHGINQNVSQSLCQEDDYEDDKPTNYSERYSEEEQHEEEERPTNYSIKYNEEKRHVDQPIDYSLKYATDIPSSQKQSFSFSKSSSGQSSKTEHMSSSSENTSTPSSNAKRQNQLHPSSAQSRSGQPQKAATCKVSSINQETIQTYCVEDTPICFSRCSSLSSLSSAEDEIGCNQTTQEADSANTLQIA

SEQ ID NO: 45053 - DNA, 8532 bp, Artificial Sequence
  derived and/or modified sequence
atggccgccgcttcttacgatcagttgctgaaacaggtagaggcattgaagatggaaaattctaacttgcgccaagaactggaggataatagtaaccacctcacaaaattagagaccgaggctagcaacatgaaagaggtgcttaagcaactacagggatccattgaagatgaggctatggcgagtagtgggcagatagatctgctggagcgcctcaaagagttaaacctggactcttccaacttcccaggtgtgaaactccgcagtaaaatgtctttacgctcctatggctccagagaaggatccgtctcatctcggtctggcgagtgcagtcccgtgccaatgggcagcttccccagaagggggttcgtcaacggatctcgggagtcgaccggctacttagaggagttggaaaaggagaggtctttgttgttagcagacctcgacaaagaggagaaggagaaggactggtactatgcgcagctgcaaaacctcaccaagaggatagatagcctgcctctcacagagaatttctcactccagaccgacatgaccagaaggcagttggagtatgaggcccgtcaaatcagagtggctatggaggagcaattagggacctgtcaggacatggagaaacgcgctcagcgtcgtatcgcccggatccaacaaatcgaaaaagacattctgaggatccggcagctgctgcagtctcaagctaccgaagcagagcgttccagccaaaataaacacgagacagggagccacgacgcagagagacagaacgaaggccagggtgtgggggaaattaatatggccacttctgggaacggtcagggatccacgacaagaatggatcatgagacagccagcgtcttatcatcctcctccacccatagcgctccaaggagactcacctcgcatctcgggacaaaagtggaaatggtctacagcctgctgagcatgctgggaacccacgataaggatgacatgagccggaccctcctggcgatgagtagctcacaggactcgtgcatttccatgcgacagtctggctgtctgccactgctgatacagttgctgcatggcaacgacaaggattccgtgctgctgggtaactccagggggtctaaggaagcacgtgcgcgagcctcagcagcccttcataatattattcactcccagccagacgataaacggggacggagggagattcgagtcctgcatctgctcgaacagattagggcttactgcgagacctgctgggagtggcaggaagcccacgaacccggcatggaccaggataaaaatccgatgcctgcaccagtcgaacaccaaatatgtcccgccgtgtgcgtactcatgaagctgagtttcgacgaagaacaccgccacgcaatgaacgaattgggagggctacaagcgatcgcggagttactgcaggttgactgcgagatgtacggtctgaccaacgaccattactcaattacattaagaagatacgccggtatggcgctgaccaacctgacttttggtgacgtcgctaacaaagcaacgttgtgctctatgaaggggtgtatgcgcgcactggtagctcagctgaaatcggaaagtgaagacttacaacaggtgattgctagtgtgctgcgtaatctttcctggcgggcagatgtgaacagcaaaaagactttacgggaggtaggatcggtcaaggcacttatggaatgtgccctcgaggtgaagaaggagtccaccctgaaaagtgtgcttagcgctttgtggaacctgagcgcccattgcaccgaaaacaaggccgatatctgtgctgtggatggggcgcttgctttcctcgtcggcacgctcacttaccgaagccaaactaacaccctggcaattattgaatctggcggggggatactcagaaacgtttcaagtcttattgccaccaatgaagatcaccggcagatcttacgggaaaacaattgcctgcagactttactgcaacatctgaaaagccactcccttactatcgttagtaatgcatgcggaacactttggaacctctccgctcgcaaccccaaggatcaggaggccctgtgggacatgggcgcagtgtctatgttgaaaaatctgatccacagtaagcataagatgatcgccatgggatcagcggccgctctcagaaatctgatggccaatagaccggccaaatacaaggatgcaaacattatgtctcccggctcatctctgccctcgctgcatgtgcgcaagcagaaggccctggaggccgagctcgatgcccagcatctgagtgagacctttgataacatcgacaacctctcacccaaggccagtcacaggagtaagcagaggcacaagcagtctctgtacggggattatgtgtttgatactaatcggcatgatgacaaccgctcagacaattttaacaccggaaatatgactgtgttatcgccttacctcaacaccacagtgctccctagcagttccagtagccgcggatctctggacagctcccggagcgagaaggaccgttcattggaacgagagcgagggattggcttgggcaattatcacccagcaacagagaatcctgggacctccagtaaaaggggccttcagatcagtaccacagcagctcagatcgcaaaagtgatggaggaggtgagtgctatccacaccagccaagaagaccgcagctcagggagtaccactgagttgcattgcgtgactgacgaacgaaatgcactgcggcgcagctcggctgcgcacactcattccaatacgtacaactttactaagtccgaaaactcaaacaggacatgctccatgccatacgcaaagctagagtataagcgatccagcaacgatagcctgaactccgttagttccagcgatggctacgggaaacggggccagatgaagccatccatagaaagttattctgaggatgatgagtccaagttctgttcttatggccaatacccggcggaccttgctcataaaattcatagcgctaaccacatggatgataacgacggcgaattggatacccccatcaattattctttgaagtactctgatgaacagctcaactccggccggcagagccccagtcagaacgaacgttgggcaagacccaagcatatcattgaggatgaaatcaaacagtctgaacagagacaatccaggaatcagtctacaacttatcccgtctacacagagagtacagatgacaagcacctcaagtttcagcctcactttggtcagcaggaatgcgtgtctccctacagaagtagaggggctaacggaagcgaaacgaaccgcgtaggttcaaaccatggaattaatcagaatgtgagtcagtcactctgccaagaagatgactatgaggacgacaagcccacgaactactctgagagatacagcgaggaagagcagcatgaagaagaggagcgaccaacgaactatagcattaaatacaatgaggaaaagcgtcatgtggatcagccgattgattacagcctcaaatacgctaccgacattccctcttcccagaagcagtcattcagtttttctaaaagtagctctgggcagtcctctaaaacagaacacatgtcctcttcttcagagaacacatcaaccccaagctctaacgccaaacgccaaaatcagctgcatccatcgagtgcccagtccaggagcggacaaccccaaaaggcagcaacatgtaaagtttcaagtatcaaccaggagactatccagacttactgtgtggaagacacaccgatttgtttctcaagatgtagttctctgtcatcactttcaagcgctgaggatgagattggatgtaaccagacaacgcaagaggcagactcagctaatacacttcaaattgccgagattaaagaaaagattgggacccgctccgctgaagaccctgtaagcgaggtgcctgcagtgagccagcaccctcggactaagtccagcagactgcagggcagttccctgtcaagcgaaagcgcacgacacaaagcggtggagttttcgagcggcgccaaaagtcctagcaagtcgggtgcccagacgcccaagtcaccaccagaacactatgtccaggagacacctctgatgttctctcgttgcacatccgtgagttctttggatagcttcgagtctcggagcatcgcgtcatccgtgcaaagcgagccctgctccggtatggtctcgggtatcatcagcccctcagatctgccagattcaccaggccagaccatgcctcccagccgctcgaaaacccctcccccaccgcctcagaccgcccagactaagagggaagtccctaagaataaggccccaactgcggaaaagagggagtctggccccaagcaggcggcggttaacgctgccgtccagcgggtgcaggtcctcccggatgccgatacactgcttcactttgccactgaatccacccccgacgggtttagctgtagctcttcactatcagccctctcactcgatgaacctttcattcagaaggacgtggaattacgaattatgcctcctgtacaagagaacgacaacggtaacgagacagaatcggagcagcctaaggagagtaacgagaatcaggagaaggaggcagagaagaccattgactcagaaaaggacctactggacgacagcgacgacgacgacatcgagatcctggaggagtgtatcatcagtgctatgccgactaaaagcagcaggaaggcaaagaagcctgctcaaacagcctcaaagctgcctccccccgtggcccgaaaacccagccagctgcccgtgtacaaactcctcccttcccagaacagattacagccacagaaacacgtgtcttttaccccaggcgatgacatgccacgagtatattgtgtggaaggtacaccaattaactttagtactgctacctccctaagcgatctgactatcgagtcgccacctaacgaattggcagcaggggaaggggtgaggggtggcgctcagtcgggagagttcgagaagcgggacactatcccgaccgagggacggagcaccgacgaggctcagggcggcaaaacttccagcgtcacaattccagagctagacgataacaaagctgaagagggagacatcttagcagaatgtattaattccgccatgccgaagggaaagagccataagccctttcgggtgaagaaaatcatggaccaggtccaacaggcttctgcgtcaagtagcgctccaaataagaatcagctggatgggaaaaaaaagaagcccacttctcctgtcaaacccatccctcaaaatactgagtatcggacccgagtacgaaagaacgcagacagtaagaataatctaaacgccgagagagtcttcagcgacaataaagacagcaagaaacagaatctcaagaacaattccaaagtctttaacgacaaactgcccaacaacgaagatcgcgtacggggcagttttgcctttgattctccgcaccactacacccctattgagggcaccccctattgcttttcacgtaacgacagcctaagctctctagacttcgatgatgatgatgtcgacctgtcccgggaaaaagcagagctgcggaaagcaaaggaaaataaggaatcagaagcgaaggtcaccagccacactgagctcacatcgaatcagcagagcgccaataagacacaggccatcgccaagcagcccataaatcgaggccaaccaaagccgatcctacagaagcaaagcaccttccctcagagtagcaaggacatacccgaccggggggccgctactgatgagaagctgcagaatttcgcaatagagaatactcccgtctgcttctcccacaattcatctttgtcttcgctgtccgatatcgaccaggaaaacaacaacaaagagaacgaaccaataaaagagactgagcccccagacagccagggagaaccaagtaagcctcaggcatctggatatgcacccaaatctttccacgtggaggatacgccagtgtgtttttctcgaaattctagcctttcatccctgtcgatcgattctgaggacgatcttctccaggaatgtatcagttcggccatgcccaagaagaaaaaaccctctcgcctgaaaggcgacaatgaaaagcattcccctaggaacatgggtgggattctgggcgaggacttgaccctggacctgaaggatatccagcgaccagacagcgaacacggcctctctccagactccgaaaattttgattggaaggcaatccaggagggggcaaactccatagtgagtagtctgcaccaggcagctgccgctgcgtgcttgagtcggcaggcttccagtgattccgactctatcctgtccttgaaaagtggtatcagcttaggaagtcccttccacttgactcctgaccaggaagagaaacctttcactagcaataagggccctcgcatcctgaagcctggcgaaaagtcaacccttgagactaaaaagatcgaaagtgaatctaaaggaatcaagggagggaaaaaggtctataagagcctcatcacaggcaaagtgcgtagcaacagtgagattagcggccagatgaaacaaccactccaggcgaacatgccgtctatttcccgaggccgcactatgatacacatcccaggagtgaggaactccagcagtagtaccagccctgtcagcaaaaagggcccccccttaaaaacaccagcctctaaaagtcctagtgaggggcaaacggctaccacctcccctagaggggccaagccaagcgttaaatcagaattgagtccagtagctcgccagacgagccagataggcggctcgagcaaagcccctagccgctctgggagccgtgattcgacccctagcagacccgcacagcagcccttgagtagaccgattcagagtccggggagaaactccatctcacctggaaggaatggaatctcacctcctaacaagctatcacagctgcctagaacctctagcccaagtaccgcgagtaccaagtcttcgggatctggaaagatgtcctatacctcacctggcaggcagatgtcacagcagaacctcaccaaacagaccggactgtccaagaatgccagctctattcctagaagtgaatcggccagtaaggggctaaatcaaatgaacaatggcaacggagccaataaaaaagtcgagttaagtagaatgtcatcaactaagagcagcggatcagagagtgaccgaagcgaacgacctgtcctagttagacagtccactttcataaaggaagccccaagtcctacattgcggaggaagctggaggagtcagccagttttgaatctctctcgccctcatccaggcctgcttcccccacaaggagccaagcacagacccctgtgcttagcccaagcctgccagatatgtccctgtcaacacatagtagcgtccaagctggcggctggcgaaagctgccccctaatctgtctcccactattgagtacaatgatgggcggccggctaagcgtcatgatatcgcgagatcccattcagagtcacccagcaggctcccaattaatcgatccggaacatggaagagggaacatagtaaacactcaagcagcctcccacgcgtgtccacgtggcgaagaaccggttccagtagttcaattctgtcagcttcctctgagtcttccgaaaaggccaagagcgaggacgagaaacacgttaatagcatatctggaacgaagcagagtaaggagaatcaagtctccgccaaagggacatggcggaaaattaaggaaaacgaattctcccccaccaactctactagccagaccgttagctcaggggccactaatggggctgagagtaagactctgatttatcagatggctcccgctgtatctaaaacagaggacgtgtgggtgagaatagaagactgtcctatcaacaatccacggtccggccgctcaccgacagggaacacaccccccgtcatcgactctgtgtctgagaaggcgaatcccaatatcaaagattctaaagacaatcaggccaagcagaacgtcggaaatggaagtgtgccaatgaggacagtgggtctggagaaccgactcaactcattcatacaggtggatgcgcccgaccaaaaagggacagagatcaagccaggacaaaacaaccccgtgccagtcagcgaaacgaacgagtccagtattgtagagcggacgccattctcttctagttctagctccaaacactcctcgcccagcggaacagtcgctgcacgtgtgacccctttcaactataacccatccccccgcaaatctagtgctgattccacaagcgcccgcccgtctcagatcccaaccccggtgaataataatactaagaagagggattctaaaacagactcaactgagagtagcggaactcagtcccccaagaggcattctggcagttacctggtcacatctgtctag

SEQ ID NO: 45054 - DNA, 8532 bp, Artificial Sequence
  derived and/or modified sequence
atggcagcggcatcctacgatcagctgttaaaacaggtggaggcactcaagatggagaactccaacctccgtcaggaactcgaggataactccaaccaccttaccaagttggagactgaggccagcaatatgaaggaggtccttaagcaactacagggaagtatcgaggatgaagctatggccagcagtggacagatcgatctcttggaaagacttaaagagctgaatctcgattcaagtaatttcccaggcgttaagctgaggtctaagatgagtttgaggagctacggctctagagaggggtcagtgagtagtcgctctggcgagtgtagccccgtgccaatggggagtttcccccgacgaggcttcgtgaatggaagccgggagagcacgggatatctggaagagctcgagaaggaaagatccctcctgctggctgatctggacaaggaggaaaaggaaaaggactggtactacgcccagctgcagaaccttaccaagagaattgattccctgcccctcaccgaaaacttcagtctgcagaccgacatgacacgcaggcagctcgagtatgaggcgcggcagattagagtcgcaatggaagaacagctcggcacttgccaggacatggaaaagcgggcgcagcgccgcattgcccgaattcagcagatcgaaaaagacatactgcgcatccgacagctgcttcagtctcaggccaccgaggctgagaggagcagtcagaacaaacacgaaacggggagtcatgatgcagagcgtcaaaatgaaggtcagggcgtaggggaaattaacatggcgacttccggaaacggccaaggcagcacaacacgcatggatcacgagaccgccagtgtgttgtcaagctctagtacacacagcgctcctaggcgcctaacttctcacctcggaaccaaagtggagatggtgtactccctactgagtatgctcggaactcatgacaaagacgatatgagccggaccttgcttgccatgagtagctctcaggatagttgtatttctatgcggcagtcagggtgcctgccactgctgatacagctactccacggtaatgataaggattcagtgctcttagggaactcgaggggatcgaaagaggccagggcacgagcatcggcggcgctgcataacattatccactcccagcctgacgataaacgtgggaggcgcgagataagggtgctgcacttgctggaacagatccgggcatactgtgagacctgctgggaatggcaggaagcacacgaacccggaatggatcaggacaaaaatccaatgccggcgccagtggagcatcaaatatgcccagccgtctgcgtgctgatgaaacttagctttgacgaagaacacaggcatgcaatgaacgagctaggcggccttcaggcgattgcagaactcctgcaggtggattgtgagatgtatgggttgactaacgaccactactcaattacgctgcggaggtatgcaggaatggccctgactaaccttaccttcggggacgtagccaacaaggccacactttgcagtatgaagggttgcatgagagctctcgtggcccaattgaagtccgagtcagaggatctgcagcaggtgattgcttcagtgcttcggaacctctcttggcgcgcggatgtcaactccaaaaagacattacgtgaagttggatcagtgaaggccctcatggaatgtgcacttgaggtcaaaaaggaatcgactcttaaaagtgtgttgtctgccctgtggaacctatcagcccattgcacagagaacaaagccgacatctgtgcggttgacggggccttggccttcttggtgggcaccttgacctacagatcgcagacgaacaccctcgccattattgagtccgggggtgggattctgaggaacgtaagttcactgattgccactaacgaagaccatagacagatattgcgggagaacaactgcctccagaccctcctccagcatctaaaatcccacagcctgaccattgtgtctaatgcctgcggcaccttgtggaaccttagcgctagaaatcccaaagaccaggaggccctatgggatatgggggcagttagtatgctgaaaaatcttattcatagcaaacataagatgatcgccatgggctctgcggcggctctccgtaatctgatggcaaataggccagcaaagtacaaggacgccaacatcatgagccctggcagctcgcttcccagcctgcacgtgagaaaacagaaggctctggaagccgaactggacgcccagcatctttctgaaaccttcgataacatcgataacttgtcccctaaagcctcccatcggagtaagcagaggcacaaacaaagcctgtacggcgattacgtttttgatactaatcgccatgacgacaatcggtctgacaactttaacacaggcaacatgacagtgctttcaccatacttaaacacgactgtgctgccaagcagttcttcttcccgtggctctctagacagctcccgttcagaaaaagaccgctcactagagcgcgagagagggatcggactggggaactaccatccagccactgaaaatcccggaacctccagcaaacgggggcttcagatctctacaactgccgctcagattgctaaggtcatggaggaagtttccgcgatacataccagccaagaggacaggagtagcggcagtaccactgagcttcactgcgttaccgatgagcgaaatgctttgagacgctcttccgccgcccacacacattcaaatacctacaacttcactaagagcgaaaatagcaatcgaacatgcagtatgccgtatgcaaaactcgaatacaaaaggtcctccaacgacagccttaactctgtttcctcctctgatggatatggcaagcggggccagatgaaaccaagtatcgagtcctatagcgaggacgacgagtccaagttttgctcttatggccagtatcccgcggacttggctcataaaatccactccgccaaccatatggacgataatgatggtgaactcgacacccccatcaactactctctcaagtactccgacgagcagttgaactccggccgccagagtccttcgcagaacgagcgttgggctaggcctaaacacatcatcgaggacgaaatcaagcagagtgaacaaagacagagcagaaatcaaagcaccacttatcccgtgtataccgaatcaaccgatgacaaacacctaaaattccagccacatttcggtcagcaggaatgcgtttccccttatcgttcccgaggcgcaaacgggtccgaaacgaatcgagtcggtagtaatcatgggattaaccaaaatgtcagccaaagcctgtgtcaggaggatgactacgaggacgataagccgactaattactctgaacggtacagtgaggaggagcagcacgaggaggaagaaagacctaccaattacagcataaaatataatgaggaaaagagacacgtggatcagcccattgattacagtctgaagtacgctaccgacatcccgagttctcagaagcagtccttttcgttcagcaagagttcctctggccagtcatcaaagactgagcatatgtcttcctccagtgaaaacactagcacaccctcctcaaacgccaagcgccagaaccagcttcatccttcctctgcccagagcaggtcaggccagccccagaaggctgcgacttgtaaggtctcttcaatcaatcaagaaactatccagacttactgtgtcgaagacactcccatttgtttctcaagatgcagctccttatccagccttagttcggccgaggacgagattggttgcaaccagaccactcaggaagctgacagcgccaatactctgcagatcgcggagataaaggagaagattggcacacgcagcgccgaagatcctgtgagtgaggtaccggctgtgtctcagcacccacggacgaaaagcagcaggctgcagggcagcagcctctcatccgagagtgcccgccataaagccgtagagttctcctctggggctaagtccccctcgaaaagcggggcacagacaccaaagtcccctcctgaacactacgtgcaggagactccgcttatgttttcacggtgtacaagtgtttcgtcgctcgacagctttgagagccgtagcatagccagcagtgtacagagtgaaccgtgctctggcatggtgagcggcattatttcccctagtgacttgccagacagccccggtcaaacgatgcccccctcaagaagtaagacaccccctccaccaccccagactgctcagaccaaacgtgaggtccctaaaaacaaagcccctactgctgaaaaacgggagagtgggcccaagcaggcggccgtgaacgctgcagtccagagagttcaagtgcttccagatgcggacactctgcttcattttgctacagagtccacgccagatggattctcttgcagcagctcactgagtgcattgtccctggatgagcccttcatccagaaggatgtcgagttgcgcattatgcctcctgtccaggagaacgataatggcaatgagacagagagcgaacagcctaaggagtccaatgaaaaccaagagaaggaagccgaaaagacaatcgacagcgaaaaagatctgttggacgatagcgatgatgatgacatagagatcctcgaagaatgcattatatcagcaatgcccaccaagtctagcagaaaggccaagaagcccgctcagaccgcatctaaactgcccccacctgttgccaggaagccaagtcagctacccgtttacaagttactgcctagtcagaacaggctgcaaccccaaaaacacgtgagcttcacccccggcgacgacatgccgcgcgtctactgcgtggagggaacacccatcaatttttccactgcaacatcattatcggatctcacaatcgaaagtcctcccaacgaactggccgccggagagggggtaaggggcggcgctcagtcaggagagtttgagaagagggacacaatacccactgaggggaggagtacagatgaagcccagggaggtaagacgagctcagtgactattcccgagctggacgataataaggccgaagaaggcgacatcctggctgagtgcattaactctgcaatgcccaaagggaagtcccataaaccatttcgcgtcaagaagatcatggatcaggttcagcaagcttccgcttcgagctctgctccgaacaagaatcagctggatggtaagaaaaagaagcctacctctcctgtcaaaccaatcccccagaacacagagtaccggacccgggtgcggaagaatgccgatagtaagaacaacctaaatgctgagagggtgttcagcgataacaaggattctaagaagcagaacctgaagaacaattctaaagtttttaatgataaattgcctaataacgaggatcgggtgagaggcagttttgctttcgatagtccccaccattatacgccaattgaaggtaccccctactgcttctccagaaacgattctctttcatctctagacttcgatgatgacgacgtggacctgtcccgagaaaaagccgagctccggaaggccaaagaaaacaaggagagtgaggctaaagtgacaagtcacaccgaactcacatccaaccaacagagcgccaacaagacacaggcaattgccaaacagcccattaaccggggccagccaaagcctatcctacagaaacagtctacgttccctcagagctcgaaggatattcccgataggggagccgcaactgacgagaagttgcagaacttcgctattgagaacacacccgtttgtttcagtcacaattcatccctttcttctttgagtgacatcgaccaggaaaacaacaataaagagaatgaacctatcaaagagacggagcctccggacagccagggcgaaccctcgaaaccgcaagccagcggatatgcacctaagtcatttcatgtcgaagacacaccagtttgctttagccgtaacagtagtctatccagcctgagcattgattccgaggacgacctcctccaggagtgcattagttccgctatgcctaaaaaaaaaaagccgtcccggctcaagggagacaacgagaagcacagccctaggaacatggggggtatattaggagaggaccttacgttagatctcaaagacatccagcgccccgactctgaacacggactcagccctgattccgagaacttcgactggaaagcaatccaggaaggcgccaattccatcgttagtagcttacatcaggctgctgcagctgcctgtctgtcacgccaggccagttcagactcagacagcattctgtccctcaaatcgggcatttcattaggaagccccttccatctgacccctgatcaggaagagaagccttttacctctaacaaaggaccacgaattcttaagccgggtgagaaaagcaccctggaaaccaagaaaatcgagtctgagagtaagggtattaaaggcgggaaaaaagtatataagagccttatcacaggaaaggttcgtagtaactccgagatctccggccaaatgaaacagcctctccaggcgaacatgcccagcatttcacgaggccgcacaatgattcacattcctggcgtgcgcaacagcagctctagtactagcccggtgagcaaaaaaggaccgccactaaaaacccctgcctccaaaagtccttctgagggccagacagccaccacgagtcccaggggagccaaaccatcggtcaaaagcgagttatctccagtggcgaggcagacctctcagatcggtggaagctctaaggctccctcaaggtccggcagcagagacagcaccccgagccggcccgcccagcagcctttaagccggccaattcagtctccaggaaggaattcaatctcaccagggcggaacgggatctcaccccctaataagctgtcccagctcccacgaacctcctctccatccacggccagcactaagtcatctgggagtggaaaaatgtcttatacttcacctggccgacagatgtcacaacagaatctgaccaaacagactgggctgtcgaagaacgcaagttctatcccgcgctcagaaagcgcaagcaagggcttgaaccagatgaataacgggaacggagcaaataagaaagtggaactatcccgaatgtcatcgaccaagtccagtgggagtgagagcgaccgcagcgagcgacccgtgttggtccgccagagtacttttatcaaagaggccccgtctccgacactgaggcgcaagcttgaggagagtgcctccttcgagtccctgagtccgtcaagcaggcccgcctctcccacacgcagccaagcccagacgccagtgctgtcccctagcctcccggatatgtcccttagtacccacagctccgtccaggctggtggatggaggaaactgcctcccaacctgtcccccaccattgaatataacgatggtcgccccgcaaaaagacatgacatagcccgatcacattccgaaagtcccagccgtctccctatcaatcggtccggaacgtggaaacgcgagcactctaaacactcttcttctctgcctagagtctccacctggcgccgcaccggttccagctctagcatcctatccgcatctagtgaatcctctgaaaaagcaaagagtgaagacgagaaacacgttaatagcattagcggaactaagcagtccaaggagaatcaagtgtccgctaagggaacttggagaaaaattaaggaaaacgaattctctcctactaactcgacatcacagaccgtgagctcgggagccaccaatggggcagaatccaaaacccttatttaccagatggcacccgccgtatctaagacagaagacgtgtgggtgaggattgaggactgccccattaacaatccaagatctggacggtctcctacgggaaatactccccctgtgattgattcggtttctgagaaggcaaatcctaacatcaaagattcgaaggataaccaggcgaagcagaacgtcggcaacggctccgttccaatgcggacagttggactagaaaataggctcaactccttcatccaggtcgacgctccggaccagaagggaacggaaataaagcccggtcaaaacaatcccgtgcctgtgagcgaaaccaacgagtcgagcattgtggaaagaacgccattcagctccagttcctcttcaaagcactcctccccaagtggaaccgtggctgcacgagtgacgccctttaactacaatcccagccctcgtaagagctcggcagactcaactagcgcgcgcccatctcaaattccgacacctgtaaacaacaatactaaaaagcgggattcaaaaacagattccaccgagagttctgggacccaaagtcccaagcgccacagcggtagttacctggtgactagcgtgtag

SEQ ID NO: 45055 - DNA, 8532 bp, Artificial Sequence
  derived and/or modified sequence
atggctgcggcctcttatgatcagttgctgaaacaggtcgaagcactgaaaatggagaactcaaaccttcggcaggaactcgaggacaatagtaatcacttaacaaaacttgaaaccgaggcctctaacatgaaggaggttctgaagcagctacaggggagtatcgaagacgaggccatggcaagcagtggccagattgatctcctggaacggcttaaagaattaaatctcgattcgtccaattttcctggggttaaactgagatccaagatgagccttaggtcctacggaagcagggagggatccgtaagctcccgaagcggcgagtgttcccccgtgccgatgggatcctttccaagacgcggctttgtcaatggatcccgtgaaagcactggatatctggaagaattggaaaaggaacgcagccttctgctagctgatttagacaaggaggagaaagagaaagactggtactacgctcagctgcaaaatctgactaaaagaatcgacagcctgcctctgacagagaacttttctttgcagacagatatgacaaggcggcagctggagtacgaggcccgacagattcgggtggccatggaggagcagttagggacatgtcaagacatggaaaagcgggcccagaggcgaattgcacggattcaacagatagagaaggatattcttcgcattcgccagctgctccaatcccaagctaccgaagccgaaaggtcttctcaaaataaacacgaaacggggtctcatgatgccgaaaggcaaaacgaaggccagggtgtgggggaaatcaatatggcgactagcgggaacggccagggttcaactactcgcatggatcacgaaacggcaagcgtgttgtctagttccagcacacactctgccccgcggagactgacctctcacttgggcaccaaagtggagatggtttattcattgctctccatgctggggacccacgataaggatgatatgtcccgaactctcctcgccatgtcctcatctcaagattcgtgcatttccatgcgccagagtggttgcctcccactgctgattcaactgctgcacggaaatgacaaagacagtgttctgctggggaattcaagagggtccaaagaggcccgggcccgggccagcgcagctctacacaatatcattcacagccagcctgacgacaaaagaggcagaagggaaattagggtcctgcacctcctcgagcagattcgcgcttattgcgagacctgctgggagtggcaggaggcacacgaacccggtatggaccaagataagaatcccatgcctgctccagtggagcatcagatctgccccgcggtgtgtgtgcttatgaaactgtctttcgacgaagagcacagacatgccatgaatgagctggggggccttcaggccatcgctgagcttctgcaggtggattgcgaaatgtacggcttgaccaacgaccactacagcattacactacggcggtatgccgggatggcccttacaaatctcacctttggcgacgttgccaataaagccacactgtgcagtatgaaaggttgtatgcgcgcacttgtggcccagctgaaatctgagagcgaggacttacagcaggtcattgcgagtgtgctgcgcaacctgtcgtggagagccgacgtaaacagtaaaaagaccttgagagaagtaggttccgttaaagcacttatggaatgtgccctcgaggtaaaaaaggaatccacattgaaatcggtgctgtctgccctttggaacctgagtgcacattgtaccgagaacaaggctgatatctgcgccgtagacggagcactggcctttctggtgggcacattgacataccgtagccagacgaacacactcgccataatagaatcaggaggcggcatcctgagaaacgtatctagcctgattgccactaatgaagatcatcgacaaatccttcgcgaaaataattgccttcagacactgttgcaacacttgaagtcacacagtttaacaatcgttagtaatgcgtgtggcaccttgtggaatctgtcagcccggaatccaaaggatcaggaggctctgtgggatatgggggctgtgagtatgctgaagaatctgatccactccaagcataagatgattgccatgggatcagccgcagccctccggaacctgatggccaatagacccgctaaatacaaagacgccaacatcatgagcccgggcagttcccttccaagtctccacgtcagaaagcagaaagccttggaagccgagctggacgcgcaacacttaagtgagacctttgacaatattgacaatctgagccctaaagcgagtcatcgaagcaaacagcgccacaagcagagtttgtacggggactatgtgtttgatacaaacaggcacgacgataaccgttcagataattttaatactggcaatatgaccgtcctgtccccgtacctgaacacaaccgtgctgcccagcagctcctcttcgagaggcagtctggatagctctagaagtgagaaagatcgcagtctggagagggaaagaggcatcgggctgggaaattaccatcctgccacagaaaatccgggcacttcttctaaacggggcctgcagatatccaccaccgcggcccagatcgccaaagtaatggaggaggtgtccgccatccataccagccaggaggatagatcctctggttctaccaccgaacttcactgcgttactgacgaacggaacgcactgcgtaggagctcagctgctcacactcacagtaatacgtataattttactaagtccgaaaacagtaaccgcacatgtagtatgccttacgcgaagctggagtacaagcgcagtagcaacgactctctgaattcagtttccagcagcgatggctatgggaaaagagggcagatgaaaccctccatcgaatcgtactccgaggatgacgaatccaagttttgctcatacgggcagtacccagccgatctggcgcataaaatccacagcgcaaatcacatggatgacaatgatggggaactagacacccccatcaattacagcctgaagtactccgacgagcagctaaatagcggccgccagagtcctagccagaatgagcggtgggcacgccctaaacacatcattgaagatgagattaagcaatccgaacagaggcaatctcggaaccagagtacaacataccctgtctacactgagtcaaccgatgataaacatttaaaattccaaccccactttggccagcaggagtgcgtgtctccctaccgctcccgcggggctaatggctcagaaaccaaccgagtaggatctaaccacggcatcaatcaaaatgtgagtcagagtctgtgccaggaggatgactacgaagatgacaaaccaacaaactactctgaaagatactccgaagaagagcagcatgaggaagaggaaagacccaccaactattccatcaagtataacgaagaaaagcgtcacgttgaccagcccatagattactctctgaagtacgcgactgatataccttcttcccaaaagcagagctttagtttctctaaatcctcctcaggacaaagtagtaaaaccgaacacatgagttcctcttctgagaatacctctactccctcctcgaacgcaaaaagacagaaccagttacacccttcgtccgcacagagccgcagtggacagccacagaaggctgctacatgcaaggtcagtagtataaaccaagaaacgatccagacatactgtgttgaggacacccctatctgtttctctcggtgttctagtttgtcctccctgtcgtccgcagaggacgaaatcggatgcaatcagacgacacaggaagccgattctgcgaacacactgcagattgcggaaatcaaagagaagatagggactaggtccgcagaagatcccgtgtcagaggtgcctgcagtatcacagcacccgcggacaaaatcatcccgcttacaaggcagttctctctcctcagaatctgcgaggcataaggccgttgagttttccagcggcgccaagtctccttccaagtccggagcccagacgcccaaaagccctcctgagcactacgtgcaagaaacccctctaatgtttagtaggtgtacatctgtgtccagtttggatagctttgaatcccgatctatcgcttcttcggtgcagtccgagccttgtagcggcatggtgtccggcatcatttccccatccgacctgcccgatagccctgggcaaaccatgcctccaagtagatctaagactcctccaccaccacctcaaacagctcagactaaacgagaagtacccaagaataaggcccctacagcagaaaagcgcgagagcggccccaagcaagcagccgtgaatgcagccgtgcagagggtgcaagttctgccagatgccgatactctccttcattttgccacagagtcaactcccgacggctttagctgcagttctagcctctccgcattgagtcttgatgaaccttttatccaaaaggatgtggagcttagaattatgccacccgtgcaggagaacgacaatggcaacgagactgaaagtgagcaacccaaagagagcaatgagaaccaggagaaggaggctgaaaagacaatcgacagcgaaaaggacctcctggatgactcggatgatgatgacatagagattctcgaagagtgcataatttccgccatgcccaccaagtcttctcggaaggctaagaagccggcccagacagcctcgaaattgcccccacccgtggcccggaagccaagtcaacttcctgtatataagttgctgccctcccagaatcggctgcaacctcagaagcacgtgagttttacacctggcgatgacatgccccgagtctactgtgtggagggaacccccatcaatttctcaacggccacaagcttaagcgacctcactattgagagtcccccaaacgaacttgctgctggcgagggcgtgagggggggagcccagagcggggagttcgaaaagagagatacaatcccaacggaaggccgatcaactgacgaggcacaggggggtaagaccagttctgttactattccagagctagacgacaataaagcagaagagggcgatatcctagctgagtgcattaacagcgcaatgcctaaagggaaatcccataaacctttccgggtcaagaaaataatggaccaggtgcagcaggcaagtgctagttctagcgcccccaacaagaaccagctcgacggaaagaaaaagaaacctactagccctgtgaaaccaatccctcaaaataccgaataccgcacacgtgttcggaagaacgctgactccaaaaataatctgaacgcagaaagggtgtttagcgataataaagattctaagaaacagaacctgaagaataattccaaggttttcaacgacaagttacctaataacgaggacagagtacgagggagttttgcgtttgatagtccgcatcattacactccaatcgagggcacgccatactgtttcagccgcaacgacagtctctcctcactggacttcgatgatgatgacgtggacctgtctcgggagaaggctgaactgcggaaggcaaaagagaataaggagagcgaagcaaaggtcacctctcacaccgagctgacttcgaaccagcagtccgccaataagacccaggcaattgctaaacaacccatcaacagaggtcaacctaaacccattctgcagaagcagtccacattccctcagagctcgaaggacatacccgacagaggtgcggcaacagacgaaaaactccaaaatttcgccattgagaatactccggtctgcttctcccacaactctagcctttctagcttgtcagatattgaccaggaaaacaataacaaggaaaatgagccaatcaaagagacagagcccccagattcccagggggaaccttcaaagccccaggccagcggctatgcacctaaatccttccatgtcgaggataccccagtatgcttctctagaaactcttcgctgtcatctctgagtattgatagcgaggatgatctcctgcaggagtgtatatctagtgccatgccgaagaagaagaagccctctcgcctgaaaggcgacaatgaaaagcattcaccaagaaatatgggcggcatccttggggaagatctgactttggacctcaaagacattcaaaggcctgactccgagcatggcttgagccctgatagtgagaactttgactggaaggccatccaggagggtgccaatagcattgtttcaagcctgcaccaagccgcggctgctgcctgcctgagccgtcaagctagtagcgactccgactcgattttgtccctcaaatccggcatttcactgggtagccctttccaccttactcccgatcaggaagagaaaccattcacgtccaacaaaggtcctagaatcctaaagcccggggaaaagagcacactggagaccaaaaagattgaaagtgaaagtaagggaatcaagggtggaaagaaagtgtacaaatccctcatcacgggcaaggtccgatctaattcagagatttcggggcaaatgaagcagccgctccaagccaacatgccgagcattagccgcggcaggactatgattcacatacccggcgtaagaaattcgagcagtagtactagccccgtgagcaagaagggaccccccctgaaaacccctgcttcaaagagcccatccgaaggtcaaactgctacgaccagccctcgaggtgctaaacccagcgtgaaaagtgaactaagcccggttgcccgacagacaagccagatcggcgggagcagcaaggccccatcccgctccggctctagggactccacaccctcccgtccagctcagcaacctctctctagacctattcagagtccgggacgaaacagtatctcccctgggaggaatggcatttcgccacctaataaattgagtcaactgcctcgcacgtccagccccagtacagcatctacaaaatctagtggatccggtaagatgagctatacatctcctgggaggcaaatgtcacaacagaatctgaccaagcagaccggcttgagtaaaaatgcctcttctatcccgagaagcgagagcgcctcaaagggtctcaatcagatgaacaacggcaacggagcaaataaaaaggtggagttaagcagaatgagcagcacaaagagcagtggctcagagagcgacaggagcgagcggcctgtcttggtgaggcagagcaccttcatcaaagaagcccccagcccaaccctccgtcgaaagctcgaggaaagtgcctcttttgaaagcctctctccgagctcacggccagcctcacctactagatcccaggcccagacccctgtgctgagtccatccctgccggacatgagcctcagcactcacagcagtgtccaggcaggtgggtggcggaagttgccaccaaacctgtcccccaccattgagtataacgacggccggccagctaaacgtcatgatatcgcaagaagccattctgagagtccatctaggctccccatcaaccgtagtggtacctggaagcgcgagcatagtaagcactccagttccctgcctagggtaagcacctggcggcgcaccggctctagctcttccatcctgagcgctagttctgagagcagcgagaaggccaagagtgaagacgagaagcacgtgaattccattagcggaaccaaacagagcaaggagaaccaagtcagtgcaaagggaacttggcggaagatcaaggagaacgaattttctccaacaaacagtaccagtcagactgtctcaagcggtgcaacaaatggggccgagtccaaaaccttgatttaccaaatggctcccgccgtgagcaaaacagaagacgtgtgggttcgtatcgaggattgtcctataaacaaccctagatcgggccgctcacctaccggtaatacgcctcccgttattgatagtgtatctgaaaaagcaaaccctaatatcaaggatagcaaagacaatcaggcaaaacagaatgtgggcaatggttccgtccctatgcgcaccgttgggttggaaaaccgcctgaactcttttatccaggttgacgcccccgatcagaaaggcaccgagataaaaccagggcagaacaacccggtcccagtttctgagacaaacgagagcagcatcgtggagaggaccccattttccagcagttctagcagcaagcattcatccccttctggtacagtggccgcgagagtcactccttttaattacaatcccagccctagaaagtccagtgccgatagcacaagcgctcggcccagccagatcccaaccccagtgaataataataccaaaaagagagattccaagaccgattccacagagtcctctggcacgcagtctccaaagaggcactctggtagttatctggtaaccagtgtgtag

SEQ ID NO: 45056 - DNA, 864 bp, Artificial Sequence
  derived and/or modified sequence
atggccgcagcctcctacgaccagttgctcaaacaggtggaggctcttaagatggagaactcgaatctcagacaagagctcgaagataattccaaccacctgacgaagctggagactgaagcctcgaatatgaaagaggtgctgaaacagctccaaggcagcattgaggacgaagccatggcaagcagcggccagatcgacctgctggaaaggctgaaagaactgaaccttgacagttctaatttcccaggggtcaagctgcgatctaagatgtctttgcgtagttatgggtccagagaaggcagcgtgtcaagtcgcagtggcgagtgctcaccagttcctatgggctcttttccacgcagaggctttgtcaacggatccagggagagcacgggatatctggaggagttggaaaaggaacgctccctgcttctggccgatctcgacaaagaagaaaaggaaaaagactggtactacgctcagctacagaatctgactaagaggatcgactcacttcctcttaccgagaatttcagccttcagactgatatgacacgccgacaactggaatacgaggctcgccagattcgagtcgccatggaggagcaactgggcacctgtcaagacatggaaaagagagcgcagaggaggattgcgagaatccagcagatcgaaaaagatatactgagaattagacagctgttgcagtcccaagccactgaggccgaacgatccagtcagaacaaacatgagaccggttcacacgatgccgaacgccagaacgagggacaaggcgtgggggaaattaatatggcgactagcggaaatggacagatcgaaaaaatgcgaatgtttgaatgctag

SEQ ID NO: 45057 - DNA, 357 bp, Artificial Sequence
  derived and/or modified sequence
atggctgctgctagttacgaccaactgttaaagcaagtggaagccctcaaaatggagaactctaatctgaggcaagagctggaggataacagcaaccaccttactaagctggagacagaagcttctaatatgaaggaggtgctgaaacaattacaaggatctatagaagacgaagctatggctagtagtggacagatagatctgctcgagaggctgaaggaacttaatctggactccagcaacttccccggcgtgaaattgagatccaagatgagcttaaggtcctacggttcaagggaaggctctgtgagcagcaggagcggtgagtgttctccggtcccaatgggatccttttag

SEQ ID NO: 45058 - DNA, 3918 bp, Artificial Sequence
  derived and/or modified sequence
atggcggccgcctcctacgaccagctgctcaaacaggtagaggctctgaaaatggaaaactctaacctgagacaggagctcgaagacaactccaaccaccttaccaagctggagaccgaggcctccaacatgaaagaagtactgaagcagctccagggtagtattgaggacgaggccatggcctcttcaggacagatagatttgctggaaagactcaaagagttgaacctcgactcatctaactttccaggagtcaaactcaggagcaagatgtccctacggagttacgggtctagggaagggtccgtgtcctctcgaagcggggagtgcagccctgtgcctatgggatcgtttcccaggagaggatttgtgaacggttctcgggagtctactggctacctagaggaactggagaaagaaaggagcttgctcctggcggacctagataaggaggagaaggaaaaagattggtactatgctcagctccagaatctgactaaaagaattgattcgctaccgttgacagaaaatttctccttacagacagatatgacaagacggcagctggagtatgaagcccggcagattagagtggcaatggaggagcagctggggacgtgccaggacatggagaagcgtgcccagcggagaatcgcccgtattcagcaaatcgagaaggacattctgcggattagacagttgcttcagtcacaggctacagaggctgagagatcttcgcagaataaacacgagactggctcgcacgacgccgagcggcagaatgaaggccagggcgtgggggagatcaacatggcaacctctggcaatggacaagggtccaccacgaggatggaccatgaaaccgccagtgtattgagttcaagctccacacacagcgccccaaggaggctcaccagccatcttgggaccaaagtggagatggtgtatagcctgctcagcatgctgggtacccatgataaggatgacatgtcacggactctgctcgcaatgtcatccagccaagatagctgcatctccatgaggcagagtggctgtctgcccctcctaattcagctattgcatgggaacgacaaggatagtgtgctcctgggaaacagtcggggctccaaggaggcccgggcccgggcctcagctgccctacataacatcatccactcccagccggacgataaacgggggcgtcgcgagatccgagttctgcatctgctcgagcagattagagcttattgcgaaacgtgttgggagtggcaagaagcccacgagccaggaatggatcaggataaaaaccccatgccggcccccgtggaacatcagatttgtcctgccgtttgcgtgctaatgaaactctccttcgacgaagagcacaggcacgcaatgaatgagctgggtggactgcaggccatcgccgagctacttcaagtcgattgcgagatgtacggactgacgaatgaccactactccattactctgaggcgatacgccggaatggcacttacaaatctgacattcggggacgtcgctaacaaagctaccttgtgttcaatgaagggatgcatgcgcgcactagtcgcacagctgaaatcagaatcagaagacttacaacaggtgattgcatccgttcttcgcaatctgtcttggcgcgcggacgtgaatagtaaaaagacactccgtgaggtgggctccgtgaaggcccttatggagtgcgcattggaggtgaaaaaggagagtactttgaagtccgtgctgagcgccctttggaatctctcggctcattgtactgagaataaggctgacatctgcgccgtcgacggagcactggcatttctagtaggtaccctcacataccgatctcagacgaatacactagctatcatcgagagcggcgggggcattctcaggaatgttagtagtctgatcgccacaaatgaagatcatcgacagattctacgtgaaaacaattgcttacagacactactgcagcatttgaagagtcacagccttactattgttagcaacgcttgcgggaccttgtggaatctgagcgctcgcaaccccaaggatcaggaggccctctgggatatgggtgccgtcagcatgctgaaaaaccttatacacagcaagcataagatgatagcaatgggctccgcagccgcgctaagaaacctgatggccaacagacccgcaaaatacaaagacgctaatataatgtcgcccggatcttcactacccagccttcacgtgcgcaaacagaaggctctggaggccgagttggacgcgcagcatctatcagagacattcgacaacattgataatctgtcaccaaaggcaagccatagatctaagcaacgtcacaaacagagcctttacggagactatgtctttgacacaaaccggcatgatgacaatcgctctgataatttcaataccgggaatatgacagtcctgtccccttatctgaacactactgtcttgcctagtagctcttctagcagaggctccttagacagctcccgcagcgagaaagatagatcactggaaagagagcgaggcataggactgggcaattaccatccggccacggaaaaccccggcacatcttccaagcggggcttgcagatctctacgaccgcggcccaaatagcaaaggtcatggaggaggtgtctgcgattcacacttctcaggaagacagaagcagcggcagtaccacagaactgcactgcgtgaccgacgaaagaaacgccctccggcgctcttctgcggcgcacactcattccaatacttacaacttcaccaaaagcgaaaattcgaatcggacctgttcgatgccttatgcgaagttggaatacaaacgctcctccaatgacagcctgaatagtgtttcctctagcgatgggtatggaaaacgtggacaaatgaagccatcaatagagtcctatagcgaggacgacgagtcaaaattttgcagctatgggcagtaccctgcagacctggcccataaaatccacagtgcaaaccacatggacgataatgacggagaactggacaccccaattaattatagtctcaaatattccgatgaacagcttaatagcggcaggcaaagcccttcccaaaatgagagatgggcgaggccgaaacatataatcgaggatgagattaagcaatccgagcagcggcaaagtcggaaccagtctaccacctatcccgtttacaccgagtctacagacgacaaacatcttaaattccagccacattttggacagcaagagtgtgtctctccgtatcgatcaaggggtgctaatgggagcgaaactaatcgcgtcggctccaaccacgggataaaccagaatgtatcgcagagcctctgccaggaggacgactatgaggatgacaagccgacgaactattctgaacgctattcggaagaggaacagcacgaggaagaggaaaggccaactaactactccattaagtacaacgaggagaagcgacatgtagatcagccaatcgactactcactcaagtatgccaccgacatcccctcctcacagaaacagagcttttcattttcgaagtcctctagcggtcagtcgtctaagaccgagcatatgtcaagctctagcgaaaatacctctaccccttcatctaatgctaaacgccagaaccagctacacccaagttcagcccagagccgctccggccagccacagaaggcagcaacgtgtaaagtctcctcaatcaatcaggaaaccattcagacctactgcgtcgaggacaccccaatctgcttctctcggtgcagctctctttccagtttgtctagcgcggaggacgagatcggttgcaatcagaccacacaggaggccgattcggctaacactttgcaaatcgcttag

SEQ ID NO: 45059 - DNA, 8532 bp, Artificial Sequence
  derived and/or modified sequence
atggctgctgccagctatgaccagctgctgaagcaggtggaggccctgaagatggagaacagcaacctgcggcaggagctggaggacaacagcaaccacctgaccaagctggagacagaggccagcaacatgaaggaggtgctgaagcagctgcagggcagcattgaagatgaggccatggccagcagcggccagattgacctgctggagcggctgaaggagctgaacctggacagcagcaacttccctggggtgaagctgcggagcaagatgagcctgcggagctatggcagccgggagggctctgtgagcagccgctctggagaatgttctcctgtgcccatgggcagcttcccccggcggggctttgtgaatggcagccgggagagcacaggctacctggaggagctggagaaggagaggagcctgctgctggccgacctggacaaggaggagaaggagaaggactggtactatgcccagctgcagaacctgaccaagagaattgacagcctgcccctgacagagaacttcagcctgcagacagacatgacccggcggcagctggagtatgaggcccggcagatccgggtggccatggaggagcagctgggcacctgccaggacatggagaagagggcccagaggcgcatcgcccgcatccagcagatcgagaaggacatcctgcgcatccggcagctgctgcagagccaggccacagaggccgagaggagcagccagaacaagcatgagaccggcagccatgatgctgagcggcagaatgaaggccagggcgtgggggagatcaacatggccaccagcggaaatggccagggcagcaccaccaggatggaccacgagacagcctctgtgctgagcagcagcagcacccacagcgccccccggcggctgaccagccacctgggcaccaaggtggagatggtgtacagcctgctgtccatgctgggcacccatgacaaggatgacatgagcaggaccctgctggccatgagcagcagccaggacagctgcatctccatgaggcagagcggctgcctgcccctgctgatccagctgctgcatggaaatgacaaggacagcgtgctgctgggcaacagccggggcagcaaggaggcccgggcccgggccagcgctgccctgcacaacatcatccacagccagccagatgacaagagaggaagaagagagatccgggtgctgcacctgctggagcagatccgggcctactgtgagacctgctgggagtggcaggaggcccacgagcccggcatggaccaggacaagaaccccatgcctgcccctgtggagcaccagatctgcccagctgtgtgtgtgctgatgaagctgagctttgatgaggagcacagacatgccatgaatgagctgggcggcctgcaggccatcgccgagctgctgcaggtggactgtgagatgtatggcctgaccaatgaccactacagcatcaccctgcggcgctatgccggcatggccctgaccaacctgacctttggagatgtggccaacaaggccaccctgtgcagcatgaagggctgcatgagggccctggtggcccagctgaagtctgagagcgaggacctgcagcaggtgattgcctctgtgctgaggaacctgtcctggagggcagatgtgaacagcaagaagaccctgcgggaggtgggctctgtgaaggccctgatggagtgtgccctggaggtgaagaaggagagcaccctgaagtctgtgctgagcgccctgtggaacctgagcgcccactgcacagagaacaaggctgacatctgtgctgtggatggagccctggccttcctggtgggcaccctgacctaccgcagccagaccaacaccctggccatcatcgagagcggcggcggcatcctgagaaatgtgagcagcctcatcgccaccaatgaagaccaccggcagatcctgcgggagaacaactgcctgcagaccctgctgcagcacctgaagagccacagcctgaccatcgtgtccaatgcctgtggcaccctgtggaacctgagcgccaggaaccccaaggaccaggaggccctgtgggacatgggcgctgtgtccatgctgaagaacctgatccacagcaagcacaagatgattgccatgggcagcgctgctgccctgaggaacctgatggccaacagacctgccaagtacaaggatgccaacatcatgagccctggcagcagcctgcccagcctgcacgtgaggaagcagaaggccctggaggccgagctggatgcccagcacctgtctgagacctttgacaacatcgacaacctgagccccaaggccagccacaggagcaagcagaggcacaagcagagcctgtatggagactatgtgtttgacaccaacagacatgatgacaacagaagtgacaacttcaacacaggcaacatgacagtgctgagcccctacctgaacaccaccgtgctgcccagcagcagcagcagccggggcagcctggacagcagccgctctgagaaggacaggagcctggagcgggagcggggcatcggcctgggcaactaccacccagccacagagaaccctggcaccagcagcaagaggggcctgcagatcagcaccacagctgcccagatcgccaaggtgatggaggaggtgtctgccatccacaccagccaggaggacaggagcagcggcagcaccacagagctgcactgtgtgacagatgaaagaaatgccctgcggcgcagcagcgctgcccacacccacagcaacacctacaacttcaccaagtctgagaacagcaacagaacctgcagcatgccctatgccaagctggagtacaagaggagcagcaatgacagcctgaacagcgtgagcagcagtgatggctacggcaagaggggccagatgaagcccagcattgagagctacagtgaagatgatgagagcaagttctgcagctatggccagtacccagctgacctggcccacaagatccacagcgccaaccacatggatgacaatgatggagagctggacacccccatcaactacagcctgaagtacagtgatgagcagctgaacagcggccggcagagccccagccagaatgaacgctgggcccggcccaagcacatcattgaagatgagatcaagcagagcgagcagaggcagagcaggaaccagagcaccacctaccctgtgtacacagagagcacagatgacaagcacctgaagttccagccccacttcggccagcaggagtgtgtgagcccctaccgcagcagaggagccaacggcagcgagaccaacagagtgggcagcaaccacggcatcaaccagaatgtgtcccagagcctgtgccaggaggatgattatgaagatgacaagcccaccaactacagcgagcgctacagcgaggaggagcagcacgaggaggaggagcggcccaccaactacagcatcaagtacaatgaggagaagagacatgtggaccagcccatcgactacagcctgaagtatgccacagacatccccagcagccagaagcagagcttctccttcagcaagagcagcagcggccagagcagcaagacagagcacatgagcagcagcagcgagaacaccagcacccccagcagcaatgccaagaggcagaaccagctgcaccccagcagcgcccagagccgcagcggccagccccagaaggccgccacctgcaaggtgagcagcatcaaccaggagaccatccagacctactgtgtggaggacacccccatctgcttcagccgctgcagcagcctgagcagcctgagcagcgcagaagatgaaattggctgcaaccagaccacccaggaggccgacagcgccaacaccctgcagattgctgagatcaaggagaagattggcaccaggtctgcagaagatcctgtgtctgaggtgcctgctgtgtcccagcaccccaggaccaagagcagccggctgcagggcagcagcctgagcagcgagagcgcccggcacaaggctgtggagttcagcagcggggccaagagccccagcaagagcggggcccagacccccaagagccccccagagcactacgtgcaggagacccccctgatgttcagccgctgcacctctgtgagcagcctggacagctttgagagccgcagcatcgccagctctgtgcagagcgagccctgcagcggcatggtgtctggcatcatcagccccagcgacctgcctgacagccctggccagaccatgccacccagccgcagcaagaccccacctcctccaccccagacagcccagaccaagcgggaggtgcccaagaacaaggcccccacagctgagaagcgggagagcggccccaagcaggccgctgtgaatgctgctgtgcagagggtgcaggtgctgcctgatgctgacaccctgctgcactttgccacagagagcaccccagatggcttcagctgcagcagcagcctgagcgccctgagcctggatgagcccttcatccagaaggatgtggagctgcgcatcatgcctcctgtgcaggagaatgacaatggaaatgaaacagaaagtgagcagcccaaggagagcaatgaaaaccaggagaaggaggccgagaagaccattgattctgagaaggacctgctggatgacagtgatgatgatgacatcgagatcctggaggagtgcatcatcagcgccatgcccaccaagagcagcaggaaggccaagaagccagcccagacagccagcaagctgcccccacctgtggccaggaagcccagccagctgcctgtgtacaagctgctgcccagccagaaccggctgcagccccagaagcacgtgtccttcaccccaggagatgacatgccccgggtgtactgtgtggagggcacccccatcaacttcagcacagccaccagcctgagtgacctgaccatcgagagccccccaaatgagctggccgccggggagggcgtgcggggcggggcccagagcggggagtttgagaagagggacaccatccccacagagggccgcagcacagatgaggcccagggcggcaagaccagctctgtgaccatccctgagctggatgacaacaaggccgaggagggggacatcctggccgagtgcatcaacagcgccatgcccaagggcaagagccacaagcccttccgggtgaagaagatcatggaccaggtgcagcaggccagcgccagcagcagcgcccccaacaagaaccagctggatggcaagaagaagaagcccaccagccctgtgaagcccatcccccagaacacagagtaccgcaccagggtgaggaagaatgctgacagcaagaacaacctgaatgctgagagggtcttcagtgacaacaaggacagcaagaagcagaacctgaagaacaacagcaaggtgttcaatgacaagctgcccaacaatgaagatagagtgcggggcagctttgcctttgacagcccccaccactacacccccatcgagggcaccccctactgcttcagcagaaatgacagcctgagcagcctggactttgatgatgatgatgtggacctgagccgggagaaggccgagctgaggaaggccaaggagaacaaggagagcgaggccaaggtgaccagccacacagagctgaccagcaaccagcagagcgccaacaagacccaggccatcgccaagcagcccatcaacagaggccagcccaagcccatcctgcagaagcagagcaccttcccccagagcagcaaggacatcccagacagaggagctgccacagatgagaagctgcagaactttgccatcgagaacacccctgtgtgcttcagccacaacagcagcctgagcagcctgagtgacatcgaccaggagaacaacaacaaggaaaatgagcccatcaaggagacagagcccccagacagccagggcgagcccagcaagccccaggccagcggctacgcccccaagagcttccacgtggaggacacccctgtgtgcttcagcaggaacagcagcctgagcagcctgagcattgacagtgaagatgacctgctgcaggagtgcatcagcagcgccatgcccaagaagaagaagcccagccggctgaagggggacaatgagaagcacagccccaggaacatgggcggcatcctgggggaggacctgaccctggacctgaaggacatccagaggccagacagcgagcacggcctgagcccagacagtgaaaattttgactggaaggccatccaggagggcgccaacagcatcgtgagcagcctgcaccaggccgctgctgctgcctgcctgagccggcaggccagcagtgacagcgacagcatcctgagcctgaagagcggcatcagcctgggcagccccttccacctgaccccagaccaggaggagaagcccttcaccagcaacaagggcccccgcatcctgaagccaggagagaagagcaccctggagaccaagaagattgaaagtgagagcaagggcatcaagggcggcaagaaggtgtacaagagcctcatcaccgggaaggtgcgcagcaacagcgagatcagcggccagatgaagcagcccctgcaggccaacatgcccagcatcagccggggccgcaccatgatccacatccctggggtgaggaacagcagcagcagcaccagccctgtgtccaagaagggcccccccctgaagaccccagccagcaagagccccagcgagggccagacagccaccaccagccccaggggggccaagcccagcgtgaagtctgagctgagccctgtggcccggcagaccagccagatcggcggcagcagcaaggcccccagccgcagcggcagccgggacagcacccccagcaggcctgcccagcagcccctgagccggcccatccagagccctggcaggaacagcatcagccctggaagaaatggcatcagcccccccaacaagctgagccagctgcccaggaccagcagccccagcacagccagcaccaagagcagcggcagcggcaagatgagctacaccagccctggccggcagatgagccagcagaacctgaccaagcagacaggcctgagcaagaatgccagcagcatccccaggtctgagagcgccagcaagggcctgaaccagatgaacaatggaaatggagccaacaagaaggtggagctgagcaggatgagcagcaccaagagcagcggcagcgagagtgacagaagtgagaggcctgtgctggtgcggcagagcaccttcatcaaggaggcccccagccccaccctgcggaggaagctggaggagagcgccagctttgagagcctgagccccagcagcaggcctgccagccccaccaggagccaggcccagacccctgtgctgagccccagcctgcctgacatgagcctgagcacccacagctctgtgcaggccggcggctggaggaagctgccccccaacctgagccccaccatcgagtacaatgatggccggcctgccaagagacatgacatcgcccggagccacagcgagagccccagccggctgcccatcaacagaagtggcacctggaagcgggagcacagcaagcacagcagcagcctgccccgggtgtccacctggaggagaacaggcagcagcagcagcatcctgagcgccagcagcgagagcagcgagaaggccaagtcagaagatgagaagcacgtgaacagcatcagcggcaccaagcagagcaaagaaaaccaggtgtctgccaagggcacctggaggaagatcaaggaaaatgagttcagccccaccaacagcaccagccagacagtgagcagcggggccaccaacggggctgagagcaagaccctcatctaccagatggccccagctgtgtccaagacagaagatgtgtgggtgagaattgaggactgccccatcaacaaccccaggagcggccgcagccccaccggcaacaccccacctgtgattgattctgtgtctgagaaggccaaccccaacatcaaggacagcaaggacaaccaggccaagcagaatgtgggcaatggatctgtgcccatgaggacagtgggcctggagaaccggctgaacagcttcatccaggtggatgccccagaccagaagggcacagagatcaagccaggccagaacaaccctgtgcctgtgtctgagaccaatgaaagcagcatcgtggagaggacccccttcagcagcagcagcagcagcaagcacagcagccccagcggcaccgtggccgcccgggtgacccccttcaactacaaccccagccccaggaagagcagcgctgacagcaccagcgcccggcccagccagatccccacccctgtgaacaacaacaccaagaagagggacagcaagacagacagcacagagagcagcggcacccagagccccaagaggcacagcggcagctacctggtgacctctgtgtag

SEQ ID NO: 45060 - DNA, 864 bp, Artificial Sequence
  derived and/or modified sequence
atggctgctgccagctatgaccagctgctgaagcaggtggaggccctgaagatggagaacagcaacctgcggcaggagctggaggacaacagcaaccacctgaccaagctggagacagaggccagcaacatgaaggaggtgctgaagcagctgcagggcagcattgaagatgaggccatggccagcagcggccagattgacctgctggagcggctgaaggagctgaacctggacagcagcaacttccctggggtgaagctgcggagcaagatgagcctgcggagctatggcagccgggagggctctgtgagcagccgctctggagaatgttctcctgtgcccatgggcagcttcccccggcggggctttgtgaatggcagccgggagagcacaggctacctggaggagctggagaaggagaggagcctgctgctggccgacctggacaaggaggagaaggagaaggactggtactatgcccagctgcagaacctgaccaagagaattgacagcctgcccctgacagagaacttcagcctgcagacagacatgacccggcggcagctggagtatgaggcccggcagatccgggtggccatggaggagcagctgggcacctgccaggacatggagaagagggcccagaggcgcatcgcccgcatccagcagatcgagaaggacatcctgcgcatccggcagctgctgcagagccaggccacagaggccgagaggagcagccagaacaagcatgagaccggcagccatgatgctgagcggcagaatgaaggccagggcgtgggggagatcaacatggccaccagcggaaatggccagatcgagaagatgaggatgtttgagtgctag

SEQ ID NO: 45061 - DNA, 357 bp, Artificial Sequence
  derived and/or modified sequence
atggctgctgccagctatgaccagctgctgaagcaggtggaggccctgaagatggagaacagcaacctgcggcaggagctggaggacaacagcaaccacctgaccaagctggagacagaggccagcaacatgaaggaggtgctgaagcagctgcagggcagcattgaagatgaggccatggccagcagcggccagattgacctgctggagcggctgaaggagctgaacctggacagcagcaacttccctggggtgaagctgcggagcaagatgagcctgcggagctatggcagccgggagggctctgtgagcagccgctctggagaatgttctcctgtgcccatgggcagcttctag

SEQ ID NO: 45062 - DNA, 3918 bp, Artificial Sequence
  derived and/or modified sequence
atggctgctgccagctatgaccagctgctgaagcaggtggaggccctgaagatggagaacagcaacctgcggcaggagctggaggacaacagcaaccacctgaccaagctggagacagaggccagcaacatgaaggaggtgctgaagcagctgcagggcagcattgaagatgaggccatggccagcagcggccagattgacctgctggagcggctgaaggagctgaacctggacagcagcaacttccctggggtgaagctgcggagcaagatgagcctgcggagctatggcagccgggagggctctgtgagcagccgctctggagaatgttctcctgtgcccatgggcagcttcccccggcggggctttgtgaatggcagccgggagagcacaggctacctggaggagctggagaaggagaggagcctgctgctggccgacctggacaaggaggagaaggagaaggactggtactatgcccagctgcagaacctgaccaagagaattgacagcctgcccctgacagagaacttcagcctgcagacagacatgacccggcggcagctggagtatgaggcccggcagatccgggtggccatggaggagcagctgggcacctgccaggacatggagaagagggcccagaggcgcatcgcccgcatccagcagatcgagaaggacatcctgcgcatccggcagctgctgcagagccaggccacagaggccgagaggagcagccagaacaagcatgagaccggcagccatgatgctgagcggcagaatgaaggccagggcgtgggggagatcaacatggccaccagcggaaatggccagggcagcaccaccaggatggaccacgagacagcctctgtgctgagcagcagcagcacccacagcgccccccggcggctgaccagccacctgggcaccaaggtggagatggtgtacagcctgctgtccatgctgggcacccatgacaaggatgacatgagcaggaccctgctggccatgagcagcagccaggacagctgcatctccatgaggcagagcggctgcctgcccctgctgatccagctgctgcatggaaatgacaaggacagcgtgctgctgggcaacagccggggcagcaaggaggcccgggcccgggccagcgctgccctgcacaacatcatccacagccagccagatgacaagagaggaagaagagagatccgggtgctgcacctgctggagcagatccgggcctactgtgagacctgctgggagtggcaggaggcccacgagcccggcatggaccaggacaagaaccccatgcctgcccctgtggagcaccagatctgcccagctgtgtgtgtgctgatgaagctgagctttgatgaggagcacagacatgccatgaatgagctgggcggcctgcaggccatcgccgagctgctgcaggtggactgtgagatgtatggcctgaccaatgaccactacagcatcaccctgcggcgctatgccggcatggccctgaccaacctgacctttggagatgtggccaacaaggccaccctgtgcagcatgaagggctgcatgagggccctggtggcccagctgaagtctgagagcgaggacctgcagcaggtgattgcctctgtgctgaggaacctgtcctggagggcagatgtgaacagcaagaagaccctgcgggaggtgggctctgtgaaggccctgatggagtgtgccctggaggtgaagaaggagagcaccctgaagtctgtgctgagcgccctgtggaacctgagcgcccactgcacagagaacaaggctgacatctgtgctgtggatggagccctggccttcctggtgggcaccctgacctaccgcagccagaccaacaccctggccatcatcgagagcggcggcggcatcctgagaaatgtgagcagcctcatcgccaccaatgaagaccaccggcagatcctgcgggagaacaactgcctgcagaccctgctgcagcacctgaagagccacagcctgaccatcgtgtccaatgcctgtggcaccctgtggaacctgagcgccaggaaccccaaggaccaggaggccctgtgggacatgggcgctgtgtccatgctgaagaacctgatccacagcaagcacaagatgattgccatgggcagcgctgctgccctgaggaacctgatggccaacagacctgccaagtacaaggatgccaacatcatgagccctggcagcagcctgcccagcctgcacgtgaggaagcagaaggccctggaggccgagctggatgcccagcacctgtctgagacctttgacaacatcgacaacctgagccccaaggccagccacaggagcaagcagaggcacaagcagagcctgtatggagactatgtgtttgacaccaacagacatgatgacaacagaagtgacaacttcaacacaggcaacatgacagtgctgagcccctacctgaacaccaccgtgctgcccagcagcagcagcagccggggcagcctggacagcagccgctctgagaaggacaggagcctggagcgggagcggggcatcggcctgggcaactaccacccagccacagagaaccctggcaccagcagcaagaggggcctgcagatcagcaccacagctgcccagatcgccaaggtgatggaggaggtgtctgccatccacaccagccaggaggacaggagcagcggcagcaccacagagctgcactgtgtgacagatgaaagaaatgccctgcggcgcagcagcgctgcccacacccacagcaacacctacaacttcaccaagtctgagaacagcaacagaacctgcagcatgccctatgccaagctggagtacaagaggagcagcaatgacagcctgaacagcgtgagcagcagtgatggctacggcaagaggggccagatgaagcccagcattgagagctacagtgaagatgatgagagcaagttctgcagctatggccagtacccagctgacctggcccacaagatccacagcgccaaccacatggatgacaatgatggagagctggacacccccatcaactacagcctgaagtacagtgatgagcagctgaacagcggccggcagagccccagccagaatgaacgctgggcccggcccaagcacatcattgaagatgagatcaagcagagcgagcagaggcagagcaggaaccagagcaccacctaccctgtgtacacagagagcacagatgacaagcacctgaagttccagccccacttcggccagcaggagtgtgtgagcccctaccgcagcagaggagccaacggcagcgagaccaacagagtgggcagcaaccacggcatcaaccagaatgtgtcccagagcctgtgccaggaggatgattatgaagatgacaagcccaccaactacagcgagcgctacagcgaggaggagcagcacgaggaggaggagcggcccaccaactacagcatcaagtacaatgaggagaagagacatgtggaccagcccatcgactacagcctgaagtatgccacagacatccccagcagccagaagcagagcttctccttcagcaagagcagcagcggccagagcagcaagacagagcacatgagcagcagcagcgagaacaccagcacccccagcagcaatgccaagaggcagaaccagctgcaccccagcagcgcccagagccgcagcggccagccccagaaggccgccacctgcaaggtgagcagcatcaaccaggagaccatccagacctactgtgtggaggacacccccatctgcttcagccgctgcagcagcctgagcagcctgagcagcgcagaagatgaaattggctgcaaccagaccacccaggaggccgacagcgccaacaccctgcagatcgcctag

SEQ ID NO: 45063 - DNA, 8532 bp, Artificial Sequence
  derived and/or modified sequence
atggccgccgccagctacgaccagctgctgaagcaggtggaggccctcaaaatggaaaattctaaccttaggcaggagttggaagataacagtaatcatcttaccaaactggaaacggaagcctcaaacatgaaggaggtactgaagcaactgcagggtagtatcgaggatgaggctatggcctcctctgggcagattgatctcctggaaagactcaaagagctcaatcttgattcctcgaattttccaggagtgaagctgcgatccaagatgtctctccgatcttacggatcaagggagggctctgtgagctcacggagtggcgagtgttcgcccgtgccaatgggatccttcccacggagagggtttgtcaacggaagtagagaaagcactggttatctcgaggaactcgagaaggaaagatcccttctgctcgcagatcttgataaagaagagaaggaaaaggactggtactatgcgcagttacaaaacctaacaaagcggatcgactcactaccgctgactgaaaatttttctctgcaaaccgatatgacgagacggcaactagagtacgaggcccgccagatcagggttgccatggaagagcagctggggacttgccaggatatggaaaagcgggctcagcgtcggatcgctagaatccagcagatagagaaagacatcctgcggatcaggcagctactccaaagccaggccaccgaagccgagcgttcaagccagaataagcacgaaactggcagccacgacgcagagcgtcaaaatgaagggcagggtgtgggagagatcaatatggcgacatcaggcaatggccaggggtccactactagaatggatcacgagactgccagtgtgctgtcatcctccagcacccactctgcaccacggaggctgactagccacctgggtaccaaagtggagatggtctatagcctgctgtcaatgctcggaacgcatgataaagatgatatgtcccgcacgcttcttgcaatgtccagctcccaggattcctgtatctctatgcgtcaatcggggtgcctgcctctgctcattcagttactccacggaaatgacaaagactccgtgctgctcggcaacagcagaggcagcaaagaggcccgtgcgcgcgcttccgccgcactgcataacatcatccactctcagccagatgataaacgcgggcggagagagatccgtgttctgcatctgctcgaacagattcgtgcctactgtgaaacctgctgggagtggcaagaggcacatgagcctggtatggatcaagataagaacccaatgcccgctcccgtggagcaccagatctgtcccgcagtctgcgtgctgatgaagctttcctttgatgaagagcatcggcacgctatgaatgaacttggcggcctccaggctatcgcagagctgcttcaggtcgactgcgaaatgtatgggctcaccaatgaccactacagtataactctgagacgctacgccgggatggctctgacaaatctcaccttcggcgacgtggccaataaggcaactctctgctccatgaagggttgcatgagagcacttgtggcacagctgaaatccgagtctgaggacttacagcaggtgattgcttccgtgttaaggaacctgtcatggcgggcagacgtaaatagcaagaagacgctacgagaagttggttccgtaaaggctctgatggagtgcgccctggaagtgaagaaagagtccaccttaaagtcagtgctgtcagctctatggaacctgagcgcccactgtactgaaaacaaggccgacatctgtgcagtggacggtgcgttagccttcctggtagggaccttgacttacaggtcccagactaacacattggccatcatcgaaagcggaggcgggattctgaggaatgtgagctctttgattgccacaaatgaagatcacaggcagatcctgagggaaaataattgtcttcaaaccttactgcaacatctcaaaagccacagcctgacaatcgtttctaacgcttgcgggacgctgtggaatctcagcgctaggaacccgaaggaccaagaagccctatgggacatgggagcggtgagcatgttgaagaacctgatccacagcaagcataaaatgatcgccatgggatccgccgcagcactgcggaatctcatggcaaataggccagccaaatataaagatgccaatattatgtcccccggctctagccttcctagcctccacgtccgaaaacagaaggcattggaagccgagctggatgctcagcatctatcagaaacatttgacaacatcgacaatctttcacccaaggcctctcacagatctaaacagaggcataagcaatctctctacggggattacgtcttcgacacaaatcgccacgatgataatcgcagcgacaactttaatactggcaatatgaccgtgctgagcccatatctgaacaccactgtgctaccaagctcctcatcttcacgcggaagcctggactcctcccgatcagagaaggatcgaagcttagagcgcgagcgaggcataggcctgggcaattaccacccagccaccgagaatccaggcactagctctaagcgtggattgcagatctcaactacagctgctcagattgccaaggtgatggaggaagtgagtgccatccacaccagccaggaagaccgcagcagcgggagtaccaccgaactccactgcgtcacagatgaaagaaatgcgctcaggaggtcttccgctgcacacacccactccaatacctataacttcacaaaaagcgagaattctaaccggacctgcagcatgccatacgctaaactcgaatacaaacggtcatcgaacgacagcctgaactccgtgagcagcagcgatgggtacggcaagaggggccaaatgaagccatcaatcgagagctactctgaagacgacgagtccaaattttgtagttatggtcagtaccccgctgaccttgcacacaagatccattctgccaatcacatggacgacaatgatggagagctggacactcccataaattactctcttaagtattctgacgagcagttgaacagcggcaggcaaagtccttcacagaacgaacgatgggcgcgcccaaaacacatcattgaggatgagataaagcagagtgagcagaggcaatcgaggaatcagagcaccacctatcctgtttacactgagtcaacagacgataagcatctgaaatttcagccccatttcgggcagcaggagtgtgtctcgccataccgctccaggggagcaaatggcagtgagaccaatagagtcggctcaaaccacggtataaaccagaatgtctctcagagcctgtgccaggaagacgattatgaagatgacaagccaacaaattattccgagcggtactccgaagaagagcagcacgaggaagaagagcggcctaccaattactctatcaagtacaacgaggaaaaacggcatgtggatcaacccatagactactcacttaaatacgctacggatattccatcctcgcagaaacagtcctttagcttcagcaagtcttcatccgggcagtcatccaagaccgagcacatgagctctagtagcgagaatacatctaccccctcctccaatgccaagcgtcagaaccagctacatccctcaagtgcccagtctcgatccggacagccgcagaaggctgctacgtgtaaggttagttctataaatcaggaaaccatccagacctattgcgtcgaggacacacctatctgcttcagccggtgtagctcactgagcagcctatcttctgcagaggatgagatcggatgcaatcagaccacgcaagaggctgacagcgcaaataccctgcagattgccgaaattaaagagaaaattggcacccgctctgccgaagacccagtatctgaggtgcccgccgtttctcagcatccccgcacaaaatcttcccgtttgcaggggtcttcactgtccagcgaaagcgcacgtcacaaggcagtagaattttcctcgggggctaagtccccctccaaaagtggagcacagacccctaagagcccacctgagcactacgttcaggagacccccctcatgttctcccgatgcaccagcgttagttctctagactcattcgaaagccgctctatcgccagcagcgttcagtctgagccgtgctcgggcatggtatcgggcattatcagtccctccgacttaccagacagcccaggacagaccatgcccccctcaaggagtaagacaccccctccacctccccaaacagctcagacaaaaagagaggtccctaagaacaaggcccctacggctgaaaagagagagagtggtcctaaacaagctgctgtgaacgcggccgtccagagggtgcaagtcctgcccgatgctgataccctcctccatttcgccactgagagcacacccgacggtttttcttgtagctcgtcgttgagcgctcttagccttgacgaaccctttatacagaaggacgtggaactgcgcattatgccccctgtccaggaaaacgataatgggaacgaaaccgagagtgagcaaccaaaagagagcaacgaaaaccaagaaaaagaggcggaaaaaactatcgactctgaaaaagacctcctggacgattctgacgatgacgatattgaaattctggaggagtgcattatctctgccatgcccaccaagtcaagccgcaaagccaaaaagcctgcccagacagccagcaaactgccacctcctgtggctcgtaagccttcccaactgccagtgtataaactgctgccttctcagaatagattgcagccacaaaagcatgtgagcttcacacctggggatgacatgccccgtgtgtactgcgtggaaggcactcccattaatttcagcactgcaacttcactgtcagaccttactatcgagtcgccgccgaacgagttggctgccggagagggggtgcggggcggagcccaaagtggcgagtttgagaagcgggacacaatcccgacagagggccgtagcacggacgaggcccagggaggcaaaacaagtagcgtgactattccagaacttgatgataataaggctgaggagggcgacattttagctgagtgcattaactccgccatgcctaagggaaaatctcataaaccatttcgcgttaaaaagatcatggaccaggtgcagcaggccagtgcctcttcttccgcccccaacaaaaaccaacttgatggaaagaagaagaaacccacctcccctgtaaagcccattcctcaaaatactgagtaccgcacgcgggtgcgcaaaaatgcggatagcaagaataaccttaacgcagagcgtgtcttttcagacaacaaagactctaagaagcagaacctaaagaacaattccaaagtttttaacgacaagctgccaaacaatgaagatagggttagaggctcttttgcattcgattccccccaccactacacgcctatcgagggcactccttactgtttctcacgtaatgactctctgtcatcattggatttcgatgacgatgacgtggatctgagtagagagaaagcggagctgcgcaaagccaaggagaacaaggaatccgaagctaaagtcactagccatactgagttaaccagcaatcagcagtctgcaaacaagactcaggcaattgcaaaacaacctattaacagaggtcagcctaaaccaattctgcagaagcaatcgacattcccacaaagttctaaagacatcccggaccgtggcgccgcaaccgacgaaaagttacagaattttgcaatcgagaatacgcctgtttgtttcagtcacaactcctcactgtctagcctctccgacattgatcaggagaacaataacaaagaaaatgaacccattaaggagacagagccacctgacagtcagggcgagcccagcaaaccccaagctagcgggtacgcacctaagtcttttcatgtcgaagacacccccgtctgcttctcccggaattccagtctgagttctctctcgatagattccgaggatgatctgctgcaagaatgcatttcaagtgcaatgcccaaaaaaaaaaagccctcccgtctgaaaggagacaatgagaagcacagtccgaggaacatgggaggaatccttggggaagatttgactctcgatctgaaggacatccagcggcccgactcagaacatggactttctcctgacagcgaaaattttgattggaaggctatccaggagggcgccaactccatcgtctcatctctgcaccaggcggccgccgccgcctgcttgtctaggcaagcgtcgagcgactctgatagtatattatcactgaaaagcggcatctctctgggttcaccatttcacctgactcccgatcaggaggagaagccattcacatccaacaagggcccccggattttgaagcccggagagaaatctaccctggaaactaagaaaatcgaatccgaatcaaagggcataaaaggtggaaaaaaggtgtataagtccctgatcaccggaaaagtgaggtctaactctgagattagtggacagatgaaacagcccctgcaggccaacatgccgtctatttcccgcggcagaactatgatccacatcccaggagtcagaaactcatctagttcaacatcaccagttagcaagaaaggtccaccgctgaagacccccgccagtaagtctccaagcgagggccaaactgcaaccacttctccaaggggggccaaaccgagcgttaagagcgagctctctccagtggcaagacagacctcgcaaattggtggcagtagtaaggccccctcaaggtccgggtctagagattctaccccatcgcggccagcccaacagcctctgagcagacctatccaatctcctggcagaaactccatatctcccggacgtaacggtatcagcccacctaataaactgagccagttgcctcgcacaagttccccttcgactgccagcacaaagtcaagtgggtccggcaagatgtcttacacatcccctgggcgtcagatgtcacagcagaacctcaccaaacagaccggactatcgaagaatgcctcctctatcccacgtagtgaaagtgcctcaaagggtctcaatcaaatgaacaacggcaacggcgcaaataagaaggtggagctttcacggatgtcctccacaaaatcatcgggctccgagtctgacaggtcagaacgccctgtccttgtgcgccagagtactttcataaaagaggctccgtcgccgactttgcggagaaagttggaagaatccgcctcgtttgagtccctgagtccgtcgagcagacccgcctctcccacccgcagccaggcacaaacccctgtcctctccccttcactgccagacatgtctctgtccacccactccagtgtgcaggcgggcggatggcgaaagcttcctcccaacctgtcaccgacaatagaatacaatgacggcaggccggccaagcgccacgatatcgcacggagtcactccgagagcccctccagattgcccattaatcggtcaggcacttggaagcgtgagcactccaagcactcgtcctcactcccacgcgtgagcacttggaggagaactggatcaagcagttcaattctctccgcgtcctccgaatcctctgagaaggccaagagtgaggacgaaaagcacgtgaattctatcagcgggaccaagcaaagcaaggaaaaccaagtatctgcaaagggcacttggcggaagattaaagaaaatgagttttccccaaccaactccacaagccagacagtgtccagcggtgctacgaacggtgccgaatccaaaacgctgatctaccagatggcacccgcggtgtctaaaacagaagacgtatgggtcagaattgaggattgccccatcaacaatccccggagcggtagatctcctaccggaaacactcctcccgtcatcgactctgtcagcgaaaaagcgaatccaaacatcaaggattctaaggataaccaggcgaaacagaacgtgggtaatggatctgtgcctatgaggacagtgggattggagaatcgtctgaacagttttattcaggtggatgcaccagatcagaaggggacggagataaagcctggtcaaaacaacccggtccctgtttcagaaacaaatgagtcaagtatcgttgaaaggacacctttttccagctcctccagtagtaagcactccagcccgtccgggaccgtcgccgcccgggtgacaccatttaattataacccctcacccaggaagtcatcagccgacagcacctctgctaggcctagccagattcccaccccggtaaataataataccaagaaacgggactccaaaaccgactcgaccgaatcatctggaacccagtcacctaagcggcacagtgggagctacctcgtcacgagtgtgtag

SEQ ID NO: 45064 - DNA, 8532 bp, Artificial Sequence
  derived and/or modified sequence
atggccgccgccagctacgaccagctgctgaagcaggtggaggccttaaagatggagaattcgaacttgagacaggagcttgaggacaacagtaatcatctcactaagctggagaccgaggctagcaatatgaaggaggttcttaagcagctccaggggtcgattgaagatgaagctatggcaagttccggccagattgacttattggagcgtctgaaagagctgaatcttgatagcagcaatttcccgggtgtcaaactgcgatcaaaaatgagtctcaggtcttatggctctcgggaggggtcggtgagttctagatctggagagtgtagcccagttccgatgggcagcttccctcgccgggggtttgttaatggctccagagagtccaccggataccttgaagagctcgagaaagagcggtcactacttctcgccgacctggataaggaggagaaggagaaagactggtactatgcccagttacagaaccttaccaagcgaattgactccctgccactgaccgaaaacttctcccttcagactgatatgacacgacggcagctggagtacgaagctcgccagattcgggtcgcaatggaggagcagctgggaacgtgccaagacatggaaaagagggcacaacgaaggatcgccaggatccagcagatagagaaagatatactgcggatacggcagctgcttcagtctcaggccactgaagccgagaggagctctcagaacaagcacgagacagggtctcatgacgccgagcgacaaaatgaaggacagggagtaggggagataaatatggccacctccgggaatgggcaggggtccaccacccgcatggaccatgaaactgcgagcgttctttcatcttcgtccacccacagcgctccacgccgtctcaccagccatctgggaacaaaggtagagatggtgtacagtttgctgtcaatgctaggcacccatgataaagatgacatgagtaggaccctgctggctatgtcgtccagccaggatagttgtatttccatgaggcagagcgggtgtctgccactgttaatccagctcctgcatggcaacgacaaagactccgtactgttaggaaacagccgaggcagcaaggaggcccgagcccgcgccagcgccgctctccacaatattatccacagtcagccagatgataaaagagggcggagagaaatccgggtgttacacctgctcgagcagattcgcgcctattgcgagacctgctgggagtggcaagaagcccatgagccgggtatggatcaggataaaaatcccatgcctgcacccgtggaacatcaaatttgtccagcagtgtgtgtgctcatgaaattaagcttcgacgaggaacataggcacgcgatgaacgaacttggcggcctccaggcaattgctgaattgctgcaggtcgattgtgaaatgtatggcctgaccaacgatcattatagcatcacgctcagacgatacgctgggatggcactgacaaacctcacattcggtgatgttgccaataaagccaccttatgttcaatgaaggggtgcatgcgcgctcttgttgcgcagctgaagagcgagtcagaggacctgcaacaggtcatcgcttccgtactgagaaacctctcttggcgcgccgatgtcaatagcaagaaaacactgcgagaggtgggctctgtgaaggccctcatggagtgtgcgttggaagtgaagaaggagtctaccctcaagtcagtgctttccgctctgtggaacctgtctgcccattgcactgaaaacaaggccgatatatgcgcagtagatggggcattggcgttcttagttggaacactaacttaccggtcccagactaatactctggccatcatcgaaagcggaggcggcatcctgcgcaatgtgtcgtccctgatagccacaaacgaggatcaccgacagatacttcgagagaataactgtctgcagaccctgctgcagcatttgaaatctcacagtctcaccatcgtctccaacgcctgtggcacgctttggaatctgagcgctcggaacccgaaggaccaagaggccctgtgggatatgggagcggtgagcatgcttaagaatctaattcactcaaagcacaaaatgatcgctatggggtctgctgccgctcttagaaatctgatggcgaatagaccagctaaatacaaagacgcgaacatcatgagcccaggctcttctttgccctcgctgcacgtgcgcaagcagaaggcactcgaggccgaactagacgcgcagcacctgtctgagacattcgacaatattgacaatctctcaccaaaagcaagtcaccgcagtaaacagcgacacaagcagagtttatatggcgactatgttttcgataccaataggcacgacgacaatcgctccgacaatttcaacacaggtaatatgactgtgctcagtccttatttaaatacgaccgtgctccccagttcctcttcctcacggggatctttggactcctctcggagcgaaaaggaccgctcactggagagagagcggggtatcggactcgggaattaccatccggctacagaaaacccaggcacctcttccaaacgtggcttgcaaatctccacaactgcggcacaaattgccaaggttatggaggaggtgagtgccatccacactagtcaagaagaccggtcttccgggagtaccacagaattgcattgtgtgacggatgagcggaacgccttaaggcgctcatccgcagcacacacccatagcaacacatacaattttacaaaatcagagaatagtaatcggacttgttctatgccgtatgccaaactggaatataaacgttcctccaacgattcattgaattctgtgtcttcctctgatggctatggtaaacgggggcagatgaaaccatccattgagtcttattccgaggacgatgaatctaagttttgcagttatggtcagtatccggccgacctcgcccacaaaattcactctgcaaatcacatggacgataacgatggcgagctggacacaccaatcaattattcccttaaatacagcgatgagcaattaaatagcggacgccagagcccttcacagaatgaacgatgggccaggccaaagcatattatcgaggatgaaatcaagcagagtgagcagagacagagtagaaatcagagcacaacgtaccccgtgtataccgagtccacagatgacaagcatctcaaattccaacctcacttcgggcagcaggaatgtgtgagcccttatcggtccaggggagcaaacggaagcgaaaccaatagggtgggaagtaatcacggcattaaccagaacgttagtcaatccctgtgccaagaggatgactatgaagatgataagcctaccaactactcagagcgctatagcgaagaagaacagcacgaggaggaggaaaggcctaccaactatagcattaagtacaacgaggagaagcgacacgtggaccagccaatcgattattctcttaagtatgcaacggacatcccctccagccagaagcagtcctttagtttcagtaagtcttcgtcaggtcagagctccaaaacggaacacatgagcagcagctctgagaacacctcaacacctagctcaaatgcaaagcggcaaaaccaactgcatccttccagtgctcagtccaggagtgggcagcctcagaaggcagccacatgcaaagttagttcaattaatcaggagacaatccagacatactgcgtagaagacactcccatctgtttctccagatgctcatctctgtcttccctttccagcgctgaggacgaaataggctgtaaccaaaccactcaggaggcagattccgctaatacgctgcaaatcgcggagattaaagagaagatcggcacccgaagcgcagaggaccctgtttctgaggtccccgctgtgagtcagcacccgagaaccaaatcctctcgactgcaggggtccagcctgagctctgagtccgcgcgccacaaggctgttgagtttagcagtggcgctaaaagccctagtaaaagcggggcacagactcccaaatcgcctcccgagcattatgtccaggagacccccttgatgttttcccggtgcacctctgtctctagtctggactcctttgaatcacgctccatcgccagtagcgtccagtcggagccttgcagcggtatggtgtctggcataatctccccttcagatttacccgatagtccaggacaaacgatgccaccttctaggtctaagacacctcctcctcccccgcagactgcacagacaaagagggaagtgcccaagaataaagcacccacagcagagaaacgggaaagcggtcccaagcaggccgcagttaacgctgcagtgcagagagttcaggttttacctgacgctgatacacttttacattttgcaacagaaagtacccctgacggttttagctgctctagcagtctttccgcgctgtccctggatgaaccattcatccaaaaagacgtcgagcttcgcatcatgcctcctgtgcaggaaaacgacaatggaaacgagaccgagtctgagcagccaaaagaatcaaatgagaatcaagaaaaagaagcggaaaagactatagatagtgagaaagacctgctcgatgacagcgacgatgatgacattgagattttggaggaatgtatcatttcagccatgcccacgaagagtagccgcaaagccaagaaaccagcccagacagcgagtaagttgccacctcccgtcgcacgcaaacctagtcaactgcccgtatacaaattactgccttcccagaaccgtttgcaaccccaaaaacacgtgtctttcaccccaggcgacgatatgcccagagtgtactgtgtagaaggaactccaattaacttcagtacagccacctcccttagcgacttgaccatcgagagccccccgaatgaactggcagccggggagggggtaagggggggcgcgcaaagtggcgagttcgagaagagagatacgattcccaccgaagggcgttccaccgacgaagcccagggcggtaaaacttcctccgtgacaattcctgaactggacgacaacaaggcagaggaaggtgacattctggccgaatgtatcaacagtgccatgccaaaggggaagagtcacaaaccatttcgggtaaaaaagattatggaccaagttcagcaggctagcgcctctagttcagcaccaaataagaaccagttagatggcaaaaaaaagaagcccactagtccagtgaaacctataccacagaataccgagtatagaacacgggtgcggaaaaacgctgacagcaagaacaacctgaacgccgagagggtgttctctgataacaaggacagcaagaagcaaaatctaaaaaacaatagtaaagtcttcaacgacaagttaccgaacaatgaagacagagtgagggggagcttcgcgtttgactcgcctcaccactataccccaattgagggcacaccctactgtttttccaggaacgacagcttgtcctctctggacttcgacgacgacgatgtggatctcagcagagagaaggctgagctccggaaagccaaggagaacaaagagtccgaggccaaagtgacttcacacaccgaactcacatctaaccagcagagcgccaacaagactcaggcaatcgccaagcagcccatcaaccgggggcaacccaagccaatactccagaagcagagtactttcccacaaagctctaaggatattccggataggggagcagccaccgacgagaaactgcagaattttgccatagagaacactccagtttgtttttcacataactcatccctctcatctctgtccgatatcgaccaggagaataataataaggagaacgagccaatcaaggagaccgagcctcctgattcccagggcgagccttcgaaaccccaggccagcggctacgcacccaagagtttccacgtggaagataccccagtgtgctttagtcggaattcaagcctgtcctctttgagcatcgattctgaggacgatctattgcaggagtgtatttcctctgccatgcctaagaaaaagaaaccttcgagattaaaaggggacaacgaaaaacactctcctaggaacatggggggcatactgggcgaagatcttaccttggacctgaaagacattcaaaggcccgactctgagcacggtctaagcccggattcggagaactttgactggaaagctatacaggaaggggccaactcaatcgtatcttctctacaccaggcggcagcagcagcttgcctgagccgtcaggcctcttcggattccgactcaatcttgtctctgaaatcggggatcagcctgggatccccctttcacctgacaccggaccaggaggagaagcctttcactagtaataagggacctcgcatcctgaagccaggcgaaaaaagcactctggagaccaagaagatcgagtccgagagcaagggaatcaagggcggcaagaaagtgtataagtcgttaatcacaggcaaagtgcgctccaatagcgaaatcagcggccagatgaaacagccgctgcaggctaacatgcccagcattagtcgcggcaggacaatgatccacatacccggtgtgagaaatagcagtagcagcacctcacctgtttccaagaaaggacctcctttgaagacccctgcttcgaagtctcccagcgagggacagactgccacaacctctccaaggggcgccaagccttctgtaaagagcgagctgtctcccgttgccaggcagacctctcagatcggcggctcatccaaagctccgagtcggtctggaagtagggattctacgccatcgcgaccagcccagcaaccgctgtccagacccattcagagccccggccggaacagtatctctccgggaaggaatggcataagtcctcccaataagcttagccagctacctaggaccagcagtcctagtacagctagcacgaagtcatcaggaagcggaaaaatgtcctatacatcacccggacgacagatgtcacagcaaaaccttactaaacagaccggactgagcaaaaacgccagcagcattccaaggtcagagagcgcgagtaagggcctcaaccaaatgaacaatggtaacggggccaataaaaaggtggaacttagcagaatgagcagcactaagagctcagggtctgaatccgacaggtctgaacggcccgtgcttgtccgccagagtacttttattaaggaagcaccatcaccaaccctccgacgtaagctagaagaatctgcatccttcgagtcattgagtcccagctcacgccctgccagtccgacacggtctcaggcccagacccccgtgctgtccccatctctcccagacatgtctctttcaacccattcctcagtgcaagcaggcgggtggcgaaagctcccacccaacctgagccctactatagagtacaacgacgggagacctgctaagagacacgacattgcccgatcccattccgaaagcccttctaggctgcccataaaccgatctggcacatggaaacgggagcacagcaaacattcaagttctctgcctcgcgtgtccacatggcgccgtacggggtcttctagcagcatcctcagcgcttcctccgaaagctccgagaaagccaagtcggaggatgaaaagcatgtcaactccatcagcggaaccaaacaatcgaaggagaaccaggttagcgctaaaggaacatggagaaaaattaaagaaaacgaattttcacctactaatagcacctcccagaccgtgagtagcggggccacaaatggagccgagtctaagactctcatttatcagatggcccctgcagtgtccaaaaccgaggatgtctgggtgcggatcgaagattgcccgatcaacaacccaaggtccgggcgctcccctaccggaaacactccacctgtcattgattccgtatccgagaaggccaacccaaacatcaaagattcaaaagacaatcaggccaaacagaacgttggtaatgggtctgtgcctatgcgcacagtgggcttggagaatcggctaaactctttcattcaggtcgatgcaccagaccaaaagggtacagagattaaacctgggcagaataacccagtccccgtgtccgaaacaaacgaaagcagtatagtagagaggactccattctcctccagtagtagctctaaacattcgagtccctctggaaccgtagccgccagggttaccccttttaactacaatccatctccccgcaaatctagtgctgactccacgtcagctagaccatcacagatccctacacctgtcaacaacaataccaagaaacgagactctaagacggattctactgagagctctgggacccagtcgcccaaacggcacagcggctcttaccttgtcacatctgtctag

SEQ ID NO: 45065 - DNA, 8532 bp, Artificial Sequence
  derived and/or modified sequence
atggccgccgccagctacgaccagctgctgaagcaggtggaggccctcaaaatggagaactctaacctaagacaggaactcgaagacaattcaaatcatctgaccaaactagagaccgaggcttccaacatgaaggaggtattgaagcagttgcagggcagtattgaggacgaggctatggcctcctccggtcagatagatctactggagcgactgaaggagctgaacttagacagctctaactttccgggagtgaagctgaggagcaaaatgagcctcaggagctacggctctagggagggatctgtgtcgtctcgctccggcgagtgcagtccagtacccatggggtcatttcctcggagaggatttgtgaacggcagtcgtgagagcacaggatatctggaagaactggaaaaggaacgctctttgctcctggccgatctcgataaggaggagaaggagaaagactggtattacgcccaactgcagaatcttactaaacgcatcgactcactgccacttacagaaaacttctctctgcaaacggacatgacccgaaggcaactggagtacgaggctaggcaaatccgggttgctatggaggaacagctgggtacgtgtcaagacatggagaagcgtgcccagcgccgtatcgctaggatccagcagatcgagaaagacattctgcgcattcgccagcttttgcagtctcaggccacagaggccgagcgcagctctcaaaataaacacgaaactgggtcgcacgacgcggagaggcagaatgagggccagggagtgggcgagattaatatggcaacaagcggcaacgggcagggtagcactaccagaatggaccatgagaccgcaagcgtgctgtcttcttcctccacacattcagctcctcgtcgactcacatcacaccttggcaccaaagttgaaatggtgtacagcttgttgagcatgctgggaacccacgataaggacgatatgtcaagaactctcttggcaatgtccagcagccaggattcttgcattagcatgcggcagtcaggctgtctacccttgcttattcagctcttgcacgggaatgacaaggattctgtcctgcttggcaatagcagaggatcgaaggaagcccgcgcaagagccagtgccgccttgcacaatatcatccactctcagccagatgacaaaaggggtcgccgcgagattagggttctgcacctgctcgagcaaattcgggcttactgcgagacatgttgggaatggcaggaggcacacgagcccgggatggaccaggataaaaaccccatgcccgctccggtcgagcaccagatttgcccggccgtatgtgtgctgatgaaactgagtttcgatgaggagcataggcacgctatgaacgagctaggcgggctgcaggccatagccgagctgctgcaagtggactgcgagatgtatggcctgaccaatgaccattattctatcacgcttaggcggtatgcaggcatggccctcaccaatctgacatttggcgatgtggcaaacaaagccaccctttgttctatgaaggggtgcatgcgcgctctggtggcacagctcaagagcgagtctgaagacctccaacaggtcattgccagcgtactccgcaatctctcttggcgggcagacgtcaacagcaagaaaaccctgagggaagtgggatccgtcaaagccttaatggagtgcgctctggaagttaagaaagagtctactctcaagagcgtgctctctgctctgtggaacctgtccgcccattgtaccgagaataaggcagacatatgtgcggtcgacggtgcccttgcgtttttagtcggcactctaacataccggtcacagacgaatacgctagccattatcgagtctgggggaggaattttgcggaacgtctcctctctcatcgctactaatgaggaccatcggcagattctaagggagaacaactgtctgcaaacactgctgcagcatctgaaatcccactctcttactattgtctctaacgcctgcggcacactgtggaacttgtccgcccggaatccgaaggatcaggaggccctgtgggacatgggcgccgtgagcatgctgaaaaatctgatccacagtaaacacaagatgatcgccatgggaagtgccgcagctctcagaaatctgatggctaatcggcctgcaaaatacaaagacgcgaacattatgtctcctgggtcatccctaccctccttgcatgttcgtaaacagaaagcattagaggctgagctagatgcccagcatctgagtgaaacattcgataacatcgataatctgtcccccaaggccagccacagaagtaaacaacggcacaaacagagcctatatggtgactatgtcttcgacacgaacagacacgacgataacaggagcgacaacttcaatacaggaaatatgactgttctctccccctacctcaatacgaccgttctgcccagctcttcatcatctcgaggctcactggacagcagtaggagtgagaaagacagatcgttggagagagagcgtgggataggcttgggaaattatcacccagccacggaaaatcctggcactagctctaaacgtgggttgcagatcagcacaactgcagcacagattgccaaggttatggaagaagtttctgctatccacaccagccaggaggatcggtcatcgggaagtacaaccgaactgcactgcgtaaccgacgagaggaatgcgcttagacgctctagcgctgcccacacacacagcaatacctacaacttcacgaagtcggagaatagcaacaggacatgcagcatgccatacgccaaactggaatacaaacgtagctcaaacgactcccttaactccgtcagctccagtgacggatatggaaagcgaggccagatgaagccttccatcgaatcgtactctgaggatgacgagtctaaattttgctcttatggccagtatccagcggacctcgctcacaaaattcattctgccaaccatatggatgacaatgatggcgagctggatacaccaattaactactctttgaagtacagcgacgaacagctgaattctgggcgccagagccctagtcagaacgaacgctgggctaggcccaaacacataatcgaggacgagatcaaacaatcagaacagcggcagtctcgcaaccagagcacaacataccctgtgtatactgaatctaccgacgacaaacacttgaaattccaaccccattttggccagcaggaatgtgtgtctccgtacaggtctcgcggagcgaatgggtccgaaacaaatcgcgtcgggtccaaccatgggataaatcagaatgttagtcagtccctttgccaggaagatgactacgaggacgataaacccacgaactacagcgaacgctattctgaggaggaacagcatgaagaggaggagcggcccacgaactattcaataaagtacaatgaggagaagagacatgttgatcagccaatcgactacagtcttaagtacgccaccgacattccatcgtctcagaagcagtcctttagtttctccaaaagctcttctggacagagttcaaaaaccgaacacatgtcctccagctccgagaacactagcacccccagtagtaacgccaaacggcaaaatcagctgcatccttctagcgctcaatctcgcagtggacagcctcagaaagctgccacatgtaaagtctccagcatcaatcaagaaacgatccagacgtactgtgtagaggacactcccatctgcttttcccggtgctcctcattgtcatcgttatcctcagctgaagatgagattggctgcaaccagacaactcaggaagcggactccgccaacacacttcagatagccgagatcaaagagaaaattggaacccggagcgcagaggaccccgtatcagaggtcccggccgtctcccagcaccctcgcaccaagtctagcagactgcagggcagttcactatcttctgaatcggcgaggcataaagcagtagaattttcaagcggtgcaaaatcccctagcaaatcaggcgcacagacaccgaagtccccaccagagcattacgtgcaggagacccctctgatgtttagccgatgtaccagcgtcagttctctcgattcctttgaatctagaagtatcgcctcttcagtgcaatcagagccctgctccgggatggtatcaggcatcatctccccatctgacctccccgattcccctggtcagaccatgcccccgagccggtcgaagacacctcccccacccccacagactgcccagaccaagagagaagtgccaaaaaacaaagcccccactgctgaaaagagggaatcaggccctaaacaggcagctgttaacgctgctgtgcaacgagtacaagtcctgcctgacgctgatactttgttacacttcgcgactgagagcacaccagatgggttttcctgttcttcaagtttgagcgcgctgtctctggatgaaccttttatccagaaggatgtcgagctgagaattatgccaccagtccaggagaacgataatggcaatgagacagagtctgagcagcctaaggagtctaacgaaaaccaggagaaggaagcagaaaaaactatagatagcgagaaagacttactcgatgactcagatgatgacgatattgagatattagaagagtgtatcatcagtgctatgcccaccaagtcatcaaggaaagcgaaaaagcctgcgcaaacagctagcaaattgccaccacctgtggctaggaagccttctcagttgcctgtgtataagctactcccctcccagaatcgccttcagccccaaaagcacgtgagcttcacacctggcgacgacatgcctcgtgtttactgcgtcgaaggaacccccatcaatttttcgaccgcaacaagcctgtctgacctcacgattgagagcccacctaacgaactggccgccggtgaaggcgtgagaggaggggcacagagcggcgagttcgagaaacgtgataccattcctacagagggcagaagtactgacgaagctcagggcggcaagacgagctcggttaccattccagaactggacgacaataaagcagaagaaggggacatactagcagaatgtatcaacagcgccatgcctaaagggaagtctcacaaaccctttcgcgtgaagaaaataatggatcaggtgcagcaagccagcgcgtcctcctctgcccctaacaagaatcagttggatggaaagaaaaaaaagcctacatctcctgttaagcccattccgcagaacaccgagtatagaacccgggtacggaaaaatgctgactcaaaaaataacctcaatgcagagagagtctttagcgataataaggattcgaagaaacagaacctgaagaataattccaaagttttcaatgacaagttgccgaataacgaagaccgggttcgagggtctttcgctttcgatagtccacaccattacacacctattgaggggaccccgtactgcttctcccggaatgattctttatcatccttggatttcgacgatgacgatgtagatctgagccgcgagaaagccgagctgcgcaaagccaaagagaacaaggaaagcgaggcaaaggtgacctcacacacagaacttacctccaaccagcagagcgccaataagacgcaggcgatcgctaagcagcccatcaatcggggccagcccaaacccattctccagaaacagtctaccttccctcagtcctctaaggacataccagacagaggcgcagccactgacgagaagctgcaaaatttcgccattgaaaacacccctgtgtgcttctctcacaactcatcgctgtctagccttagtgatatcgatcaggagaataacaacaaggagaatgagccaattaaagagaccgaaccccccgattctcagggcgaaccgagcaagccacaggctagtggctacgcccccaaaagttttcacgtcgaggatacgcctgtgtgcttctcgcgaaattcgagcctctcaagcttaagcatcgacagtgaggacgacctcctccaggaatgcatttcttctgctatgccaaaaaagaagaaaccatcgagactgaagggcgacaatgaaaaacattcccccaggaacatgggagggatcttgggtgaagacctgaccctggacctgaaggacatccagcgacccgattctgaacacggcctgtcccccgacagtgagaacttcgattggaaagccatacaagaaggagccaattcaatcgttagctcactacatcaggcggcagcggcggcctgcttgtcacgccaagcaagctccgatagcgactctatcctcagcctgaagagtggcatatctttgggctcaccgtttcacctaactccagatcaagaggagaagccattcacaagtaataaaggacctcgcattctcaaacccggtgaaaaaagcacgctggaaacaaagaaaattgagtccgagtcaaagggtattaaaggaggaaagaaagtgtacaagtcactgattacagggaaagttcgcagtaactccgaaattagtggacagatgaaacagcctctgcaggctaacatgccttcaatctcacggggaagaacaatgatccatatacctggagtgcggaattcttcgtcttctacgagccccgtgagcaagaaggggcctcccttgaagacacccgcaagtaaatcacccagcgagggccagaccgcaacgacttcacctcggggcgctaaaccatcagtcaaatcagagctgagtccagtggctcggcagacatctcagatcggtgggagcagtaaagcgccaagtagatcaggctcaagggatagcactccatcccggcctgcacagcaaccactgagtagacctatccagagcccaggtaggaactcgataagtcctggcagaaatggtatctcaccaccgaacaagctctcccagctacctaggacgagctccccctcaacagcgagcactaagagcagcggcagcggaaagatgagctatacatctcccggacggcagatgagtcagcagaatctgaccaaacagacaggcctcagtaagaacgcatcgagtatcccacgatccgagtctgctagtaaagggctaaaccagatgaacaacggcaacggtgctaataagaaagtggaactgagcagaatgagcagcaccaaatcaagcggcagtgagtctgaccggtccgagaggcctgtactggtgcggcaatccacattcatcaaggaggccccatcgcccacgctcagaaggaagctggaagaatccgcgtccttcgagtctctgtccccctcatctcgccccgcaagccctacaaggtcgcaggcccagacgccggttctctcaccatcacttccagatatgagcctgagtacgcacagcagtgtgcaggccggaggctggcgaaagttgccccctaatctatctcctaccatagagtacaatgacggcagaccggctaaaaggcacgatattgcacggagccatagcgagtcgcctagccggctgccaatcaacagaagcggtacatggaagcgcgaacatagcaaacactcatcatccctgccgcgtgtcagtacctggaggagaaccgggagcagctcttctatcttgtcagctagcagcgaatcctccgagaaagctaaaagcgaggacgagaagcatgtcaacagcataagtggcaccaaacagtctaaggaaaatcaggtttccgccaagggcacctggcgcaagataaaggagaatgagttcagccccaccaatagcacctcacagactgtgagtagcggtgctacgaatggcgcagaaagcaagacattaatttaccaaatggcaccggccgttagcaagaccgaggacgtttgggtgaggattgaagactgtcccatcaataatcctcgatcagggcggagccctaccggcaacaccccaccagtgattgactcagtttctgagaaagctaacccgaacatcaaagacagcaaggataaccaggctaaacaaaacgtgggaaacggatcagtgcccatgcggacggtggggctagagaaccggctgaactctttcatccaggtggacgcccctgaccagaaaggaacagagattaagcctggccagaataaccctgtgccagtttcggaaacgaacgagagcagcatcgtggagcgcacgcccttctccagttctagcagctcaaaacactcgtccccttccggcaccgtggccgcacgtgtgacccccttcaattacaatccaagtcctcggaagtctagtgctgattccacaagcgcaagaccttcgcagatcccaaccccagttaacaataatacaaaaaagcgtgactccaaaacggatagcacggaatcatccggcacccaatcccctaagagacattccggatcatacctcgtgacttccgtgtag

SEQ ID NO: 45066 - DNA, 864 bp, Artificial Sequence
  derived and/or modified sequence
atggccgccgccagctacgaccagctgctgaagcaggtggaggccctcaagatggagaactctaatctgcgccaggaattggaggacaactcaaatcatctgactaagttggagaccgaagctagcaacatgaaggaggtcctcaagcaactccaaggaagcatcgaggacgaagcgatggcatcgagcgggcagattgacctcttagaaagactcaaagagctgaacttagactcaagcaactttcctggagtgaaactcaggtccaagatgtctctacggtcttatgggagtagggaaggatcagtctcttccaggtcaggagagtgcagcccagtgcctatgggcagctttccaaggcgaggattcgttaatggctcacgggagtccacaggttacctggaggagctggaaaaagagagatcattgctcctcgccgatttggacaaggaggagaaggagaaggattggtattacgcccaactgcaaaatcttacgaagcggatagactccctgccgctgacagaaaatttctcgttacagactgatatgactagaaggcagctcgaatatgaggcccgccagataagagttgccatggaagagcaattggggacttgtcaggatatggaaaaacgggctcaaagaagaattgcacgcattcagcagatcgagaaggatatcctgcgcatccggcaactgttgcaaagtcaggcaactgaggctgagaggagttcacaaaacaagcatgagacaggaagccatgatgctgagcgccagaatgaggggcagggagttggggaaattaatatggccacatctggtaacgggcagatagagaagatgcggatgttcgagtgctag

SEQ ID NO: 45067 - DNA, 357 bp, Artificial Sequence
  derived and/or modified sequence
atggccgccgccagctacgaccagctgctgaagcaggtggaggccctgaaaatggagaacagtaacctgcggcaggaactcgaggacaactctaatcacctgacgaaacttgagacagaggcttccaatatgaaagaagttctgaaacagctgcaaggatccattgaggatgaggccatggcctcctcaggacagattgacctgctcgagcgtctaaaggaactgaacctggatagttcgaatttcccaggcgttaagctccggtccaaaatgtccctccggagctatggaagccgcgagggttcggtctcttctcggtcaggggagtgttctcccgtgcctatgggatctttttag

SEQ ID NO: 45068 - DNA, 3918 bp, Artificial Sequence
  derived and/or modified sequence
atggccgccgccagctacgaccagctgctgaagcaggtggaggccctgaaaatggagaacagcaatctgagacaggaactggaggataacagcaaccaccttaccaaactggagaccgaagcctctaatatgaaggaagtcctgaaacagctgcaggggtcaattgaggatgaagctatggcctccagcggtcagatcgatctgctggagagattaaaggagctgaatcttgacagctccaactttcctggggttaagttgcgcagcaaaatgtccctgagatcatatggcagtcgtgaggggtcggtgtcttctcgtagcggagagtgttccccggtgccaatggggtcctttcctcggagggggtttgtgaacggaagtcgtgagtccacagggtatctcgaggagctggaaaaggaaaggtcacttctgctggcagatcttgataaagaagaaaaagaaaaagattggtactacgcccagctccagaacttgaccaaaaggatcgactcactgcccctaacagagaatttctccctacagacagacatgacgcgccggcagttagagtacgaggcccggcagattcgagtagcaatggaggaacaactgggaacgtgccaggatatggagaagagagctcaacgcagaattgcccggatccagcagattgagaaggacattcttcgtatccgacaattgctgcagagccaggcaaccgaagctgaaagatccagccagaacaagcacgagaccggtagccatgatgctgagcggcagaatgaggggcaaggggtgggcgaaatcaacatggcaaccagcggaaatggccaaggctctaccacgcgcatggaccacgaaaccgcgtccgttctgagttcttcttccacgcattcagctcccaggcggctgacttcacacctgggaaccaaagtcgagatggtctattcacttctgtccatgctggggacgcatgacaaggacgacatgtccaggactctattggctatgagctcatcccaggatagctgcataagcatgcggcagagcggctgtttgcctttactcatccagttattgcacggcaacgacaaagactccgtgctgctgggcaattctcgcgggagcaaagaggcccgggccagggcgagcgccgctttgcacaacataattcactctcaacctgatgacaaacgggggcggagggagattagagttctccacctgctcgagcaaataagggcttattgtgagacttgctgggagtggcaagaggcccacgaacctggcatggaccaggataagaatcctatgccagctcctgttgaacaccaaatctgtccagctgtctgcgttcttatgaagctgtcttttgatgaagagcaccgccacgcgatgaatgagctaggcggtttgcaggcaattgctgagctactacaagtagattgcgagatgtacgggctgactaacgaccactacagcattacactgaggaggtacgccgggatggcactgactaacctgaccttcggtgacgtcgccaataaggctacgctgtgcagcatgaaaggatgcatgcgcgccctggtggcccaacttaaaagtgagagcgaggacctccaacaagtcattgcgagcgtgctccggaatctttcttggcgcgcagatgtgaatagcaagaaaacgttgagggaggttggttccgttaaggcactcatggaatgcgctctggaagtcaaaaaagaaagcacactgaagagcgttctgtcggccctctggaacctgagtgcccattgcacagaaaacaaagcagatatctgtgctgtggatggggcacttgcgtttctagtggggacactgacgtatcgcagccagacgaataccctagctataatcgaaagcggcggtggaatactgagaaatgtctccagtctgatcgccactaacgaggatcacagacagatcctgagagaaaacaactgtctccagacactgctccagcaccttaagagtcatagtttgacgatcgtgtctaatgcttgcggaactttgtggaatctctcagcaagaaaccctaaggaccaggaggctctgtgggatatgggagccgtgtctatgctgaagaacctgatccactcaaaacacaagatgatagcgatgggatctgccgctgcgctcaggaatcttatggccaatagacctgccaagtataaggacgccaacattatgtcaccaggatcatcattgccgtctctgcatgttcgaaagcagaaggctctggaagcggagctcgacgcacagcatctgtccgagacatttgacaatattgacaacctatcacctaaagctagccataggagcaagcaacggcacaagcaatccctgtacggggactacgtctttgataccaaccggcacgatgacaacaggtcagacaatttcaatactgggaacatgaccgtgctgagcccctatctcaatacaactgtgctgccttcgtcttcttctagtcgggggtcattagatagctcaagaagcgagaaggatcgttctcttgagcgagagcgggggatcggcttgggaaactatcacccagcaaccgagaatcctggtacgagctccaagagaggccttcaaattagtactaccgccgcgcagattgctaaagtaatggaggaggtgagtgccatccataccagccaagaggacagatcttctggcagcacgacagaactccactgtgtgaccgacgagcgtaacgctttgcgaagatcaagtgcggcccacacccatagtaatacctataacttcacaaagtccgagaactctaatagaacatgttccatgccatatgctaagttagagtacaaacggtcatcaaatgattccctcaacagcgtctcatcgtctgacggatacggcaagaggggccagatgaagcccagcattgaatcgtatagtgaagacgacgaaagcaagttttgttcatatggacagtatcccgctgatctggctcataagatccacagcgccaaccacatggatgacaatgacggtgagctagacactccgatcaactatagccttaagtatagtgatgaacagctgaactcggggcggcaatctccatctcagaacgaacggtgggcacgcccaaaacacatcatcgaagacgaaattaaacagagtgaacagcgtcagagcaggaatcaaagcaccacctatcctgtctacacggaaagtaccgacgataaacacctcaaatttcaaccccacttcggtcagcaggagtgcgtaagcccatacagaagccgaggggccaatggcagcgagacaaatcgcgtcggtagcaaccatggtatcaaccagaacgtttcacagtccctgtgccaggaggatgactatgaggatgacaaacctacaaactattcagagcgctactctgaggaggagcagcacgaggaagaagaacgcccaactaattattcgatcaagtacaatgaggagaagaggcatgtcgaccagcccatagactattcattaaagtacgcaacagatattccgtcctcacagaaacagtctttctcttttagtaagagttcatctgggcagtccagtaaaactgaacatatgtcatcaagctctgagaacacgtcaaccccctcgagcaatgcaaaaagacaaaatcagctccatccttcgtccgctcagtctcggagcggtcagccacagaaagctgcgacttgtaaagtgtcaagtatcaaccaggagaccatccagacctactgcgtggaagacacgccaatatgcttttccaggtgtagctcacttagcagtctgtcttctgctgaagatgagataggttgtaatcagactacacaagaagccgattccgcgaacacattgcaaatcgcatag

SEQ ID NO: 45069 - DNA, 10701 bp, Artificial Sequence
  derived and/or modified sequence
ggagacagaatggaggtgctgccggactcggaaatggggtccaagggtagccaaggatggctgcagcttcatatgatcagttgttaaagcaagttgaggcactgaagatggagaactcaaatcttcgacaagagctagaagataattccaatcatcttacaaaactggaaactgaggcatctaatatgaaggaagtacttaaacaactacaaggaagtattgaagatgaagctatggcttcttctggacagattgatttattagagcgtcttaaagagcttaacttagatagcagtaatttccctggagtaaaactgcggtcaaaaatgtccctccgttcttatggaagccgggaaggatctgtatcaagccgttctggagagtgcagtcctgttcctatgggttcatttccaagaagagggtttgtaaatggaagcagagaaagtactggatatttagaagaacttgagaaagagaggtcattgcttcttgctgatcttgacaaagaagaaaaggaaaaagactggtattacgctcaacttcagaatctcactaaaagaatagatagtcttcctttaactgaaaatttttccttacaaacagatatgaccagaaggcaattggaatatgaagcaaggcaaatcagagttgcgatggaagaacaactaggtacctgccaggatatggaaaaacgagcacagcgaagaatagccagaattcagcaaatcgaaaaggacatacttcgtatacgacagcttttacagtcccaagcaacagaagcagagaggtcatctcagaacaagcatgaaaccggctcacatgatgctgagcggcagaatgaaggtcaaggagtgggagaaatcaacatggcaacttctggtaatggtcagggttcaactacacgaatggaccatgaaacagccagtgttttgagttctagtagcacacactctgcacctcgaaggctgacaagtcatctgggaaccaaggtggaaatggtgtattcattgttgtcaatgcttggtactcatgataaggatgatatgtcgcgaactttgctagctatgtctagctcccaagacagctgtatatccatgcgacagtctggatgtcttcctctcctcatccagcttttacatggcaatgacaaagactctgtattgttgggaaattcccggggcagtaaagaggctcgggccagggccagtgcagcactccacaacatcattcactcacagcctgatgacaagagaggcaggcgtgaaatccgagtccttcatcttttggaacagatacgcgcttactgtgaaacctgttgggagtggcaggaagctcatgaaccaggcatggaccaggacaaaaatccaatgccagctcctgttgaacatcagatctgtcctgctgtgtgtgttctaatgaaactttcatttgatgaagagcatagacatgcaatgaatgaactagggggactacaggccattgcagaattattgcaagtggactgtgaaatgtatgggcttactaatgaccactacagtattacactaagacgatatgctggaatggctttgacaaacttgacttttggagatgtagccaacaaggctacgctatgctctatgaaaggctgcatgagagcacttgtggcccaactaaaatctgaaagtgaagacttacagcaggttattgcgagtgttttgaggaatttgtcttggcgagcagatgtaaatagtaaaaagacgttgcgagaagttggaagtgtgaaagcattgatggaatgtgctttagaagttaaaaaggaatcaaccctcaaaagcgtattgagtgccttatggaatttgtcagcacattgcactgagaataaagctgatatatgtgctgtagatggtgcacttgcatttttggttggcactcttacttaccggagccagacaaacactttagccattattgaaagtggaggtgggatattacggaatgtgtccagcttgatagctacaaatgaggaccacaggcaaatcctaagagagaacaactgtctacaaactttattacaacacttaaaatctcatagtttgacaatagtcagtaatgcatgtggaactttgtggaatctctcagcaagaaatcctaaagaccaggaagcattatgggacatgggggcagttagcatgctcaagaacctcattcattcaaagcacaaaatgattgctatgggaagtgctgcagctttaaggaatctcatggcaaataggcctgcgaagtacaaggatgccaatattatgtctcctggctcaagcttgccatctcttcatgttaggaaacaaaaagccctagaagcagaattagatgctcagcacttatcagaaacttttgacaatatagacaatttaagtcccaaggcatctcatcgtagtaagcagagacacaagcaaagtctctatggtgattatgtttttgacaccaatcgacatgatgataataggtcagacaattttaatactggcaacatgactgtcctttcaccatatttgaatactacagtgttacccagctcctcttcatcaagaggaagcttagatagttctcgttctgaaaaagatagaagtttggagagagaacgcggaattggtctaggcaactaccatccagcaacagaaaatccaggaacttcttcaaagcgaggtttgcagatctccaccactgcagcccagattgccaaagtcatggaagaagtgtcagccattcatacctctcaggaagacagaagttctgggtctaccactgaattacattgtgtgacagatgagagaaatgcacttagaagaagctctgctgcccatacacattcaaacacttacaatttcactaagtcggaaaattcaaataggacatgttctatgccttatgccaaattagaatacaagagatcttcaaatgatagtttaaatagtgtcagtagtagtgatggttatggtaaaagaggtcaaatgaaaccctcgattgaatcctattctgaagatgatgaaagtaagttttgcagttatggtcaatacccagccgacctagcccataaaatacatagtgcaaatcatatggatgataatgatggagaactagatacaccaataaattatagtcttaaatattcagatgagcagttgaactctggaaggcaaagtccttcacagaatgaaagatgggcaagacccaaacacataatagaagatgaaataaaacaaagtgagcaaagacaatcaaggaatcaaagtacaacttatcctgtttatactgagagcactgatgataaacacctcaagttccaaccacattttggacagcaggaatgtgtttctccatacaggtcacggggagccaatggttcagaaacaaatcgagtgggttctaatcatggaattaatcaaaatgtaagccagtctttgtgtcaagaagatgactatgaagatgataagcctaccaattatagtgaacgttactctgaagaagaacagcatgaagaagaagagagaccaacaaattatagcataaaatataatgaagagaaacgtcatgtggatcagcctattgattatagtttaaaatatgccacagatattccttcatcacagaaacagtcattttcattctcaaagagttcatctggacaaagcagtaaaaccgaacatatgtcttcaagcagtgagaatacgtccacaccttcatctaatgccaagaggcagaatcagctccatccaagttctgcacagagtagaagtggtcagcctcaaaaggctgccacttgcaaagtttcttctattaaccaagaaacaatacagacttattgtgtagaagatactccaatatgtttttcaagatgtagttcattatcatctttgtcatcagctgaagatgaaataggatgtaatcagacgacacaggaagcagattctgctaataccctgcaaatagcagaaataaaagaaaagattggaactaggtcagctgaagatcctgtgagcgaagttccagcagtgtcacagcaccctagaaccaaatccagcagactgcagggttctagtttatcttcagaatcagccaggcacaaagctgttgaattttcttcaggagcgaaatctccctccaaaagtggtgctcagacacccaaaagtccacctgaacactatgttcaggagaccccactcatgtttagcagatgtacttctgtcagttcacttgatagttttgagagtcgttcgattgccagctccgttcagagtgaaccatgcagtggaatggtaagtggcattataagccccagtgatcttccagatagccctggacaaaccatgccaccaagcagaagtaaaacacctccaccacctcctcaaacagctcaaaccaagcgagaagtacctaaaaataaagcacctactgctgaaaagagagagagtggacctaagcaagctgcagtaaatgctgcagttcagagggtccaggttcttccagatgctgatactttattacattttgccacggaaagtactccagatggattttcttgttcatccagcctgagtgctctgagcctcgatgagccatttatacagaaagatgtggaattaagaataatgcctccagttcaggaaaatgacaatgggaatgaaacagaatcagagcagcctaaagaatcaaatgaaaaccaagagaaagaggcagaaaaaactattgattctgaaaaggacctattagatgattcagatgatgatgatattgaaatactagaagaatgtattatttctgccatgccaacaaagtcatcacgtaaagcaaaaaagccagcccagactgcttcaaaattacctccacctgtggcaaggaaaccaagtcagctgcctgtgtacaaacttctaccatcacaaaacaggttgcaaccccaaaagcatgttagttttacaccgggggatgatatgccacgggtgtattgtgttgaagggacacctataaacttttccacagctacatctctaagtgatctaacaatcgaatcccctccaaatgagttagctgctggagaaggagttagaggaggggcacagtcaggtgaatttgaaaaacgagataccattcctacagaaggcagaagtacagatgaggctcaaggaggaaaaacctcatctgtaaccatacctgaattggatgacaataaagcagaggaaggtgatattcttgcagaatgcattaattctgctatgcccaaagggaaaagtcacaagcctttccgtgtgaaaaagataatggaccaggtccagcaagcatctgcgtcttcttctgcacccaacaaaaatcagttagatggtaagaaaaagaaaccaacttcaccagtaaaacctataccacaaaatactgaatataggacacgtgtaagaaaaaatgcagactcaaaaaataatttaaatgctgagagagttttctcagacaacaaagattcaaagaaacagaatttgaaaaataattccaaggtcttcaatgataagctcccaaataatgaagatagagtcagaggaagttttgcttttgattcacctcatcattacacgcctattgaaggaactccttactgtttttcacgaaatgattctttgagttctctagattttgatgatgatgatgttgacctttccagggaaaaggctgaattaagaaaggcaaaagaaaataaggaatcagaggctaaagttaccagccacacagaactaacctccaaccaacaatcagctaataagacacaagctattgcaaagcagccaataaatcgaggtcagcctaaacccatacttcagaaacaatccacttttccccagtcatccaaagacataccagacagaggggcagcaactgatgaaaagttacagaattttgctattgaaaatactccggtttgcttttctcataattcctctctgagttctctcagtgacattgaccaagaaaacaacaataaagaaaatgaacctatcaaagagactgagccccctgactcacagggagaaccaagtaaacctcaagcatcaggctatgctcctaaatcatttcatgttgaagataccccagtttgtttctcaagaaacagttctctcagttctcttagtattgactctgaagatgacctgttgcaggaatgtataagctccgcaatgccaaaaaagaaaaagccttcaagactcaagggtgataatgaaaaacatagtcccagaaatatgggtggcatattaggtgaagatctgacacttgatttgaaagatatacagagaccagattcagaacatggtctatcccctgattcagaaaattttgattggaaagctattcaggaaggtgcaaattccatagtaagtagtttacatcaagctgctgctgctgcatgtttatctagacaagcttcgtctgattcagattccatcctttccctgaaatcaggaatctctctgggatcaccatttcatcttacacctgatcaagaagaaaaaccctttacaagtaataaaggcccacgaattctaaaaccaggggagaaaagtacattggaaactaaaaagatagaatctgaaagtaaaggaatcaaaggaggaaaaaaagtttataaaagtttgattactggaaaagttcgatctaattcagaaatttcaggccaaatgaaacagccccttcaagcaaacatgccttcaatctctcgaggcaggacaatgattcatattccaggagttcgaaatagctcctcaagtacaagtcctgtttctaaaaaaggcccaccccttaagactccagcctccaaaagccctagtgaaggtcaaacagccaccacttctcctagaggagccaagccatctgtgaaatcagaattaagccctgttgccaggcagacatcccaaataggtgggtcaagtaaagcaccttctagatcaggatctagagattcgaccccttcaagacctgcccagcaaccattaagtagacctatacagtctcctggccgaaactcaatttcccctggtagaaatggaataagtcctcctaacaaattatctcaacttccaaggacatcatcccctagtactgcttcaactaagtcctcaggttctggaaaaatgtcatatacatctccaggtagacagatgagccaacagaaccttaccaaacaaacaggtttatccaagaatgccagtagtattccaagaagtgagtctgcctccaaaggactaaatcagatgaataatggtaatggagccaataaaaaggtagaactttctagaatgtcttcaactaaatcaagtggaagtgaatctgatagatcagaaagacctgtattagtacgccagtcaactttcatcaaagaagctccaagcccaaccttaagaagaaaattggaggaatctgcttcatttgaatctctttctccatcatctagaccagcttctcccactaggtcccaggcacaaactccagttttaagtccttcccttcctgatatgtctctatccacacattcgtctgttcaggctggtggatggcgaaaactcccacctaatctcagtcccactatagagtataatgatggaagaccagcaaagcgccatgatattgcacggtctcattctgaaagtccttctagacttccaatcaataggtcaggaacctggaaacgtgagcacagcaaacattcatcatcccttcctcgagtaagcacttggagaagaactggaagttcatcttcaattctttctgcttcatcagaatccagtgaaaaagcaaaaagtgaggatgaaaaacatgtgaactctatttcaggaaccaaacaaagtaaagaaaaccaagtatccgcaaaaggaacatggagaaaaataaaagaaaatgaattttctcccacaaatagtacttctcagaccgtttcctcaggtgctacaaatggtgctgaatcaaagactctaatttatcaaatggcacctgctgtttctaaaacagaggatgtttgggtgagaattgaggactgtcccattaacaatcctagatctggaagatctcccacaggtaatactcccccggtgattgacagtgtttcagaaaaggcaaatccaaacattaaagattcaaaagataatcaggcaaaacaaaatgtgggtaatggcagtgttcccatgcgtaccgtgggtttggaaaatcgcctgaactcctttattcaggtggatgcccctgaccaaaaaggaactgagataaaaccaggacaaaataatcctgtccctgtatcagagactaatgaaagttctatagtggaacgtaccccattcagttctagcagctcaagcaaacacagttcacctagtgggactgttgctgccagagtgactccttttaattacaacccaagccctaggaaaagcagcgcagatagcacttcagctcggccatctcagatcccaactccagtgaataacaacacaaagaagcgagattccaaaactgacagcacagaatccagtggaacccaaagtcctaagcgccattctgggtcttaccttgtgacatctgtttaaaagagaggaagaatgaaactaagaaaattctatgttaattacaactgctatatagacattttgtttcaaatgaaactttaaaagactgaaaaattttgtaaataggtttgattcttgttagagggtttttgttctggaagccatatttgatagtatactttgtcttcactggtcttattttgggaggcactcttgatggttaggaaaaaaatagtaaagccaagtatgtttgtacagtatgttttacatgtatttaaagtagcatcccatcccaacttcctttaattattgcttgtcttaaaataatgaacactacagatagaaaatatgatatattgctgttatcaatcatttctagattataaactgactaaacttacatcagggaaaaattggtatttatgcaaaaaaaaatgtttttgtccttgtgagtccatctaacatcataattaatcatgtggctgtgaaattcacagtaatatggttcccgatgaacaagtttacccagcctgctttgctttactgcatgaatgaaactgatggttcaatttcagaagtaatgattaacagttatgtggtcacatgatgtgcatagagatagctacagtgtaataatttacactattttgtgctccaaacaaaacaaaaatctgtgtaactgtaaaacattgaatgaaactattttacctgaactagattttatctgaaagtaggtagaatttttgctatgctgtaatttgttgtatattctggtatttgaggtgagatggctgctcttttattaatgagacatgaattgtgtctcaacagaaactaaatgaacatttcagaataaattattgctgtatgtaaactgttactgaaattggtatttgtttgaagggtcttgtttcacatttgtattaataattgtttaaaatgcctcttttaaaagcttatataaatttttttcttcagcttctatgcattaagagtaaaattcctcttactgtaataaaaacaattgaagaagactgttgccacttaaccattccatgcgttggcacttatctattcctgaaatttcttttatgtgattagctcatcttgatttttaatatttttccacttaaacttttttttcttactccactggagctcagtaaaagtaaattcatgtaatagcaatgcaagcagcctagcacagactaagcattgagcataataggcccacataatttcctctttcttaatattatagaattctgtacttgaaattgattcttagacattgcagtctcttcgaggctttacagtgtaaactgtcttgccccttcatcttcttgttgcaactgggtctgacatgaacactttttatcaccctgtatgttagggcaagatctcagcagtgaagtataatcagcactttgccatgctcagaaaattcaaatcacatggaactttagaggtagatttaatacgattaagatattcagaagtatattttagaatccctgcctgttaaggaaactttatttgtggtaggtacagttctggggtacatgttaagtgtccccttatacagtggagggaagtcttccttcctgaaggaaaataaactgacacttattaactaagataatttacttaatatatcttccctgatttgttttaaaagatcagagggtgactgatgatacatgcatacatatttgttgaataaatgaaaatttatttttagtgataagattcatacactctgtatttggggagggaaaacctttttaagcatggtggggcactcagataggagtgaatacacctacctggtgccttgaaaatcacatcaagtagttaattatctaccccttacctgtgtttataacttccaggtaatgagaatgattttttttaaagctaaaatgccagtaaataaaagtgctatgacttgagctaagatatttgactccaatgcctgtactgtgtctactgcaccactttgtaaacacttcaatttactatctttgaaatgattgacctttaaatttttgccaaatgttatctgaaattgtctatgaataccatctacttctgttgttttcccaggcttccataaacaatggagatacatgca

SEQ ID NO: 45070 - DNA, 11025 bp, Artificial Sequence
  derived and/or modified sequence
acaagatggcggagggcaagtagcaagggggcggggtgtggccgccggaagcctagccgctgctcgggggggacctgcgggctcaggcccgggagctgcggaccgaggttggctcgatgctgttcccaggtactgttgttggctgttggtgaggaaggtgaagcactcagttgccttctcgggcctcggcgccccctatgtacgcctccctgggctcgggtccggtcgcccctttgcccgcttctgtaccaccctcagttctcgggtcctggagcaccggcggcagcaggagctgcgtccggcaggagacgaagagcccgggcggcgctcgtacttctggccactgggcgagcgtctggcaggtccaagggtagccaaggatggctgcagcttcatatgatcagttgttaaagcaagttgaggcactgaagatggagaactcaaatcttcgacaagagctagaagataattccaatcatcttacaaaactggaaactgaggcatctaatatgaaggaagtacttaaacaactacaaggaagtattgaagatgaagctatggcttcttctggacagattgatttattagagcgtcttaaagagcttaacttagatagcagtaatttccctggagtaaaactgcggtcaaaaatgtccctccgttcttatggaagccgggaaggatctgtatcaagccgttctggagagtgcagtcctgttcctatgggttcatttccaagaagagggtttgtaaatggaagcagagaaagtactggatatttagaagaacttgagaaagagaggtcattgcttcttgctgatcttgacaaagaagaaaaggaaaaagactggtattacgctcaacttcagaatctcactaaaagaatagatagtcttcctttaactgaaaatttttccttacaaacagatatgaccagaaggcaattggaatatgaagcaaggcaaatcagagttgcgatggaagaacaactaggtacctgccaggatatggaaaaacgagcacagcgaagaatagccagaattcagcaaatcgaaaaggacatacttcgtatacgacagcttttacagtcccaagcaacagaagcagagaggtcatctcagaacaagcatgaaaccggctcacatgatgctgagcggcagaatgaaggtcaaggagtgggagaaatcaacatggcaacttctggtaatggtcagggttcaactacacgaatggaccatgaaacagccagtgttttgagttctagtagcacacactctgcacctcgaaggctgacaagtcatctgggaaccaaggtggaaatggtgtattcattgttgtcaatgcttggtactcatgataaggatgatatgtcgcgaactttgctagctatgtctagctcccaagacagctgtatatccatgcgacagtctggatgtcttcctctcctcatccagcttttacatggcaatgacaaagactctgtattgttgggaaattcccggggcagtaaagaggctcgggccagggccagtgcagcactccacaacatcattcactcacagcctgatgacaagagaggcaggcgtgaaatccgagtccttcatcttttggaacagatacgcgcttactgtgaaacctgttgggagtggcaggaagctcatgaaccaggcatggaccaggacaaaaatccaatgccagctcctgttgaacatcagatctgtcctgctgtgtgtgttctaatgaaactttcatttgatgaagagcatagacatgcaatgaatgaactagggggactacaggccattgcagaattattgcaagtggactgtgaaatgtatgggcttactaatgaccactacagtattacactaagacgatatgctggaatggctttgacaaacttgacttttggagatgtagccaacaaggctacgctatgctctatgaaaggctgcatgagagcacttgtggcccaactaaaatctgaaagtgaagacttacagcaggttattgcgagtgttttgaggaatttgtcttggcgagcagatgtaaatagtaaaaagacgttgcgagaagttggaagtgtgaaagcattgatggaatgtgctttagaagttaaaaaggaatcaaccctcaaaagcgtattgagtgccttatggaatttgtcagcacattgcactgagaataaagctgatatatgtgctgtagatggtgcacttgcatttttggttggcactcttacttaccggagccagacaaacactttagccattattgaaagtggaggtgggatattacggaatgtgtccagcttgatagctacaaatgaggaccacaggcaaatcctaagagagaacaactgtctacaaactttattacaacacttaaaatctcatagtttgacaatagtcagtaatgcatgtggaactttgtggaatctctcagcaagaaatcctaaagaccaggaagcattatgggacatgggggcagttagcatgctcaagaacctcattcattcaaagcacaaaatgattgctatgggaagtgctgcagctttaaggaatctcatggcaaataggcctgcgaagtacaaggatgccaatattatgtctcctggctcaagcttgccatctcttcatgttaggaaacaaaaagccctagaagcagaattagatgctcagcacttatcagaaacttttgacaatatagacaatttaagtcccaaggcatctcatcgtagtaagcagagacacaagcaaagtctctatggtgattatgtttttgacaccaatcgacatgatgataataggtcagacaattttaatactggcaacatgactgtcctttcaccatatttgaatactacagtgttacccagctcctcttcatcaagaggaagcttagatagttctcgttctgaaaaagatagaagtttggagagagaacgcggaattggtctaggcaactaccatccagcaacagaaaatccaggaacttcttcaaagcgaggtttgcagatctccaccactgcagcccagattgccaaagtcatggaagaagtgtcagccattcatacctctcaggaagacagaagttctgggtctaccactgaattacattgtgtgacagatgagagaaatgcacttagaagaagctctgctgcccatacacattcaaacacttacaatttcactaagtcggaaaattcaaataggacatgttctatgccttatgccaaattagaatacaagagatcttcaaatgatagtttaaatagtgtcagtagtagtgatggttatggtaaaagaggtcaaatgaaaccctcgattgaatcctattctgaagatgatgaaagtaagttttgcagttatggtcaatacccagccgacctagcccataaaatacatagtgcaaatcatatggatgataatgatggagaactagatacaccaataaattatagtcttaaatattcagatgagcagttgaactctggaaggcaaagtccttcacagaatgaaagatgggcaagacccaaacacataatagaagatgaaataaaacaaagtgagcaaagacaatcaaggaatcaaagtacaacttatcctgtttatactgagagcactgatgataaacacctcaagttccaaccacattttggacagcaggaatgtgtttctccatacaggtcacggggagccaatggttcagaaacaaatcgagtgggttctaatcatggaattaatcaaaatgtaagccagtctttgtgtcaagaagatgactatgaagatgataagcctaccaattatagtgaacgttactctgaagaagaacagcatgaagaagaagagagaccaacaaattatagcataaaatataatgaagagaaacgtcatgtggatcagcctattgattatagtttaaaatatgccacagatattccttcatcacagaaacagtcattttcattctcaaagagttcatctggacaaagcagtaaaaccgaacatatgtcttcaagcagtgagaatacgtccacaccttcatctaatgccaagaggcagaatcagctccatccaagttctgcacagagtagaagtggtcagcctcaaaaggctgccacttgcaaagtttcttctattaaccaagaaacaatacagacttattgtgtagaagatactccaatatgtttttcaagatgtagttcattatcatctttgtcatcagctgaagatgaaataggatgtaatcagacgacacaggaagcagattctgctaataccctgcaaatagcagaaataaaagaaaagattggaactaggtcagctgaagatcctgtgagcgaagttccagcagtgtcacagcaccctagaaccaaatccagcagactgcagggttctagtttatcttcagaatcagccaggcacaaagctgttgaattttcttcaggagcgaaatctccctccaaaagtggtgctcagacacccaaaagtccacctgaacactatgttcaggagaccccactcatgtttagcagatgtacttctgtcagttcacttgatagttttgagagtcgttcgattgccagctccgttcagagtgaaccatgcagtggaatggtaagtggcattataagccccagtgatcttccagatagccctggacaaaccatgccaccaagcagaagtaaaacacctccaccacctcctcaaacagctcaaaccaagcgagaagtacctaaaaataaagcacctactgctgaaaagagagagagtggacctaagcaagctgcagtaaatgctgcagttcagagggtccaggttcttccagatgctgatactttattacattttgccacggaaagtactccagatggattttcttgttcatccagcctgagtgctctgagcctcgatgagccatttatacagaaagatgtggaattaagaataatgcctccagttcaggaaaatgacaatgggaatgaaacagaatcagagcagcctaaagaatcaaatgaaaaccaagagaaagaggcagaaaaaactattgattctgaaaaggacctattagatgattcagatgatgatgatattgaaatactagaagaatgtattatttctgccatgccaacaaagtcatcacgtaaagcaaaaaagccagcccagactgcttcaaaattacctccacctgtggcaaggaaaccaagtcagctgcctgtgtacaaacttctaccatcacaaaacaggttgcaaccccaaaagcatgttagttttacaccgggggatgatatgccacgggtgtattgtgttgaagggacacctataaacttttccacagctacatctctaagtgatctaacaatcgaatcccctccaaatgagttagctgctggagaaggagttagaggaggggcacagtcaggtgaatttgaaaaacgagataccattcctacagaaggcagaagtacagatgaggctcaaggaggaaaaacctcatctgtaaccatacctgaattggatgacaataaagcagaggaaggtgatattcttgcagaatgcattaattctgctatgcccaaagggaaaagtcacaagcctttccgtgtgaaaaagataatggaccaggtccagcaagcatctgcgtcttcttctgcacccaacaaaaatcagttagatggtaagaaaaagaaaccaacttcaccagtaaaacctataccacaaaatactgaatataggacacgtgtaagaaaaaatgcagactcaaaaaataatttaaatgctgagagagttttctcagacaacaaagattcaaagaaacagaatttgaaaaataattccaaggtcttcaatgataagctcccaaataatgaagatagagtcagaggaagttttgcttttgattcacctcatcattacacgcctattgaaggaactccttactgtttttcacgaaatgattctttgagttctctagattttgatgatgatgatgttgacctttccagggaaaaggctgaattaagaaaggcaaaagaaaataaggaatcagaggctaaagttaccagccacacagaactaacctccaaccaacaatcagctaataagacacaagctattgcaaagcagccaataaatcgaggtcagcctaaacccatacttcagaaacaatccacttttccccagtcatccaaagacataccagacagaggggcagcaactgatgaaaagttacagaattttgctattgaaaatactccggtttgcttttctcataattcctctctgagttctctcagtgacattgaccaagaaaacaacaataaagaaaatgaacctatcaaagagactgagccccctgactcacagggagaaccaagtaaacctcaagcatcaggctatgctcctaaatcatttcatgttgaagataccccagtttgtttctcaagaaacagttctctcagttctcttagtattgactctgaagatgacctgttgcaggaatgtataagctccgcaatgccaaaaaagaaaaagccttcaagactcaagggtgataatgaaaaacatagtcccagaaatatgggtggcatattaggtgaagatctgacacttgatttgaaagatatacagagaccagattcagaacatggtctatcccctgattcagaaaattttgattggaaagctattcaggaaggtgcaaattccatagtaagtagtttacatcaagctgctgctgctgcatgtttatctagacaagcttcgtctgattcagattccatcctttccctgaaatcaggaatctctctgggatcaccatttcatcttacacctgatcaagaagaaaaaccctttacaagtaataaaggcccacgaattctaaaaccaggggagaaaagtacattggaaactaaaaagatagaatctgaaagtaaaggaatcaaaggaggaaaaaaagtttataaaagtttgattactggaaaagttcgatctaattcagaaatttcaggccaaatgaaacagccccttcaagcaaacatgccttcaatctctcgaggcaggacaatgattcatattccaggagttcgaaatagctcctcaagtacaagtcctgtttctaaaaaaggcccaccccttaagactccagcctccaaaagccctagtgaaggtcaaacagccaccacttctcctagaggagccaagccatctgtgaaatcagaattaagccctgttgccaggcagacatcccaaataggtgggtcaagtaaagcaccttctagatcaggatctagagattcgaccccttcaagacctgcccagcaaccattaagtagacctatacagtctcctggccgaaactcaatttcccctggtagaaatggaataagtcctcctaacaaattatctcaacttccaaggacatcatcccctagtactgcttcaactaagtcctcaggttctggaaaaatgtcatatacatctccaggtagacagatgagccaacagaaccttaccaaacaaacaggtttatccaagaatgccagtagtattccaagaagtgagtctgcctccaaaggactaaatcagatgaataatggtaatggagccaataaaaaggtagaactttctagaatgtcttcaactaaatcaagtggaagtgaatctgatagatcagaaagacctgtattagtacgccagtcaactttcatcaaagaagctccaagcccaaccttaagaagaaaattggaggaatctgcttcatttgaatctctttctccatcatctagaccagcttctcccactaggtcccaggcacaaactccagttttaagtccttcccttcctgatatgtctctatccacacattcgtctgttcaggctggtggatggcgaaaactcccacctaatctcagtcccactatagagtataatgatggaagaccagcaaagcgccatgatattgcacggtctcattctgaaagtccttctagacttccaatcaataggtcaggaacctggaaacgtgagcacagcaaacattcatcatcccttcctcgagtaagcacttggagaagaactggaagttcatcttcaattctttctgcttcatcagaatccagtgaaaaagcaaaaagtgaggatgaaaaacatgtgaactctatttcaggaaccaaacaaagtaaagaaaaccaagtatccgcaaaaggaacatggagaaaaataaaagaaaatgaattttctcccacaaatagtacttctcagaccgtttcctcaggtgctacaaatggtgctgaatcaaagactctaatttatcaaatggcacctgctgtttctaaaacagaggatgtttgggtgagaattgaggactgtcccattaacaatcctagatctggaagatctcccacaggtaatactcccccggtgattgacagtgtttcagaaaaggcaaatccaaacattaaagattcaaaagataatcaggcaaaacaaaatgtgggtaatggcagtgttcccatgcgtaccgtgggtttggaaaatcgcctgaactcctttattcaggtggatgcccctgaccaaaaaggaactgagataaaaccaggacaaaataatcctgtccctgtatcagagactaatgaaagttctatagtggaacgtaccccattcagttctagcagctcaagcaaacacagttcacctagtgggactgttgctgccagagtgactccttttaattacaacccaagccctaggaaaagcagcgcagatagcacttcagctcggccatctcagatcccaactccagtgaataacaacacaaagaagcgagattccaaaactgacagcacagaatccagtggaacccaaagtcctaagcgccattctgggtcttaccttgtgacatctgtttaaaagagaggaagaatgaaactaagaaaattctatgttaattacaactgctatatagacattttgtttcaaatgaaactttaaaagactgaaaaattttgtaaataggtttgattcttgttagagggtttttgttctggaagccatatttgatagtatactttgtcttcactggtcttattttgggaggcactcttgatggttaggaaaaaaatagtaaagccaagtatgtttgtacagtatgttttacatgtatttaaagtagcatcccatcccaacttcctttaattattgcttgtcttaaaataatgaacactacagatagaaaatatgatatattgctgttatcaatcatttctagattataaactgactaaacttacatcagggaaaaattggtatttatgcaaaaaaaaatgtttttgtccttgtgagtccatctaacatcataattaatcatgtggctgtgaaattcacagtaatatggttcccgatgaacaagtttacccagcctgctttgctttactgcatgaatgaaactgatggttcaatttcagaagtaatgattaacagttatgtggtcacatgatgtgcatagagatagctacagtgtaataatttacactattttgtgctccaaacaaaacaaaaatctgtgtaactgtaaaacattgaatgaaactattttacctgaactagattttatctgaaagtaggtagaatttttgctatgctgtaatttgttgtatattctggtatttgaggtgagatggctgctcttttattaatgagacatgaattgtgtctcaacagaaactaaatgaacatttcagaataaattattgctgtatgtaaactgttactgaaattggtatttgtttgaagggtcttgtttcacatttgtattaataattgtttaaaatgcctcttttaaaagcttatataaatttttttcttcagcttctatgcattaagagtaaaattcctcttactgtaataaaaacaattgaagaagactgttgccacttaaccattccatgcgttggcacttatctattcctgaaatttcttttatgtgattagctcatcttgatttttaatatttttccacttaaacttttttttcttactccactggagctcagtaaaagtaaattcatgtaatagcaatgcaagcagcctagcacagactaagcattgagcataataggcccacataatttcctctttcttaatattatagaattctgtacttgaaattgattcttagacattgcagtctcttcgaggctttacagtgtaaactgtcttgccccttcatcttcttgttgcaactgggtctgacatgaacactttttatcaccctgtatgttagggcaagatctcagcagtgaagtataatcagcactttgccatgctcagaaaattcaaatcacatggaactttagaggtagatttaatacgattaagatattcagaagtatattttagaatccctgcctgttaaggaaactttatttgtggtaggtacagttctggggtacatgttaagtgtccccttatacagtggagggaagtcttccttcctgaaggaaaataaactgacacttattaactaagataatttacttaatatatcttccctgatttgttttaaaagatcagagggtgactgatgatacatgcatacatatttgttgaataaatgaaaatttatttttagtgataagattcatacactctgtatttggggagggaaaacctttttaagcatggtggggcactcagataggagtgaatacacctacctggtgccttgaaaatcacatcaagtagttaattatctaccccttacctgtgtttataacttccaggtaatgagaatgattttttttaaagctaaaatgccagtaaataaaagtgctatgacttgagctaagatatttgactccaatgcctgtactgtgtctactgcaccactttgtaaacacttcaatttactatctttgaaatgattgacctttaaatttttgccaaatgttatctgaaattgtctatgaataccatctacttctgttgttttcccaggcttccataaacaatggagatacatgca

SEQ ID NO: 45071 - DNA, 10619 bp, Artificial Sequence
  derived and/or modified sequence
gaatggaggtgctgccggactcggaaatggggacacatgcattggtggccaaaagagagaggagacaaaaccgctgcagatggctgatgtgaatctagtggaaagagctactggggatgagagaaagaggaggaggcaggtccaagggtagccaaggatggctgcagcttcatatgatcagttgttaaagcaagttgaggcactgaagatggagaactcaaatcttcgacaagagctagaagataattccaatcatcttacaaaactggaaactgaggcatctaatatgaaggaagtacttaaacaactacaaggaagtattgaagatgaagctatggcttcttctggacagattgatttattagagcgtcttaaagagcttaacttagatagcagtaatttccctggagtaaaactgcggtcaaaaatgtccctccgttcttatggaagccgggaaggatctgtatcaagccgttctggagagtgcagtcctgttcctatgggttcatttccaagaagagggtttgtaaatggaagcagagaaagtactggatatttagaagaacttgagaaagagaggtcattgcttcttgctgatcttgacaaagaagaaaaggaaaaagactggtattacgctcaacttcagaatctcactaaaagaatagatagtcttcctttaactgaaaatttttccttacaaacagatatgaccagaaggcaattggaatatgaagcaaggcaaatcagagttgcgatggaagaacaactaggtacctgccaggatatggaaaaacgagcacagcgaagaatagccagaattcagcaaatcgaaaaggacatacttcgtatacgacagcttttacagtcccaagcaacagaagcagagaggtcatctcagaacaagcatgaaaccggctcacatgatgctgagcggcagaatgaaggtcaaggagtgggagaaatcaacatggcaacttctggtaatggtcagggttcaactacacgaatggaccatgaaacagccagtgttttgagttctagtagcacacactctgcacctcgaaggctgacaagtcatctgggaaccaaggtggaaatggtgtattcattgttgtcaatgcttggtactcatgataaggatgatatgtcgcgaactttgctagctatgtctagctcccaagacagctgtatatccatgcgacagtctggatgtcttcctctcctcatccagcttttacatggcaatgacaaagactctgtattgttgggaaattcccggggcagtaaagaggctcgggccagggccagtgcagcactccacaacatcattcactcacagcctgatgacaagagaggcaggcgtgaaatccgagtccttcatcttttggaacagatacgcgcttactgtgaaacctgttgggagtggcaggaagctcatgaaccaggcatggaccaggacaaaaatccaatgccagctcctgttgaacatcagatctgtcctgctgtgtgtgttctaatgaaactttcatttgatgaagagcatagacatgcaatgaatgaactagggggactacaggccattgcagaattattgcaagtggactgtgaaatgtatgggcttactaatgaccactacagtattacactaagacgatatgctggaatggctttgacaaacttgacttttggagatgtagccaacaaggctacgctatgctctatgaaaggctgcatgagagcacttgtggcccaactaaaatctgaaagtgaagacttacagcaggttattgcgagtgttttgaggaatttgtcttggcgagcagatgtaaatagtaaaaagacgttgcgagaagttggaagtgtgaaagcattgatggaatgtgctttagaagttaaaaaggaatcaaccctcaaaagcgtattgagtgccttatggaatttgtcagcacattgcactgagaataaagctgatatatgtgctgtagatggtgcacttgcatttttggttggcactcttacttaccggagccagacaaacactttagccattattgaaagtggaggtgggatattacggaatgtgtccagcttgatagctacaaatgaggaccacaggcaaatcctaagagagaacaactgtctacaaactttattacaacacttaaaatctcatagtttgacaatagtcagtaatgcatgtggaactttgtggaatctctcagcaagaaatcctaaagaccaggaagcattatgggacatgggggcagttagcatgctcaagaacctcattcattcaaagcacaaaatgattgctatgggaagtgctgcagctttaaggaatctcatggcaaataggcctgcgaagtacaaggatgccaatattatgtctcctggctcaagcttgccatctcttcatgttaggaaacaaaaagccctagaagcagaattagatgctcagcacttatcagaaacttttgacaatatagacaatttaagtcccaaggcatctcatcgtagtaagcagagacacaagcaaagtctctatggtgattatgtttttgacaccaatcgacatgatgataataggtcagacaattttaatactggcaacatgactgtcctttcaccatatttgaatactacagtgttacccagctcctcttcatcaagaggaagcttagatagttctcgttctgaaaaagatagaagtttggagagagaacgcggaattggtctaggcaactaccatccagcaacagaaaatccaggaacttcttcaaagcgaggtttgcagatctccaccactgcagcccagattgccaaagtcatggaagaagtgtcagccattcatacctctcaggaagacagaagttctgggtctaccactgaattacattgtgtgacagatgagagaaatgcacttagaagaagctctgctgcccatacacattcaaacacttacaatttcactaagtcggaaaattcaaataggacatgttctatgccttatgccaaattagaatacaagagatcttcaaatgatagtttaaatagtgtcagtagtagtgatggttatggtaaaagaggtcaaatgaaaccctcgattgaatcctattctgaagatgatgaaagtaagttttgcagttatggtcaatacccagccgacctagcccataaaatacatagtgcaaatcatatggatgataatgatggagaactagatacaccaataaattatagtcttaaatattcagatgagcagttgaactctggaaggcaaagtccttcacagaatgaaagatgggcaagacccaaacacataatagaagatgaaataaaacaaagtgagcaaagacaatcaaggaatcaaagtacaacttatcctgtttatactgagagcactgatgataaacacctcaagttccaaccacattttggacagcaggaatgtgtttctccatacaggtcacggggagccaatggttcagaaacaaatcgagtgggttctaatcatggaattaatcaaaatgtaagccagtctttgtgtcaagaagatgactatgaagatgataagcctaccaattatagtgaacgttactctgaagaagaacagcatgaagaagaagagagaccaacaaattatagcataaaatataatgaagagaaacgtcatgtggatcagcctattgattatagtttaaaatatgccacagatattccttcatcacagaaacagtcattttcattctcaaagagttcatctggacaaagcagtaaaaccgaacatatgtcttcaagcagtgagaatacgtccacaccttcatctaatgccaagaggcagaatcagctccatccaagttctgcacagagtagaagtggtcagcctcaaaaggctgccacttgcaaagtttcttctattaaccaagaaacaatacagacttattgtgtagaagatactccaatatgtttttcaagatgtagttcattatcatctttgtcatcagctgaagatgaaataggatgtaatcagacgacacaggaagcagattctgctaataccctgcaaatagcagaaataaaagaaaagattggaactaggtcagctgaagatcctgtgagcgaagttccagcagtgtcacagcaccctagaaccaaatccagcagactgcagggttctagtttatcttcagaatcagccaggcacaaagctgttgaattttcttcaggagcgaaatctccctccaaaagtggtgctcagacacccaaaagtccacctgaacactatgttcaggagaccccactcatgtttagcagatgtacttctgtcagttcacttgatagttttgagagtcgttcgattgccagctccgttcagagtgaaccatgcagtggaatggtaagtggcattataagccccagtgatcttccagatagccctggacaaaccatgccaccaagcagaagtaaaacacctccaccacctcctcaaacagctcaaaccaagcgagaagtacctaaaaataaagcacctactgctgaaaagagagagagtggacctaagcaagctgcagtaaatgctgcagttcagagggtccaggttcttccagatgctgatactttattacattttgccacggaaagtactccagatggattttcttgttcatccagcctgagtgctctgagcctcgatgagccatttatacagaaagatgtggaattaagaataatgcctccagttcaggaaaatgacaatgggaatgaaacagaatcagagcagcctaaagaatcaaatgaaaaccaagagaaagaggcagaaaaaactattgattctgaaaaggacctattagatgattcagatgatgatgatattgaaatactagaagaatgtattatttctgccatgccaacaaagtcatcacgtaaagcaaaaaagccagcccagactgcttcaaaattacctccacctgtggcaaggaaaccaagtcagctgcctgtgtacaaacttctaccatcacaaaacaggttgcaaccccaaaagcatgttagttttacaccgggggatgatatgccacgggtgtattgtgttgaagggacacctataaacttttccacagctacatctctaagtgatctaacaatcgaatcccctccaaatgagttagctgctggagaaggagttagaggaggggcacagtcaggtgaatttgaaaaacgagataccattcctacagaaggcagaagtacagatgaggctcaaggaggaaaaacctcatctgtaaccatacctgaattggatgacaataaagcagaggaaggtgatattcttgcagaatgcattaattctgctatgcccaaagggaaaagtcacaagcctttccgtgtgaaaaagataatggaccaggtccagcaagcatctgcgtcttcttctgcacccaacaaaaatcagttagatggtaagaaaaagaaaccaacttcaccagtaaaacctataccacaaaatactgaatataggacacgtgtaagaaaaaatgcagactcaaaaaataatttaaatgctgagagagttttctcagacaacaaagattcaaagaaacagaatttgaaaaataattccaaggtcttcaatgataagctcccaaataatgaagatagagtcagaggaagttttgcttttgattcacctcatcattacacgcctattgaaggaactccttactgtttttcacgaaatgattctttgagttctctagattttgatgatgatgatgttgacctttccagggaaaaggctgaattaagaaaggcaaaagaaaataaggaatcagaggctaaagttaccagccacacagaactaacctccaaccaacaatcagctaataagacacaagctattgcaaagcagccaataaatcgaggtcagcctaaacccatacttcagaaacaatccacttttccccagtcatccaaagacataccagacagaggggcagcaactgatgaaaagttacagaattttgctattgaaaatactccggtttgcttttctcataattcctctctgagttctctcagtgacattgaccaagaaaacaacaataaagaaaatgaacctatcaaagagactgagccccctgactcacagggagaaccaagtaaacctcaagcatcaggctatgctcctaaatcatttcatgttgaagataccccagtttgtttctcaagaaacagttctctcagttctcttagtattgactctgaagatgacctgttgcaggaatgtataagctccgcaatgccaaaaaagaaaaagccttcaagactcaagggtgataatgaaaaacatagtcccagaaatatgggtggcatattaggtgaagatctgacacttgatttgaaagatatacagagaccagattcagaacatggtctatcccctgattcagaaaattttgattggaaagctattcaggaaggtgcaaattccatagtaagtagtttacatcaagctgctgctgctgcatgtttatctagacaagcttcgtctgattcagattccatcctttccctgaaatcaggaatctctctgggatcaccatttcatcttacacctgatcaagaagaaaaaccctttacaagtaataaaggcccacgaattctaaaaccaggggagaaaagtacattggaaactaaaaagatagaatctgaaagtaaaggaatcaaaggaggaaaaaaagtttataaaagtttgattactggaaaagttcgatctaattcagaaatttcaggccaaatgaaacagccccttcaagcaaacatgccttcaatctctcgaggcaggacaatgattcatattccaggagttcgaaatagctcctcaagtacaagtcctgtttctaaaaaaggcccaccccttaagactccagcctccaaaagccctagtgaaggtcaaacagccaccacttctcctagaggagccaagccatctgtgaaatcagaattaagccctgttgccaggcagacatcccaaataggtgggtcaagtaaagcaccttctagatcaggatctagagattcgaccccttcaagacctgcccagcaaccattaagtagacctatacagtctcctggccgaaactcaatttcccctggtagaaatggaataagtcctcctaacaaattatctcaacttccaaggacatcatcccctagtactgcttcaactaagtcctcaggttctggaaaaatgtcatatacatctccaggtagacagatgagccaacagaaccttaccaaacaaacaggtttatccaagaatgccagtagtattccaagaagtgagtctgcctccaaaggactaaatcagatgaataatggtaatggagccaataaaaaggtagaactttctagaatgtcttcaactaaatcaagtggaagtgaatctgatagatcagaaagacctgtattagtacgccagtcaactttcatcaaagaagctccaagcccaaccttaagaagaaaattggaggaatctgcttcatttgaatctctttctccatcatctagaccagcttctcccactaggtcccaggcacaaactccagttttaagtccttcccttcctgatatgtctctatccacacattcgtctgttcaggctggtggatggcgaaaactcccacctaatctcagtcccactatagagtataatgatggaagaccagcaaagcgccatgatattgcacggtctcattctgaaagtccttctagacttccaatcaataggtcaggaacctggaaacgtgagcacagcaaacattcatcatcccttcctcgagtaagcacttggagaagaactggaagttcatcttcaattctttctgcttcatcagaatccagtgaaaaagcaaaaagtgaggatgaaaaacatgtgaactctatttcaggaaccaaacaaagtaaagaaaaccaagtatccgcaaaaggaacatggagaaaaataaaagaaaatgaattttctcccacaaatagtacttctcagaccgtttcctcaggtgctacaaatggtgctgaatcaaagactctaatttatcaaatggcacctgctgtttctaaaacagaggatgtttgggtgagaattgaggactgtcccattaacaatcctagatctggaagatctcccacaggtaatactcccccggtgattgacagtgtttcagaaaaggcaaatccaaacattaaagattcaaaagataatcaggcaaaacaaaatgtgggtaatggcagtgttcccatgcgtaccgtgggtttggaaaatcgcctgaactcctttattcaggtggatgcccctgaccaaaaaggaactgagataaaaccaggacaaaataatcctgtccctgtatcagagactaatgaaagttctatagtggaacgtaccccattcagttctagcagctcaagcaaacacagttcacctagtgggactgttgctgccagagtgactccttttaattacaacccaagccctaggaaaagcagcgcagatagcacttcagctcggccatctcagatcccaactccagtgaataacaacacaaagaagcgagattccaaaactgacagcacagaatccagtggaacccaaagtcctaagcgccattctgggtcttaccttgtgacatctgtttaaaagagaggaagaatgaaactaagaaaattctatgttaattacaactgctatatagacattttgtttcaaatgaaactttaaaagactgaaaaattttgtaaataggtttgattcttgttagagggtttttgttctggaagccatatttgatagtatactttgtcttcactggtcttattttgggaggcactcttgatggttaggaaaaaaatagtaaagccaagtatgtttgtacagtatgttttacatgtatttaaagtagcatcccatcccaacttcctttaattattgcttgtcttaaaataatgaacactacagatagaaaatatgatatattgctgttatcaatcatttctagattataaactgactaaacttacatcagggaaaaattggtatttatgcaaaaaaaaatgtttttgtccttgtgagtccatctaacatcataattaatcatgtggctgtgaaattcacagtaatatggttcccgatgaacaagtttacccagcctgctttgctttactgcatgaatgaaactgatggttcaatttcagaagtaatgattaacagttatgtggtcacatgatgtgcatagagatagctacagtgtaataatttacactattttgtgctccaaacaaaacaaaaatctgtgtaactgtaaaacattgaatgaaactattttacctgaactagattttatctgaaagtaggtagaatttttgctatgctgtaatttgttgtatattctggtatttgaggtgagatggctgctcttttattaatgagacatgaattgtgtctcaacagaaactaaatgaacatttcagaataaattattgctgtatgtaaactgttactgaaattggtatttgtttgaagggtcttgtttcacatttgtattaataattgtttaaaatgcctcttttaaaagcttatataaatttttttcttcagcttctatgcattaagagtaaaattcctcttactgtaataaaaacaattgaagaagactgttgccacttaaccattccatgcgttggcacttatctattcctgaaatttcttttatgtgattagctcatcttgatttttaatatttttccacttaaacttttttttcttactccactggagctcagtaaaagtaaattcatgtaatagcaatgcaagcagcctagcacagactaagcattgagcataataggcccacataatttcctctttcttaatattatagaattctgtacttgaaattgattcttagacattgcagtctcttcgaggctttacagtgtaaactgtcttgccccttcatcttcttgttgcaactgggtctgacatgaacactttttatcaccctgtatgttagggcaagatctcagcagtgaagtataatcagcactttgccatgctcagaaaattcaaatcacatggaactttagaggtagatttaatacgattaagatattcagaagtatattttagaatccctgcctgttaaggaaactttatttgtggtaggtacagttctggggtacatgttaagtgtccccttatacagtggagggaagtcttccttcctgaaggaaaataaactgacacttattaactaagataatttacttaatatatcttccctgatttgttttaaaagatcagagggtgactgatgatacatgcatacatatttgttgaataaatgaaaatttatttttagtgataagattcatacactctgtatttggggagggaaaacctttttaagcatggtggggcactcagataggagtgaatacacctacctggtgccttgaaaatcacatcaagtagttaattatctaccccttacctgtgtttataacttccaggtaatgagaatgattttttttaaagctaaaatgccagtaaataaaagtgctatgacttg

SEQ ID NO: 45072 - DNA, 7406 bp, Artificial Sequence
  derived and/or modified sequence
actggagacagaatggaggtgctgccggactcggaaatggggtccaagggtagccaaggatggctgcagcttcatatgatcagttgttaaagcaagttgaggcactgaagatggagaactcaaatcttcgacaagagctagaagataattccaatcatcttacaaaactggaaactgaggcatctaatatgaaggaagtacttaaacaactacaaggaagtattgaagatgaagctatggcttcttctggacagattgatttattagagcgtcttaaagagcttaacttagatagcagtaatttccctggagtaaaactgcggtcaaaaatgtccctccgttcttatggaagccgggaaggatctgtatcaagccgttctggagagtgcagtcctgttcctatgggttcatttccaagaagagggtttgtaaatggaagcagagaaagtactggatatttagaagaacttgagaaagagaggtcattgcttcttgctgatcttgacaaagaagaaaaggaaaaagactggtattacgctcaacttcagaatctcactaaaagaatagatagtcttcctttaactgaaaatttttccttacaaacagatatgaccagaaggcaattggaatatgaagcaaggcaaatcagagttgcgatggaagaacaactaggtacctgccaggatatggaaaaacgagcacagcgaagaatagccagaattcagcaaatcgaaaaggacatacttcgtatacgacagcttttacagtcccaagcaacagaagcagagaggtcatctcagaacaagcatgaaaccggctcacatgatgctgagcggcagaatgaaggtcaaggagtgggagaaatcaacatggcaacttctggtaatggtcagatagaaaagatgaggatgtttgaatgctgatgggaaggagccagtagagaagagagttgaagatccctaagatcaaagagaaatggagagagaaaggatccagagcacatctaaagggatggaccttagataggaggaggggaactctgatgtcacagcaaaaggtggcgatggatatatacgcagggttcaactacacgaatggaccatgaaacagccagtgttttgagttctagtagcacacactctgcacctcgaaggctgacaagtcatctgggaaccaaggtggaaatggtgtattcattgttgtcaatgcttggtactcatgataaggatgatatgtcgcgaactttgctagctatgtctagctcccaagacagctgtatatccatgcgacagtctggatgtcttcctctcctcatccagcttttacatggcaatgacaaagactctgtattgttgggaaattcccggggcagtaaagaggctcgggccagggccagtgcagcactccacaacatcattcactcacagcctgatgacaagagaggcaggcgtgaaatccgagtccttcatcttttggaacagatacgcgcttactgtgaaacctgttgggagtggcaggaagctcatgaaccaggcatggaccaggacaaaaatccaatgccagctcctgttgaacatcagatctgtcctgctgtgtgtgttctaatgaaactttcatttgatgaagagcatagacatgcaatgaatgaactagggggactacaggccattgcagaattattgcaagtggactgtgaaatgtatgggcttactaatgaccactacagtattacactaagacgatatgctggaatggctttgacaaacttgacttttggagatgtagccaacaaggctacgctatgctctatgaaaggctgcatgagagcacttgtggcccaactaaaatctgaaagtgaagacttacagcaggttattgcgagtgttttgaggaatttgtcttggcgagcagatgtaaatagtaaaaagacgttgcgagaagttggaagtgtgaaagcattgatggaatgtgctttagaagttaaaaaggaatcaaccctcaaaagcgtattgagtgccttatggaatttgtcagcacattgcactgagaataaagctgatatatgtgctgtagatggtgcacttgcatttttggttggcactcttacttaccggagccagacaaacactttagccattattgaaagtggaggtgggatattacggaatgtgtccagcttgatagctacaaatgaggaccacaggcaaatcctaagagagaacaactgtctacaaactttattacaacacttaaaatctcatagtttgacaatagtcagtaatgcatgtggaactttgtggaatctctcagcaagaaatcctaaagaccaggaagcattatgggacatgggggcagttagcatgctcaagaacctcattcattcaaagcacaaaatgattgctatgggaagtgctgcagctttaaggaatctcatggcaaataggcctgcgaagtacaaggatgccaatattatgtctcctggctcaagcttgccatctcttcatgttaggaaacaaaaagccctagaagcagaattagatgctcagcacttatcagaaacttttgacaatatagacaatttaagtcccaaggcatctcatcgtagtaagcagagacacaagcaaagtctctatggtgattatgtttttgacaccaatcgacatgatgataataggtcagacaattttaatactggcaacatgactgtcctttcaccatatttgaatactacagtgttacccagctcctcttcatcaagaggaagcttagatagttctcgttctgaaaaagatagaagtttggagagagaacgcggaattggtctaggcaactaccatccagcaacagaaaatccaggaacttcttcaaagcgaggtttgcagatctccaccactgcagcccagattgccaaagtcatggaagaagtgtcagccattcatacctctcaggaagacagaagttctgggtctaccactgaattacattgtgtgacagatgagagaaatgcacttagaagaagctctgctgcccatacacattcaaacacttacaatttcactaagtcggaaaattcaaataggacatgttctatgccttatgccaaattagaatacaagagatcttcaaatgatagtttaaatagtgtcagtagtagtgatggttatggtaaaagaggtcaaatgaaaccctcgattgaatcctattctgaagatgatgaaagtaagttttgcagttatggtcaatacccagccgacctagcccataaaatacatagtgcaaatcatatggatgataatgatggagaactagatacaccaataaattatagtcttaaatattcagatgagcagttgaactctggaaggcaaagtccttcacagaatgaaagatgggcaagacccaaacacataatagaagatgaaataaaacaaagtgagcaaagacaatcaaggaatcaaagtacaacttatcctgtttatactgagagcactgatgataaacacctcaagttccaaccacattttggacagcaggaatgtgtttctccatacaggtcacggggagccaatggttcagaaacaaatcgagtgggttctaatcatggaattaatcaaaatgtaagccagtctttgtgtcaagaagatgactatgaagatgataagcctaccaattatagtgaacgttactctgaagaagaacagcatgaagaagaagagagaccaacaaattatagcataaaatataatgaagagaaacgtcatgtggatcagcctattgattatagtttaaaatatgccacagatattccttcatcacagaaacagtcattttcattctcaaagagttcatctggacaaagcagtaaaaccgaacatatgtcttcaagcagtgagaatacgtccacaccttcatctaatgccaagaggcagaatcagctccatccaagttctgcacagagtagaagtggtcagcctcaaaaggctgccacttgcaaagtttcttctattaaccaagaaacaatacagacttattgtgtagaagatactccaatatgtttttcaagatgtagttcattatcatctttgtcatcagctgaagatgaaataggatgtaatcagacgacacaggaagcagattctgctaataccctgcaaatagcagaaataaaagaaaagattggaactaggtcagctgaagatcctgtgagcgaagttccagcagtgtcacagcaccctagaaccaaatccagcagactgcagggttctagtttatcttcagaatcagccaggcacaaagctgttgaattttcttcaggagcgaaatctccctccaaaagtggtgctcagacacccaaaagtccacctgaacactatgttcaggagaccccactcatgtttagcagatgtacttctgtcagttcacttgatagttttgagagtcgttcgattgccagctccgttcagagtgaaccatgcagtggaatggtaagtggcattataagccccagtgatcttccagatagccctggacaaaccatgccaccaagcagaagtaaaacacctccaccacctcctcaaacagctcaaaccaagcgagaagtacctaaaaataaagcacctactgctgaaaagagagagagtggacctaagcaagctgcagtaaatgctgcagttcagagggtccaggttcttccagatgctgatactttattacattttgccacggaaagtactccagatggattttcttgttcatccagcctgagtgctctgagcctcgatgagccatttatacagaaagatgtggaattaagaataatgcctccagttcaggaaaatgacaatgggaatgaaacagaatcagagcagcctaaagaatcaaatgaaaaccaagagaaagaggcagaaaaaactattgattctgaaaaggacctattagatgattcagatgatgatgatattgaaatactagaagaatgtattatttctgccatgccaacaaagtcatcacgtaaagcaaaaaagccagcccagactgcttcaaaattacctccacctgtggcaaggaaaccaagtcagctgcctgtgtacaaacttctaccatcacaaaacaggttgcaaccccaaaagcatgttagttttacaccgggggatgatatgccacgggtgtattgtgttgaagggacacctataaacttttccacagctacatctctaagtgatctaacaatcgaatcccctccaaatgagttagctgctggagaaggagttagaggaggggcacagtcaggtgaatttgaaaaacgagataccattcctacagaaggcagaagtacagatgaggctcaaggaggaaaaacctcatctgtaaccatacctgaattggatgacaataaagcagaggaaggtgatattcttgcagaatgcattaattctgctatgcccaaagggaaaagtcacaagcctttccgtgtgaaaaagataatggaccaggtccagcaagcatctgcgtcttcttctgcacccaacaaaaatcagttagatggtaagaaaaagaaaccaacttcaccagtaaaacctataccacaaaatactgaatataggacacgtgtaagaaaaaatgcagactcaaaaaataatttaaatgctgagagagttttctcagacaacaaagattcaaagaaacagaatttgaaaaataattccaaggtcttcaatgataagctcccaaataatgaagatagagtcagaggaagttttgcttttgattcacctcatcattacacgcctattgaaggaactccttactgtttttcacgaaatgattctttgagttctctagattttgatgatgatgatgttgacctttccagggaaaaggctgaattaagaaaggcaaaagaaaataaggaatcagaggctaaagttaccagccacacagaactaacctccaaccaacaatcagctaataagacacaagctattgcaaagcagccaataaatcgaggtcagcctaaacccatacttcagaaacaatccacttttccccagtcatccaaagacataccagacagaggggcagcaactgatgaaaagttacagaattttgctattgaaaatactccggtttgcttttctcataattcctctctgagttctctcagtgacattgaccaagaaaacaacaataaagaaaatgaacctatcaaagagactgagccccctgactcacagggagaaccaagtaaacctcaagcatcaggctatgctcctaaatcatttcatgttgaagataccccagtttgtttctcaagaaacagttctctcagttctcttagtattgactctgaagatgacctgttgcaggaatgtataagctccgcaatgccaaaaaagaaaaagccttcaagactcaagggtgataatgaaaaacatagtcccagaaatatgggtggcatattaggtgaagatctgacacttgatttgaaagatatacagagaccagattcagaacatggtctatcccctgattcagaaaattttgattggaaagctattcaggaaggtgcaaattccatagtaagtagtttacatcaagctgctgctgctgcatgtttatctagacaagcttcgtctgattcagattccatcctttccctgaaatcaggaatctctctgggatcaccatttcatcttacacctgatcaagaagaaaaaccctttacaagtaataaaggcccacgaattctaaaaccaggggagaaaagtacattggaaactaaaaagatagaatctgaaagtaaaggaatcaaaggaggaaaaaaagtttataaaagtttgattactggaaaagttcgatctaattcagaaatttcaggccaaatgaaacagccccttcaagcaaacatgccttcaatctctcgaggcaggacaatgattcatattccaggagttcgaaatagctcctcaagtacaagtcctgtttctaaaaaaggcccaccccttaagactccagcctccaaaagccctagtgaaggtcaaacagccaccacttctcctagaggagccaagccatctgtgaaatcagaattaagccctgttgccaggcagacatcccaaataggtgggtcaagtaaagcaccttctagatcaggatctagagattcgaccccttcaagacctgcccagcaaccattaagtagacctatacagtctcctggccgaaactcaatttcccctggtagaaatggaataagtcctcctaacaaattatctcaacttccaaggacatcatcccctagtactgcttcaactaagtcctcaggttctggaaaaatgtcatatacatctccaggtagacagatgagccaacagaaccttaccaaacaaacaggtttatccaagaat

SEQ ID NO: 45073 - DNA, 524 bp, Artificial Sequence
  derived and/or modified sequence
gcattgtagtcttcccacctcccacaagatggcggagggcaagtagcaagggggcggggtgtggccgccggaagcctagccgctgctcgggggggacctgcgggctcaggcccgggagctgcggaccgaggttggctcgatgctgttcccaggtccaagggtagccaaggatggctgcagcttcatatgatcagttgttaaagcaagttgaggcactgaagatggagaactcaaatcttcgacaagagctagaagataattccaatcatcttacaaaactggaaactgaggcatctaatatgaaggaagtacttaaacaactacaaggaagtattgaagatgaagctatggcttcttctggacagattgatttattagagcgtcttaaagagcttaacttagatagcagtaatttccctggagtaaaactgcggtcaaaaatgtccctccgttcttatggaagccgggaaggatctgtatcaagccgttctggagagtgcagtcctgttcctatgggttcattt

SEQ ID NO: 45074 - DNA, 4061 bp, Artificial Sequence
  derived and/or modified sequence
cttttcctccctggcgacaaggacacatgcattggtggccaaaagagagaggagacaaaaccgctgcagatggctgatgtgaatctagtggaaagagctactggggatgagagaaagaggaggaggcaggtccaagggtagccaaggatggctgcagcttcatatgatcagttgttaaagcaagttgaggcactgaagatggagaactcaaatcttcgacaagagctagaagataattccaatcatcttacaaaactggaaactgaggcatctaatatgaaggaagtacttaaacaactacaaggaagtattgaagatgaagctatggcttcttctggacagattgatttattagagcgtcttaaagagcttaacttagatagcagtaatttccctggagtaaaactgcggtcaaaaatgtccctccgttcttatggaagccgggaaggatctgtatcaagccgttctggagagtgcagtcctgttcctatgggttcatttccaagaagagggtttgtaaatggaagcagagaaagtactggatatttagaagaacttgagaaagagaggtcattgcttcttgctgatcttgacaaagaagaaaaggaaaaagactggtattacgctcaacttcagaatctcactaaaagaatagatagtcttcctttaactgaaaatttttccttacaaacagatatgaccagaaggcaattggaatatgaagcaaggcaaatcagagttgcgatggaagaacaactaggtacctgccaggatatggaaaaacgagcacagcgaagaatagccagaattcagcaaatcgaaaaggacatacttcgtatacgacagcttttacagtcccaagcaacagaagcagagaggtcatctcagaacaagcatgaaaccggctcacatgatgctgagcggcagaatgaaggtcaaggagtgggagaaatcaacatggcaacttctggtaatggtcagggttcaactacacgaatggaccatgaaacagccagtgttttgagttctagtagcacacactctgcacctcgaaggctgacaagtcatctgggaaccaaggtggaaatggtgtattcattgttgtcaatgcttggtactcatgataaggatgatatgtcgcgaactttgctagctatgtctagctcccaagacagctgtatatccatgcgacagtctggatgtcttcctctcctcatccagcttttacatggcaatgacaaagactctgtattgttgggaaattcccggggcagtaaagaggctcgggccagggccagtgcagcactccacaacatcattcactcacagcctgatgacaagagaggcaggcgtgaaatccgagtccttcatcttttggaacagatacgcgcttactgtgaaacctgttgggagtggcaggaagctcatgaaccaggcatggaccaggacaaaaatccaatgccagctcctgttgaacatcagatctgtcctgctgtgtgtgttctaatgaaactttcatttgatgaagagcatagacatgcaatgaatgaactagggggactacaggccattgcagaattattgcaagtggactgtgaaatgtatgggcttactaatgaccactacagtattacactaagacgatatgctggaatggctttgacaaacttgacttttggagatgtagccaacaaggctacgctatgctctatgaaaggctgcatgagagcacttgtggcccaactaaaatctgaaagtgaagacttacagcaggttattgcgagtgttttgaggaatttgtcttggcgagcagatgtaaatagtaaaaagacgttgcgagaagttggaagtgtgaaagcattgatggaatgtgctttagaagttaaaaaggaatcaaccctcaaaagcgtattgagtgccttatggaatttgtcagcacattgcactgagaataaagctgatatatgtgctgtagatggtgcacttgcatttttggttggcactcttacttaccggagccagacaaacactttagccattattgaaagtggaggtgggatattacggaatgtgtccagcttgatagctacaaatgaggaccacaggcaaatcctaagagagaacaactgtctacaaactttattacaacacttaaaatctcatagtttgacaatagtcagtaatgcatgtggaactttgtggaatctctcagcaagaaatcctaaagaccaggaagcattatgggacatgggggcagttagcatgctcaagaacctcattcattcaaagcacaaaatgattgctatgggaagtgctgcagctttaaggaatctcatggcaaataggcctgcgaagtacaaggatgccaatattatgtctcctggctcaagcttgccatctcttcatgttaggaaacaaaaagccctagaagcagaattagatgctcagcacttatcagaaacttttgacaatatagacaatttaagtcccaaggcatctcatcgtagtaagcagagacacaagcaaagtctctatggtgattatgtttttgacaccaatcgacatgatgataataggtcagacaattttaatactggcaacatgactgtcctttcaccatatttgaatactacagtgttacccagctcctcttcatcaagaggaagcttagatagttctcgttctgaaaaagatagaagtttggagagagaacgcggaattggtctaggcaactaccatccagcaacagaaaatccaggaacttcttcaaagcgaggtttgcagatctccaccactgcagcccagattgccaaagtcatggaagaagtgtcagccattcatacctctcaggaagacagaagttctgggtctaccactgaattacattgtgtgacagatgagagaaatgcacttagaagaagctctgctgcccatacacattcaaacacttacaatttcactaagtcggaaaattcaaataggacatgttctatgccttatgccaaattagaatacaagagatcttcaaatgatagtttaaatagtgtcagtagtagtgatggttatggtaaaagaggtcaaatgaaaccctcgattgaatcctattctgaagatgatgaaagtaagttttgcagttatggtcaatacccagccgacctagcccataaaatacatagtgcaaatcatatggatgataatgatggagaactagatacaccaataaattatagtcttaaatattcagatgagcagttgaactctggaaggcaaagtccttcacagaatgaaagatgggcaagacccaaacacataatagaagatgaaataaaacaaagtgagcaaagacaatcaaggaatcaaagtacaacttatcctgtttatactgagagcactgatgataaacacctcaagttccaaccacattttggacagcaggaatgtgtttctccatacaggtcacggggagccaatggttcagaaacaaatcgagtgggttctaatcatggaattaatcaaaatgtaagccagtctttgtgtcaagaagatgactatgaagatgataagcctaccaattatagtgaacgttactctgaagaagaacagcatgaagaagaagagagaccaacaaattatagcataaaatataatgaagagaaacgtcatgtggatcagcctattgattatagtttaaaatatgccacagatattccttcatcacagaaacagtcattttcattctcaaagagttcatctggacaaagcagtaaaaccgaacatatgtcttcaagcagtgagaatacgtccacaccttcatctaatgccaagaggcagaatcagctccatccaagttctgcacagagtagaagtggtcagcctcaaaaggctgccacttgcaaagtttcttctattaaccaagaaacaatacagacttattgtgtagaagatactccaatatgtttttcaagatgtagttcattatcatctttgtcatcagctgaagatgaaataggatgtaatcagacgacacaggaagcagattctgctaataccctgcaaatagc

SEQ ID NO: 45075 - DNA, 8532 bp, Artificial Sequence
  derived and/or modified sequence
atggctgcagcctcatatgatcagttgctgaagcaggtggaagcactgaagatggagaacagtaatttgcgccaagaactggaggataactcaaaccacttgaccaaactcgagacagaagccagtaacatgaaggaagtacttaaacaacttcagggttccatcgaggatgaggctatggccagtagcggccagatcgacctccttgaaaggctcaaggagctgaatctggattctagtaattttccaggggtaaagttaaggagcaaaatgagtctgagatcgtacgggagcagagagggctcggtttcatcgcgctcaggcgagtgttcaccagtgccaatgggatcttttccccgaagggggtttgtgaacggctctagagaatccaccggctacctcgaggaattagagaaagaaagatcactgctgctggcagacctagataaggaggaaaaggaaaaagactggtactacgcccagttgcagaatctcaccaaaagaatcgactctttgcctcttaccgagaatttcagcctacaaactgacatgaccaggaggcaacttgagtatgaagccaggcaaattagggttgcgatggaagagcagctgggtacttgccaggatatggagaagcgagcccagcgtaggatcgcaaggatacagcaaatagaaaaggacatccttcggatcaggcagcttttgcagtcgcaagcaacagaagcggaacgaagctcacagaacaagcacgagacaggcagccatgatgcggagcgacagaatgaaggccagggagtgggcgagataaacatggccacctcgggcaatggccagggtagcacaacaagaatggatcacgaaacagcgtcagtgttatcatcgagttccactcacagcgctcctcgtaggttaacctctcatctaggaacaaaagtcgaaatggtctacagtctacttagcatgctggggacacatgataaagacgacatgagcagaacgctattggcaatgagttcctcacaggatagctgcatttccatgagacagtccggttgtctccctttactgatccagttactgcacggcaatgataaggattccgtgttactaggtaacagtagaggatccaaagaggctagggcaagagcaagcgccgctcttcacaacataattcattcacagccggacgacaaaaggggcagaagggagatccgggtacttcatctactggagcagatacgggcttactgcgagacctgctgggagtggcaggaggcacatgaacctgggatggaccaggacaagaaccctatgcccgctcccgtagagcatcagatatgtccggcagtctgcgtgcttatgaagctgtcattcgatgaagagcaccggcatgctatgaatgagctgggcggtctccaggcaatagccgagttgttgcaggtggattgtgagatgtacggtctgaccaatgatcactatagcatcaccctgcgcagatatgccggaatggctttaacgaatctcaccttcggggacgttgcaaacaaagccaccctgtgctcgatgaaagggtgtatgcgagcgctggttgcccagctcaagtctgaatccgaagatctgcagcaggtcatagcttctgttctgaggaacctttcttggcgggctgatgtcaactcaaaaaagaccctgcgtgaggtgggtagcgtcaaagctcttatggagtgcgcgttagaggtcaagaaagagagtaccttgaagagcgtcctgtctgcgctgtggaacctcagcgctcactgtactgaaaataaggcagacatttgcgcagtagatggcgcactcgcgttccttgttggcaccctcacttataggagccagacaaacaccttggccattattgaatctggcggaggaatcctaaggaatgtgtcctccctgatcgccacaaacgaggatcacaggcagatcttgcgagagaataattgtctccaaactctcctgcaacatttaaaatcccactcgctcaccatagtgtccaatgcatgtggcacactgtggaatcttagcgctagaaatccaaaggaccaagaagcattatgggacatgggcgctgtcagtatgctcaaaaacttgattcactccaagcacaagatgattgctatgggctctgccgctgccctgagaaacttgatggcaaaccgtcccgctaagtacaaggacgcaaatattatgtcccccggaagctcactgccgtcacttcacgttaggaagcaaaaggcactcgaagccgagttggacgctcagcacctcagcgagacgttcgataacatcgacaacctgtcgcccaaggcttcccatagatcaaaacagcgccataaacagtccctgtacggagactatgtgttcgataccaatcgacacgatgataaccgcagcgataattttaacaccggtaacatgactgtcttgagtccgtatctcaacaccacagtactgccgtcctcttcatcgtctcggggatcccttgactcttcccgaagtgagaaggacagaagccttgagcgggagagggggattggtctgggcaattatcaccccgcaaccgaaaatccagggacaagtagtaagaggggcctgcagataagcacaactgctgcccaaatcgctaaggttatggaggaagtgtccgccattcatacttcgcaggaggatcgctccagcggtagtacaactgaattgcactgtgtcaccgacgagcgcaatgctctccgtaggtctagtgccgcacacactcactctaatacatataacttcaccaagtccgagaacagtaaccgaacgtgttctatgccttatgcaaaactagagtataagaggtcgtcgaacgattccttgaattctgtttctagcagtgacggctacggcaagcgtggacagatgaagccatccattgagagttacagcgaagacgacgaatcaaagttttgtagctatggccaataccctgccgacctggcccataagatccattcagccaatcacatggacgataatgatggcgagctcgatactcctattaactattccctcaagtatagtgatgagcagctcaacagcggtaggcaatccccttcccagaacgaacgatgggctagacccaaacacattatagaggacgagattaaacagagtgaacagcgccagtcccgcaaccagagcactacttatccagtctatacagagtcaaccgacgacaagcacctaaagttccagcctcactttggacaacaggagtgcgtgtccccctataggagccgaggtgccaacggctcagaaactaatagagtgggcagcaaccacgggatcaatcagaacgttagtcagagcctttgccaggaagatgattatgaggacgacaaacccactaactattccgagcggtattctgaagaggagcagcacgaggaggaggagcggccaaccaactactcaattaagtataacgaagagaagcgacatgtcgaccagccaatcgactacagtcttaaatacgccacagacattccaagtagccagaaacaaagttttagctttagcaagagcagctccggtcaatcgtcaaaaaccgaacatatgtcaagctcttcagagaatacgtccacccccagcagtaatgccaagagacagaaccaactgcatccttcgtctgctcagagccgttcaggacagcctcagaaagccgctacatgcaaagtttcatccatcaaccaagagactattcagacctattgcgtcgaggacacccccatttgtttcagccgctgtagctctctgagctcactgtcatctgccgaggacgaaataggatgtaaccagacgacccaggaggccgactcggccaatactttgcagatcgccgaaatcaaggaaaaaataggcacgcgctcggcagaggaccccgtgagcgaagttcccgcagtttctcaacatccaagaaccaagtcttcacgcctacaggggagttccctgtcatcagaatccgcacggcataaagccgtcgagttctctagtggtgcaaagtctcccagtaagtcaggggcacagactccaaagtcccctcccgaacattacgtgcaggagacgccactgatgttttctcgatgtacgtcagtgagcagcctggattcctttgagtccaggagcatcgccagcagtgtgcaaagcgagccctgtagcggaatggtgtccgggatcattagcccttcggaccttcccgactcgccagggcaaaccatgcctccttcccgctcgaaaacacctcctcctccacctcagaccgcacagaccaaacgcgaggttcctaaaaataaggctccgaccgcagagaagcgtgaaagcggccctaagcaggccgctgtaaacgctgctgtgcagcgtgtgcaagtgcttccggatgccgatacgctcttacatttcgctacagagagtacccccgatgggttctcttgcagctcgtctctgtccgccctctcactggatgagccgtttattcagaaagatgtggaactaaggatcatgccgcctgtgcaggagaacgacaacggcaatgagaccgaatcagaacagccaaaagagagtaatgaaaatcaggagaaagaagccgagaagacgattgatagtgagaaggacctgctggatgactcggacgatgatgacatagagatactggaagagtgcatcatcagcgctatgccaaccaaatcctctaggaaggccaaaaagccagcacagacagcatcgaaattgcccccacctgtggcacggaaaccaagccagctgccagtgtacaagttgcttccttcccagaacaggctccaaccacagaagcatgtgagcttcacgccaggagacgacatgccacgggtgtactgcgttgaaggcactccaattaatttttcaacagccacttctctctcggacctgactattgagtccccccctaatgaactggctgcaggcgagggcgtccgcggaggcgcacagtctggcgaatttgagaagcgtgatacaattcccacggaagggagatctaccgacgaggcgcagggcggaaagacaagttcagtgaccattcccgaactcgacgataataaggcagaggaaggagacatcctcgcagaatgcattaacagcgctatgcccaaggggaagagccacaaaccattccgagtaaagaaaatcatggaccaggtgcaacaagccagcgcctcctcctctgcccctaacaaaaaccagctcgacggaaagaaaaagaagcccacctccccagtcaagccaattccccagaacaccgaataccgaacacgcgttaggaagaacgccgacagtaaaaataatttgaatgccgagcgcgtgttctccgacaataaggattccaagaagcagaaccttaagaataacagcaaagtctttaatgataagctgccgaataatgaggacagagtgcggggtagcttcgcgttcgatagcccgcatcactacactcccatagaaggcacaccttactgtttctcacgtaatgattccctgtcttccttggattttgacgacgatgacgtggacctgtccagagagaaagccgagctgagaaaggccaaggaaaataaggagagcgaagccaaggtaacaagtcacacagagttgacatcgaatcaacaatccgcaaacaaaacccaggcaatcgctaagcaacccataaatagggggcagcctaaaccaattctgcaaaagcagagtactttcccccagtcctctaaagatatacccgaccgcggtgccgcaactgatgagaaacttcagaatttcgccattgagaacaccccagtctgtttctcccacaattcatccctatcaagcctcagtgatatcgaccaggagaataataataaagaaaatgagccaattaaggaaacggagccaccggatagtcagggcgaacccagtaaaccacaggccagtgggtacgcccctaaatcatttcacgtggaagataccccagtgtgttttagtaggaatagctccctctcatccctcagcatcgactcagaggacgacttgctgcaggaatgcatcagtagcgcaatgcccaagaagaagaagccatcaagattgaagggcgataacgagaaacatagtcccagaaacatgggcggaatactgggcgaagatctcaccctcgacctgaaggatatccaacgcccagacagtgagcatggacttagccccgattctgaaaattttgattggaaggccatccaagagggtgccaattcaattgtttcttcacttcaccaggctgcagcagctgcctgtctatcacgacaggcctcatcggacagcgactcgatcctgtcccttaagagcggcattagcttaggctcgccttttcacctcactccagatcaggaggaaaaacccttcacaagcaacaagggcccacgtattctaaaaccaggtgaaaagtccacattggaaaccaagaagatcgagtcagagagtaaggggattaaggggggaaaaaaggtttataagtccttgattactggcaaagttcgctcaaactcagaaatttcgggccagatgaagcagcctttacaggcaaacatgccatcaatttctcggggaagaacaatgatacacatcccgggtgtgcggaacagctcctctagcacctctccagtgagcaagaagggaccacctctgaagaccccggctagtaagtccccttctgaggggcagaccgccacaacctcaccaagaggggcaaagccctctgttaagtccgagctctcccccgtggccagacaaaccagccagattggcggttcctcaaaagctccctccaggagtggcagcagggacagcactccaagccggccagcgcaacagcctctcagccgccctatccaatcacccggaagaaactccatcagtcctgggagaaacgggatttctcctcctaacaagctctcacagctgcctaggaccagtagtccatcgaccgcttccacaaagtcctcgggcagtggcaaaatgagttataccagcccaggacgccaaatgtcacaacaaaatctgactaagcagaccgggcttagtaaaaatgcgagctcgatcccccgttccgaatccgcctccaaagggctcaatcagatgaacaacggcaacggggcaaataagaaggtggaactttcccggatgtcatctaccaagtcctctggcagcgaaagcgaccgatcagaacgtcctgtgcttgttcgccagtctacatttataaaagaggctccttctccgacgcttcgcagaaagcttgaggagtcagcctcatttgaatcgctgtctccgagttccaggccagccagccccactcgttctcaggctcagactcccgttctgagcccatccctgcccgatatgtcactaagtacccacagctccgtccaggccggtgggtggagaaaacttccacctaatttgtcccccacaatcgagtataacgatggcagacctgcaaaacgccacgatatcgcacggtcgcactccgagtcgcccagtcgcctgcccattaataggagcgggacttggaagcgcgagcacagcaagcactccagctccttaccgagggtgtccacgtggcggcgtaccggatcttcatcctctattctctccgccagctcagaatctagcgaaaaggcaaagtccgaggatgaaaagcacgtgaatagcatcagtggaactaagcagtccaaagagaaccaagtctcagctaaggggacttggcggaagattaaggaaaatgaattcagtcctacaaattccacctcacaaacagtgagctctggcgcaaccaacggcgctgaatccaaaacccttatctatcagatggcccctgccgtgtcgaagacagaggacgtgtgggtgagaatagaagattgccccataaacaatcctaggtccggacgcagcccaactgggaacactcctcctgtgattgacagtgtgagcgagaaggccaaccctaacataaaagacagtaaggataatcaggccaagcagaatgtaggtaacgggtctgtccccatgcgcaccgtaggactggagaatagactcaactcatttattcaggtggacgcccctgaccagaagggaactgagataaagcccggacagaacaatccagttccagtctctgaaacaaacgagagcagcatcgtggagcgaacgccatttagcagttcatccagtagcaaacactcttcaccttccggtactgtggccgctcgcgtgaccccattcaactacaatccatccccaaggaagtccagtgctgactcgacgtctgcaaggccctctcaaattcccacacccgtgaataacaacaccaaaaaaagggatagtaaaaccgactccacagagagttcaggcactcaaagcccaaagaggcacagcggttcatacttggtgacctcagtctaa

SEQ ID NO: 45076 - DNA, 8531 bp, Artificial Sequence
  derived and/or modified sequence
atggccgctgctagctatgatcagctgctgaagcaggtagaggcgttgaagatggagaatagtaacctacgccaagaacttgaagataattccaaccatctcaccaaactggagaccgaggctagtaacatgaaggaggttctaaagcagctacagggttcgatcgaggatgaagcaatggcctcttcagggcaaattgatcttctcgaacggctcaaggagttaaatcttgatagttctaactttcccggtgtgaagctgaggtcgaagatgtctctgcgatcatacggttccagggaaggatctgtctcctctcgctccggtgagtgcagcccggtgcccatgggctcatttccaaggaggggatttgttaacggtagccgggaatctactggctacctggaagagttggagaaagaaaggagtctgttactggccgacctagacaaggaggagaaggagaaagattggtattacgcgcagctccagaatctgacaaaacgcatcgactcactccccttaaccgagaatttcagtctgcagaccgatatgactcggaggcagctggaatatgaggcccgtcagatccgggtcgccatggaggagcagctggggacatgccaagacatggagaaacgagctcagcggcgaattgccaggattcaacagattgagaaggatatcctgcggatccgacagttgttgcagtcccaggccaccgaagcagagcggagctctcagaataaacacgagactggaagccatgatgcggagaggcagaatgaaggccaaggggttggggagatcaacatggccacatcagggaatggccagggaagcacaaccagaatggatcacgaaaccgccagcgtgttgtccagcagctctacacatagtgcacctcgaagattaacaagccacttgggaacaaaagtcgagatggtgtactcattactgagcatgctaggcacacatgacaaggatgatatgtcaaggacgctgttggcgatgtcttctagccaagactcatgcattagcatgcgacagtctggctgccttcctttactgatccaactgttgcatggcaacgacaaagattcagttctcttgggaaattctagggggagtaaggaagcaagagcacgtgcttccgctgcactgcataacatcatccacagtcagcccgacgacaagaggggcaggcgggaaattcgggtcttgcatctgcttgaacagataagggcttactgtgagacctgctgggagtggcaggaggctcatgaaccaggtatggaccaggacaagaatccaatgccagctcctgtggagcatcagatatgtccagctgtgtgcgtgctgatgaaactgtctttcgatgaagaacaccggcatgcaatgaatgagctgggcggactccaggctatcgcggaactgttacaggttgactgcgagatgtacggactgaccaatgaccactattccatcaccttacgacggtacgcgggaatggctctcacaaatctgacgttcggagacgtcgctaataaagccaccctgtgtagcatgaagggatgtatgcgcgctctggtggcccagctgaagtccgaaagcgaggatctccaacaggtcatcgcctcagtactccggaacttatcttggagggcagatgttaactccaagaagactctccgggaagtagggtctgtgaaggccctgatggaatgcgcactggaggtcaagaaggagtccactctcaagtcagttttgagcgcactatggaacctatcggcgcactgtactgagaacaaagctgatatttgcgcagtggacggtgccctcgcttttttggtgggcacgttgacctaccggagccaaaccaatacactggccatcatcgagtcagggggaggaatcctgaggaacgtgtccagcctaattgcaaccaacgaagaccaccggcagatcctgagggaaaacaattgtctacaaaccctcctccagcatctgaagtcacacagtctgacaattgtgtctaacgcgtgtgggactttgtggaacctgtctgccagaaatcccaaagaccaggaagcactgtgggacatgggagctgtgtcaatgctaaagaacctgatccacagcaagcacaagatgattgccatgggctccgctgccgctctgagaaacctgatggctaacaggcccgctaaatataaggacgcgaatataatgagtcccggttccagcctccctagcctgcatgtgagaaagcaaaaggccctggaggctgaactggacgcacaacatctgagcgaaacatttgacaacatagataacctctcccccaaagctagccatagatccaaacagcgacataagcagagcttatatggcgattatgtgttcgatacaaaccgacacgatgacaacaggagtgataattttaatactgggaacatgaccgtactttccccatatctcaatacaacagtgctgccctctagtagtagctcacgaggctcccttgacagttcccgctcagaaaaagataggtcactggagcgagagaggggaattgggctgggcaactatcaccccgctaccgaaaatccagggacatctagtaaacggggtttgcagatctctaccactgccgctcaaattgcaaaagtaatggaagaggtgtctgctattcatacctcacaggaggatcggtcttccggctccaccacggaactgcactgcgtcacggatgaacggaacgctctgagaaggtcttccgcggcacacacacacagtaacacatataatttcacaaagagcgagaattcaaacagaacttgttctatgccatatgcaaagctcgaatataaaagatcgtccaatgatagtcttaattctgtatcgtcatctgacgggtatggaaaacgcggacagatgaaaccttccatagagtcctattctgaggacgatgagtctaagttctgtagttacggccagtatcctgcagaccttgcccacaaaatccactcagctaatcatatggacgataacgacggggaactagacactcctatcaactattcactgaagtactctgacgaacagctcaattccggtcggcagagcccatcccagaacgagagatgggcgagaccaaaacacatcatcgaggacgaaatcaagcagtcagagcagcggcagagccggaatcagagcacgacataccccgtgtacactgaatctacagatgataaacaccttaaattccaaccacatttcggtcagcaggagtgtgtgtctccgtaccgatctcgcggtgcgaacgggtctgaaacgaatagggtgggctctaatcacggcatcaaccagaatgtctcacagagcctctgccaggaggacgactatgaagatgacaagccgacaaattatagtgagaggtacagcgaggaagaacagcacgaagaagaagaaagaccaaccaactatagtatcaagtataatgaagaaaagcgccacgtcgaccagcctatcgactattctctcaaatatgccaccgacattccgagctcccagaaacaaagttttagttttagtaaatccagttccgggcagagcagcaagactgagcacatgtcgtcgtcttccgaaaacacatctacacccagtagcaacgccaagagacaaaaccagttgcatccctccagcgcgcagtcgcgctcaggtcagccacaaaaagctgcgacttgcaaggtctcaagcatcaatcaggagaccatccaaacctactgtgtcgaggacactcctatttgtttctcaagatgttccagcctctccagcctctctagtgctgaggacgagatcggttgcaaccagaccacgcaggaagccgactctgcaaacaccttgcagatagcagagatcaaagagaagatcgggacacgctccgcggaggatcccgtgagcgaagtgccggcagttagtcagcatcctcgcactaaatcttcccgattgcagggttcttccctgtcctcagaatcagcacgccacaaagcggtcgagttttcctccggcgctaagagtccttctaagtctggggctcaaactccaaaaagcccgccagagcattacgtccaggagactccattaatgttttcccgctgtacaagcgtttctagcctagacagcttcgagtccaggtcaattgcttcttcggtccaatccgagccctgctccggaatggtctcaggaattatcagtccttccgacttaccagattcacccggacagaccatgcccccatcacgctctaagactcctccccctccccctcagacagcccagactaaacgcgaggtgcctaaaaacaaagcaccaactgcggagaagcgagagagtggacccaagcaagccgcagtgaacgctgccgtgcagagagtccaagttctgcccgacgccgacacgctgctgcactttgccacagagtcaacccctgacggattttcgtgctctagctccctgtccgcattatctttggatgaaccatttattcagaaggacgttgagttaaggataatgcctcctgtgcaggagaatgataatggcaacgagacagagagcgagcagccaaaagagtcaaatgagaatcaggaaaaggaggcagaaaaaacaattgatagtgagaaggacctgctggacgattccgacgatgacgatattgagatcttggaggagtgcataatatccgccatgcccactaaatcttccagaaaggcaaaaaagcccgctcaaaccgcctccaaactgccaccacctgtggcaagaaagcctagtcaattgccggtttataagctgctgccttcacagaatcgcttgcaaccgcagaagcatgtctcgtttacaccaggtgatgatatgcccagggtttattgtgtggagggtacgcccataaacttcagtacagccacttctctgagtgatctgaccattgaatctcctcctaatgagcttgcggctggggagggggtcaggggaggagcccagtccggtgaattcgagaaacgagatacaatcccaacggagggacgatcgactgatgaggcacagggcggaaagacttcatcagtaaccatcccggagctcgacgacaacaaggccgaggagggcgatatcttggcagaatgcatcaacagcgccatgccaaaaggtaagtctcacaagccctttcgggtgaagaaaatcatggatcaagtgcagcaagcttccgccagctcgtccgcgccaaataaaaaccaactggatggcaagaaaaaaaagccaacctcacccgtcaaaccgattccacagaatacagagtatcgtaccagagtacgcaagaatgccgactccaaaaataacttaaacgccgagagagttttttcagataacaaagattccaagaaacaaaatttgaagaacaacagtaaagtgtttaatgacaaactgcctaacaacgaagatcgagtccgcggatcattcgctttcgattcaccccaccactataccccaatagagggtacgccctattgcttcagtcgcaatgacagtttgagtagtttagatttcgatgatgacgacgtggacctgagcagagagaaggcagagcttcggaaagccaaggagaacaaggaatccgaagcaaaggttaccagtcacaccgaactgacatccaaccagcaatctgcaaacaagactcaggctatagccaagcagcccatcaaccgagggcagcctaagcccattctccagaagcagagtaccttcccacagtcgagtaaggatataccagaccggggtgctgcaaccgatgaaaagctgcagaatttcgcgatcgaaaatacgccagtctgtttctcccataatagttccctctcctccttatcggatatcgatcaggagaacaataacaaggaaaacgagcccatcaaggaaaccgagccccctgattctcagggcgaaccaagtaagccccaggccagcgggtatgcacccaagtccttccacgttgaggacacgcctgtttgcttctcgcgcaactcctcacttagctccctaagtattgacagtgaagatgacctactgcaggaatgtatttccagcgccatgcccaagaagaagaaaccttcccgtcttaagggtgacaatgagaagcactcccctagaaatatggggggaattttgggcgaggacttgactttggatttgaaagacattcagcgccctgactctgagcatgggctgagccctgactccgaaaacttcgattggaaagccattcaggaaggagctaactcaatcgtgagcagtctgcaccaggcggctgccgcagcatgtctgtcacgccaggcctccagcgatagcgactctatcctgagcctcaaatcagggatctcactcggttccccttttcatcttaccccggaccaggaggagaagcccttcacatccaataaaggcccacgaatcttgaaaccaggagagaaatcaactcttgagactaagaagattgaatcagaaagcaagggcataaaagggggtaagaaagtgtacaaaagtttaatcacaggcaaagtgcggtccaattcagagatctctggtcaaatgaagcagccattgcaggccaatatgccttcaatctctaggggcaggactatgattcatatcccaggagtgcgaaactcgagcagttctacttcgccagtgtcaaaaaaaggcccacctttgaaaactcctgcctctaagtctccttccgaaggacagaccgcaacaacctctccgagaggcgctaagccctccgtcaagtcagagctatctcctgtggctcgccagacctcccagatcggtgggagcagtaaggcaccatctcgcagcggcagccgagactcaaccccgtctaggcctgcgcagcagccccttagcaggccaattcagtcgcccggaagaaattcaatctcgccaggcagaaatgggatcagccctccaaataaactcagccaactgccaagaacatcatctccgagcaccgcctctactaagtccagcggtagtgggaagatgagctacacttctcccggaagacaaatgtcgcagcagaatttaaccaaacaaacaggactctcaaagaacgcttcctcaatccctcgaagcgagagcgcctctaagggcttgaaccagatgaataacggaaacggggctaataaaaaggtggagctgtctcggatgagttctacgaagtcaagcggaagtgaatctgacaggtctgagcggccagttttggttagacaatccacattcatcaaggaagcaccatcccccacactacgaaggaagctcgaggaatcagccagcttcgaaagcctgtccccttctagccgacctgcgagcccaacacggtcccaagcgcagacccccgttctgagtccttccctgcctgatatgtcactctccacccattcttcggtgcaagccggaggctggcggaagttgccacccaacttatcccctaccattgagtataacgacggtcggccagcaaagcgccatgacatagccaggtcccacagcgagtctcctagcagactccccatcaatcgaagtggaacctggaagcgtgagcactctaagcattctagtagtctcccaagagtttcaacgtggaggcgaactggcagcagcagctcaattctgagtgcctccagtgaaagctcagaaaaggcgaagtcagaggatgagaagcacgtgaactcaattagcggcaccaaacagtccaaggaaaaccaggtgtccgcgaagggtacttggcggaagattaaggagaacgagttcagtcctacaaatagcacctctcagacagtgtcaagtggagcaactaacggggcagagagcaagacgcttatatatcagatggcacctgctgtctcaaagactgaggatgtctgggtcagaattgaggactgtcccattaacaatcctcgctcagggcgatctcctaccggcaacacgcctcctgtgatcgattcagtgtctgaaaaggctaaccccaacatcaaagactccaaggacaatcaggccaaacagaacgtgggaaacggcagcgtccccatgcgcacagtcgggctggagaaccgtctgaacagttttatacaggtggacgcccctgatcagaagggcacagagatcaagccaggtcagaacaatcccgtcccagtgtcagagactaacgagtcgagtatcgtggaacgcacacctttttcatcgagctcaagctccaaacattcttctccctccggaactgtggctgccagagtaacgccttttaattataacccatctcctaggaagagtagcgctgattctacttcagctagacccagccagattccaactcccgtgaacaataacactaagaagcgggatagtaaaaccgattctacggagtccagcggcactcagagtcccaagcgacacagtggaagctacctagttaccagtgttta

SEQ ID NO: 45077 - DNA, 8531 bp, Artificial Sequence
  derived and/or modified sequence
atggccgctgcctcctacgaccagcttctcaagcaggtggaggctttaaaaatggaaaatagcaacttgaggcaggagctggaagacaacagcaatcacctaaccaagctggaaaccgaggcctcaaacatgaaagaggtgctaaaacagctccaaggctcaattgaggacgaggccatggctagttctggccaaatcgatctcctggagcgcttgaaagaactgaatctcgacagctcaaatttccctggcgttaagctgcggtcaaagatgtcattgcgcagctatgggagtcgggaaggcagcgtgagttctcgaagtggggaatgttcacctgtgcctatggggtcattcccgcgtcgcggattcgtcaatggcagccgtgagagtactggttatctagaggagttagagaaagagagatctctcctcctagccgacttggacaaggaggaaaaagagaaggactggtattacgcccagctccagaatttgaccaagcgcatagacagtctccctctgaccgaaaatttcagcctccagaccgacatgacaaggaggcagctggagtacgaagcgaggcagattcgggttgccatggaggaacagctgggcacgtgtcaggatatggaaaaacgcgcacaaaggagaatcgcaaggattcagcaaatcgaaaaggacattcttcgaatcagacagttgctacagagtcaggcaacagaggcggaacggtcctctcagaataagcacgaaactggcagccacgatgccgaacgtcagaacgaagggcagggagtcggcgagataaatatggccaccagcggaaatgggcaggggagcacaacgcgtatggatcatgagacagcctcagtcctgtctagcagctcaacacattcagcacctcggagacttacgagtcatcttggcacgaaggtggaaatggtgtacagtctactgtctatgctgggcacccatgacaaggatgacatgagcagaactctgttagcaatgagcagttctcaggacagctgtattagcatgaggcagtcgggctgtcttcccttgctcattcagctcttgcatggcaacgacaaagatagtgttttgttaggaaacagccggggatcgaaggaagccagggcccgtgcaagcgcagcgctgcataatatcattcactcacaaccagacgacaaacgaggtaggcgagaaattagagtccttcacctcctcgagcagatcagggcctactgcgaaacttgctgggagtggcaggaggctcacgagcctggcatggaccaggataaaaacccaatgcccgcacctgtggaacaccagatctgcccggcagtgtgtgtgctgatgaaactctcctttgacgaagaacatagacacgcaatgaatgagttaggaggactccaggcgatagctgagctcctgcaggtcgattgtgagatgtacgggctcaccaacgatcattacagtattacactgagaagatacgcgggtatggcactcacaaacctcaccttcggcgacgtggccaataaagcgaccctttgcagtatgaaggggtgcatgcgtgcactcgttgctcaattgaagagcgagtccgaagatctccagcaggtaatcgcatcagtgttaaggaatctttcctggcgtgctgatgtcaactccaagaagacgctgagggaagtgggttcagttaaagccttgatggaatgtgccctggaggtcaagaaggaaagtaccctgaaatccgtgttgagtgccctgtggaatctttctgctcactgcaccgaaaataaagcagacatttgcgcagtggatggggctctggctttcctggttggcacccttacatacagatctcagacaaatacactggccatcattgaaagtggcggtggcattctccgtaatgtgagctctctgatagccaccaacgaagatcataggcagatcttgagagagaataattgcctgcagacattgctccagcacctgaaatcacatagtctcactatcgtatccaatgcttgtggcacactttggaacttgtccgcccgtaaccccaaggatcaagaggcactctgggacatgggggcagtgtccatgctgaaaaatctgatccattccaagcataaaatgatcgcaatgggttcagccgctgcactgaggaatctgatggctaatcggccagctaaatacaaagatgctaatatcatgagcccgggatcttcgttaccatctttgcatgtccgaaaacagaaagccctggaggcagaactggacgctcagcacctgtctgagactttcgataacatcgacaacctgtccccgaaggcaagccaccggtccaagcagcgccacaaacaatccctttatggcgactacgtgtttgacaccaaccgtcatgacgacaatcgctctgataattttaacactggaaatatgacagtcctgtccccgtatctgaacactactgtcctccccagcagctcatcatcccgaggctcactcgatagctcaaggtcagagaaagaccgaagcctcgagcgagagaggggcatcggcctcggcaactaccatcccgctaccgaaaatccgggaaccagtagtaagagagggttacaaatctcaacaactgcggcacaaatagcaaaggtaatggaagaggtaagtgctattcacaccagccaggaggatcgctcaagcggatcaacaacagagctacactgcgtaacggacgagagaaacgccctgagacgctcaagcgcagctcacactcattccaatacatataattttaccaagagtgagaatagtaatcgtacttgcagcatgccctatgccaagctggagtataagcggtcaagtaatgacagcctgaattctgtgtcaagctctgatggatatggtaaacggggacagatgaaaccaagtattgaatcatattccgaggacgatgagtccaagttttgttcgtacgggcagtacccggctgatctggcccataaaattcattccgccaatcatatggatgataacgacggtgaactcgataccccaattaactactctttgaagtacagcgatgagcagctgaacagcggacgccaatcaccatctcagaacgagaggtgggcaagacccaagcatattatcgaagacgagattaagcagagcgagcagagacagagtagaaatcaaagcacaacctatcctgtctatacagagtccacagatgataagcatctgaagtttcaacctcattttggccaacaagagtgcgtgagtccctataggtctcggggagctaacggtagtgagaccaacagggtgggctctaaccacggcatcaaccaaaacgtcagccagtccctgtgtcaagaggatgattatgaggacgacaagcccaccaattatagcgagaggtattcggaggaggagcaacatgaggaagaagagcgtcctacaaattactctattaaatacaatgaagagaaaaggcatgttgatcagcccatcgactatagtttgaaatacgccacagacattccatcgagccaaaagcagtcattctccttctccaagtcatcgagcgggcagtcctcaaaaactgagcacatgtcgtccagcagtgagaatacatctaccccatcatctaacgccaaacgccagaaccaactgcatccaagctccgcacagtcccggtcaggtcagcctcagaaggcggcaacatgtaaagtctcatctattaaccaggagacaattcagacctattgcgttgaggacacccctatctgtttttctaggtgttcttctctgtcctccctctccagtgcagaggatgagatcggctgcaatcaaacaacacaggaagccgactctgccaacaccctgcaaatcgccgagataaaggagaagatcggaacgagatctgccgaggatccggtgtcagaagtgccagcagtctcccagcaccctaggaccaagtcgtcaaggctgcaagggtcatcactgtcttccgagtccgcccgacacaaagcagttgagttctcatccggggctaaatcaccctccaaatctggagcgcaaacaccaaaatcacctccagaacattacgtgcaggagactcccctaatgttttctcggtgtacctccgtgtctagcctggactctttcgaaagccggagtattgcgagctcagtgcagtccgagccctgtagcggcatggtatctgggatcataagcccctctgatctcccagattcacccggacagaccatgccgccttcaagatctaaaacaccacctcccccacctcagacagcacaaactaaacgcgaggtgcccaagaataaggcaccaacggctgaaaagagggagtccggcccaaagcaggccgcagtgaacgccgctgtgcagcgcgtgcaggttctgcccgacgcagatactctgctccacttcgccacagagagcacgcctgatggcttttcttgctcgtcctcgctgtctgccctttctctggacgagccttttatacaaaaagatgtcgagctacgaattatgccacctgttcaggagaacgacaacgggaacgagactgagagcgaacagcccaaggaatcaaatgaaaatcaagagaaggaggcggagaagacaatcgactccgagaaggacctcctggatgacagtgacgacgacgatattgaaatactcgaagaatgcatcatttccgccatgccaaccaagagctcgcggaaagcgaagaaacccgctcagacagcctctaagcttcctccccctgtggccagaaagccatctcagctaccagtctataaacttctgccgtcgcaaaaccggctacagccacaaaagcacgtgagcttcacccccggtgacgatatgcctcgggtttactgcgtggagggtacaccaatcaacttctctacagctacgtctctctccgatctcactatcgagtcaccgccaaacgagttggctgcaggtgagggtgtccgaggcggtgcacagtccggagaattcgaaaaaagagacacaatccctaccgaaggacggtccactgatgaagctcagggtggcaagaccagttcggttacaatccctgagctggacgacaataaagcagaggagggggatatcctcgctgaatgcataaattctgccatgcccaagggtaagagccataagcctttcagagtgaaaaagatcatggaccaggtgcaacaagcctcagcctcaagttcagcacctaacaaaaatcaattggacggtaaaaagaagaagccaacttcacctgtcaaaccgatcccgcagaatactgaatatcggactagagttcgcaagaacgcagacagcaaaaacaatctgaacgcagagcgagttttttccgacaacaaagattctaaaaaacagaacctcaagaacaatagcaaggtctttaatgacaagttgccgaacaacgaggatcgagttcgaggatcgttcgcattcgactcccctcaccattacacacctatcgaagggactccttactgctttagccgcaacgacagtctctcctccctggacttcgatgacgacgatgtcgacttgtcccgcgaaaaagccgagctgcgcaaagccaaggagaataaggagtctgaagcaaaggtgactagtcatacagaactgacatcaaatcaacagagcgctaacaagacacaggcaattgcaaagcagcccatcaatcgtggccagcccaaaccaatcctgcagaaacagagcacgtttccccagtccagtaaagacattccggaccggggagccgctaccgacgagaagctgcaaaacttcgctatagagaatacgcccgtgtgcttcagccacaattcctcactttcttccctcagtgatatcgaccaggagaataataacaaggagaacgagcccattaaggagactgaaccccctgattcgcaaggggaaccctctaaaccacaagcaagcgggtacgctccaaagtcatttcatgttgaagacacccccgtgtgcttcagcagaaactcatccctatcctctctcagcatcgacagcgaggacgacctacttcaagagtgcatctcctcggcaatgcccaagaagaaaaaaccatctcggctgaaaggagacaacgagaagcattctcctagaaatatggggggaattcttggtgaggacctgacgttggacttgaaagacattcagagacctgattcagaacacgggctaagtcctgattccgaaaacttcgactggaaggcaatccaggagggtgccaattctatcgtgagctctctacaccaggccgcagctgcagcctgtctgtcacgccaggccagttctgatagtgatagtattttgagtctgaagtctggtatctcattgggttctccttttcatctgactcccgatcaagaggagaagccgtttacctcaaacaaggggcctcggatcctcaagcccggtgaaaagagtaccctggaaacaaagaagatagagagcgagagcaagggcattaagggtgggaaaaaggtctataagagcttgataaccggtaaagtgcgaagtaactctgagatatctggccagatgaagcaaccactgcaggccaatatgcccagcatctcccgaggcaggacgatgatacatatacccggtgttcggaatagttccagcagtaccagccctgtctcgaagaaaggtcctccattgaagactcccgcatcgaaatccccatccgaggggcagacagctactactagtccacgcggagccaagccaagtgtgaaatcagagctgagtcctgtggcgagacaaacttcacagattgggggttcgagcaaggccccaagtaggtctggatctagagatagtacaccaagccgccctgcccagcagccattgagtcggccaattcagagccctgggcgtaactccatctcccctgggcgtaacgggatctcccccccaaataaattatcccagctgccaagaacctcatcccccagcacggccagtacgaagtcatccggaagtggcaagatgtcatatacaagccctggccgacagatgagccaacaaaatttgacaaagcagacgggactgagcaagaatgcatccagtatccccaggtccgagagtgcctccaagggtctgaaccagatgaacaacggcaacggagctaacaagaaagtggagctctcccgcatgagcagcacaaaatcatctggatctgaatctgatcgcagtgagcgtcccgtcctcgtccggcaaagcacatttattaaggaggctccctctcctaccctccgcaggaagctagaagagtcagcctcctttgaatccctgtccccatcaagccgcccagcaagccccacacgctctcaggcccagactccagttctcagtccctctctcccggacatgtcattgagcacacactctagcgttcaagctggtggttggcggaagttgcctcctaacctcagcccgacaatcgagtacaatgatgggcgacctgcaaagagacatgatatcgcgcgttcacactccgagtcaccatctcgcttgcctattaataggagtggcacatggaaacgagagcattcaaaacacagttcatcgctgcctcgcgtgagcacctggaggcgaacaggctccagctcctccattttgtctgcatccagtgaatcctctgagaaggcaaaaagcgaagatgagaagcatgtgaatagcatctcggggaccaaacagtccaaagagaaccaggtctcagccaaggggacatggcgaaagatcaaagagaatgaattcagccccacaaactcaacatcccaaacagtgagcagcggtgcgaccaacggtgccgaatcaaagacattgatttaccagatggcgcctgctgtatctaagaccgaggacgtatgggttaggatcgaagactgccctatcaataaccccagatcagggagaagccctaccggcaatacacctcctgtcattgatagtgtctccgaaaaggcgaatccaaacattaaggattctaaagataatcaggccaaacagaatgtcggcaacgggagtgttcctatgcgaacggttggcctggagaataggttgaatagcttcatccaggtggacgcgccagaccagaagggtactgagataaaacccggacagaataatcccgtgcctgtctccgagaccaatgagagctccattgtcgaacggacaccatttagctcctcaagttcctctaagcactccagcccttcaggaacagtcgcagccagggtgacgccttttaactataatccgtcaccaaggaaatctagcgctgatagcacatcggccaggccaagtcagattcccacacccgttaacaataacactaagaagagggatagcaaaaccgatagcacggagtccagtgggacacagagtcctaagcgccattcggggtcgtatctagttacatcggtgta

SEQ ID NO: 45078 - DNA, 864 bp, Artificial Sequence
  derived and/or modified sequence
atggccgcagcctcctatgatcagcttttgaaacaggtagaggctctcaaaatggagaattcgaacctgcgacaggagctggaagacaatagcaatcaccttacgaaacttgagactgaagcaagcaatatgaaggaggtgctgaaacagcttcaaggatcaatcgaggatgaggctatggcatcaagcggacagattgaccttcttgagcgactgaaagaattgaatttagactccagtaattttcccggagttaagttgagatctaaaatgagcctcaggtcttatggatcccgcgagggctcagtgagtagccgcagcggcgagtgcagccctgtgcccatgggctccttcccaagacgcggattcgtgaacggctcaagagaatcaaccggttacctggaagagttggagaaggagcggagccttctcctcgctgacctggacaaagaggagaaagaaaaggactggtattatgcgcaactccagaacctgacaaagagaatcgactctctgcctcttacagagaatttcagccttcagacggacatgacacgcaggcaactcgagtatgaagcaaggcagattcgtgtggccatggaggagcagctggggacgtgccaagacatggaaaaaagagcccagaggaggattgcacgaatccagcagattgagaaagatatcttaagaatccgccagctattgcagtctcaggctaccgaagctgagcggagtagccagaacaaacacgagaccggatcccatgacgcagagcgccagaacgaggggcagggcgtgggcgaaatcaacatggctacctccggaaacggacaaatagagaagatgcgcatgttcgaatgttag

SEQ ID NO: 45079 - DNA, 357 bp, Artificial Sequence
  derived and/or modified sequence
atggcagctgcttcctatgatcagctcttaaaacaagtcgaggcattaaaaatggagaattctaatcttcgccaggagctcgaggacaacagcaaccatctcacaaaactcgagaccgaagcctcaaacatgaaggaggtactgaagcagctgcaaggaagcatcgaggacgaggccatggcaagctctgggcaaatcgatctgctggagaggctcaaggaactcaatttagattccagcaacttccctggagtgaagttgcgttctaagatgtccctgaggtcttacggatctcgtgagggatctgtaagctcacggagtggcgaatgcagccccgtgcctatggggagcttctag

SEQ ID NO: 45080 - DNA, 3918 bp, Artificial Sequence
  derived and/or modified sequence
atggccgcagcttcttacgatcaacttctgaaacaagtcgaagcgctcaagatggaaaactctaacctcaggcaagagctagaagacaacagtaaccaccttactaaactggagaccgaagcttcaaacatgaaggaagttctcaagcagcttcaaggatccatcgaagacgaggccatggcctcctcgggccaaatcgacttactggaacgcttgaaagagctgaacctggactcatctaatttcccaggcgtgaaactgcggtccaaaatgagtctgcggagttacggatcccgcgaagggagcgtgtcttccaggtctggggagtgttccccagtccctatgggatctttcccaaggagagggttcgtgaacgggagccgcgagtccaccgggtacctcgaggaacttgaaaaggagaggagcctcctattggctgacctggacaaggaagaaaaggaaaaagattggtattatgcacaactgcaaaatctgaccaagagaatagactcactccccctgaccgaaaatttctctctccagactgatatgaccagacgccagctggagtacgaggctcggcagatcagagttgccatggaggagcagctggggacttgtcaggacatggagaagcgagcccaacgcaggatcgcaaggatccagcagatcgagaaagacatcctgcggattcgccagctgttacaatcccaagcaacagaagccgagagatcttcgcagaacaagcatgaaactggcagccatgacgctgagcgccagaacgagggacagggggtcggggagatcaatatggctacgtcagggaatggtcaggggtcgacaacgcggatggaccatgagaccgccagcgttctcagctcatctagcactcatagtgctccacggagacttacatcccacctcgggacaaaggttgagatggtgtattcactgctttccatgttgggcacccacgacaaagatgacatgagtagaactctgcttgccatgtcctcctcacaggacagctgtatctcaatgagacagtctgggtgcctacccttgctgatacaactgctgcatggcaacgataaggactcagtgttgcttggcaactccagaggtagtaaggaggcgagggcgcgagcatcagctgccctgcacaacattatccactctcagcccgacgataagagagggaggcgcgagatcagggtcctgcatctgctggaacagatccgcgcttactgcgaaacttgttgggagtggcaggaagcacatgagcccggaatggaccaggataaaaaccccatgcccgctcccgtcgagcatcagatctgccctgctgtgtgcgttttgatgaagctgagctttgatgaggaacaccggcatgctatgaacgaactgggtggtctgcaggcaattgcagagctactccaggtggattgtgagatgtatggtcttactaatgaccactattccatcacactaaggcgttatgctggaatggcacttaccaacctcacgtttggcgatgtggccaataaggccacgctatgcagtatgaaagggtgtatgcgggcacttgtcgcacagctcaagagtgagtctgaggatcttcagcaggtgatagcaagcgtgttgagaaatctgagctggagggccgatgtgaactcgaagaagaccctgcgcgaagtgggtagcgtcaaggcccttatggagtgtgcactggaggttaaaaaagagagtactctcaagtccgttctttcagctctctggaacctgtccgctcactgcacagaaaacaaagcggatatctgcgccgtggacggggcacttgccttcctggtgggaactctgacataccgttctcagactaatacactggccattatagagagtggaggagggattctgaggaacgtgagtagcctcatagcaacaaacgaagaccatcggcaaatcttgcgcgagaacaactgtctgcagaccctccttcagcacttgaaatctcactctttgacaatcgttagcaacgcatgtggaaccctctggaatttgtcagcccgaaacccaaaggaccaggaggccttgtgggacatgggcgctgtttctatgctcaagaacctgattcattcgaagcacaagatgatagctatgggaagtgctgcggctttgcgcaatctgatggcaaaccgccctgccaagtacaaagatgcaaacatcatgtcaccaggtagtagcctaccttccttacacgtgagaaagcagaaagcgctggaggctgagcttgatgcgcagcatctgagcgaaaccttcgacaatatcgataacctcagccccaaggcatcgcaccgctcgaaacaacgccataaacagagcttatacggcgactacgtttttgatacaaatcggcatgacgacaaccgctccgataacttcaacacaggtaacatgactgtgctgtccccatatttgaatacaaccgtactccctagtagcagctcgtcacgtggcagtctcgactcatctaggtctgagaaggatcgaagcctggaaagagaaaggggaattggactgggaaactatcaccctgccacagaaaacccagggacatctagcaagcgcggactgcagattagcactaccgccgcacaaattgccaaagtgatggaagaggttagcgccatccacacaagtcaggaagaccggtcctctggatctaccactgaactgcattgcgtcaccgatgagcggaatgcactgcggagaagctccgcggcacacacccatagcaacacctataacttcactaagtccgaaaactctaataggacctgtagtatgccatacgccaagctcgagtataaacggagttccaacgattccctgaattccgttagtagctctgacggatacggaaagagggggcaaatgaaacctagtatcgagagttactccgaagacgatgagtctaaattctgttcatacggccaatatccagcggacctggctcacaagattcacagcgccaatcatatggatgataacgacggggaactggacactcccattaactattcactcaaatattcagatgaacaacttaatagcggcagacagtccccttcacagaatgagcgctgggcacgaccaaagcacattattgaagatgaaattaagcagagtgaacagaggcagtcgcgtaaccagtcgacaacttaccctgtgtacacggagagtaccgacgacaaacacctgaaatttcaacctcacttcggccagcaagagtgtgtttcaccttacagatcaaggggtgccaacggttccgagacgaatcgggtgggcagtaatcacgggattaaccagaatgtttcgcagtccctgtgtcaagaagacgattatgaagatgacaagcccacgaactactcggaaagatatagtgaggaagagcagcatgaagaggaggagcgtccgactaattacagcattaaatataacgaagaaaaacgccacgtggaccagcctattgactactccctgaaatatgctacggatataccaagctctcagaagcagtctttctcatttagcaagagcagtagtgggcagagtagcaaaactgagcatatgagtagttcgagtgaaaacacctctactccgtcttcaaatgctaaaaggcagaaccagttgcatccaagtagcgctcagtctcgttccggacaaccacaaaaggccgctacgtgtaaagtgagttcaattaatcaagagaccattcagacatactgcgtcgaagatacccccatctgcttctccagatgtagctcactgtcctctctgtcaagcgctgaggacgaaatcggctgcaaccaaacaacgcaggaggcagactctgccaacacacttcaaatcgcctag

SEQ ID NO: 45081 - DNA, 8532 bp, Artificial Sequence
  derived and/or modified sequence
atggccgccgccagctacgaccagctgctgaagcaggtggaggccctgaagatggagaacagcaacctgagacaggagctggaggacaacagcaaccacctgaccaagctggagaccgaggccagcaacatgaaggaggtgctgaagcagctgcagggcagcatcgaggacgaggccatggccagcagcggccagatcgacctgctggagagactgaaggagctgaacctggacagcagcaacttccccggcgtgaagctgagaagcaagatgagcctgagaagctacggcagcagagagggcagcgtgagcagcagaagcggcgagtgcagccccgtgcccatgggcagcttccccagaagaggcttcgtgaacggcagcagagagagcaccggctacctggaggagctggagaaggagagaagcctgctgctggccgacctggacaaggaggagaaggagaaggactggtactacgcccagctgcagaacctgaccaagagaatcgacagcctgcccctgaccgagaacttcagcctgcagaccgacatgaccagaagacagctggagtacgaggccagacagatcagagtggccatggaggagcagctgggcacctgccaggacatggagaagagagcccagagaagaatcgccagaatccagcagatcgagaaggacatcctgagaatcagacagctgctgcagagccaggccaccgaggccgagagaagcagccagaacaagcacgagaccggcagccacgacgccgagagacagaacgagggccagggcgtgggcgagatcaacatggccaccagcggcaacggccagggcagcaccaccagaatggaccacgagaccgccagcgtgctgagcagcagcagcacccacagcgcccccagaagactgaccagccacctgggcaccaaggtggagatggtgtacagcctgctgagcatgctgggcacccacgacaaggacgacatgagcagaaccctgctggccatgagcagcagccaggacagctgcatcagcatgagacagagcggctgcctgcccctgctgatccagctgctgcacggcaacgacaaggacagcgtgctgctgggcaacagcagaggcagcaaggaggccagagccagagccagcgccgccctgcacaacatcatccacagccagcccgacgacaagagaggcagaagagagatcagagtgctgcacctgctggagcagatcagagcctactgcgagacctgctgggagtggcaggaggcccacgagcccggcatggaccaggacaagaaccccatgcccgcccccgtggagcaccagatctgccccgccgtgtgcgtgctgatgaagctgagcttcgacgaggagcacagacacgccatgaacgagctgggcggcctgcaggccatcgccgagctgctgcaggtggactgcgagatgtacggcctgaccaacgaccactacagcatcaccctgagaagatacgccggcatggccctgaccaacctgaccttcggcgacgtggccaacaaggccaccctgtgcagcatgaagggctgcatgagagccctggtggcccagctgaagagcgagagcgaggacctgcagcaggtgatcgccagcgtgctgagaaacctgagctggagagccgacgtgaacagcaagaagaccctgagagaggtgggcagcgtgaaggccctgatggagtgcgccctggaggtgaagaaggagagcaccctgaagagcgtgctgagcgccctgtggaacctgagcgcccactgcaccgagaacaaggccgacatctgcgccgtggacggcgccctggccttcctggtgggcaccctgacctacagaagccagaccaacaccctggccatcatcgagagcggcggcggcatcctgagaaacgtgagcagcctgatcgccaccaacgaggaccacagacagatcctgagagagaacaactgcctgcagaccctgctgcagcacctgaagagccacagcctgaccatcgtgagcaacgcctgcggcaccctgtggaacctgagcgccagaaaccccaaggaccaggaggccctgtgggacatgggcgccgtgagcatgctgaagaacctgatccacagcaagcacaagatgatcgccatgggcagcgccgccgccctgagaaacctgatggccaacagacccgccaagtacaaggacgccaacatcatgagccccggcagcagcctgcccagcctgcacgtgagaaagcagaaggccctggaggccgagctggacgcccagcacctgagcgagaccttcgacaacatcgacaacctgagccccaaggccagccacagaagcaagcagagacacaagcagagcctgtacggcgactacgtgttcgacaccaacagacacgacgacaacagaagcgacaacttcaacaccggcaacatgaccgtgctgagcccctacctgaacaccaccgtgctgcccagcagcagcagcagcagaggcagcctggacagcagcagaagcgagaaggacagaagcctggagagagagagaggcatcggcctgggcaactaccaccccgccaccgagaaccccggcaccagcagcaagagaggcctgcagatcagcaccaccgccgcccagatcgccaaggtgatggaggaggtgagcgccatccacaccagccaggaggacagaagcagcggcagcaccaccgagctgcactgcgtgaccgacgagagaaacgccctgagaagaagcagcgccgcccacacccacagcaacacctacaacttcaccaagagcgagaacagcaacagaacctgcagcatgccctacgccaagctggagtacaagagaagcagcaacgacagcctgaacagcgtgagcagcagcgacggctacggcaagagaggccagatgaagcccagcatcgagagctacagcgaggacgacgagagcaagttctgcagctacggccagtaccccgccgacctggcccacaagatccacagcgccaaccacatggacgacaacgacggcgagctggacacccccatcaactacagcctgaagtacagcgacgagcagctgaacagcggcagacagagccccagccagaacgagagatgggccagacccaagcacatcatcgaggacgagatcaagcagagcgagcagagacagagcagaaaccagagcaccacctaccccgtgtacaccgagagcaccgacgacaagcacctgaagttccagccccacttcggccagcaggagtgcgtgagcccctacagaagcagaggcgccaacggcagcgagaccaacagagtgggcagcaaccacggcatcaaccagaacgtgagccagagcctgtgccaggaggacgactacgaggacgacaagcccaccaactacagcgagagatacagcgaggaggagcagcacgaggaggaggagagacccaccaactacagcatcaagtacaacgaggagaagagacacgtggaccagcccatcgactacagcctgaagtacgccaccgacatccccagcagccagaagcagagcttcagcttcagcaagagcagcagcggccagagcagcaagaccgagcacatgagcagcagcagcgagaacaccagcacccccagcagcaacgccaagagacagaaccagctgcaccccagcagcgcccagagcagaagcggccagccccagaaggccgccacctgcaaggtgagcagcatcaaccaggagaccatccagacctactgcgtggaggacacccccatctgcttcagcagatgcagcagcctgagcagcctgagcagcgccgaggacgagatcggctgcaaccagaccacccaggaggccgacagcgccaacaccctgcagatcgccgagatcaaggagaagatcggcaccagaagcgccgaggaccccgtgagcgaggtgcccgccgtgagccagcaccccagaaccaagagcagcagactgcagggcagcagcctgagcagcgagagcgccagacacaaggccgtggagttcagcagcggcgccaagagccccagcaagagcggcgcccagacccccaagagcccccccgagcactacgtgcaggagacccccctgatgttcagcagatgcaccagcgtgagcagcctggacagcttcgagagcagaagcatcgccagcagcgtgcagagcgagccctgcagcggcatggtgagcggcatcatcagccccagcgacctgcccgacagccccggccagaccatgccccccagcagaagcaagaccccccccccccccccccagaccgcccagaccaagagagaggtgcccaagaacaaggcccccaccgccgagaagagagagagcggccccaagcaggccgccgtgaacgccgccgtgcagagagtgcaggtgctgcccgacgccgacaccctgctgcacttcgccaccgagagcacccccgacggcttcagctgcagcagcagcctgagcgccctgagcctggacgagcccttcatccagaaggacgtggagctgagaatcatgccccccgtgcaggagaacgacaacggcaacgagaccgagagcgagcagcccaaggagagcaacgagaaccaggagaaggaggccgagaagaccatcgacagcgagaaggacctgctggacgacagcgacgacgacgacatcgagatcctggaggagtgcatcatcagcgccatgcccaccaagagcagcagaaaggccaagaagcccgcccagaccgccagcaagctgcccccccccgtggccagaaagcccagccagctgcccgtgtacaagctgctgcccagccagaacagactgcagccccagaagcacgtgagcttcacccccggcgacgacatgcccagagtgtactgcgtggagggcacccccatcaacttcagcaccgccaccagcctgagcgacctgaccatcgagagcccccccaacgagctggccgccggcgagggcgtgagaggcggcgcccagagcggcgagttcgagaagagagacaccatccccaccgagggcagaagcaccgacgaggcccagggcggcaagaccagcagcgtgaccatccccgagctggacgacaacaaggccgaggagggcgacatcctggccgagtgcatcaacagcgccatgcccaagggcaagagccacaagcccttcagagtgaagaagatcatggaccaggtgcagcaggccagcgccagcagcagcgcccccaacaagaaccagctggacggcaagaagaagaagcccaccagccccgtgaagcccatcccccagaacaccgagtacagaaccagagtgagaaagaacgccgacagcaagaacaacctgaacgccgagagagtgttcagcgacaacaaggacagcaagaagcagaacctgaagaacaacagcaaggtgttcaacgacaagctgcccaacaacgaggacagagtgagaggcagcttcgccttcgacagcccccaccactacacccccatcgagggcaccccctactgcttcagcagaaacgacagcctgagcagcctggacttcgacgacgacgacgtggacctgagcagagagaaggccgagctgagaaaggccaaggagaacaaggagagcgaggccaaggtgaccagccacaccgagctgaccagcaaccagcagagcgccaacaagacccaggccatcgccaagcagcccatcaacagaggccagcccaagcccatcctgcagaagcagagcaccttcccccagagcagcaaggacatccccgacagaggcgccgccaccgacgagaagctgcagaacttcgccatcgagaacacccccgtgtgcttcagccacaacagcagcctgagcagcctgagcgacatcgaccaggagaacaacaacaaggagaacgagcccatcaaggagaccgagccccccgacagccagggcgagcccagcaagccccaggccagcggctacgcccccaagagcttccacgtggaggacacccccgtgtgcttcagcagaaacagcagcctgagcagcctgagcatcgacagcgaggacgacctgctgcaggagtgcatcagcagcgccatgcccaagaagaagaagcccagcagactgaagggcgacaacgagaagcacagccccagaaacatgggcggcatcctgggcgaggacctgaccctggacctgaaggacatccagagacccgacagcgagcacggcctgagccccgacagcgagaacttcgactggaaggccatccaggagggcgccaacagcatcgtgagcagcctgcaccaggccgccgccgccgcctgcctgagcagacaggccagcagcgacagcgacagcatcctgagcctgaagagcggcatcagcctgggcagccccttccacctgacccccgaccaggaggagaagcccttcaccagcaacaagggccccagaatcctgaagcccggcgagaagagcaccctggagaccaagaagatcgagagcgagagcaagggcatcaagggcggcaagaaggtgtacaagagcctgatcaccggcaaggtgagaagcaacagcgagatcagcggccagatgaagcagcccctgcaggccaacatgcccagcatcagcagaggcagaaccatgatccacatccccggcgtgagaaacagcagcagcagcaccagccccgtgagcaagaagggcccccccctgaagacccccgccagcaagagccccagcgagggccagaccgccaccaccagccccagaggcgccaagcccagcgtgaagagcgagctgagccccgtggccagacagaccagccagatcggcggcagcagcaaggcccccagcagaagcggcagcagagacagcacccccagcagacccgcccagcagcccctgagcagacccatccagagccccggcagaaacagcatcagccccggcagaaacggcatcagcccccccaacaagctgagccagctgcccagaaccagcagccccagcaccgccagcaccaagagcagcggcagcggcaagatgagctacaccagccccggcagacagatgagccagcagaacctgaccaagcagaccggcctgagcaagaacgccagcagcatccccagaagcgagagcgccagcaagggcctgaaccagatgaacaacggcaacggcgccaacaagaaggtggagctgagcagaatgagcagcaccaagagcagcggcagcgagagcgacagaagcgagagacccgtgctggtgagacagagcaccttcatcaaggaggcccccagccccaccctgagaagaaagctggaggagagcgccagcttcgagagcctgagccccagcagcagacccgccagccccaccagaagccaggcccagacccccgtgctgagccccagcctgcccgacatgagcctgagcacccacagcagcgtgcaggccggcggctggagaaagctgccccccaacctgagccccaccatcgagtacaacgacggcagacccgccaagagacacgacatcgccagaagccacagcgagagccccagcagactgcccatcaacagaagcggcacctggaagagagagcacagcaagcacagcagcagcctgcccagagtgagcacctggagaagaaccggcagcagcagcagcatcctgagcgccagcagcgagagcagcgagaaggccaagagcgaggacgagaagcacgtgaacagcatcagcggcaccaagcagagcaaggagaaccaggtgagcgccaagggcacctggagaaagatcaaggagaacgagttcagccccaccaacagcaccagccagaccgtgagcagcggcgccaccaacggcgccgagagcaagaccctgatctaccagatggcccccgccgtgagcaagaccgaggacgtgtgggtgagaatcgaggactgccccatcaacaaccccagaagcggcagaagccccaccggcaacaccccccccgtgatcgacagcgtgagcgagaaggccaaccccaacatcaaggacagcaaggacaaccaggccaagcagaacgtgggcaacggcagcgtgcccatgagaaccgtgggcctggagaacagactgaacagcttcatccaggtggacgcccccgaccagaagggcaccgagatcaagcccggccagaacaaccccgtgcccgtgagcgagaccaacgagagcagcatcgtggagagaacccccttcagcagcagcagcagcagcaagcacagcagccccagcggcaccgtggccgccagagtgacccccttcaactacaaccccagccccagaaagagcagcgccgacagcaccagcgccagacccagccagatccccacccccgtgaacaacaacaccaagaagagagacagcaagaccgacagcaccgagagcagcggcacccagagccccaagagacacagcggcagctacctggtgaccagcgtgtag

SEQ ID NO: 45082 - DNA, 864 bp, Artificial Sequence
  derived and/or modified sequence
atggccgccgccagctacgaccagctgctgaagcaggtggaggccctgaagatggagaacagcaacctgagacaggagctggaggacaacagcaaccacctgaccaagctggagaccgaggccagcaacatgaaggaggtgctgaagcagctgcagggcagcatcgaggacgaggccatggccagcagcggccagatcgacctgctggagagactgaaggagctgaacctggacagcagcaacttccccggcgtgaagctgagaagcaagatgagcctgagaagctacggcagcagagagggcagcgtgagcagcagaagcggcgagtgcagccccgtgcccatgggcagcttccccagaagaggcttcgtgaacggcagcagagagagcaccggctacctggaggagctggagaaggagagaagcctgctgctggccgacctggacaaggaggagaaggagaaggactggtactacgcccagctgcagaacctgaccaagagaatcgacagcctgcccctgaccgagaacttcagcctgcagaccgacatgaccagaagacagctggagtacgaggccagacagatcagagtggccatggaggagcagctgggcacctgccaggacatggagaagagagcccagagaagaatcgccagaatccagcagatcgagaaggacatcctgagaatcagacagctgctgcagagccaggccaccgaggccgagagaagcagccagaacaagcacgagaccggcagccacgacgccgagagacagaacgagggccagggcgtgggcgagatcaacatggccaccagcggcaacggccagatcgagaagatgagaatgttcgagtgctag

SEQ ID NO: 45083 - DNA, 357 bp, Artificial Sequence
  derived and/or modified sequence
atggccgccgccagctacgaccagctgctgaagcaggtggaggccctgaagatggagaacagcaacctgagacaggagctggaggacaacagcaaccacctgaccaagctggagaccgaggccagcaacatgaaggaggtgctgaagcagctgcagggcagcatcgaggacgaggccatggccagcagcggccagatcgacctgctggagagactgaaggagctgaacctggacagcagcaacttccccggcgtgaagctgagaagcaagatgagcctgagaagctacggcagcagagagggcagcgtgagcagcagaagcggcgagtgcagccccgtgcccatgggcagcttctag

SEQ ID NO: 45084 - DNA, 3918 bp, Artificial Sequence
  derived and/or modified sequence
atggccgccgccagctacgaccagctgctgaagcaggtggaggccctgaagatggagaacagcaacctgagacaggagctggaggacaacagcaaccacctgaccaagctggagaccgaggccagcaacatgaaggaggtgctgaagcagctgcagggcagcatcgaggacgaggccatggccagcagcggccagatcgacctgctggagagactgaaggagctgaacctggacagcagcaacttccccggcgtgaagctgagaagcaagatgagcctgagaagctacggcagcagagagggcagcgtgagcagcagaagcggcgagtgcagccccgtgcccatgggcagcttccccagaagaggcttcgtgaacggcagcagagagagcaccggctacctggaggagctggagaaggagagaagcctgctgctggccgacctggacaaggaggagaaggagaaggactggtactacgcccagctgcagaacctgaccaagagaatcgacagcctgcccctgaccgagaacttcagcctgcagaccgacatgaccagaagacagctggagtacgaggccagacagatcagagtggccatggaggagcagctgggcacctgccaggacatggagaagagagcccagagaagaatcgccagaatccagcagatcgagaaggacatcctgagaatcagacagctgctgcagagccaggccaccgaggccgagagaagcagccagaacaagcacgagaccggcagccacgacgccgagagacagaacgagggccagggcgtgggcgagatcaacatggccaccagcggcaacggccagggcagcaccaccagaatggaccacgagaccgccagcgtgctgagcagcagcagcacccacagcgcccccagaagactgaccagccacctgggcaccaaggtggagatggtgtacagcctgctgagcatgctgggcacccacgacaaggacgacatgagcagaaccctgctggccatgagcagcagccaggacagctgcatcagcatgagacagagcggctgcctgcccctgctgatccagctgctgcacggcaacgacaaggacagcgtgctgctgggcaacagcagaggcagcaaggaggccagagccagagccagcgccgccctgcacaacatcatccacagccagcccgacgacaagagaggcagaagagagatcagagtgctgcacctgctggagcagatcagagcctactgcgagacctgctgggagtggcaggaggcccacgagcccggcatggaccaggacaagaaccccatgcccgcccccgtggagcaccagatctgccccgccgtgtgcgtgctgatgaagctgagcttcgacgaggagcacagacacgccatgaacgagctgggcggcctgcaggccatcgccgagctgctgcaggtggactgcgagatgtacggcctgaccaacgaccactacagcatcaccctgagaagatacgccggcatggccctgaccaacctgaccttcggcgacgtggccaacaaggccaccctgtgcagcatgaagggctgcatgagagccctggtggcccagctgaagagcgagagcgaggacctgcagcaggtgatcgccagcgtgctgagaaacctgagctggagagccgacgtgaacagcaagaagaccctgagagaggtgggcagcgtgaaggccctgatggagtgcgccctggaggtgaagaaggagagcaccctgaagagcgtgctgagcgccctgtggaacctgagcgcccactgcaccgagaacaaggccgacatctgcgccgtggacggcgccctggccttcctggtgggcaccctgacctacagaagccagaccaacaccctggccatcatcgagagcggcggcggcatcctgagaaacgtgagcagcctgatcgccaccaacgaggaccacagacagatcctgagagagaacaactgcctgcagaccctgctgcagcacctgaagagccacagcctgaccatcgtgagcaacgcctgcggcaccctgtggaacctgagcgccagaaaccccaaggaccaggaggccctgtgggacatgggcgccgtgagcatgctgaagaacctgatccacagcaagcacaagatgatcgccatgggcagcgccgccgccctgagaaacctgatggccaacagacccgccaagtacaaggacgccaacatcatgagccccggcagcagcctgcccagcctgcacgtgagaaagcagaaggccctggaggccgagctggacgcccagcacctgagcgagaccttcgacaacatcgacaacctgagccccaaggccagccacagaagcaagcagagacacaagcagagcctgtacggcgactacgtgttcgacaccaacagacacgacgacaacagaagcgacaacttcaacaccggcaacatgaccgtgctgagcccctacctgaacaccaccgtgctgcccagcagcagcagcagcagaggcagcctggacagcagcagaagcgagaaggacagaagcctggagagagagagaggcatcggcctgggcaactaccaccccgccaccgagaaccccggcaccagcagcaagagaggcctgcagatcagcaccaccgccgcccagatcgccaaggtgatggaggaggtgagcgccatccacaccagccaggaggacagaagcagcggcagcaccaccgagctgcactgcgtgaccgacgagagaaacgccctgagaagaagcagcgccgcccacacccacagcaacacctacaacttcaccaagagcgagaacagcaacagaacctgcagcatgccctacgccaagctggagtacaagagaagcagcaacgacagcctgaacagcgtgagcagcagcgacggctacggcaagagaggccagatgaagcccagcatcgagagctacagcgaggacgacgagagcaagttctgcagctacggccagtaccccgccgacctggcccacaagatccacagcgccaaccacatggacgacaacgacggcgagctggacacccccatcaactacagcctgaagtacagcgacgagcagctgaacagcggcagacagagccccagccagaacgagagatgggccagacccaagcacatcatcgaggacgagatcaagcagagcgagcagagacagagcagaaaccagagcaccacctaccccgtgtacaccgagagcaccgacgacaagcacctgaagttccagccccacttcggccagcaggagtgcgtgagcccctacagaagcagaggcgccaacggcagcgagaccaacagagtgggcagcaaccacggcatcaaccagaacgtgagccagagcctgtgccaggaggacgactacgaggacgacaagcccaccaactacagcgagagatacagcgaggaggagcagcacgaggaggaggagagacccaccaactacagcatcaagtacaacgaggagaagagacacgtggaccagcccatcgactacagcctgaagtacgccaccgacatccccagcagccagaagcagagcttcagcttcagcaagagcagcagcggccagagcagcaagaccgagcacatgagcagcagcagcgagaacaccagcacccccagcagcaacgccaagagacagaaccagctgcaccccagcagcgcccagagcagaagcggccagccccagaaggccgccacctgcaaggtgagcagcatcaaccaggagaccatccagacctactgcgtggaggacacccccatctgcttcagcagatgcagcagcctgagcagcctgagcagcgccgaggacgagatcggctgcaaccagaccacccaggaggccgacagcgccaacaccctgcagatcgcctag

SEQ ID NO: 45085 - protein, 249 aa, Artificial Sequence
  derived and/or modified sequence
MAAGMYLEHYLDSIENLPFELQRNFQLMRDLDQRTEDLKAEIDKLATEYMSSARSLSSEEKLALLKQIQEAYGKCKEFGDDKVQLAMQTYEMVDKHIRRLDTDLARFEADLKEKQIESSDYDSSSSKGKKKGRTQKEKKAARARSKGKNSDEEAPKTAQKKLKLVRTSPEYGMPSVTFGSVHPSDVLDMPVDPNEPTYCLCHQVSYGEMIGCDNPDCSIEWFHFACVGLTTKPRGKWFCPRCSQERKKK

SEQ ID NO: 45086 - DNA, 750 bp, Artificial Sequence
  derived and/or modified sequence
atggccgccggcatgtacctggagcactacctggacagcatcgagaacctgcccttcgagctgcagagaaacttccagctgatgagagacctggaccagagaaccgaggacctgaaggccgagatcgacaagctggccaccgagtacatgagcagcgccagaagcctgagcagcgaggagaagctggccctgctgaagcagatccaggaggcctacggcaagtgcaaggagttcggcgacgacaaggtgcagctggccatgcagacctacgagatggtggacaagcacatcagaagactggacaccgacctggccagattcgaggccgacctgaaggagaagcagatcgagagcagcgactacgacagcagcagcagcaagggcaagaagaagggcagaacccagaaggagaagaaggccgccagagccagaagcaagggcaagaacagcgacgaggaggcccccaagaccgcccagaagaagctgaagctggtgagaaccagccccgagtacggcatgcccagcgtgaccttcggcagcgtgcaccccagcgacgtgctggacatgcccgtggaccccaacgagcccacctactgcctgtgccaccaggtgagctacggcgagatgatcggctgcgacaaccccgactgcagcatcgagtggttccacttcgcctgcgtgggcctgaccaccaagcccagaggcaagtggttctgccccagatgcagccaggagagaaagaagaagtag

SEQ ID NO: 45087 - DNA, 750 bp, Artificial Sequence
  derived and/or modified sequence
atggccgcaggtatgtatctggagcactatctggatagtatagagaatttgccgtttgaacttcagcggaatttccagcttatgagagatcttgaccagaggacggaagatctgaaggcggagatcgacaaactcgcgacagaatatatgagttcggcacggtcgctgagctctgaggaaaagctcgccctcctgaagcagattcaggaagcatatggtaagtgcaaggagtttggtgacgataaagtgcaactggcgatgcagacctacgaaatggtagacaaacacatcagacggctggacacggacctggctagattcgaggcggatttgaaggaaaaacaaatagaaagcagcgactatgactctagcagttccaagggcaagaaaaaaggacggactcagaaggagaaaaaagctgctagggcccgaagtaaaggcaagaacagcgatgaggaggcgccaaaaacagcccaaaaaaagctaaaactcgtcagaacaagtccagagtacggtatgccatcggtgacttttggttcggtccatccttctgatgtcttggacatgcctgtcgatccaaatgaaccaacctactgcctatgccatcaggtgtcgtacggggaaatgatcgggtgcgataaccccgattgcagcattgagtggtttcacttcgcttgtgtagggctcaccactaagccgagagggaagtggttttgccctcgatgttctcaggaacggaagaaaaagtag

SEQ ID NO: 45088 - DNA, 750 bp, Artificial Sequence
  derived and/or modified sequence
atggctgctggcatgtacctggagcactacctggacagcattgagaacctgccctttgagctgcagaggaacttccagctgatgagggacctggaccagaggacagaggacctgaaggccgagattgacaagctggccacagagtacatgagcagcgcccggagcctgagcagcgaggagaagctggccctgctgaagcagatccaggaggcctacggcaagtgcaaggagtttggagatgacaaggtgcagctggccatgcagacctatgagatggtggacaagcacatccggcggctggacacagacctggccaggtttgaagctgacctgaaggagaagcagatcgagagcagtgactatgacagcagcagcagcaagggcaagaagaagggccgcacccagaaggagaagaaggccgcccgggcccggagcaagggcaagaacagtgatgaggaggcccccaagacagcccagaagaagctgaagctggtgaggaccagcccagaatatggcatgcccagcgtgaccttcggctctgtgcaccccagtgatgtgctggacatgcctgtggaccccaatgagcccacctactgcctgtgccaccaggtgtcctatggagagatgattggctgtgacaacccagactgcagcattgagtggttccactttgcctgtgtgggcctgaccaccaagccccggggcaagtggttctgcccccgctgcagccaggagaggaagaagaagtag

SEQ ID NO: 45089 - DNA, 1393 bp, Artificial Sequence
  derived and/or modified sequence
ttccggggcggatcggaagttgctttgttttgcttcgagatggctgcggggatgtatttggaacattatctggacagtattgaaaaccttccctttgaattacagagaaactttcagctcatgagggacctagaccaaagaacagaggacctgaaggctgaaattgacaagttggccactgagtatatgagtagtgcccgcagcctgagctccgaggaaaaattggcccttctcaaacagatccaggaagcctatggcaagtgcaaggaatttggtgacgacaaggtgcagcttgccatgcagacctatgagatggtggacaaacacattcggcggctggacacagacctggcccgttttgaggctgatctcaaggagaaacagattgagtcaagtgactatgacagctcttccagcaaaggcaaaaagaaaggccggactcaaaaggagaagaaagctgctcgtgctcgttccaaagggaaaaactcggatgaagaagcccccaagactgcccagaagaagttaaagctcgtgcgcacaagtcctgagtatgggatgccctcagtgacctttggcagtgtccacccctctgatgtgttggatatgcctgtggatcccaacgaacccacctattgcctttgtcaccaggtctcctatggagagatgattggctgtgacaaccctgattgttccattgagtggttccattttgcctgtgtggggctgacaaccaagcctcgggggaaatggttttgcccacgctgctcccaagaacggaagaagaaatagataagggccttggattccaacacagtttcttccacatcccctgacttgggctagtgggcagaggaatgcctgtgctggggccaggggttcagggaggagtggatggcacagtgctgtcatcccttctcctcccctctccccactcccggtgctgaggctgcatcagaccctggtagggaggggtgccgcagccactaacggtatgtgctctccttcagccctctcccttcggagggacgtggtcttgcccactgtccttttgcctccatgctgaggtcggtgctgtatttcagagggagggtccttttcattctccttgctttgtatttaaggactggggcatagcatgggggcagtcccccagacctcttcattccccctcctgtggtgagggctaggtgtgatcaacacttttcttctccattcccttcctgcttttttcatggtgggggatccaccaggtcatctaggctctggccctagttgaaggggcaccccttcctctgtgccaagaggattcatcctgggagagggggcaaggtggaatgcagataactcacatgtaaaaggaacttgggtaggtaaataaaagctatacatgttg

SEQ ID NO: 45090 - DNA, 750 bp, Artificial Sequence
  derived and/or modified sequence
atggccgccggcatgtacctggagcactacctggacagcatcgagaacctcccctttgagctgcaacgtaacttccaactcatgagagatttggatcagcggactgaagacctgaaagccgaaatcgataaacttgcgacagagtatatgtctagtgcccgatccttgtctagcgaggaaaaactggcccttctgaaacagatccaggaggcatatggtaaatgtaaagagttcggagatgataaggtgcaactggctatgcaaacatacgaaatggttgacaagcatatacggagactggacaccgacctggcgaggttcgaggccgacttaaaagaaaagcaaatagagagttccgattatgactcatcctcgtcaaaaggtaagaaaaaagggcgcacgcagaaggaaaagaaagccgccagggcccgttcaaagggaaaaaattccgatgaggaagctcctaagaccgcccagaagaaattaaagctcgtccgcacatcaccagagtatggtatgccaagcgtaacgtttggcagcgtacacccgagcgacgtgctcgatatgccagttgatccaaatgagcccacttattgcttatgccatcaagtttcctatggcgagatgattggttgcgataacccagattgctcaattgaatggtttcactttgcatgtgtgggactcacgacaaagccacgcggtaagtggttctgtccccggtgcagccaggaacgtaagaagaaatag

SEQ ID NO: 45091 - DNA, 750 bp, Artificial Sequence
  derived and/or modified sequence
atggctgctggcatgtacttagagcattacttggacagcatcgagaatctaccttttgagctgcagaggaatttccagctgatgagggacctggatcagcggacagaggacttgaaggcagagatcgacaagttggctacagagtacatgagctctgcaaggagtctgtcctcggaagagaaactggcgcttctcaaacaaatccaagaggcctacggtaaatgcaaagaatttggggacgacaaggtacagctggcgatgcagacctacgaaatggttgataagcacattaggcggctcgatacagatttagcaagatttgaggctgacctgaaggagaagcagattgagagcagtgactacgactccagttcatcaaaaggcaagaagaaggggagaacgcaaaaggagaagaaagcagctagggcaaggtccaaaggtaagaatagtgatgaagaagctcccaagactgcccagaagaaactgaaactggttaggacaagcccagaatatggaatgccgtccgttacatttggatctgttcacccaagtgatgtactggatatgcccgtggatccaaacgaaccgacatactgtctgtgtcaccaggtgtcttacggcgagatgatcgggtgtgacaaccccgattgctctattgagtggttccacttcgcgtgcgtagggctaaccactaaaccacggggaaagtggttttgccctaggtgctctcaggagcgaaagaagaagtag

SEQ ID NO: 45092 - protein, 246 aa, Artificial Sequence
  derived and/or modified sequence
MAAGMYLEHYLDSIENLPFELQRNFQLMRDLDQRTEDLKAEIDKLATEYMSSARSLSSEEKLALLKQIQEAYGKCKEFGDDKVQLAMQTYEMVDKHIRRLDTDLARFEADLKEKQIESSDYDSSSSKEGRTQKEKKAARARSKGKNSDEEAPKTAQKKLKLVRTSPEYGMPSVTFGSVHPSDVLDMPVDPNEPTYCLCHQVSYGEMIGCDNPDCSIEWFHFACVGLTTKPRGKWFCPRCSQERKKK

SEQ ID NO: 45093 - DNA, 741 bp, Artificial Sequence
  derived and/or modified sequence
atggccgccggcatgtacctggagcactacctggacagcatcgagaacctgcccttcgagctgcagagaaacttccagctgatgagagacctggaccagagaaccgaggacctgaaggccgagatcgacaagctggccaccgagtacatgagcagcgccagaagcctgagcagcgaggagaagctggccctgctgaagcagatccaggaggcctacggcaagtgcaaggagttcggcgacgacaaggtgcagctggccatgcagacctacgagatggtggacaagcacatcagaagactggacaccgacctggccagattcgaggccgacctgaaggagaagcagatcgagagcagcgactacgacagcagcagcagcaaggagggcagaacccagaaggagaagaaggccgccagagccagaagcaagggcaagaacagcgacgaggaggcccccaagaccgcccagaagaagctgaagctggtgagaaccagccccgagtacggcatgcccagcgtgaccttcggcagcgtgcaccccagcgacgtgctggacatgcccgtggaccccaacgagcccacctactgcctgtgccaccaggtgagctacggcgagatgatcggctgcgacaaccccgactgcagcatcgagtggttccacttcgcctgcgtgggcctgaccaccaagcccagaggcaagtggttctgccccagatgcagccaggagagaaagaagaagtag

SEQ ID NO: 45094 - DNA, 741 bp, Artificial Sequence
  derived and/or modified sequence
atggctgcgggtatgtacctcgagcattacctggatagtattgagaacctgccattcgagcttcagcggaatttccaactaatgagagatctggatcagcggacagaggacctgaaggcagaaatcgacaaactcgcgactgaatatatgtcgtccgctcgaagcctgagtagtgaggagaaattagccctgctcaaacagatccaagaagcctatggcaagtgcaaggaatttggagacgacaaagtgcagctagcgatgcagacctatgaaatggtcgacaagcatatcaggagactcgataccgacctggctaggtttgaagctgatttgaaggaaaaacagattgagagttccgattacgacagctccagcagtaaagaaggccgcactcaaaaagaaaagaaagcagccagagctcggagcaaaggaaaaaattccgatgaagaggcccctaagacagcccagaagaagttaaagctggtcagaacctcccctgaatacggcatgccctctgttacttttgggtccgtgcatccctccgacgtgctagacatgcccgtggatcctaatgaacccacctactgtctgtgccatcaggtgtcgtatggagaaatgattggatgcgacaatccggactgtagcatcgagtggtttcactttgcctgcgtcgggctgacgactaagcctcgagggaaatggttctgtcccagatgctctcaagaaagaaaaaagaagtag

SEQ ID NO: 45095 - DNA, 741 bp, Artificial Sequence
  derived and/or modified sequence
atggctgctggcatgtacctggagcactacctggacagcattgagaacctgccctttgagctgcagaggaacttccagctgatgagggacctggaccagaggacagaggacctgaaggccgagattgacaagctggccacagagtacatgagcagcgcccggagcctgagcagcgaggagaagctggccctgctgaagcagatccaggaggcctacggcaagtgcaaggagtttggagatgacaaggtgcagctggccatgcagacctatgagatggtggacaagcacatccggcggctggacacagacctggccaggtttgaagctgacctgaaggagaagcagatcgagagcagtgactatgacagcagcagcagcaaggagggccgcacccagaaggagaagaaggccgcccgggcccggagcaagggcaagaacagtgatgaggaggcccccaagacagcccagaagaagctgaagctggtgaggaccagcccagaatatggcatgcccagcgtgacctttggatctgtgcaccccagtgatgtgctggacatgcctgtggaccccaatgagcccacctactgcctgtgccaccaggtgtcctatggagagatgattggctgtgacaacccagactgcagcattgagtggttccactttgcctgtgtgggcctgaccaccaagccccggggcaagtggttctgcccccgctgcagccaggagaggaagaagaagtag

SEQ ID NO: 45096 - DNA, 741 bp, Artificial Sequence
  derived and/or modified sequence
atggctgcggggatgtatttggaacattatctggacagtattgaaaaccttccctttgaattacagagaaactttcagctcatgagggacctagaccaaagaacagaggacctgaaggctgaaattgacaagttggccactgagtatatgagtagtgcccgcagcctgagctccgaggaaaaattggcccttctcaaacagatccaggaagcctatggcaagtgcaaggaatttggtgacgacaaggtgcagcttgccatgcagacctatgagatggtggacaaacacattcggcggctggacacagacctggcccgttttgaggctgatctcaaggagaaacagattgagtcaagtgactatgacagctcttccagcaaagaaggccggactcaaaaggagaagaaagctgctcgtgctcgttccaaagggaaaaactcggatgaagaagcccccaagactgcccagaagaagttaaagctcgtgcgcacaagtcctgagtatgggatgccctcagtgacctttggcagtgtccacccctctgatgtgttggatatgcctgtggatcccaacgaacccacctattgcctttgtcaccaggtctcctatggagagatgattggctgtgacaaccctgattgttccattgagtggttccattttgcctgtgtggggctgacaaccaagcctcgggggaaatggttttgcccacgctgctcccaagaacggaagaagaaatag

SEQ ID NO: 45097 - DNA, 741 bp, Artificial Sequence
  derived and/or modified sequence
atggccgccggcatgtacctggagcactacctggacagcatcgagaacttacccttcgagctccagcggaattttcaactcatgagagatctggaccagcgtactgaagatctgaaagccgagatagacaagctggctaccgaatacatgagcagcgctagaagcctttccagcgaggagaagctagccctcttgaagcagatacaggaggcttacggcaagtgtaaggagttcggagatgataaggtgcagctggctatgcagacgtatgagatggttgacaagcatattcggcggctcgacacagacctggccagattcgaggccgacctgaaggaaaaacaaattgagagcagtgactatgactccagctcctccaaagaaggtagaactcaaaaggaaaagaaggctgcacgggcgcgaagcaagggcaagaacagcgatgaagaggcacctaaaactgcacagaagaagctcaagttagtgcggacatcccccgaatatgggatgccctcagtcacatttgggtcagtgcatcccagcgacgtgctggacatgccagtagatcccaatgaaccaacttactgcctgtgccatcaagtgtcttacggagaaatgatcggatgcgacaaccccgattgtagcatcgagtggttccattttgcctgcgtcggactgacaacgaagcccagaggcaaatggttctgtccacgttgcagtcaagagcgcaaaaaaaagtag

SEQ ID NO: 45098 - DNA, 741 bp, Artificial Sequence
  derived and/or modified sequence
atggccgctggcatgtatttggaacattacctggactctatcgagaacctgcctttcgagctacagcgcaattttcagttaatgagagacctggaccagaggacagaagacctgaaggccgaaatcgataagttggccacggaatatatgagttccgcaaggtcgctttcttctgaagagaaactcgccttactcaaacagatacaagaagcctatgggaagtgcaaggaattcggagacgacaaagtccagttagcgatgcagacgtatgaaatggtggacaaacacatacgacggctagacaccgacttggctaggttcgaagccgacttgaaggagaagcagatagaaagttcagactatgactcctctagctcaaaggaagggcgtacacaaaaagagaaaaaagcagcgagagctcggagtaaagggaagaactctgacgaggaggctccgaaaaccgcacagaagaagttaaaacttgtgcggaccagccctgaatacgggatgccatctgtgacctttggatctgtgcacccttctgatgtcctggatatgcctgtggaccccaatgaacctacatattgcctttgtcatcaggtttcctatggggagatgattgggtgtgacaatcccgattgtagcattgagtggttccattttgcctgcgtaggtctcacgactaagccgaggggaaagtggttttgtcctagatgcagtcaggagcgcaagaagaaatag

SEQ ID NO: 45099 - protein, 245 aa, Artificial Sequence
  derived and/or modified sequence
MAAGMYLEHYLDSIENLPFELQRNFQLMRDLDQRTEDLKAEIDKLATEYMSSARSLSSEEKLALLKQIQEAYGKCKEFGDDKVQLAMQTYEMVDKHIRRLDTDLARFEADLKEKQIESSDYDSSSSKGRTQKEKKAARARSKGKNSDEEAPKTAQKKLKLVRTSPEYGMPSVTFGSVHPSDVLDMPVDPNEPTYCLCHQVSYGEMIGCDNPDCSIEWFHFACVGLTTKPRGKWFCPRCSQERKKK

SEQ ID NO: 45100 - DNA, 738 bp, Artificial Sequence
  derived and/or modified sequence
atggccgccggcatgtacctggagcactacctggacagcatcgagaacctgcccttcgagctgcagagaaacttccagctgatgagagacctggaccagagaaccgaggacctgaaggccgagatcgacaagctggccaccgagtacatgagcagcgccagaagcctgagcagcgaggagaagctggccctgctgaagcagatccaggaggcctacggcaagtgcaaggagttcggcgacgacaaggtgcagctggccatgcagacctacgagatggtggacaagcacatcagaagactggacaccgacctggccagattcgaggccgacctgaaggagaagcagatcgagagcagcgactacgacagcagcagcagcaagggcagaacccagaaggagaagaaggccgccagagccagaagcaagggcaagaacagcgacgaggaggcccccaagaccgcccagaagaagctgaagctggtgagaaccagccccgagtacggcatgcccagcgtgaccttcggcagcgtgcaccccagcgacgtgctggacatgcccgtggaccccaacgagcccacctactgcctgtgccaccaggtgagctacggcgagatgatcggctgcgacaaccccgactgcagcatcgagtggttccacttcgcctgcgtgggcctgaccaccaagcccagaggcaagtggttctgccccagatgcagccaggagagaaagaagaagtag

SEQ ID NO: 45101 - DNA, 738 bp, Artificial Sequence
  derived and/or modified sequence
atggcagcgggtatgtacctggagcattaccttgactccatcgaaaaccttcccttcgagctccaaagaaacttccagcttatgcgcgacttagaccagcgaactgaagatcttaaagcagaaatcgacaagctggccacagagtacatgtcctcagcaaggagtctctcatctgaggagaagttggccttgttgaagcagattcaggaagcctatgggaaatgtaaggagttcggggacgataaggtccagttggcaatgcagacgtatgagatggtggataagcatattagacgtctggatactgacctcgcccgatttgaggcggatttgaaagagaaacagattgagagtagtgactatgattctagctcttctaaggggcgcacccagaaggaaaaaaaagctgcgcgtgccagatctaaaggaaagaattccgacgaagaagcaccaaaaaccgcccagaaaaaacttaagttggttcgaactagtcctgagtacgggatgcctagcgtgaccttcggaagcgtgcatccctctgacgtccttgacatgcctgttgatccaaacgaacctacttactgcctttgccatcaggttagctatggggagatgattgggtgtgataaccctgattgtagcattgagtggtttcacttcgcttgtgtgggcctgactaccaaacctagaggcaagtggttttgtcctcgatgtagccaggaacgaaagaaaaagtag

SEQ ID NO: 45102 - DNA, 738 bp, Artificial Sequence
  derived and/or modified sequence
atggctgctggcatgtacctggagcactacctggacagcattgagaacctgccctttgagctgcagaggaacttccagctgatgagggacctggaccagaggacagaggacctgaaggccgagattgacaagctggccacagagtacatgagcagcgcccggagcctgagcagcgaggagaagctggccctgctgaagcagatccaggaggcctacggcaagtgcaaggagtttggagatgacaaggtgcagctggccatgcagacctatgagatggtggacaagcacatccggcggctggacacagacctggccaggtttgaagctgacctgaaggagaagcagatcgagagcagtgactatgacagcagcagcagcaaaggaagaacccagaaggagaagaaggccgcccgggcccggagcaagggcaagaacagtgatgaggaggcccccaagacagcccagaagaagctgaagctggtgaggaccagcccagaatatggcatgcccagcgtgaccttcggctctgtgcaccccagtgatgtgctggacatgcctgtggaccccaatgagcccacctactgcctgtgccaccaggtgtcctatggagagatgattggctgtgacaacccagactgcagcattgagtggttccactttgcctgtgtgggcctgaccaccaagccccggggcaagtggttctgcccccgctgcagccaggagaggaagaagaagtag

SEQ ID NO: 45103 - DNA, 1348 bp, Artificial Sequence
  derived and/or modified sequence
acttccggggcggatcggaagttgctttgttttgcttcgagatggctgcggggatgtatttggaacattatctggacagtattgaaaaccttccctttgaattacagagaaactttcagctcatgagggacctagaccaaagaacagaggacctgaaggctgaaattgacaagttggccactgagtatatgagtagtgcccgcagcctgagctccgaggaaaaattggcccttctcaaacagatccaggaagcctatggcaagtgcaaggaatttggtgacgacaaggtgcagcttgccatgcagacctatgagatggtggacaaacacattcggcggctggacacagacctggcccgttttgaggctgatctcaaggagaaacagattgagtcaagtgactatgacagctcttccagcaaaggccggactcaaaaggagaagaaagctgctcgtgctcgttccaaagggaaaaactcggatgaagaagcccccaagactgcccagaagaagttaaagctcgtgcgcacaagtcctgagtatgggatgccctcagtgacctttggcagtgtccacccctctgatgtgttggatatgcctgtggatcccaacgaacccacctattgcctttgtcaccaggtctcctatggagagatgattggctgtgacaaccctgattgttccattgagtggttccattttgcctgtgtggggctgacaaccaagcctcgggggaaatggttttgcccacgctgctcccaagaacggaagaagaaatagataagggccttggattccaacacagtttcttccacatcccctgacttgggctagtgggcagaggaatgcctgtgctggggccaggggttcagggaggagtggatggcacagtgctgtcatcccttctcctcccctctccccactcccggtgctgaggctgcatcagaccctggtagggaggggtgccgcagccactaacggtatgtgctctccttcagccctctcccttcggagggacgtggtcttgcccactgtccttttgcctccatgctgaggtcggtgctgtatttcagagggagggtccttttcattctccttgctttgtatttaaggactggggcatagcatgggggcagtcccccagacctcttcattccccctcctgtggtgagggctaggtgtgatcaacacttttcttctccattcccttcctgcttttttcatggtgggggatccaccaggtcatctaggctctggccctagttgaaggggcaccccttcctctgtgccaagaggattcatcctgggagagggggcaaggtggaatgcagataactcacatgtaaaag

SEQ ID NO: 45104 - DNA, 738 bp, Artificial Sequence
  derived and/or modified sequence
atggccgccggcatgtacctggagcactacctggacagcatcgagaatttgcctttcgaactgcagcgtaactttcagcttatgagggacttggaccagaggaccgaggacctgaaagccgagattgataagctggccaccgaatatatgtcctcagcacgtagtttatcttctgaggagaagctcgctttgcttaagcagatacaggaagcctacgggaagtgtaaagagtttggcgatgacaaagtacagttagctatgcagacatatgaaatggtcgataagcacatacgccgactggacactgatttagccaggttcgaggccgatcttaaagagaaacagattgaaagctccgactacgacagttcatcctccaaagggcggactcaaaaagagaaaaaggccgctcgggctaggagcaaagggaagaactcagatgaggaagccccgaaaaccgcacagaaaaagctgaagctggttcgtaccagcccagaatacggaatgccgtcagtaacctttggaagcgtgcatccctctgatgtactcgacatgccagttgaccctaatgagccaacttactgcctgtgccaccaagtgtcctacggggaaatgattggttgtgacaaccctgactgctcaattgaatggttccacttcgcctgtgtcggacttacaaccaaacccagggggaagtggttctgcccacgctgcagccaagagcgtaaaaagaaatag

SEQ ID NO: 45105 - DNA, 738 bp, Artificial Sequence
  derived and/or modified sequence
atggcggcaggtatgtatctggagcactacctggatagcatcgaaaatctgcccttcgagctgcagcgcaattttcaactgatgcgggatctggatcaaaggaccgaggatctcaaggctgaaatagacaagctggctacagagtacatgagctccgccagaagtttgagctcggaagagaagctcgcgctcctgaagcaaatccaggaagcttacggtaaatgtaaagaattcggtgatgataaggtgcagttggccatgcagacctacgagatggttgacaaacacatcagacggctagataccgacctcgcacgttttgaggccgatctgaaggagaagcaaatcgagagtagtgactacgacagttcctcctcaaaaggacggacccagaaagagaagaaggccgctagagctcgtagtaaaggcaagaactccgacgaggaagcccctaaaaccgcccagaagaagttgaaactggtgcggactagcccagagtatggaatgccttcagttacatttgggtcggtacatccctctgacgtgctggacatgcccgtagacccgaatgagccaacctattgcttatgtcaccaagtgtcttacggtgagatgatcggttgtgacaaccctgattgttctatcgaatggttccatttcgcctgcgtcggattgaccaccaaaccccgagggaaatggttttgtcccagatgctcccaggaacgcaagaaaaagtag

SEQ ID NO: 45106 - protein, 225 aa, Artificial Sequence
  derived and/or modified sequence
MAAGMYLEHYLDNLKAEIDKLATEYMSSARSLSSEEKLALLKQIQEAYGKCKEFGDDKVQLAMQTYEMVDKHIRRLDTDLARFEADLKEKQIESSDYDSSSSKGKKKGRTQKEKKAARARSKGKNSDEEAPKTAQKKLKLVRTSPEYGMPSVTFGSVHPSDVLDMPVDPNEPTYCLCHQVSYGEMIGCDNPDCSIEWFHFACVGLTTKPRGKWFCPRCSQERKKK

SEQ ID NO: 45107 - DNA, 678 bp, Artificial Sequence
  derived and/or modified sequence
atggccgccggcatgtacctggagcactacctggacaacctgaaggccgagatcgacaagctggccaccgagtacatgagcagcgccagaagcctgagcagcgaggagaagctggccctgctgaagcagatccaggaggcctacggcaagtgcaaggagttcggcgacgacaaggtgcagctggccatgcagacctacgagatggtggacaagcacatcagaagactggacaccgacctggccagattcgaggccgacctgaaggagaagcagatcgagagcagcgactacgacagcagcagcagcaagggcaagaagaagggcagaacccagaaggagaagaaggccgccagagccagaagcaagggcaagaacagcgacgaggaggcccccaagaccgcccagaagaagctgaagctggtgagaaccagccccgagtacggcatgcccagcgtgaccttcggcagcgtgcaccccagcgacgtgctggacatgcccgtggaccccaacgagcccacctactgcctgtgccaccaggtgagctacggcgagatgatcggctgcgacaaccccgactgcagcatcgagtggttccacttcgcctgcgtgggcctgaccaccaagcccagaggcaagtggttctgccccagatgcagccaggagagaaagaagaagtag

SEQ ID NO: 45108 - DNA, 678 bp, Artificial Sequence
  derived and/or modified sequence
atggcagctggcatgtacctcgagcactatctggataaccttaaagccgagatcgacaagttggccaccgagtatatgagcagcgcaagatccctgagctcagaggaaaagctcgcgctgctaaagcagatccaggaagcgtatgggaagtgtaaagagtttggcgacgataaagtgcagctagccatgcagacctacgaaatggtagataaacatattagaaggttagacaccgatttagccaggtttgaggcagacctaaaggagaaacaaattgaaagcagcgattatgacagctcctccagtaaaggcaagaaaaagggaaggacccagaaagagaaaaaggcagccagagctcgatctaaggggaaaaactcggacgaggaggcacccaagacggcccaaaagaagctcaagctggtgagaacctctcccgaatacggaatgccttccgttaccttcggctccgttcacccgtccgacgttctggatatgcccgtggatcctaacgagccaacatactgtttgtgccatcaggtatcctacggggagatgatcgggtgtgacaaccccgattgctctattgagtggttccattttgcctgcgtggggctgaccaccaaaccccgcggcaagtggttttgtccacggtgcagtcaagagaggaagaaaaaatag

SEQ ID NO: 45109 - DNA, 678 bp, Artificial Sequence
  derived and/or modified sequence
atggctgctggcatgtacctggagcactacctggacaacctgaaggccgagattgacaagctggccacagagtacatgagcagcgcccggagcctgagcagcgaggagaagctggccctgctgaagcagatccaggaggcctacggcaagtgcaaggagtttggagatgacaaggtgcagctggccatgcagacctatgagatggtggacaagcacatccggcggctggacacagacctggccaggtttgaagctgacctgaaggagaagcagatcgagagcagtgactatgacagcagcagcagcaagggcaagaagaagggccgcacccagaaggagaagaaggccgcccgggcccggagcaagggcaagaacagtgatgaggaggcccccaagacagcccagaagaagctgaagctggtgaggaccagcccagaatatggcatgcccagcgtgaccttcggctctgtgcaccccagtgatgtgctggacatgcctgtggaccccaatgagcccacctactgcctgtgccaccaggtgtcctatggagagatgattggctgtgacaacccagactgcagcattgagtggttccactttgcctgtgtgggcctgaccaccaagccccggggcaagtggttctgcccccgctgcagccaggagaggaagaagaagtag

SEQ ID NO: 45110 - DNA, 678 bp, Artificial Sequence
  derived and/or modified sequence
atggctgcggggatgtatttggaacattatctggacaacctgaaggctgaaattgacaagttggccactgagtatatgagtagtgcccgcagcctgagctccgaggaaaaattggcccttctcaaacagatccaggaagcctatggcaagtgcaaggaatttggtgacgacaaggtgcagcttgccatgcagacctatgagatggtggacaaacacattcggcggctggacacagacctggcccgttttgaggctgatctcaaggagaaacagattgagtcaagtgactatgacagctcttccagcaaaggcaaaaagaaaggccggactcaaaaggagaagaaagctgctcgtgctcgttccaaagggaaaaactcggatgaagaagcccccaagactgcccagaagaagttaaagctcgtgcgcacaagtcctgagtatgggatgccctcagtgacctttggcagtgtccacccctctgatgtgttggatatgcctgtggatcccaacgaacccacctattgcctttgtcaccaggtctcctatggagagatgattggctgtgacaaccctgattgttccattgagtggttccattttgcctgtgtggggctgacaaccaagcctcgggggaaatggttttgcccacgctgctcccaagaacggaagaagaaatag

SEQ ID NO: 45111 - DNA, 678 bp, Artificial Sequence
  derived and/or modified sequence
atggccgccggcatgtacctggagcactacctggacaacctgaaggcggagatcgacaaacttgccactgaatatatgtcaagcgctcgcagtctgtcttccgaggaaaaactcgctctgctgaagcagatccaggaggcgtacggaaaatgcaaagaatttggagacgataaagtccaacttgccatgcagacgtatgagatggtcgacaaacacattcgccgtcttgatacggatctggccagatttgaagccgaccttaaagaaaaacagattgaatccagcgattatgacagctcctcctctaaaggaaagaaaaagggccgaacacagaaggaaaagaaagctgcccgggcaaggtcaaaaggtaagaactctgatgaagaagcccccaagaccgctcagaagaaactgaagctcgtgcgaaccagcccggagtacggtatgccttctgtgacttttggcagcgtgcacccttccgacgtgctggatatgcccgttgatcccaatgagcccacatattgcctttgccatcaggtatcctacggcgagatgattgggtgtgacaaccccgactgctctatcgaatggttccacttcgcttgcgttggactgacgactaagccaagggggaaatggttttgtcctagatgttcccaggaaaggaaaaaaaaatag

SEQ ID NO: 45112 - DNA, 678 bp, Artificial Sequence
  derived and/or modified sequence
atggcggcaggaatgtatctggaacattacctggataatctcaaagctgagatcgataagttagcaactgagtacatgtcctccgcacgttccctgagttcagaggagaaactggcgttactcaagcagattcaagaagcgtatggtaagtgtaaagagttcggggatgataaagtccagctagctatgcagacctacgaaatggtcgataagcatattagaaggctcgatactgatctggcgagattcgaagcagatcttaaggaaaaacaaattgagtcctccgattatgatagctcgtcaagcaaaggtaaaaaaaaaggccgtacccaaaaggaaaaaaaggcagctcgggctcgaagcaaaggaaaaaattccgacgaggaggctcccaaaaccgcacagaaaaagctgaagctagtgaggacgtccccagaatacggtatgccctcggtcacgtttggcagcgtgcaccccagcgacgtcctggacatgcctgtggatcctaacgagcccacgtactgcctctgccatcaagtctcctatggggagatgatcggatgcgacaatcccgactgtagtatcgagtggtttcacttcgcatgcgtgggactgaccacaaagccacgtggaaagtggttttgcccaagatgctcccaggagcgtaagaagaagtag

SEQ ID NO: 45113 - protein, 179 aa, Artificial Sequence
  derived and/or modified sequence
MAAGMYLEHYLDSIENLPFELQRNFQLMRDLDQRTEDLKAEIDKLATEYMSSARSLSSEEKLALLKQIQEAYGKCKEFGDDKVQLAMQTYEMVDKHIRRLDTDLARFEADLKEKQIESSDYDSSSSKGKKKGRTQKEKKAARARSKGKNSDEEAPKTAQKKLKLVRTVPLSGSILPVWG

SEQ ID NO: 45114 - DNA, 540 bp, Artificial Sequence
  derived and/or modified sequence
atggccgccggcatgtacctggagcactacctggacagcatcgagaacctgcccttcgagctgcagagaaacttccagctgatgagagacctggaccagagaaccgaggacctgaaggccgagatcgacaagctggccaccgagtacatgagcagcgccagaagcctgagcagcgaggagaagctggccctgctgaagcagatccaggaggcctacggcaagtgcaaggagttcggcgacgacaaggtgcagctggccatgcagacctacgagatggtggacaagcacatcagaagactggacaccgacctggccagattcgaggccgacctgaaggagaagcagatcgagagcagcgactacgacagcagcagcagcaagggcaagaagaagggcagaacccagaaggagaagaaggccgccagagccagaagcaagggcaagaacagcgacgaggaggcccccaagaccgcccagaagaagctgaagctggtgagaaccgtgcccctgagcggcagcatcctgcccgtgtggggctag

SEQ ID NO: 45115 - DNA, 540 bp, Artificial Sequence
  derived and/or modified sequence
atggccgccggtatgtatctggagcactacttggattctattgaaaacctgccattcgagctccagcgcaactttcagttaatgcgcgacctggatcaacggacagaagatttaaaggctgagatcgacaagctcgctacggagtacatgagtagcgctcggagtctttcctcagaggaaaagctcgccctgttgaagcaaattcaggaagcctatggcaagtgtaaagagttcggcgatgacaaagtgcagctcgcaatgcagacgtacgaaatggtcgacaagcatattagaaggctggataccgatctcgcccggttcgaagccgacctcaaagaaaagcagatcgagtcatcagattatgattcttccagttctaaggggaaaaagaaaggacgcacgcaaaaggaaaagaaggctgcaagggctcgttccaaggggaagaacagtgacgaggaggcccctaagacagcacagaaaaagctcaagttagtccggaccgtcccgttatccggctccatcctccctgtgtggggatag

SEQ ID NO: 45116 - DNA, 540 bp, Artificial Sequence
  derived and/or modified sequence
atggctgctggcatgtacctggagcactacctggacagcattgagaacctgccctttgagctgcagaggaacttccagctgatgagggacctggaccagaggacagaggacctgaaggccgagattgacaagctggccacagagtacatgagcagcgcccggagcctgagcagcgaggagaagctggccctgctgaagcagatccaggaggcctacggcaagtgcaaggagtttggagatgacaaggtgcagctggccatgcagacctatgagatggtggacaagcacatccggcggctggacacagacctggccaggtttgaagctgacctgaaggagaagcagatcgagagcagtgactatgacagcagcagcagcaagggcaagaagaagggccgcacccagaaggagaagaaggccgcccgggcccggagcaagggcaagaacagtgatgaggaggcccccaagacagcccagaagaagctgaagctggtgaggacagtgcccctgagcggcagcatcctgcctgtgtggggctag

SEQ ID NO: 45117 - DNA, 602 bp, Artificial Sequence
  derived and/or modified sequence
atggctgcggggatgtatttggaacattatctggacagtattgaaaaccttccctttgaattacagagaaactttcagctcatgagggacctagaccaaagaacagaggacctgaaggctgaaattgacaagttggccactgagtatatgagtagtgcccgcagcctgagctccgaggaaaaattggcccttctcaaacagatccaggaagcctatggcaagtgcaaggaatttggtgacgacaaggtgcagcttgccatgcagacctatgagatggtggacaaacacattcggcggctggacacagacctggcccgttttgaggctgatctcaaggagaaacagattgagtcaagtgactatgacagctcttccagcaaaggcaaaaagaaaggccggactcaaaaggagaagaaagctgctcgtgctcgttccaaagggaaaaactcggatgaagaagcccccaagactgcccagaagaagttaaagctcgtgcgcactgttccattgagtggttccattttgcctgtgtggggctgacaaccaagcctcgggggaaatggttttgcccacgctgctcccaagaacggaagaagaaatag

SEQ ID NO: 45118 - DNA, 540 bp, Artificial Sequence
  derived and/or modified sequence
atggccgccggcatgtacctggagcactacctggacagcatcgagaacctgcctttcgagctgcagcgtaatttccagcttatgagagaccttgatcaaagaaccgaggacttgaaagcagagatcgacaagttagcgacagaatacatgtcctctgccagatccctgtctagcgaggaaaagctggccctcttaaaacagattcaagaagcctacggcaagtgtaaagagtttggcgacgacaaggtgcagcttgctatgcaaacatatgaaatggtggacaagcacatccgtcgcctcgatactgatttagcacgatttgaggccgatctcaaggagaagcagattgagtcgtccgactacgatagtagcagttctaaaggtaagaaaaagggccgtacccagaaagagaagaaagccgctagggccagatcgaagggcaagaatagcgacgaggaggcacccaagactgcccaaaagaaactgaaactggtccgaactgtcccactatctggatctattcttcccgtgtggggctag

SEQ ID NO: 45119 - DNA, 540 bp, Artificial Sequence
  derived and/or modified sequence
atggccgcaggcatgtatttggaacattatctagatagcatcgaaaatttaccgtttgaactacagcgcaattttcagctgatgcgggacctcgaccagcggacagaggacctgaaagccgaaatagacaaattggctactgagtacatgagctcggcgagaagtttgtcctccgaggagaagttagcattactgaagcagatccaggaagcgtacggcaagtgtaaagagtttggcgacgacaaagtgcagctggcaatgcagacatacgagatggtggacaaacacattcgacggctggacactgacctggcacgatttgaggcggatttaaaagaaaaacagatcgaatcttccgactatgacagttcctcttccaagggaaaaaagaaaggtaggacccagaaagaaaagaaagccgcacgcgcacgcagcaaggggaaaaacagcgacgaggaggcgcctaaaacggcccagaagaaattgaaactggtacgcactgtacctctgtctggaagcattctgccggtgtggggatag

SEQ ID NO: 45120 - protein, 271 aa, Artificial Sequence
  derived and/or modified sequence
  misc_feature (1)..(1): Xaa can be any naturally occurring amino acid
XPLGLRISLVTCPLQCGIMWQLLLPTALLLLVSAGMRTDLPKAVVFLEPQWYRVLEKDSVTLKCQGAYSPEDNSTQWFHNESLISSQASSYFIDAATVDDSGEYRCQTNLSTLSDPVQLEVHIGWLLLQAPRWVFKEEDPIHLRCHSWKNTALHKVTYLQNGKGRKYFHHNSDFYIPKATLKDSGSYFCRGLFGSKNVSSETVNITITQGLAVSTISSFFPPGYQVSFCLVMVLLFAVDTGLYFSVKTNIRSSTRDWKDHKFKWRKDPQDK

SEQ ID NO: 45121 - protein, 289 aa, Artificial Sequence
  derived and/or modified sequence
MGGGAGERLFTSSCLVGLVPLGLRISLVTCPLQCGIMWQLLLPTALLLLVSAGMRTDLPKAVVFLEPQWYRVLEKDSVTLKCQGAYSPEDNSTQWFHNESLISSQASSYFIDAATVDDSGEYRCQTNLSTLSDPVQLEVHIGWLLLQAPRWVFKEEDPIHLRCHSWKNTALHKVTYLQNGKGRKYFHHNSDFYIPKATLKDSGSYFCRGLFGSKNVSSETVNITITQGLAVSTISSFFPPGYQVSFCLVMVLLFAVDTGLYFSVKTNIRSSTRDWKDHKFKWRKDPQDK

SEQ ID NO: 45122 - DNA, 1972 bp, Artificial Sequence
  derived and/or modified sequence
tccctttagggctccggatatctttggtgacttgtccactccagtgtggcatcatgtggcagctgctcctcccaactgctctgctacttctagtttcagctggcatgcggactgatctcccaaaggctgtggtgttcctggagcctcaatggtacagggtgctcgagaaggacagtgtgactctgaagtgccagggagcctactcccctgaggacaattccacacagtggtttcacaatgagagcctcatctcaagccaggcctcgagctacttcattgacgctgccacagtcgacgacagtggagagtacaggtgccagacaaacctctccaccctcagtgacccggtgcagctagaagtccatatcggctggctgttgctccaggcccctcggtgggtgttcaaggaggaagaccctattcacctgaggtgtcacagctggaagaacactgctctgcataaggtcacatatttacagaatggcaaaggcaggaagtattttcatcataattctgacttctacattccaaaagccacactcaaagacagcggctcctacttctgcagggggctttttgggagtaaaaatgtgtcttcagagactgtgaacatcaccatcactcaaggtttggcagtgtcaaccatctcatcattctttccacctgggtaccaagtctctttctgcttggtgatggtactcctttttgcagtggacacaggactatatttctctgtgaagacaaacattcgaagctcaacaagagactggaaggaccataaatttaaatggagaaaggaccctcaagacaaatgacccccatcccatgggggtaataagagcagtagcagcagcatctctgaacatttctctggatttgcaaccccatcatcctcaggcctctctacaagcagcaggaaacatagaactcagagccagatcccttatccaactctcgacttttccttggtctccagtggaagggaaaagcccatgatcttcaagcagggaagccccagtgagtagctgcattcctagaaattgaagtttcagagctacacaaacactttttctgtcccaaccgttccctcacagcaaagcaacaatacaggctagggatggtaatcctttaaacatacaaaaattgctcgtgttataaattacccagtttagaggggaaaaaaaaacaattattcctaaataaatggataagtagaattaatggttgaggcaggaccatacagagtgtgggaactgctggggatctagggaattcagtgggaccaatgaaagcatggctgagaaatagcaggtagtccaggatagtctaagggaggtgttcccatctgagcccagagataagggtgtcttcctagaacattagccgtagtggaattaacaggaaatcatgagggtgacgtagaattgagtcttccaggggactctatcagaactggaccatctccaagtatataacgatgagtcctcttaatgctaggagtagaaaatggtcctaggaaggggactgaggattgcggtggggggtggggtggaaaagaaagtacagaacaaaccctgtgtcactgtcccaagttgctaagtgaacagaactatctcagcatcagaatgagaaagcctgagaagaaagaaccaaccacaagcacacaggaaggaaagcgcaggaggtgaaaatgctttcttggccagggtagtaagaattagaggttaatgcagggactgtaaaaccaccttttctgcttcaatatctaattcctgtgtagctttgttcattgcatttattaaacaaatgttgtataaccaatactaaatgtactactgagcttcgctgagttaagttatgaaactttcaaatccttcatcatgtcagttccaatgaggtggggatggagaagacaattgttgcttatgaaagaaagctttagctgtctctgttttgtaagctttaagcgcaa

SEQ ID NO: 45123 - DNA, 462 bp, Artificial Sequence
  derived and/or modified sequence
attgtgagagtaaccaacgtggggttacgggggagaatctggagagaagagaagaggttaacaaccctcccacttcctggccacccccctccaccttttctgggctccggatatctttggtgacttgtccactccagtgtggcatcatgtggcagctgctcctcccaactgctctgctacttctagtttcagctggcatgcggactgatctcccaaaggctgtggtgttcctggagcctcaatggtacagggtgctcgagaaggacagtgtgactctgaagtgccagggagcctactcccctgaggacaattccacacagtggtttcacaatgagagcctcatctcaagccaggcctcgagctacttcattgacgctgccacagtcgacgacagtggagagtacaggtgccagacaaacctctccaccctcagtgacccggtgcagctagaagtccatatcg

SEQ ID NO: 45124 - DNA, 2301 bp, Artificial Sequence
  derived and/or modified sequence
gattctgtgtgtgtcctcagatgctcagccacagacctttgagggagtaaagggggcagacccacccaccttgcctccaggctctttccttcctggtcctgttctatggtggggctcccttgccagacttcagactgagaagtcagatgaagtttcaagaaaaggaaattggtgggtgacagagatgggtggaggggctggggaaaggctgtttacttcctcctgtctagtcggtttggtccctttagggctccggatatctttggtgacttgtccactccagtgtggcatcatgtggcagctgctcctcccaactgctctgctacttctagtttcagctggcatgcggactgatctcccaaaggctgtggtgttcctggagcctcaatggtacagggtgctcgagaaggacagtgtgactctgaagtgccagggagcctactcccctgaggacaattccacacagtggtttcacaatgagagcctcatctcaagccaggcctcgagctacttcattgacgctgccacagtcgacgacagtggagagtacaggtgccagacaaacctctccaccctcagtgacccggtgcagctagaagtccatatcggctggctgttgctccaggcccctcggtgggtgttcaaggaggaagaccctattcacctgaggtgtcacagctggaagaacactgctctgcataaggtcacatatttacagaatggcaaaggcaggaagtattttcatcataattctgacttctacattccaaaagccacactcaaagacagcggctcctacttctgcagggggctttttgggagtaaaaatgtgtcttcagagactgtgaacatcaccatcactcaaggtttggcagtgtcaaccatctcatcattctttccacctgggtaccaagtctctttctgcttggtgatggtactcctttttgcagtggacacaggactatatttctctgtgaagacaaacattcgaagctcaacaagagactggaaggaccataaatttaaatggagaaaggaccctcaagacaaatgacccccatcccatgggggtaataagagcagtagcagcagcatctctgaacatttctctggatttgcaaccccatcatcctcaggcctctctacaagcagcaggaaacatagaactcagagccagatcccttatccaactctcgacttttccttggtctccagtggaagggaaaagcccatgatcttcaagcagggaagccccagtgagtagctgcattcctagaaattgaagtttcagagctacacaaacactttttctgtcccaaccgttccctcacagcaaagcaacaatacaggctagggatggtaatcctttaaacatacaaaaattgctcgtgttataaattacccagtttagaggggaaaaaaaaacaattattcctaaataaatggataagtagaattaatggttgaggcaggaccatacagagtgtgggaactgctggggatctagggaattcagtgggaccaatgaaagcatggctgagaaatagcaggtagtccaggatagtctaagggaggtgttcccatctgagcccagagataagggtgtcttcctagaacattagccgtagtggaattaacaggaaatcatgagggtgacgtagaattgagtcttccaggggactctatcagaactggaccatctccaagtatataacgatgagtcctcttaatgctaggagtagaaaatggtcctaggaaggggactgaggattgcggtggggggtggggtggaaaagaaagtacagaacaaaccctgtgtcactgtcccaagttgctaagtgaacagaactatctcagcatcagaatgagaaagcctgagaagaaagaaccaaccacaagcacacaggaaggaaagcgcaggaggtgaaaatgctttcttggccagggtagtaagaattagaggttaatgcagggactgtaaaaccaccttttctgcttcaatatctaattcctgtgtagctttgttcattgcatttattaaacaaatgttgtataaccaatactaaatgtactactgagcttcgctgagttaagttatgaaactttcaaatccttcatcatgtcagttccaatgaggtggggatggagaagacaattgttgcttatgaaagaaagctttagctgtctctgttttgtaagctttaagcgcaacatttcttggttccaataaagcattttacaagatcttgcatgctactcttagatagaagatgggaaaaccatggtaataaaatatgaatg

SEQ ID NO: 45125 - DNA, 816 bp, Artificial Sequence
  derived and/or modified sequence
tgaccgctgggtctcaggatttctctggtgacttgtccgttacagtgcggtatcatgtggcaattgctgctgccaactgctcttttactcctcgtgagcgccggaatgcgcacagacctccccaaagctgtcgtgtttttggaaccccagtggtaccgagtgctcgagaaagattctgtcaccttaaagtgccagggcgcgtactcgccagaggataactctacccagtggtttcacaatgaatctctgatcagctctcaggcgagttcttatttcatcgacgctgcgacagtcgatgactccggagagtacagatgccagaccaacttgagcacgttaagcgatccagtgcaattggaggtccacatcggctggttgctgttgcaggccccacggtgggtgttcaaagaggaggatcccattcaccttagatgtcattcctggaaaaataccgctctgcataaggtgacctatctacagaacgggaagggcagaaaatacttccaccataatagcgatttctacattcccaaggcaaccctgaaggatagcgggtcatacttttgtaggggcctgttcggaagtaagaatgtgagtagtgagacggtgaacatcactatcacacaggggctcgccgtatccacaataagcagcttttttccccctggataccaggtgtcattctgcttggtgatggtactcttgttcgccgtcgatactggactatatttctccgttaaaacaaatataagatcatctacacgggattggaaggaccataaatttaagtggcgtaaggatccgcaggacaagtag

SEQ ID NO: 45126 - DNA, 870 bp, Artificial Sequence
  derived and/or modified sequence
atgggtggaggtgctggggagagattatttacgtcttcatgtctggtcggcctggtcccactgggcctgcgaatttccctggtgacctgcccactccagtgtgggatcatgtggcaactcctcttacccactgctctgctacttctggtctcggcggggatgcgcacagatctgcccaaggcagtagtatttcttgagccccagtggtatcgcgttcttgaaaaagacagcgtgactttgaagtgccagggtgcgtacagtcctgaggataatagtacccagtggtttcacaatgagtctctgatcagctcccaggcgagctcctatttcatcgacgctgccactgttgatgatagcggagaatatcgctgccagaccaacttgtcaaccctgtctgatccagtgcaactggaagtgcacattggatggcttcttctacaggctcccaggtgggtgttcaaagaggaggacccaatccacctccgttgccactcatggaaaaataccgccctgcacaaagtgacctatctgcagaatggaaagggtcggaagtacttccaccacaactccgatttctacattccgaaagcgactttaaaggactctgggagttacttttgtcggggtttgtttggcagtaaaaatgtgtcaagtgagacggtgaatattaccatcacccagggactggcagtttccacgatttcaagttttttcccccctggatatcaagtgtccttctgcctggtaatggttttgctcttcgccgtcgatactggcctgtactttagtgtaaagactaacatccggagctcaaccagggactggaaagaccacaaatttaagtggaggaaggatccacaggataagtag

SEQ ID NO: 45127 - DNA, 816 bp, Artificial Sequence
  derived and/or modified sequence
tgacccctgggcctgcgcatcagcctggtgacctgccccctgcagtgtggcatcatgtggcagctgctgctgcccacagccctgctgctgctggtgtctgctggcatgaggacagacctgcccaaggctgtggtgttcctggagccccagtggtacagagtgctggagaaggacagcgtgaccctgaagtgccagggcgcctacagccctgaggacaacagcacccagtggttccacaatgaaagcctcatcagcagccaggccagcagctacttcattgatgctgccaccgtggatgattctggagagtaccgctgccagaccaacctgagcaccctgagtgaccctgtgcagctggaggtgcacatcggctggctgctgctgcaggccccccgctgggtgttcaaggaggaggaccccatccacctgcgctgccacagctggaagaacacagccctgcacaaggtgacctacctgcagaatggaaaaggaaggaagtacttccaccacaacagcgacttctacatccccaaggccaccctgaaggacagcggcagctacttctgccggggcctgtttggcagcaagaatgtgagcagcgagaccgtgaacatcaccatcacccagggcctggccgtgtccaccatcagcagcttcttccccccaggctaccaggtgtccttctgcctggtgatggtgctgctgtttgctgtggacaccggcctgtacttctctgtgaagaccaacatccgcagcagcacccgggactggaaggaccacaagttcaagtggaggaaggacccccaggacaagtag

SEQ ID NO: 45128 - DNA, 870 bp, Artificial Sequence
  derived and/or modified sequence
atgggcggcggggccggggagcggctcttcaccagcagctgcctggtgggcctggtgcccctgggcctgcgcatcagcctggtgacctgccccctgcagtgtggcatcatgtggcagctgctgctgcccacagccctgctgctgctggtgtctgctggcatgaggacagacctgcccaaggctgtggtgttcctggagccccagtggtacagagtgctggagaaggacagcgtgaccctgaagtgccagggcgcctacagccctgaggacaacagcacccagtggttccacaatgaaagcctcatcagcagccaggccagcagctacttcattgatgctgccaccgtggatgattctggagagtaccgctgccagaccaacctgagcaccctgagtgaccctgtgcagctggaggtgcacatcggctggctgctgctgcaggccccccgctgggtgttcaaggaggaggaccccatccacctgcgctgccacagctggaagaacacagccctgcacaaggtgacctacctgcagaatggaaaaggaaggaagtacttccaccacaacagcgacttctacatccccaaggccaccctgaaggacagcggcagctacttctgccggggcctgtttggcagcaagaatgtgagcagcgagaccgtgaacatcaccatcacccagggcctggccgtgtccaccatcagcagcttcttccccccaggctaccaggtgtccttctgcctggtgatggtgctgctgtttgctgtggacaccggcctgtacttctctgtgaagaccaacatccgcagcagcacccgggactggaaggaccacaagttcaagtggaggaaggacccccaggacaagtag

SEQ ID NO: 45129 - DNA, 816 bp, Artificial Sequence
  derived and/or modified sequence
tgacccctgggcctgcggatcagcctggtgacctgccccctgcagtgcggcataatgtggcaattgttactgccgactgcacttctgctgcttgtatccgcgggcatgcgcactgatctgcctaaggcagtcgtgtttctcgaaccccagtggtatagagtactggagaaggacagcgtaacacttaagtgccagggtgcatattctcctgaagacaattctactcagtggttccataacgagtctttaatttcctcccaggcctctagctacttcattgatgcggctacggtcgacgactctggggaatatcgatgtcagactaacctgagtaccctgtcggaccccgtacagctagaggtccacattggctggctgttgcttcaagcgccccgttgggtttttaaggaagaagacccaatccaccttagatgccacagttggaaaaacactgccctccataaagtaacctaccttcagaacggcaaaggacgaaagtacttccatcacaacagtgatttttacattcctaaagctactctgaaggattccggatcctatttttgtaggggcctgttcggttcaaaaaacgtctcttccgagacagtgaatataactattactcagggcttggccgtgagtacaatctcctcgttcttcccgccagggtaccaagtcagtttctgtctcgtgatggttctcctgttcgctgtggacactgggctttattttagtgtgaagaccaacatacggtcctcgaccagagactggaaggaccataaatttaagtggcggaaggatccgcaagataaatag

SEQ ID NO: 45130 - DNA, 870 bp, Artificial Sequence
  derived and/or modified sequence
atgggcggcggcgccggcgagcggctgttcaccagcagctgcctggtcgggctggtgcccctggggttgcgcattagccttgttacttgccctctgcagtgtgggataatgtggcaactactccttcccaccgctctgctgctgctggtaagtgccggtatgcgaaccgatctgccgaaagcagtggtgtttctggagccacaatggtacagggttctggaaaaggacagtgtgactttaaagtgtcagggtgcttacagccccgaggacaactccacacagtggttccacaatgaatccctgatatccagtcaagcgagtagctatttcattgatgctgccacagtggatgactccggagaatatagatgtcagacgaacctcagtaccctctcagatcccgtgcagctggaggtccatatcggctggctcctcctgcaagcgccgcgatgggtcttcaaagaggaggaccctatccacctccggtgccactcctggaagaatacagccctgcacaaggtgacttacctgcaaaatgggaaaggccgcaagtactttcatcataattctgatttctatattccaaaagccacattaaaggattctgggtcctacttctgccggggcctcttcggttcgaaaaacgttagctccgaaaccgtgaatatcaccatcacacagggcctcgccgtctcaacgatctcttccttcttcccgcctggctatcaggtgtcattctgcctggtaatggtactgctcttcgccgtggacaccggcctgtactttagtgttaaaactaacattagatcctccacccgggactggaaagaccacaagtttaagtggcgcaaggacccccaggacaaatag

SEQ ID NO: 45131 - DNA, 816 bp, Artificial Sequence
  derived and/or modified sequence
taaccactagggctccggatcagcctggtgacatgcccactgcagtgtggcatcatgtggcagctgttacttccaaccgccctccttcttctggtatctgctggtatgcggactgacctgccgaaggctgtggtcttcctggagcctcagtggtacagagtgctggaaaaagatagtgttacattgaagtgtcagggggcatatagtcctgaagacaatagtactcagtggttccataacgagagtctgatcagctcacaggcctcctcctatttcatagacgccgcaaccgtcgacgactcaggcgaataccgctgtcagaccaaccttagtaccctttctgatccagtgcagttagaggtgcatattggctggctgctgctccaagccccaaggtgggtgtttaaagaagaggaccctatccatttacgatgccactcatggaagaacaccgctttgcataaggtaacctatcttcagaacggtaaggggaggaagtactttcatcataactctgatttctatatacccaaggccacactcaaagattctggttcatacttctgccgcggtctgtttggctctaagaatgtcagctctgaaaccgttaacatcacaatcacccagggcctcgctgtatccactattagctcatttttccctccagggtatcaagtgtcattctgtttggtcatggttctgctgttcgctgttgacacgggcctctatttctctgtgaagaccaacattagatcatcaaccagggattggaaagaccacaaatttaagtggcggaaagatccacaggacaagtag

SEQ ID NO: 45132 - DNA, 870 bp, Artificial Sequence
  derived and/or modified sequence
atgggcggtggcgcaggcgagagacttttcacgtcttcctgtctcgttgggttggttcctctggggctgcggatttctctggtcacttgtcccctccaatgtggaattatgtggcagcttcttctccctacggccctgctcctgctggtcagcgccggaatgcgcactgacttacccaaggcagtggtcttcctggagcctcagtggtatcgcgtgttagagaaggactctgtgacacttaaatgtcagggcgcatattcgcctgaagataattctactcaatggttccataacgagtcgctgataagctcccaggcttctagctatttcattgatgcagctacagtagacgattccggcgagtacaggtgtcaaaccaacttatcaaccttgtcagatccagtccaacttgaggtacacatagggtggctgcttcttcaggctcccaggtgggtttttaaggaggaagatccaatccacctgcgatgtcattcctggaagaataccgccttacacaaagtgacctacctccagaatggaaaaggcagaaaatacttccatcacaactcagacttctacattccaaaagcgaccttgaaagactctgggtcttacttctgcagaggcctgttcggcagcaaaaatgtctcatctgagactgtgaatattacaatcacccagggtctggctgtctctacaattagcagtttctttccaccaggctaccaggtgtcattctgcctagtgatggtgctgctgttcgctgtagataccgggctgtacttctcagttaagactaacatccgcagctctactagagactggaaagaccataaatttaagtggagaaaagacccacaagataagtag

SEQ ID NO: 45133 - DNA, 816 bp, Artificial Sequence
  derived and/or modified sequence
tgacccctgggcctgagaatcagcctggtgacctgccccctgcagtgcggcatcatgtggcagctgctgctgcccaccgccctgctgctgctggtgagcgccggcatgagaaccgacctgcccaaggccgtggtgttcctggagccccagtggtacagagtgctggagaaggacagcgtgaccctgaagtgccagggcgcctacagccccgaggacaacagcacccagtggttccacaacgagagcctgatcagcagccaggccagcagctacttcatcgacgccgccaccgtggacgacagcggcgagtacagatgccagaccaacctgagcaccctgagcgaccccgtgcagctggaggtgcacatcggctggctgctgctgcaggcccccagatgggtgttcaaggaggaggaccccatccacctgagatgccacagctggaagaacaccgccctgcacaaggtgacctacctgcagaacggcaagggcagaaagtacttccaccacaacagcgacttctacatccccaaggccaccctgaaggacagcggcagctacttctgcagaggcctgttcggcagcaagaacgtgagcagcgagaccgtgaacatcaccatcacccagggcctggccgtgagcaccatcagcagcttcttcccccccggctaccaggtgagcttctgcctggtgatggtgctgctgttcgccgtggacaccggcctgtacttcagcgtgaagaccaacatcagaagcagcaccagagactggaaggaccacaagttcaagtggagaaaggacccccaggacaagtag

SEQ ID NO: 45134 - DNA, 870 bp, Artificial Sequence
  derived and/or modified sequence
atgggcggcggcgccggcgagagactgttcaccagcagctgcctggtgggcctggtgcccctgggcctgagaatcagcctggtgacctgccccctgcagtgcggcatcatgtggcagctgctgctgcccaccgccctgctgctgctggtgagcgccggcatgagaaccgacctgcccaaggccgtggtgttcctggagccccagtggtacagagtgctggagaaggacagcgtgaccctgaagtgccagggcgcctacagccccgaggacaacagcacccagtggttccacaacgagagcctgatcagcagccaggccagcagctacttcatcgacgccgccaccgtggacgacagcggcgagtacagatgccagaccaacctgagcaccctgagcgaccccgtgcagctggaggtgcacatcggctggctgctgctgcaggcccccagatgggtgttcaaggaggaggaccccatccacctgagatgccacagctggaagaacaccgccctgcacaaggtgacctacctgcagaacggcaagggcagaaagtacttccaccacaacagcgacttctacatccccaaggccaccctgaaggacagcggcagctacttctgcagaggcctgttcggcagcaagaacgtgagcagcgagaccgtgaacatcaccatcacccagggcctggccgtgagcaccatcagcagcttcttcccccccggctaccaggtgagcttctgcctggtgatggtgctgctgttcgccgtggacaccggcctgtacttcagcgtgaagaccaacatcagaagcagcaccagagactggaaggaccacaagttcaagtggagaaaggacccccaggacaagtag

SEQ ID NO: 45135 - DNA, 765 bp, Artificial Sequence
  derived and/or modified sequence
atgtggcagctgctcctccctactgctctattgcttctggtgagcgccggtatgagaaccgaggatcttccaaaggctgttgtgtttctagaaccacagtggtaccgcgtattggagaaggattcagttacgctcaaatgccagggggcctattctcccgaggataacagtacccagtggttccacaatgagagcctgatttccagtcaggccagctcctattttatagacgcggccaccgtcgacgattcgggagaatatcgatgccagaccaatctttccacactttccgatccagtccagctcgaagtgcacataggctggctgctgctacaggccccaaggtgggtgttcaaggaagaggatcccatacaccttcgctgtcacagctggaagaatacagccctccacaaggttacctatcttcagaatggaaaggggagaaagtacttccaccacaacagtgatttctacatcccaaaggcaaccttgaaggacagcggatcgtatttctgcagagggttattcgggtcaaaaaatgtctcatcggaaaccgttaacattaccatcacccagggcctcgcggtctccaccataagttctttttttccaccaggttatcaagtatccttttgcctagtgatggtgcttctttttgctgtcgatactggactgtatttcagtgttaagacaaacatcaggtcatccacccgggattggaaggaccataagttcaaatggcggaaggacccccaggataaatag

SEQ ID NO: 45136 - DNA, 765 bp, Artificial Sequence
  derived and/or modified sequence
atgtggcagctgttattacccacagcactgctgctattagtgtcagccggtatgcgcaccgaggacttgccaaaggcggtggttttcttggagcctcagtggtaccgagtgctggagaaagattccgtgacactcaagtgccagggggcctacagtccagaggacaatagtacccaatggttccacaatgagagtctcatctccagtcaggcatcctcatatttcatcgacgcggccacggtcgatgacagcggcgaatatagatgtcagactaacctcagcacgctctccgaccctgttcagctggaggtccatatcggatggctgctgctacaggccccccgctgggtctttaaggaggaagatcccatccatttgcggtgtcatagttggaagaacacagccctgcacaaggtcacgtacttacagaacggcaaaggtcggaaatatttccaccataacagcgatttttatataccaaaagcaaccctcaaagattccgggtcatatttttgtagaggtctgtttggtagcaagaatgtgagtagcgagactgttaacatcacaatcacccaagggctagctgtgagtacaataagttcgttttttccaccgggctatcaggtctcattctgcctcgtgatggttctgttattcgccgtcgacaccggcctgtattttagcgtgaaaaccaacattcgcagcagtaccagagactggaaggatcacaaattcaagtggcgcaaggacccgcaggacaaatag

SEQ ID NO: 45137 - DNA, 765 bp, Artificial Sequence
  derived and/or modified sequence
atgtggcagctactgctgccaacagccttgctcctactcgttagcgccggtatgcgcacggaagatctgccaaaggccgtggtatttctagaaccgcagtggtacagggtgttagaaaaagattccgtcactctgaagtgtcagggcgcctacagccccgaggacaattctacccagtggttccacaacgaaagcctgataagtagtcaggcttcctcatacttcatagatgccgccactgtcgacgattctggtgaataccgctgtcagaccaacctttctacattgagtgatcccgtccagctggaggtacacattggctggcttttgttgcaggctccccgctgggtgttcaaagaagaagatcctatccatctgcgctgccacagttggaagaacaccgctttgcacaaagtcacttacctgcagaatggaaaagggcgcaagtactttcatcataactccgatttctacatacctaaggccacactgaaagatagcggcagctacttctgcaggggcctgtttggctcaaagaacgtgagttcggagaccgtaaacattaccatcacgcagggactggcagtgtcgacaattagtagcttctttccccctgggtatcaagtttctttttgccttgtgatggtgcttctattcgccgtcgatactggcctttatttttccgtgaaaactaatataaggagtagtacgcgagactggaaggatcataaattcaaatggcgcaaggatcctcaggataagtag

SEQ ID NO: 45138 - DNA, 765 bp, Artificial Sequence
  derived and/or modified sequence
atgtggcagctgctgctgcccacagccctgctgctgctggtgtctgctggcatgaggacagaggacctgcccaaggctgtggtgttcctggagccccagtggtacagagtgctggagaaggacagcgtgaccctgaagtgccagggcgcctacagccctgaggacaacagcacccagtggttccacaatgaaagcctcatcagcagccaggccagcagctacttcattgatgctgccaccgtggatgacagcggggagtaccgctgccagaccaacctgagcaccctgagtgaccctgtgcagctggaggtgcacatcggctggctgctgctgcaggccccccgctgggtgttcaaggaggaggaccccatccacctgcgctgccacagctggaagaacacagccctgcacaaggtgacctacctgcagaatggcaagggcaggaagtacttccaccacaacagcgacttctacatccccaaggccaccctgaaggacagcggcagctacttctgccggggcctgtttggcagcaagaatgtgtccagtgaaacagtgaacatcaccatcacccagggcctggccgtgtccaccatcagcagcttcttccccccaggctaccaggtgtccttctgcctggtgatggtgctgctgtttgctgtggacaccggcctgtacttctctgtgaagaccaacatccgcagcagcacccgggactggaaggaccacaagttcaagtggaggaaggacccccaggacaagtag

SEQ ID NO: 45139 - DNA, 765 bp, Artificial Sequence
  derived and/or modified sequence
atgtggcagctgctgctgcccaccgccctgctgctgctggtgagcgcagggatgcggactgaggacttacctaaagctgtcgtgttcctggagccccaatggtaccgggtgctggagaaggactcagtgaccctgaagtgccagggtgcatatagccctgaggacaacagtactcagtggtttcataatgagagcttgatctccagccaggctagctcatatttcatcgatgctgccacagtggatgactcaggcgagtatagatgccagacaaaccttagtaccctgagtgaccccgttcaattagaggttcatataggctggctactcctccaggcccctaggtgggtttttaaggaggaggaccctatccacctccggtgtcatagctggaaaaatacagccctgcacaaagtgacatacctacagaacgggaaagggcgcaagtacttccaccataactctgatttttatatcccaaaagcaactctcaaagactctggctcctacttttgtcggggactgtttggaagcaaaaacgtctcaagcgaaactgtcaatatcacaataactcagggcctggctgtgtctactatcagcagtttcttcccccctgggtatcaggtgtccttttgtcttgtcatggtacttttgttcgctgtggacacagggctttatttttccgttaaaaccaacattcggtctagcacaagggattggaaggaccacaaatttaagtggcgtaaggatccccaggacaaatag

SEQ ID NO: 45140 - DNA, 765 bp, Artificial Sequence
  derived and/or modified sequence
atgtggcagctgctgctgcccaccgccctgctgctgctggtgagcgccgggatgagaactgaggacctgcctaaagccgttgtgttcctagagcctcaatggtacagagtactggagaaggactcagtcactctgaaatgccagggtgcctatagcccggaggataactccacccaatggtttcataacgaaagcttaatatccagtcaggcctcttcctatttcattgacgctgcaacggtagacgacagcggcgaatatagatgccagactaatttgagtactctttctgaccccgtgcagcttgaagtccacataggctggttactattgcaagccccgcgctgggtctttaaagaggaagaccctattcacctgagatgccattcttggaagaacacagctctgcacaaggtcacatatcttcagaacggcaaaggtaggaagtatttccatcataattcggatttttacatccctaaggctaccttgaaggacagcggttcttacttctgccgggggctgtttgggagcaagaacgtttcaagcgaaactgtgaacatcacaatcacacagggccttgccgttagtacgattagctccttcttcccccctggttatcaggtgtctttttgcctggttatggtcctcctgtttgccgtggacaccgggctttatttctccgtgaagacaaacatcaggagtagcacgcgcgattggaaggatcacaagttcaagtggaggaaagatccacaggataagtag

SEQ ID NO: 45141 - DNA, 765 bp, Artificial Sequence
  derived and/or modified sequence
atgtggcagctgctgctgcccaccgccctgctgctgctggtgagcgcaggcatgagaacagaagatctccctaaagcagttgtttttctggaaccgcagtggtatcgcgtcctggagaaggatagcgttacattaaaatgccagggggcatattcccctgaagacaattcaacccagtggtttcacaacgaaagcctgatctcctcccaggcaagctcatactttattgatgcggccacggtggacgacagcggcgagtacagatgtcagacaaatctgtccactcttagcgaccccgtgcagttggaagtccatatcggctggttgctgctgcaggcgccccggtgggttttcaaggaggaagaccccatccatttacgttgtcactcgtggaagaacaccgccctgcacaaggttacctacctacagaatggcaaaggtagaaaatattttcatcacaactccgatttttacatacctaaggccacactcaaggacagcggatcatacttctgtcgcggcctgttcggaagtaagaacgtttccagcgaaacggtgaatattactattacgcaggggctggctgtctccaccatctcatcattttttccacccggataccaggtctcattttgtctcgtgatggtactcctgttcgccgtggacaccggcctctacttttctgtgaagactaacatcagatctagtactcgtgattggaaagatcacaagttcaagtggaggaaggacccccaggataagtag

SEQ ID NO: 45142 - DNA, 765 bp, Artificial Sequence
  derived and/or modified sequence
atgtggcagctcctgctccctacagcattattgctgctcgtgtctgccggaatgagaactgaggaccttcccaaggccgtagtgttcctggagccacaatggtaccgcgtgctcgaaaaggacagtgtgacactcaagtgtcagggtgcctactcaccagaggacaacagcacccagtggttccataacgagtcattaatcagcagccaggcctctagctatttcatcgacgcagcaaccgtggacgactccggggagtatagatgccaaaccaacttgagcacactgtccgacccagtccagcttgaagtccacatcggctggctgctgctccaggccccacgatgggttttcaaggaggaagatcctattcatctacgttgccatagctggaaaaacaccgcacttcataaggtgacgtacctacagaacggcaaagggagaaagtacttccatcataattcagatttctatatccccaaagcgaccttaaaggacagcgggtcatacttctgccggggactgtttggtagcaaaaatgtgagttctgagaccgttaatattaccattacccaggggttggcagtcagcaccataagttctttcttccccccaggctaccaggtttctttttgcctagtgatggtgctgttattcgcagtggataccgggctatacttcagcgtgaaaaccaacatcagatcgagtacgcgcgactggaaggaccataaattcaagtggagaaaggatccccaagataagtag

SEQ ID NO: 45143 - DNA, 765 bp, Artificial Sequence
  derived and/or modified sequence
atgtggcagctgctccttcccactgcgctgctgctgttagtatccgcagggatgcggacagaggatctgccaaaggccgtggtgttcttagagcctcagtggtacagggttctggagaaggatagtgtaacactgaaatgccaaggggcttactcccctgaggacaactccacgcagtggtttcacaacgagagcttgatttcatcccaagccagcagctactttatagacgccgcaactgtggatgacagcggtgagtatcgctgccaaactaacctgtccacgctgagcgatcctgtccagcttgaggtccacataggctggctgttgcttcaggctccgcgttgggtgttcaaggaagaggatccaatccacttgagatgtcacagttggaagaatactgccctgcacaaagtgacctacctgcagaatggtaaggggcgaaagtattttcatcacaattccgacttctacatacctaaggccacacttaaagattctggctcttatttctgtaggggactgtttggaagtaagaatgtcagttctgagacagtgaacattacaatcacgcaaggtctggcggtttcgactattagctccttctttccgcctggctaccaagtgtctttttgcctggtcatggttctcctgtttgctgtcgatactggattgtactttagcgtaaagacaaacattagatcgagtaccagagactggaaggaccataagttcaaatggcgtaaagatccccaggacaaatag

SEQ ID NO: 45144 - DNA, 765 bp, Artificial Sequence
  derived and/or modified sequence
atgtggcagctgctcctgccaacggccttgttgttgttagttagcgccggaatgagaactgaggatctgccaaaggcagtcgtgtttctggaaccgcagtggtatcgggtgctcgaaaaagactcggtgacactgaagtgccagggcgcatacagtcccgaagacaacagcactcagtggtttcacaacgagtcacttatttcatctcaggcgagcagctacttcatcgatgcggcaacggtagatgattctggcgaataccgttgccagaccaacctgagtacactcagcgaccctgtgcagcttgaggttcatatcggatggctgttactgcaggccccaagatgggtgtttaaggaggaagatcccatacacctgcgttgtcacagctggaagaatacagcgctccacaaggtgacatacctccaaaatgggaaaggacggaaatatttccaccataactctgatttttacatcccaaaagccacacttaaagattctggctcttacttctgcagagggttgtttggctcaaagaacgtgagctccgagacagttaacatcacaataacccagggcctggcagtcagcactattagctcctttttccctcctggctaccaggtcagcttctgtctggtcatggtactgttattcgccgtggacacagggttgtatttttcagttaagactaatattagatcttcaaccagagattggaaagatcataagtttaaatggagaaaagatcctcaggacaagtag

SEQ ID NO: 45145 - DNA, 765 bp, Artificial Sequence
  derived and/or modified sequence
atgtggcagctgctgctgcccaccgccctgctgctgctggtgagcgccggcatgagaaccgaggacctgcccaaggccgtggtgttcctggagccccagtggtacagagtgctggagaaggacagcgtgaccctgaagtgccagggcgcctacagccccgaggacaacagcacccagtggttccacaacgagagcctgatcagcagccaggccagcagctacttcatcgacgccgccaccgtggacgacagcggcgagtacagatgccagaccaacctgagcaccctgagcgaccccgtgcagctggaggtgcacatcggctggctgctgctgcaggcccccagatgggtgttcaaggaggaggaccccatccacctgagatgccacagctggaagaacaccgccctgcacaaggtgacctacctgcagaacggcaagggcagaaagtacttccaccacaacagcgacttctacatccccaaggccaccctgaaggacagcggcagctacttctgcagaggcctgttcggcagcaagaacgtgagcagcgagaccgtgaacatcaccatcacccagggcctggccgtgagcaccatcagcagcttcttcccccccggctaccaggtgagcttctgcctggtgatggtgctgctgttcgccgtggacaccggcctgtacttcagcgtgaagaccaacatcagaagcagcaccagagactggaaggaccacaagttcaagtggagaaaggacccccaggacaagtag

SEQ ID NO: 45146 - protein, 105 aa, Artificial Sequence
  derived and/or modified sequence
MWQLLLPTALLLLVSAGMRTDLPKAVVFLEPQWYRVLEKDSVTLKCQGAYSPEDNSTQWFHNESLISSQASSYFIDAATVDDSGEYRCQTNLSTLSDPVQLEVHI

SEQ ID NO: 45147 - DNA, 318 bp, Artificial Sequence
  derived and/or modified sequence
atgtggcagctgctgcttccaacagccttactcctccttgtgtcagccggcatgaggacggacctgcccaaggccgtggtgtttctcgagccgcagtggtacagggttctggagaaggactctgtcacgctgaaatgtcagggcgcctattctcctgaagacaacagcactcagtggttccataacgagtctttgatctcgtcacaggcatcttcctattttattgacgccgccaccgtggatgattccggagagtatcgttgtcagaccaacttgagcaccctgtccgaccctgtgcagctggaggtacacatttag

SEQ ID NO: 45148 - DNA, 318 bp, Artificial Sequence
  derived and/or modified sequence
atgtggcagctgctgctgcccacagccctgctgctgctggtgtctgctggcatgaggacagacctgcccaaggctgtggtgttcctggagccccagtggtacagagtgctggagaaggacagcgtgaccctgaagtgccagggcgcctacagccctgaggacaacagcacccagtggttccacaatgaaagcctcatcagcagccaggccagcagctacttcattgatgctgccaccgtggatgattctggagagtaccgctgccagaccaacctgagcaccctgagtgaccctgtgcagctggaggtgcacatctag

SEQ ID NO: 45149 - DNA, 318 bp, Artificial Sequence
  derived and/or modified sequence
atgtggcagctgctgctgcccaccgccctgctgctgctggtgagcgctggaatgcgtactgacctgccgaaggcagtcgtcttcctggagccacagtggtacagggtgctggagaaggatagtgtcacactcaaatgtcagggggcgtactctcctgaggacaatagcactcagtggtttcacaatgaaagtctgatatctagccaagcctcatcgtactttattgatgccgccacggtcgacgatagtggtgagtatagatgccaaaccaacttgagcactctgagcgacccagtccagctcgaagtccacatatag

SEQ ID NO: 45150 - DNA, 318 bp, Artificial Sequence
  derived and/or modified sequence
atgtggcagctcctcttgcctactgccctcctgttgctggtctcagcgggtatgcgaacagacttgccaaaagctgttgtgttcctggagccccagtggtatcgcgtgttggagaaggatagcgtcactctcaagtgtcaaggagcttacagccccgaggataattcaactcagtggtttcacaacgagagtctgattagcagccaggcctcctcttacttcattgatgctgccaccgtggatgattctggcgagtacagatgtcagacgaacctgagtaccctgagcgatccagtacaactggaggtgcatatctag

SEQ ID NO: 45151 - DNA, 318 bp, Artificial Sequence
  derived and/or modified sequence
atgtggcagctgctgctgcccaccgccctgctgctgctggtgagcgccggcatgagaaccgacctgcccaaggccgtggtgttcctggagccccagtggtacagagtgctggagaaggacagcgtgaccctgaagtgccagggcgcctacagccccgaggacaacagcacccagtggttccacaacgagagcctgatcagcagccaggccagcagctacttcatcgacgccgccaccgtggacgacagcggcgagtacagatgccagaccaacctgagcaccctgagcgaccccgtgcagctggaggtgcacatctag

SEQ ID NO: 45152 - protein, 180 aa, Artificial Sequence
  derived and/or modified sequence
MGIPMGKSMLVLLTFLAFASCCIAAYRPSETLCGGELVDTLQFVCGDRGFYFSRPASRVSRRSRGIVEECCFRSCDLALLETYCATPAKSERDVSTPPTVLPDNFPRYPVGKFFQYDTWKQSTQRLRRGLPALLRARRGHVLAKELEAFREAKRHRPLIALPTQDPAHGGAPPEMASNRK

SEQ ID NO: 45153 - protein, 183 aa, Artificial Sequence
  derived and/or modified sequence
MGIPMGKSMLVLLTFLAFASCCIAAYRPSETLCGGELVDTLQFVCGDRGFYFRLPGRPASRVSRRSRGIVEECCFRSCDLALLETYCATPAKSERDVSTPPTVLPDNFPRYPVGKFFQYDTWKQSTQRLRRGLPALLRARRGHVLAKELEAFREAKRHRPLIALPTQDPAHGGAPPEMASNRK

SEQ ID NO: 45154 - protein, 236 aa, Artificial Sequence
  derived and/or modified sequence
MVSPDPQIIVVAPETELASMQVQRTEDGVTIIQIFWVGRKGELLRRTPVSSAMQTPMGIPMGKSMLVLLTFLAFASCCIAAYRPSETLCGGELVDTLQFVCGDRGFYFSRPASRVSRRSRGIVEECCFRSCDLALLETYCATPAKSERDVSTPPTVLPDNFPRYPVGKFFQYDTWKQSTQRLRRGLPALLRARRGHVLAKELEAFREAKRHRPLIALPTQDPAHGGAPPEMASNRK

SEQ ID NO: 45155 - DNA, 5156 bp, Artificial Sequence
  derived and/or modified sequence
ccgctaatgtaccatgccctggtgctggaaagtgcctgagccagctgccccagcggcctcagcactaccaagttggcacaaagctccccaaattcggaggggctcagggaaacgagtggaggggatgaggaggtgaggggtaaacccatcatttcagttggcatttgagcaggtgccatgctcagcggagatgaggctctcccatctgtaggggccgtattaacatgcacactctaaaagtgcccttcgtttctccagcctcagctttgtccctctcctcctccacgtcaacctggccagagggtctggacgccacagccagggcaccccctgctttggtggtgactgctaatattggccaggccggcggatcatcgtccaggcagtttcggcagagagccttgggcaccagtgactccccggtcctctttatccactgtccaggagctgcggggactgcgcagggactagagtacaggggccgaagagtcaccaccgagcttgtgtgggaggaggtggattccagcccccagccccagggctctgaatcgctgccagctcagccccctgcccagcctgccccacagcctgagccccagcaggccagagagcccagtcctgaggtgagctgctgtggcctgtggcccaggcgaccccagcgctcccagaactgaggctggcagccagccccagcctcagccccaactgcgaggcagagagacaccaatgggaatcccaatggggaagtcgatgctggtgcttctcaccttcttggccttcgcctcgtgctgcattgctgcttaccgccccagtgagaccctgtgcggcggggagctggtggacaccctccagttcgtctgtggggaccgcggcttctacttcagcaggcccgcaagccgtgtgagccgtcgcagccgtggcatcgttgaggagtgctgtttccgcagctgtgacctggccctcctggagacgtactgtgctacccccgccaagtccgagagggacgtgtcgacccctccgaccgtgcttccggacaacttccccagataccccgtgggcaagttcttccaatatgacacctggaagcagtccacccagcgcctgcgcaggggcctgcctgccctcctgcgtgcccgccggggtcacgtgctcgccaaggagctcgaggcgttcagggaggccaaacgtcaccgtcccctgattgctctacccacccaagaccccgcccacgggggcgcccccccagagatggccagcaatcggaagtgagcaaaactgccgcaagtctgcagcccggcgccaccatcctgcagcctcctcctgaccacggacgtttccatcaggttccatcccgaaaatctctcggttccacgtccccctggggcttctcctgacccagtccccgtgccccgcctccccgaaacaggctactctcctcggccccctccatcgggctgaggaagcacagcagcatcttcaaacatgtacaaaatcgattggctttaaacacccttcacataccctccccccaaattatccccaattatccccacacataaaaaatcaaaacattaaactaacccccttcccccccccccacaacaaccctcttaaaactaattggctttttagaaacaccccacaaaagctcagaaattggctttaaaaaaaacaaccaccaaaaaaaatcaattggctaaaaaaaaaaagtattaaaaacgaattggctgagaaacaattggcaaaataaaggaatttggcactccccacccccctctttctcttctcccttggactttgagtcaaattggcctggacttgagtccctgaaccagcaaagagaaaagaaggaccccagaaatcacaggtgggcacgtcgctgctaccgccatctcccttctcacgggaattttcagggtaaactggccatccgaaaatagcaacaacccagactggctcctcactcccttttccatcactaaaaatcacagagcagtcagagggacccagtaagaccaaaggaggggaggacagagcatgaaaaccaaaatccatgcaaatgaaatgtaattggcacgaccctcacccccaaatcttacatctcaattcccatcctaaaaagcactcatactttatgcatccccgcagctacacacacacaacacacagcacacgcatgaacacagcacacacacgagcacagcacacacacaaacgcacagcacacacagcacacagatgagcacacagcacacacacaaacgcacagcacacacacgcacacacatgcacacacagcacacaaacgcacggcacacacacgcacacacatgcacacacagcacacacacaaacgcacagcacacacaaacgcacagcacacacgcacacacagcacacacacgagcacacagcacacaaacgcacagcacacgcacacacatgcacacacagcacacacactagcacacagcacacacacaaagacacagcacacacatgcacacacagcacacacacgcgaacacagcacacacgaacacagcacacacagcacacacacaaacacagcacacacatgcacacagcacacgcacacacagcacacacatgaacacagcacacagcacacacatgcacacacagcacacacgcatgcacagcacacatgaacacagcacacacacaaacacacagcacacacatgcacacacagcacacacactcatgcgcagcacatacatgaacacagctcacagcacacaaacacgcagcacacacgttgcacacgcaagcacccacctgcacacacacatgcgcacacacacgcacacccccacaaaattggatgaaaacaataagcatatctaagcaactacgatatctgtatggatcaggccaaagtcccgctaagattctccaatgttttcatggtctgagccccgctcctgttcccatctccactgcccctcggccctgtctgtgccctgcctctcagaggagggggctcagatggtgcggcctgagtgtgcggccggcggcatttgggatacacccgtagggtgggcggggtgtgtcccaggcctaattccatctttccaccatgacagagatgcccttgtgaggctggcctccttggcgcctgtccccacggcccccgcagcgtgagccacgatgctccccataccccacccattcccgatacaccttacttactgtgtgttggcccagccagagtgaggaaggagtttggccacattggagatggcggtagctgagcagacatgcccccacgagtagcctgactccctggtgtgctcctggaaggaagatcttggggacccccccaccggagcacacctagggatcatctttgcccgtctcctggggaccccccaagaaatgtggagtcctcgggggccgtgcactgatgcggggagtgtgggaagtctggcggttggaggggtgggtggggggcagtgggggctgggcggggggagttctggggtaggaagtggtcccgggagattttggatggaaaagtcaggaggattgacagcagacttgcagaattacatagagaaattaggaacccccaaatttcatgtcaattgatctattccccctctttgtttcttggggcatttttccttttttttttttttttgttttttttttacccctccttagctttatgcgctcagaaaccaaattaaaccccccccccatgtaacaggggggcagtgacaaaagcaagaacgcacgaagccagcctggagaccaccacgtcctgccccccgccatttatcgccctgattggattttgtttttcatctgtccctgttgcttgggttgagttgagggtggagcctcctggggggcactggccactgagcccccttggagaagtcagaggggagtggagaaggccactgtccggcctggcttctggggacagtggctggtccccagaagtcctgagggcggaggggggggttgggcagggtctcctcaggtgtcaggagggtgctcggaggccacaggagggggctcctggctggcctgaggctggccggaggggaaggggctagcaggtgtgtaaacagagggttccatcaggctggggcagggtggccgccttccgcacacttgaggaaccctcccctctccctcggtgacatcttgcccgcccctcagcaccctgccttgtctccaggaggtccgaagctctgtgggacctcttgggggcaaggtggggtgaggccggggagtagggaggtcaggcgggtctgagcccacagagcaggagagctgccaggtctgcccatcgaccaggttgcttgggccccggagcccacgggtctggtgatgccatagcagccaccaccgcggcgcctagggctgcggcagggactcggcctctgggaggtttacctcgcccccacttgtgcccccagctcagcccccctgcacgcagcccgactagcagtctagaggcctgaggcttctgggtcctggtgacggggctggcatgaccccgggggtcgtccatgccagtccgcctcagtcgcagagggtccctcggcaagcgccctgtgagtgggccattcggaacattggacagaagcccaaagagccaaattgtcacaattgtggaacccacattggcctgagatccaaaacgcttcgaggcaccccaaattacctgcccattcgtcaggacacccacccacccagtgttatattctgcctcgccggagtgggtgttcccgggggcacttgccgaccagccccttgcgtccccaggtttgcagctctcccctgggccactaaccatcctggcccgggctgcctgtctgacctccgtgcctagtcgtggctctccatcttgtctcctccccgtgtccccaatgtcttcagtggggggccccctcttgggtcccctcctctgccatcacctgaagacccccacgccaaacactgaatgtcacctgtgcctgccgcctcggtccaccttgcggcccgtgtttgactcaactcaactcctttaacgctaatatttccggcaaaatcccatgcttgggttttgtctttaaccttgtaacgcttgcaatcccaataaagcattaaaagtcatgaaaaaaaaaaaaaaaaaa

SEQ ID NO: 45156 - DNA, 4856 bp, Artificial Sequence
  derived and/or modified sequence
ggccgcgcgccctcaggacgtggacagggagggcttccccgtgtccaggaaagcgaccgggcattgcccccagtctcccccaaatttgggcattgtccccgggtcttccaacggactgggcgttgctcccggacactgaggactggccccggggtctcgctcaccttcagcagcgtccaccgcctgccacagagcgttcgatcgctcgctgcctgagctcctggtgcgcccgcggacgcagcctccagcttcgcggagatggtttccccagacccccaaattatcgtggtggcccccgagaccgaactcgcgtctatgcaagtccaacgcactgaggacggggtaaccattatccagatattttgggtgggccgcaaaggcgagctacttagacgcaccccggtgagctcggccatgcagacaccaatgggaatcccaatggggaagtcgatgctggtgcttctcaccttcttggccttcgcctcgtgctgcattgctgcttaccgccccagtgagaccctgtgcggcggggagctggtggacaccctccagttcgtctgtggggaccgcggcttctacttcagcaggcccgcaagccgtgtgagccgtcgcagccgtggcatcgttgaggagtgctgtttccgcagctgtgacctggccctcctggagacgtactgtgctacccccgccaagtccgagagggacgtgtcgacccctccgaccgtgcttccggacaacttccccagataccccgtgggcaagttcttccaatatgacacctggaagcagtccacccagcgcctgcgcaggggcctgcctgccctcctgcgtgcccgccggggtcacgtgctcgccaaggagctcgaggcgttcagggaggccaaacgtcaccgtcccctgattgctctacccacccaagaccccgcccacgggggcgcccccccagagatggccagcaatcggaagtgagcaaaactgccgcaagtctgcagcccggcgccaccatcctgcagcctcctcctgaccacggacgtttccatcaggttccatcccgaaaatctctcggttccacgtccccctggggcttctcctgacccagtccccgtgccccgcctccccgaaacaggctactctcctcggccccctccatcgggctgaggaagcacagcagcatcttcaaacatgtacaaaatcgattggctttaaacacccttcacataccctccccccaaattatccccaattatccccacacataaaaaatcaaaacattaaactaacccccttcccccccccccacaacaaccctcttaaaactaattggctttttagaaacaccccacaaaagctcagaaattggctttaaaaaaaacaaccaccaaaaaaaatcaattggctaaaaaaaaaaagtattaaaaacgaattggctgagaaacaattggcaaaataaaggaatttggcactccccacccccctctttctcttctcccttggactttgagtcaaattggcctggacttgagtccctgaaccagcaaagagaaaagaaggaccccagaaatcacaggtgggcacgtcgctgctaccgccatctcccttctcacgggaattttcagggtaaactggccatccgaaaatagcaacaacccagactggctcctcactcccttttccatcactaaaaatcacagagcagtcagagggacccagtaagaccaaaggaggggaggacagagcatgaaaaccaaaatccatgcaaatgaaatgtaattggcacgaccctcacccccaaatcttacatctcaattcccatcctaaaaagcactcatactttatgcatccccgcagctacacacacacaacacacagcacacgcatgaacacagcacacacacgagcacagcacacacacaaacgcacagcacacacagcacacagatgagcacacagcacacacacaaacgcacagcacacacacgcacacacatgcacacacagcacacaaacgcacggcacacacacgcacacacatgcacacacagcacacacacaaacgcacagcacacacaaacgcacagcacacacgcacacacagcacacacacgagcacacagcacacaaacgcacagcacacgcacacacatgcacacacagcacacacactagcacacagcacacacacaaagacacagcacacacatgcacacacagcacacacacgcgaacacagcacacacgaacacagcacacacagcacacacacaaacacagcacacacatgcacacagcacacgcacacacagcacacacatgaacacagcacacagcacacacatgcacacacagcacacacgcatgcacagcacacatgaacacagcacacacacaaacacacagcacacacatgcacacacagcacacacactcatgcgcagcacatacatgaacacagctcacagcacacaaacacgcagcacacacgttgcacacgcaagcacccacctgcacacacacatgcgcacacacacgcacacccccacaaaattggatgaaaacaataagcatatctaagcaactacgatatctgtatggatcaggccaaagtcccgctaagattctccaatgttttcatggtctgagccccgctcctgttcccatctccactgcccctcggccctgtctgtgccctgcctctcagaggagggggctcagatggtgcggcctgagtgtgcggccggcggcatttgggatacacccgtagggtgggcggggtgtgtcccaggcctaattccatctttccaccatgacagagatgcccttgtgaggctggcctccttggcgcctgtccccacggcccccgcagcgtgagccacgatgctccccataccccacccattcccgatacaccttacttactgtgtgttggcccagccagagtgaggaaggagtttggccacattggagatggcggtagctgagcagacatgcccccacgagtagcctgactccctggtgtgctcctggaaggaagatcttggggacccccccaccggagcacacctagggatcatctttgcccgtctcctggggaccccccaagaaatgtggagtcctcgggggccgtgcactgatgcggggagtgtgggaagtctggcggttggaggggtgggtggggggcagtgggggctgggcggggggagttctggggtaggaagtggtcccgggagattttggatggaaaagtcaggaggattgacagcagacttgcagaattacatagagaaattaggaacccccaaatttcatgtcaattgatctattccccctctttgtttcttggggcatttttccttttttttttttttttgttttttttttacccctccttagctttatgcgctcagaaaccaaattaaaccccccccccatgtaacaggggggcagtgacaaaagcaagaacgcacgaagccagcctggagaccaccacgtcctgccccccgccatttatcgccctgattggattttgtttttcatctgtccctgttgcttgggttgagttgagggtggagcctcctggggggcactggccactgagcccccttggagaagtcagaggggagtggagaaggccactgtccggcctggcttctggggacagtggctggtccccagaagtcctgagggcggaggggggggttgggcagggtctcctcaggtgtcaggagggtgctcggaggccacaggagggggctcctggctggcctgaggctggccggaggggaaggggctagcaggtgtgtaaacagagggttccatcaggctggggcagggtggccgccttccgcacacttgaggaaccctcccctctccctcggtgacatcttgcccgcccctcagcaccctgccttgtctccaggaggtccgaagctctgtgggacctcttgggggcaaggtggggtgaggccggggagtagggaggtcaggcgggtctgagcccacagagcaggagagctgccaggtctgcccatcgaccaggttgcttgggccccggagcccacgggtctggtgatgccatagcagccaccaccgcggcgcctagggctgcggcagggactcggcctctgggaggtttacctcgcccccacttgtgcccccagctcagcccccctgcacgcagcccgactagcagtctagaggcctgaggcttctgggtcctggtgacggggctggcatgaccccgggggtcgtccatgccagtccgcctcagtcgcagagggtccctcggcaagcgccctgtgagtgggccattcggaacattggacagaagcccaaagagccaaattgtcacaattgtggaacccacattggcctgagatccaaaacgcttcgaggcaccccaaattacctgcccattcgtcaggacacccacccacccagtgttatattctgcctcgccggagtgggtgttcccgggggcacttgccgaccagccccttgcgtccccaggtttgcagctctcccctgggccactaaccatcctggcccgggctgcctgtctgacctccgtgcctagtcgtggctctccatcttgtctcctccccgtgtccccaatgtcttcagtggggggccccctcttgggtcccctcctctgccatcacctgaagacccccacgccaaacactgaatgtcacctgtgcctgccgcctcggtccaccttgcggcccgtgtttgactcaactcaactcctttaacgctaatatttccggcaaaatcccatgcttgggttttgtctttaaccttgtaacgcttgcaatcccaataaagcattaaaagtcatgaaaaaaaaaaaaaaaaaa

SEQ ID NO: 45157 - DNA, 5182 bp, Artificial Sequence
  derived and/or modified sequence
cgcctgtccccctcccgaggcccgggctcgcgacggcagagggctccgtcggcccaaaccgagctgggcgcccgcggtccgggtgcagcctccactccgccccccagtcaccgcctcccccggcccctcgacgtggcgcccttccctccgcttctctgtgctccccgcgcccctcttggcgtctggccccggcccccgctctttctcccgcaaccttcccttcgctccctcccgtcccccccagctcctagcctccgactccctccccccctcacgcccgccctctcgccttcgccgaaccaaagtggattaattacacgctttctgtttctctccgtgctgttctctcccgctgtgcgcctgcccgcctctcgctgtcctctctccccctcgccctctcttcggcccccccctttcacgttcactctgtctctcccactatctctgcccccctctatccttgatacaacagctgacctcatttcccgataccttttcccccccgaaaagtacaacatctggcccgccccagcccgaagacagcccgtcctccctggacaatcagacgaattctccccccccccccaaaaaaaagccatccccccgctctgccccgtcgcacattcggcccccgcgactcggccagagcggcgctggcagaggagtgtccggcaggagggccaacgcccgctgttcggtttgcgacacgcagcagggaggtgggcggcagcgtcgccggcttccagacaccaatgggaatcccaatggggaagtcgatgctggtgcttctcaccttcttggccttcgcctcgtgctgcattgctgcttaccgccccagtgagaccctgtgcggcggggagctggtggacaccctccagttcgtctgtggggaccgcggcttctacttcagcaggcccgcaagccgtgtgagccgtcgcagccgtggcatcgttgaggagtgctgtttccgcagctgtgacctggccctcctggagacgtactgtgctacccccgccaagtccgagagggacgtgtcgacccctccgaccgtgcttccggacaacttccccagataccccgtgggcaagttcttccaatatgacacctggaagcagtccacccagcgcctgcgcaggggcctgcctgccctcctgcgtgcccgccggggtcacgtgctcgccaaggagctcgaggcgttcagggaggccaaacgtcaccgtcccctgattgctctacccacccaagaccccgcccacgggggcgcccccccagagatggccagcaatcggaagtgagcaaaactgccgcaagtctgcagcccggcgccaccatcctgcagcctcctcctgaccacggacgtttccatcaggttccatcccgaaaatctctcggttccacgtccccctggggcttctcctgacccagtccccgtgccccgcctccccgaaacaggctactctcctcggccccctccatcgggctgaggaagcacagcagcatcttcaaacatgtacaaaatcgattggctttaaacacccttcacataccctccccccaaattatccccaattatccccacacataaaaaatcaaaacattaaactaacccccttcccccccccccacaacaaccctcttaaaactaattggctttttagaaacaccccacaaaagctcagaaattggctttaaaaaaaacaaccaccaaaaaaaatcaattggctaaaaaaaaaaagtattaaaaacgaattggctgagaaacaattggcaaaataaaggaatttggcactccccacccccctctttctcttctcccttggactttgagtcaaattggcctggacttgagtccctgaaccagcaaagagaaaagaaggaccccagaaatcacaggtgggcacgtcgctgctaccgccatctcccttctcacgggaattttcagggtaaactggccatccgaaaatagcaacaacccagactggctcctcactcccttttccatcactaaaaatcacagagcagtcagagggacccagtaagaccaaaggaggggaggacagagcatgaaaaccaaaatccatgcaaatgaaatgtaattggcacgaccctcacccccaaatcttacatctcaattcccatcctaaaaagcactcatactttatgcatccccgcagctacacacacacaacacacagcacacgcatgaacacagcacacacacgagcacagcacacacacaaacgcacagcacacacagcacacagatgagcacacagcacacacacaaacgcacagcacacacacgcacacacatgcacacacagcacacaaacgcacggcacacacacgcacacacatgcacacacagcacacacacaaacgcacagcacacacaaacgcacagcacacacgcacacacagcacacacacgagcacacagcacacaaacgcacagcacacgcacacacatgcacacacagcacacacactagcacacagcacacacacaaagacacagcacacacatgcacacacagcacacacacgcgaacacagcacacacgaacacagcacacacagcacacacacaaacacagcacacacatgcacacagcacacgcacacacagcacacacatgaacacagcacacagcacacacatgcacacacagcacacacgcatgcacagcacacatgaacacagcacacacacaaacacacagcacacacatgcacacacagcacacacactcatgcgcagcacatacatgaacacagctcacagcacacaaacacgcagcacacacgttgcacacgcaagcacccacctgcacacacacatgcgcacacacacgcacacccccacaaaattggatgaaaacaataagcatatctaagcaactacgatatctgtatggatcaggccaaagtcccgctaagattctccaatgttttcatggtctgagccccgctcctgttcccatctccactgcccctcggccctgtctgtgccctgcctctcagaggagggggctcagatggtgcggcctgagtgtgcggccggcggcatttgggatacacccgtagggtgggcggggtgtgtcccaggcctaattccatctttccaccatgacagagatgcccttgtgaggctggcctccttggcgcctgtccccacggcccccgcagcgtgagccacgatgctccccataccccacccattcccgatacaccttacttactgtgtgttggcccagccagagtgaggaaggagtttggccacattggagatggcggtagctgagcagacatgcccccacgagtagcctgactccctggtgtgctcctggaaggaagatcttggggacccccccaccggagcacacctagggatcatctttgcccgtctcctggggaccccccaagaaatgtggagtcctcgggggccgtgcactgatgcggggagtgtgggaagtctggcggttggaggggtgggtggggggcagtgggggctgggcggggggagttctggggtaggaagtggtcccgggagattttggatggaaaagtcaggaggattgacagcagacttgcagaattacatagagaaattaggaacccccaaatttcatgtcaattgatctattccccctctttgtttcttggggcatttttccttttttttttttttttgttttttttttacccctccttagctttatgcgctcagaaaccaaattaaaccccccccccatgtaacaggggggcagtgacaaaagcaagaacgcacgaagccagcctggagaccaccacgtcctgccccccgccatttatcgccctgattggattttgtttttcatctgtccctgttgcttgggttgagttgagggtggagcctcctggggggcactggccactgagcccccttggagaagtcagaggggagtggagaaggccactgtccggcctggcttctggggacagtggctggtccccagaagtcctgagggcggaggggggggttgggcagggtctcctcaggtgtcaggagggtgctcggaggccacaggagggggctcctggctggcctgaggctggccggaggggaaggggctagcaggtgtgtaaacagagggttccatcaggctggggcagggtggccgccttccgcacacttgaggaaccctcccctctccctcggtgacatcttgcccgcccctcagcaccctgccttgtctccaggaggtccgaagctctgtgggacctcttgggggcaaggtggggtgaggccggggagtagggaggtcaggcgggtctgagcccacagagcaggagagctgccaggtctgcccatcgaccaggttgcttgggccccggagcccacgggtctggtgatgccatagcagccaccaccgcggcgcctagggctgcggcagggactcggcctctgggaggtttacctcgcccccacttgtgcccccagctcagcccccctgcacgcagcccgactagcagtctagaggcctgaggcttctgggtcctggtgacggggctggcatgaccccgggggtcgtccatgccagtccgcctcagtcgcagagggtccctcggcaagcgccctgtgagtgggccattcggaacattggacagaagcccaaagagccaaattgtcacaattgtggaacccacattggcctgagatccaaaacgcttcgaggcaccccaaattacctgcccattcgtcaggacacccacccacccagtgttatattctgcctcgccggagtgggtgttcccgggggcacttgccgaccagccccttgcgtccccaggtttgcagctctcccctgggccactaaccatcctggcccgggctgcctgtctgacctccgtgcctagtcgtggctctccatcttgtctcctccccgtgtccccaatgtcttcagtggggggccccctcttgggtcccctcctctgccatcacctgaagacccccacgccaaacactgaatgtcacctgtgcctgccgcctcggtccaccttgcggcccgtgtttgactcaactcaactcctttaacgctaatatttccggcaaaatcccatgcttgggttttgtctttaaccttgtaacgcttgcaatcccaataaagcattaaaagtcatgaaaaaaaaaaaaaaaaaa

SEQ ID NO: 45158 - DNA, 711 bp, Artificial Sequence
  derived and/or modified sequence
atggtgagccccgacccccagatcatcgtggtggcccccgagaccgagctggccagcatgcaggtgcagagaaccgaggacggcgtgaccatcatccagatcttctgggtgggcagaaagggcgagctgctgagaagaacccccgtgagcagcgccatgcagacccccatgggcatccccatgggcaagagcatgctggtgctgctgaccttcctggccttcgccagctgctgcatcgccgcctacagacccagcgagaccctgtgcggcggcgagctggtggacaccctgcagttcgtgtgcggcgacagaggcttctacttcagcagacccgccagcagagtgagcagaagaagcagaggcatcgtggaggagtgctgcttcagaagctgcgacctggccctgctggagacctactgcgccacccccgccaagagcgagagagacgtgagcaccccccccaccgtgctgcccgacaacttccccagataccccgtgggcaagttcttccagtacgacacctggaagcagagcacccagagactgagaagaggcctgcccgccctgctgagagccagaagaggccacgtgctggccaaggagctggaggccttcagagaggccaagagacacagacccctgatcgccctgcccacccaggaccccgcccacggcggcgccccccccgagatggccagcaacagaaagtag

SEQ ID NO: 45159 - DNA, 711 bp, Artificial Sequence
  derived and/or modified sequence
atggtctccccagacccgcaaattattgtggttgcccctgagacggaactggctagcatgcaggtgcagcgcaccgaggacggcgtgacaattattcagatcttctgggtcggccgcaaaggcgaactactgcgcaggactcctgtgagtagtgcgatgcagactcctatgggtatcccgatgggcaagagcatgctcgtactgctgacgtttttagcatttgcgtcttgttgtatcgccgcttatcggcccagtgagacactgtgcggaggtgagcttgttgacacccttcagttcgtttgcggggacaggggcttctattttagccggccagcttcccgagtgagtcgccggtcccggggtattgtggaagaatgctgcttccgcagctgcgacctcgcacttctcgagacatattgtgcaactccagctaagagtgagcgtgacgtgagcactcctcccaccgtcttgcccgataatttccctcgctaccctgtgggaaagttctttcagtacgatacctggaaacagtcaacccagaggctgagacgtgggttgcctgcactgctcagggctagacggggccatgttctcgccaaggagcttgaggcttttcgcgaggccaagcggcacagaccactcattgcactccctacccaagatccggcccacggcggcgcaccccccgagatggcctctaatcgcaaatag

SEQ ID NO: 45160 - DNA, 711 bp, Artificial Sequence
  derived and/or modified sequence
atggtgtccccagacccccagatcatcgtggtggcccctgagacagagctggcctccatgcaggtgcagaggacagaagatggagtgaccatcatccagatcttctgggtgggcaggaagggggagctgctgcggaggacccctgtgtcctctgccatgcagacccccatgggcatccccatgggcaagtccatgctggtgctgctgaccttcctggcctttgccagctgctgcatcgccgcctaccggcccagcgagaccctgtgtggcggggagctggtggacaccctgcagtttgtgtgtggggaccggggcttctacttcagcaggcctgccagccgggtgtccagaagaagccggggcatcgtggaggagtgctgcttccgcagctgtgacctggccctgctggagacctactgtgccaccccagccaagtcagaaagagatgtgtccaccccacccaccgtgctgcctgacaacttcccccgctaccctgtgggcaagttcttccagtatgacacctggaagcagagcacccagaggctgcggcggggcctgcctgccctgctgcgggcccggcggggccacgtgctggccaaggagctggaggccttccgggaggccaagaggcaccggcccctgattgccctgcccacccaggaccctgcccacggcggggcccctcctgagatggccagcaacaggaagtag

SEQ ID NO: 45161 - DNA, 5138 bp, Artificial Sequence
  derived and/or modified sequence
ccgctaatgtaccatgccctggtgctggaaagtgcctgagccagctgccccagcggcctcagcactaccaagttggcacaaagctccccaaattcggaggggctcagggaaacgagtggaggggatgaggaggtgaggggtaaacccatcatttcagttggcatttgagcaggtgccatgctcagcggagatgaggctctcccatctgtaggggccgtattaacatgcacactctaaaagtgcccttcgtttctccagcctcagctttgtccctctcctcctccacgtcaacctggccagagggtctggacgccacagccagggcaccccctgctttggtggtgactgctaatattggccaggccggcggatcatcgtccaggcagtttcggcagagagccttgggcaccagtgactccccggtcctctttatccactgtccaggagctgcggggactgcgcagggactagagtacaggggccgaagagtcaccaccgagcttgtgtgggaggaggtggattccagcccccagccccagggctctgaatcgctgccagctcagccccctgcccagcctgccccacagcctgagccccagcaggccagagagcccagtcctgaggtgagctgctgtggcctgtggcccaggcgaccccagcgctcccagaactgaggctggcagccagccccagcctcagccccaactgcgaggcagagagacaccaatgggaatcccaatggggaagtcgatgctggtgcttctcaccttcttggccttcgcctcgtgctgcattgctgcttaccgccccagtgagaccctgtgcggcggggagctggtggacaccctccagttcgtctgtggggaccgcggcttctacttcagcaggcccgcaagccgtgtgagccgtcgcagccgtggcatcgttgaggagtgctgtttccgcagctgtgacctggccctcctggagacgtactgtgctacccccgccaagtccgagagggacgtgtcgacccctccgaccgtgcttccggacaacttccccagataccccgtgggcaagttcttccaatatgacacctggaagcagtccacccagcgcctgcgcaggggcctgcctgccctcctgcgtgcccgccggggtcacgtgctcgccaaggagctcgaggcgttcagggaggccaaacgtcaccgtcccctgattgctctacccacccaagaccccgcccacgggggcgcccccccagagatggccagcaatcggaagtgagcaaaactgccgcaagtctgcagcccggcgccaccatcctgcagcctcctcctgaccacggacgtttccatcaggttccatcccgaaaatctctcggttccacgtccccctggggcttctcctgacccagtccccgtgccccgcctccccgaaacaggctactctcctcggccccctccatcgggctgaggaagcacagcagcatcttcaaacatgtacaaaatcgattggctttaaacacccttcacataccctccccccaaattatccccaattatccccacacataaaaaatcaaaacattaaactaacccccttcccccccccccacaacaaccctcttaaaactaattggctttttagaaacaccccacaaaagctcagaaattggctttaaaaaaaacaaccaccaaaaaaaatcaattggctaaaaaaaaaaagtattaaaaacgaattggctgagaaacaattggcaaaataaaggaatttggcactccccacccccctctttctcttctcccttggactttgagtcaaattggcctggacttgagtccctgaaccagcaaagagaaaagaaggaccccagaaatcacaggtgggcacgtcgctgctaccgccatctcccttctcacgggaattttcagggtaaactggccatccgaaaatagcaacaacccagactggctcctcactcccttttccatcactaaaaatcacagagcagtcagagggacccagtaagaccaaaggaggggaggacagagcatgaaaaccaaaatccatgcaaatgaaatgtaattggcacgaccctcacccccaaatcttacatctcaattcccatcctaaaaagcactcatactttatgcatccccgcagctacacacacacaacacacagcacacgcatgaacacagcacacacacgagcacagcacacacacaaacgcacagcacacacagcacacagatgagcacacagcacacacacaaacgcacagcacacacacgcacacacatgcacacacagcacacaaacgcacggcacacacacgcacacacatgcacacacagcacacacacaaacgcacagcacacacaaacgcacagcacacacgcacacacagcacacacacgagcacacagcacacaaacgcacagcacacgcacacacatgcacacacagcacacacactagcacacagcacacacacaaagacacagcacacacatgcacacacagcacacacacgcgaacacagcacacacgaacacagcacacacagcacacacacaaacacagcacacacatgcacacagcacacgcacacacagcacacacatgaacacagcacacagcacacacatgcacacacagcacacacgcatgcacagcacacatgaacacagcacacacacaaacacacagcacacacatgcacacacagcacacacactcatgcgcagcacatacatgaacacagctcacagcacacaaacacgcagcacacacgttgcacacgcaagcacccacctgcacacacacatgcgcacacacacgcacacccccacaaaattggatgaaaacaataagcatatctaagcaactacgatatctgtatggatcaggccaaagtcccgctaagattctccaatgttttcatggtctgagccccgctcctgttcccatctccactgcccctcggccctgtctgtgccctgcctctcagaggagggggctcagatggtgcggcctgagtgtgcggccggcggcatttgggatacacccgtagggtgggcggggtgtgtcccaggcctaattccatctttccaccatgacagagatgcccttgtgaggctggcctccttggcgcctgtccccacggcccccgcagcgtgagccacgatgctccccataccccacccattcccgatacaccttacttactgtgtgttggcccagccagagtgaggaaggagtttggccacattggagatggcggtagctgagcagacatgcccccacgagtagcctgactccctggtgtgctcctggaaggaagatcttggggacccccccaccggagcacacctagggatcatctttgcccgtctcctggggaccccccaagaaatgtggagtcctcgggggccgtgcactgatgcggggagtgtgggaagtctggcggttggaggggtgggtggggggcagtgggggctgggcggggggagttctggggtaggaagtggtcccgggagattttggatggaaaagtcaggaggattgacagcagacttgcagaattacatagagaaattaggaacccccaaatttcatgtcaattgatctattccccctctttgtttcttggggcatttttccttttttttttttttttgttttttttttacccctccttagctttatgcgctcagaaaccaaattaaaccccccccccatgtaacaggggggcagtgacaaaagcaagaacgcacgaagccagcctggagaccaccacgtcctgccccccgccatttatcgccctgattggattttgtttttcatctgtccctgttgcttgggttgagttgagggtggagcctcctggggggcactggccactgagcccccttggagaagtcagaggggagtggagaaggccactgtccggcctggcttctggggacagtggctggtccccagaagtcctgagggcggaggggggggttgggcagggtctcctcaggtgtcaggagggtgctcggaggccacaggagggggctcctggctggcctgaggctggccggaggggaaggggctagcaggtgtgtaaacagagggttccatcaggctggggcagggtggccgccttccgcacacttgaggaaccctcccctctccctcggtgacatcttgcccgcccctcagcaccctgccttgtctccaggaggtccgaagctctgtgggacctcttgggggcaaggtggggtgaggccggggagtagggaggtcaggcgggtctgagcccacagagcaggagagctgccaggtctgcccatcgaccaggttgcttgggccccggagcccacgggtctggtgatgccatagcagccaccaccgcggcgcctagggctgcggcagggactcggcctctgggaggtttacctcgcccccacttgtgcccccagctcagcccccctgcacgcagcccgactagcagtctagaggcctgaggcttctgggtcctggtgacggggctggcatgaccccgggggtcgtccatgccagtccgcctcagtcgcagagggtccctcggcaagcgccctgtgagtgggccattcggaacattggacagaagcccaaagagccaaattgtcacaattgtggaacccacattggcctgagatccaaaacgcttcgaggcaccccaaattacctgcccattcgtcaggacacccacccacccagtgttatattctgcctcgccggagtgggtgttcccgggggcacttgccgaccagccccttgcgtccccaggtttgcagctctcccctgggccactaaccatcctggcccgggctgcctgtctgacctccgtgcctagtcgtggctctccatcttgtctcctccccgtgtccccaatgtcttcagtggggggccccctcttgggtcccctcctctgccatcacctgaagacccccacgccaaacactgaatgtcacctgtgcctgccgcctcggtccaccttgcggcccgtgtttgactcaactcaactcctttaacgctaatatttccggcaaaatcccatgcttgggttttgtctttaaccttgtaacgcttgcaatcccaataaagcattaaaagtcatg

SEQ ID NO: 45162 - DNA, 1047 bp, Artificial Sequence
  derived and/or modified sequence
caggggccgaagagtcaccaccgagcttgtgtgggaggaggtggattccagcccccagccccagggctctgaatcgctgccagctcagccccctgcccagcctgccccacagcctgagccccagcaggccagagagcccagtcctgaggtgagctgctgtggcctgtggcccaggcgaccccagcgctcccagaactgaggctggcagccagccccagcctcagccccaactgcgaggcagagagacaccaatgggaatcccaatggggaagtcgatgctggtgcttctcaccttcttggccttcgcctcgtgctgcattgctgcttaccgccccagtgagaccctgtgcggcggggagctggtggacaccctccagttcgtctgtggggaccgcggcttctacttcagcaggcccgcaagccgtgtgagccgtcgcagccgtggcatcgttgaggagtgctgtttccgcagctgtgacctggccctcctggagacgtactgtgctacccccgccaagtccgagagggacgtgtcgacccctccgaccgtgcttccggacaacttccccagataccccgtgggcaagttcttccaatatgacacctggaagcagtccacccagcgcctgcgcaggggcctgcctgccctcctgcgtgcccgccggggtcacgtgctcgccaaggagctcgaggcgttcagggaggccaaacgtcaccgtcccctgattgctctacccacccaagaccccgcccacgggggcgcccccccagagatggccagcaatcggaagtgagcaaaactgccgcaagtctgcagcccggcgccaccatcctgcagcctcctcctgaccacggacgtttccatcaggttccatcccgaaaatctctcggttccacgtccccctggggcttctcctgacccagtccccgtgccccgcctccccgaaacaggctactctcctcggccccctccatcgggctgaggaagcacagcagcatcttcaaacatgtacaaaatcgattggctttaaacacccttcacatacc

SEQ ID NO: 45163 - DNA, 5136 bp, Artificial Sequence
  derived and/or modified sequence
agccctccaggacaggctgcatcagaagaggccatcaagcagatcactgtccttctgccatggccctgtggatgcgcctcctgcccctgctggcgctgctggccctctggggacctgacccagccgcagcctttgtgaaccaacacctgtgcggctcacacctggtggaagctctctacctagtgtgcggggaacgaggcttcttctacacacccaagacccgccgggaggcagaggacctgcaggcctcagctttgtccctctcctcctccacgtcaacctggccagagggtctggacgccacagccagggcaccccctgctttggtggtgactgctaatattggccaggccggcggatcatcgtccaggcagtttcggcagagagccttgggcaccagtgactccccggtcctctttatccactgtccaggagctgcggggactgcgcagggactagagtacaggggccgaagagtcaccaccgagcttgtgtgggaggaggtggattccagcccccagccccagggctctgaatcgctgccagctcagccccctgcccagcctgccccacagcctgagccccagcaggccagagagcccagtcctgaggtgagctgctgtggcctgtggcccaggcgaccccagcgctcccagaactgaggctggcagccagccccagcctcagccccaactgcgaggcagagagccagacaccaatgggaatcccaatggggaagtcgatgctggtgcttctcaccttcttggccttcgcctcgtgctgcattgctgcttaccgccccagtgagaccctgtgcggcggggagctggtggacaccctccagttcgtctgtggggaccgcggcttctacttcagacttccaggcaggcccgcaagccgtgtgagccgtcgcagccgtggcatcgttgaggagtgctgtttccgcagctgtgacctggccctcctggagacgtactgtgctacccccgccaagtccgagagggacgtgtcgacccctccgaccgtgcttccggacaacttccccagataccccgtgggcaagttcttccaatatgacacctggaagcagtccacccagcgcctgcgcaggggcctgcctgccctcctgcgtgcccgccggggtcacgtgctcgccaaggagctcgaggcgttcagggaggccaaacgtcaccgtcccctgattgctctacccacccaagaccccgcccacgggggcgcccccccagagatggccagcaatcggaagtgagcaaaactgccgcaagtctgcagcccggcgccaccatcctgcagcctcctcctgaccacggacgtttccatcaggttccatcccgaaaatctctcggttccacgtccccctggggcttctcctgacccagtccccgtgccccgcctccccgaaacaggctactctcctcggccccctccatcgggctgaggaagcacagcagcatcttcaaacatgtacaaaatcgattggctttaaacacccttcacataccctccccccaaattatccccaattatccccacacataaaaaatcaaaacattaaactaacccccttcccccccccccacaacaaccctcttaaaactaattggctttttagaaacaccccacaaaagctcagaaattggctttaaaaaaaacaaccaccaaaaaaaatcaattggctaaaaaaaaaaagtattaaaaacgaattggctgagaaacaattggcaaaataaaggaatttggcactccccacccccctctttctcttctcccttggactttgagtcaaattggcctggacttgagtccctgaaccagcaaagagaaaagaaggaccccagaaatcacaggtgggcacgtcgctgctaccgccatctcccttctcacgggaattttcagggtaaactggccatccgaaaatagcaacaacccagactggctcctcactcccttttccatcactaaaaatcacagagcagtcagagggacccagtaagaccaaaggaggggaggacagagcatgaaaaccaaaatccatgcaaatgaaatgtaattggcacgaccctcacccccaaatcttacatctcaattcccatcctaaaaagcactcatactttatgcatccccgcagctacacacacacaacacacagcacacgcatgaacacagcacacacacgagcacagcacacacacaaacgcacagcacacacagcacacagatgagcacacagcacacacacaaacgcacagcacacacacgcacacacatgcacacacagcacacaaacgcacggcacacacacgcacacacatgcacacacagcacacacacaaacgcacagcacacacaaacgcacagcacacacgcacacacagcacacacacgagcacacagcacacaaacgcacagcacacgcacacacatgcacacacagcacacacactagcacacagcacacacacaaagacacagcacacacatgcacacacagcacacacacgcgaacacagcacacacgaacacagcacacacagcacacacacaaacacagcacacacatgcacacagcacacgcacacacagcacacacatgaacacagcacacagcacacacatgcacacacagcacacacgcatgcacagcacacatgaacacagcacacacacaaacacacagcacacacatgcacacacagcacacacactcatgcgcagcacatacatgaacacagctcacagcacacaaacacgcagcacacacgttgcacacgcaagcacccacctgcacacacacatgcgcacacacacgcacacccccacaaaattggatgaaaacaataagcatatctaagcaactacgatatctgtatggatcaggccaaagtcccgctaagattctccaatgttttcatggtctgagccccgctcctgttcccatctccactgcccctcggccctgtctgtgccctgcctctcagaggagggggctcagatggtgcggcctgagtgtgcggccggcggcatttgggatacacccgtagggtgggcggggtgtgtcccaggcctaattccatctttccaccatgacagagatgcccttgtgaggctggcctccttggcgcctgtccccacggcccccgcagcgtgagccacgatgctccccataccccacccattcccgatacaccttacttactgtgtgttggcccagccagagtgaggaaggagtttggccacattggagatggcggtagctgagcagacatgcccccacgagtagcctgactccctggtgtgctcctggaaggaagatcttggggacccccccaccggagcacacctagggatcatctttgcccgtctcctggggaccccccaagaaatgtggagtcctcgggggccgtgcactgatgcggggagtgtgggaagtctggcggttggaggggtgggtggggggcagtgggggctgggcggggggagttctggggtaggaagtggtcccgggagattttggatggaaaagtcaggaggattgacagcagacttgcagaattacatagagaaattaggaacccccaaatttcatgtcaattgatctattccccctctttgtttcttggggcatttttccttttttttttttttttgttttttttttacccctccttagctttatgcgctcagaaaccaaattaaaccccccccccatgtaacaggggggcagtgacaaaagcaagaacgcacgaagccagcctggagaccaccacgtcctgccccccgccatttatcgccctgattggattttgtttttcatctgtccctgttgcttgggttgagttgagggtggagcctcctggggggcactggccactgagcccccttggagaagtcagaggggagtggagaaggccactgtccggcctggcttctggggacagtggctggtccccagaagtcctgagggcggaggggggggttgggcagggtctcctcaggtgtcaggagggtgctcggaggccacaggagggggctcctggctggcctgaggctggccggaggggaaggggctagcaggtgtgtaaacagagggttccatcaggctggggcagggtggccgccttccgcacacttgaggaaccctcccctctccctcggtgacatcttgcccgcccctcagcaccctgccttgtctccaggaggtccgaagctctgtgggacctcttgggggcaaggtggggtgaggccggggagtagggaggtcaggcgggtctgagcccacagagcaggagagctgccaggtctgcccatcgaccaggttgcttgggccccggagcccacgggtctggtgatgccatagcagccaccaccgcggcgcctagggctgcggcagggactcggcctctgggaggtttacctcgcccccacttgtgcccccagctcagcccccctgcacgcagcccgactagcagtctagaggcctgaggcttctgggtcctggtgacggggctggcatgaccccgggggtcgtccatgccagtccgcctcagtcgcagagggtccctcggcaagcgccctgtgagtgggccattcggaacattggacagaagcccaaagagccaaattgtcacaattgtggaacccacattggcctgagatccaaaacgcttcgaggcaccccaaattacctgcccattcgtcaggacacccacccacccagtgttatattctgcctcgccggagtgggtgttcccgggggcacttgccgaccagccccttgcgtccccaggtttgcagctctcccctgggccactaaccatcctggcccgggctgcctgtctgacctccgtgcctagtcgtggctctccatcttgtctcctccccgtgtccccaatgtcttcagtggggggccccctcttgggtcccctcctctgccatcacctgaagacccccacgccaaacactgaatgtcacctgtgcctgccgcctcggtccaccttgcggcccgtgtttgactcaactcaactcctttaacgctaatatttccggcaaaatcccatgcttgggttttgtctttaaccttgtaacgcttgcaatcccaataaagcattaaaagtc

SEQ ID NO: 45164 - DNA, 828 bp, Artificial Sequence
  derived and/or modified sequence
aactggacattagcttctcctgtgaaagagacttccagcttcctcctcctcctcttcctcctcctcctcctgccccagcgagccttctgctgagctacaccaatgggaatcccaatggggaagtcgatgctggtgcttctcaccttcttggccttcgcctcgtgctgcattgctgcttaccgccccagtgagaccctgtgcggcggggagctggtggacaccctccagttcgtctgtggggaccgcggcttctacttcagacttccaggcaggcccgcaagccgtgtgagccgtcgcagccgtggcatcgttgaggagtgctgtttccgcagctgtgacctggccctcctggagacgtactgtgctacccccgccaagtccgagagggacgtgtcgacccctccgaccgtgcttccggacaacttccccagataccccgtgggcaagttcttccaatatgacacctggaagcagtccacccagcgcctgcgcaggggcctgcctgccctcctgcgtgcccgccggggtcacgtgctcgccaaggagctcgaggcgttcagggaggccaaacgtcaccgtcccctgattgctctacccacccaagaccccgcccacgggggcgcccccccagagatggccagcaatcggaagtgagcaaaactgccgcaagtctgcagcccggcgccaccatcctgcagcctcctcctgaccacggacgtttccatcaggttccatcccgaaaatctctcggttccacgtccccctggggcttctcctgacccagtccccgtgccccgcctccccgaaacaggctactctcctcggccc

SEQ ID NO: 45165 - DNA, 1005 bp, Artificial Sequence
  derived and/or modified sequence
aactggacattagcttctcctgtgaaagagacttccagcttcctcctcctcctcttcctcctcctcctcctgccccagcgagccttctgctgagctgtagacaccaatgggaatcccaatggggaagtcgatgctggtgcttctcaccttcttggccttcgcctcgtgctgcattgctgcttaccgccccagtgagaccctgtgcggcggggagctggtggacaccctccagttcgtctgtggggaccgcggcttctacttcagacttccaggcaggcccgcaagccgtgtgagccgtcgcagccgtggcatcgttgaggagtgctgtttccgcagctgtgacctggccctcctggagacgtactgtgctacccccgccaagtccgagagggacgtgtcgacccctccgaccgtgcttccggacaacttccccagataccccgtgggcaagttcttccaatatgacacctggaagcagtccacccagcgcctgcgcaggggcctgcctgccctcctgcgtgcccgccggggtcacgtgctcgccaaggagctcgaggcgttcagggaggccaaacgtcaccgtcccctgattgctctacccacccaagaccccgcccacgggggcgcccccccagagatggccagcaatcggaagtgagcaaaactgccgcaagtctgcagcccggcgccaccatcctgcagcctcctcctgaccacggacgtttccatcaggttccatcccgaaaatctctcggttccacgtccccctggggcttctcctgacccagtccccgtgccccgcctccccgaaacaggctactctcctcggccccctccatcgggctgaggaagcacagcagcatcttcaaacatgtacaaaatcgattggctttaaacacccttcacataccctccccccaaattatccccaattatccccacacataaaaaatcaaaacattaaactaacccccttcccccccccccacaacaaccctcttaaaa

SEQ ID NO: 45166 - DNA, 4527 bp, Artificial Sequence
  derived and/or modified sequence
gcaaactggacattagcttctcctgtgaaagagacttccagcttcctcctcctcctcttcctcctcctcctcctgccccagcgagccttctgctgagctgtagacaccaatgggaatcccaatggggaagtcgatgctggtgcttctcaccttcttggccttcgcctcgtgctgcattgctgcttaccgccccagtgagaccctgtgcggcggggagctggtggacaccctccagttcgtctgtggggaccgcggcttctacttcagcaggcccgcaagccgtgtgagccgtcgcagccgtggcatcgttgaggagtgctgtttccgcagctgtgacctggccctcctggagacgtactgtgctacccccgccaagtccgagagggacgtgtcgacccctccgaccgtgcttccggacaacttccccagataccccgtgggcaagttcttccaatatgacacctggaagcagtccacccagcgcctgcgcaggggcctgcctgccctcctgcgtgcccgccggggtcacgtgctcgccaaggagctcgaggcgttcagggaggccaaacgtcaccgtcccctgattgctctacccacccaagaccccgcccacgggggcgcccccccagagatggccagcaatcggaagtgagcaaaactgccgcaagtctgcagcccggcgccaccatcctgcagcctcctcctgaccacggacgtttccatcaggttccatcccgaaaatctctcggttccacgtccccctggggcttctcctgacccagtccccgtgccccgcctccccgaaacaggctactctcctcggccccctccatcgggctgaggaagcacagcagcatcttcaaacatgtacaaaatcgattggctttaaacacccttcacataccctccccccaaattatccccaattatccccacacataaaaaatcaaaacattaaactaacccccttcccccccccccacaacaaccctcttaaaactaattggctttttagaaacaccccacaaaagctcagaaattggctttaaaaaaaacaaccaccaaaaaaaatcaattggctaaaaaaaaaaagtattaaaaacgaattggctgagaaacaattggcaaaataaaggaatttggcactccccacccccctctttctcttctcccttggactttgagtcaaattggcctggacttgagtccctgaaccagcaaagagaaaagaaggaccccagaaatcacaggtgggcacgtcgctgctaccgccatctcccttctcacgggaattttcagggtaaactggccatccgaaaatagcaacaacccagactggctcctcactcccttttccatcactaaaaatcacagagcagtcagagggacccagtaagaccaaaggaggggaggacagagcatgaaaaccaaaatccatgcaaatgaaatgtaattggcacgaccctcacccccaaatcttacatctcaattcccatcctaaaaagcactcatactttatgcatccccgcagctacacacacacaacacacagcacacgcatgaacacagcacacacacgagcacagcacacacacaaacgcacagcacacacagcacacagatgagcacacagcacacacacaaacgcacagcacacacacgcacacacatgcacacacagcacacaaacgcacggcacacacacgcacacacatgcacacacagcacacacacaaacgcacagcacacacaaacgcacagcacacacgcacacacagcacacacacgagcacacagcacacaaacgcacagcacacgcacacacatgcacacacagcacacacactagcacacagcacacacacaaagacacagcacacacatgcacacacagcacacacacgcgaacacagcacacacgaacacagcacacacagcacacacacaaacacagcacacacatgcacacagcacacgcacacacagcacacacatgaacacagcacacagcacacacatgcacacacagcacacacgcatgcacagcacacatgaacacagcacacacacaaacacacagcacacacatgcacacacagcacacacactcatgcgcagcacatacatgaacacagctcacagcacacaaacacgcagcacacacgttgcacacgcaagcacccacctgcacacacacatgcgcacacacacgcacacccccacaaaattggatgaaaacaataagcatatctaagcaactacgatatctgtatggatcaggccaaagtcccgctaagattctccaatgttttcatggtctgagccccgctcctgttcccatctccactgcccctcggccctgtctgtgccctgcctctcagaggagggggctcagatggtgcggcctgagtgtgcggccggcggcatttgggatacacccgtagggtgggcggggtgtgtcccaggcctaattccatctttccaccatgacagagatgcccttgtgaggctggcctccttggcgcctgtccccacggcccccgcagcgtgagccacgatgctccccataccccacccattcccgatacaccttacttactgtgtgttggcccagccagagtgaggaaggagtttggccacattggagatggcggtagctgagcagacatgcccccacgagtagcctgactccctggtgtgctcctggaaggaagatcttggggacccccccaccggagcacacctagggatcatctttgcccgtctcctggggaccccccaagaaatgtggagtcctcgggggccgtgcactgatgcggggagtgtgggaagtctggcggttggaggggtgggtggggggcagtgggggctgggcggggggagttctggggtaggaagtggtcccgggagattttggatggaaaagtcaggaggattgacagcagacttgcagaattacatagagaaattaggaacccccaaatttcatgtcaattgatctattccccctctttgtttcttggggcatttttccttttttttttttttttgttttttttttacccctccttagctttatgcgctcagaaaccaaattaaaccccccccccatgtaacaggggggcagtgacaaaagcaagaacgcacgaagccagcctggagaccaccacgtcctgccccccgccatttatcgccctgattggattttgtttttcatctgtccctgttgcttgggttgagttgagggtggagcctcctggggggcactggccactgagcccccttggagaagtcagaggggagtggagaaggccactgtccggcctggcttctggggacagtggctggtccccagaagtcctgagggcggaggggggggttgggcagggtctcctcaggtgtcaggagggtgctcggaggccacaggagggggctcctggctggcctgaggctggccggaggggaaggggctagcaggtgtgtaaacagagggttccatcaggctggggcagggtggccgccttccgcacacttgaggaaccctcccctctccctcggtgacatcttgcccgcccctcagcaccctgccttgtctccaggaggtccgaagctctgtgggacctcttgggggcaaggtggggtgaggccggggagtagggaggtcaggcgggtctgagcccacagagcaggagagctgccaggtctgcccatcgaccaggttgcttgggccccggagcccacgggtctggtgatgccatagcagccaccaccgcggcgcctagggctgcggcagggactcggcctctgggaggtttacctcgcccccacttgtgcccccagctcagcccccctgcacgcagcccgactagcagtctagaggcctgaggcttctgggtcctggtgacggggctggcatgaccccgggggtcgtccatgccagtccgcctcagtcgcagagggtccctcggcaagcgccctgtgagtgggccattcggaacattggacagaagcccaaagagccaaattgtcacaattgtggaacccacattggcctgagatccaaaacgcttcgaggcaccccaaattacctgcccattcgtcaggacacccacccacccagtgttatattctgcctcgccggagtgggtgttcccgggggcacttgccgaccagccccttgcgtccccaggtttgcagctctcccctgggccactaaccatcctggcccgggctgcctgtctgacctccgtgcctagtcgtggctctccatcttgtctcctccccgtgtccccaatgtcttcagtggggggccccctcttgggtcccctcctctgccatcacctgaagacccccacgccaaacactgaatgtcacctgtgcctgccgcctcggtccaccttgcggcccgtgtttgactcaactcaactcctttaacgctaatatttccggcaaaatcccatgcttgggttttgtctttaaccttgtaacgcttgcaatcccaataaagcattaaaagtcatgatcttc

SEQ ID NO: 45167 - DNA, 5179 bp, Artificial Sequence
  derived and/or modified sequence
cgcctgtccccctcccgaggcccgggctcgcgacggcagagggctccgtcggcccaaaccgagctgggcgcccgcggtccgggtgcagcctccactccgccccccagtcaccgcctcccccggcccctcgacgtggcgcccttccctccgcttctctgtgctccccgcgcccctcttggcgtctggccccggcccccgctctttctcccgcaaccttcccttcgctccctcccgtcccccccagctcctagcctccgactccctccccccctcacgcccgccctctcgccttcgccgaaccaaagtggattaattacacgctttctgtttctctccgtgctgttctctcccgctgtgcgcctgcccgcctctcgctgtcctctctccccctcgccctctcttcggcccccccctttcacgttcactctgtctctcccactatctctgcccccctctatccttgatacaacagctgacctcatttcccgataccttttcccccccgaaaagtacaacatctggcccgccccagcccgaagacagcccgtcctccctggacaatcagacgaattctccccccccccccaaaaaaaagccatccccccgctctgccccgtcgcacattcggcccccgcgactcggccagagcggcgctggcagaggagtgtccggcaggagggccaacgcccgctgttcggtttgcgacacgcagcagggaggtgggcggcagcgtcgccggcttccagacaccaatgggaatcccaatggggaagtcgatgctggtgcttctcaccttcttggccttcgcctcgtgctgcattgctgcttaccgccccagtgagaccctgtgcggcggggagctggtggacaccctccagttcgtctgtggggaccgcggcttctacttcagacttccaggcaggcccgcaagccgtgtgagccgtcgcagccgtggcatcgttgaggagtgctgtttccgcagctgtgacctggccctcctggagacgtactgtgctacccccgccaagtccgagagggacgtgtcgacccctccgaccgtgcttccggacaacttccccagataccccgtgggcaagttcttccaatatgacacctggaagcagtccacccagcgcctgcgcaggggcctgcctgccctcctgcgtgcccgccggggtcacgtgctcgccaaggagctcgaggcgttcagggaggccaaacgtcaccgtcccctgattgctctacccacccaagaccccgcccacgggggcgcccccccagagatggccagcaatcggaagtgagcaaaactgccgcaagtctgcagcccggcgccaccatcctgcagcctcctcctgaccacggacgtttccatcaggttccatcccgaaaatctctcggttccacgtccccctggggcttctcctgacccagtccccgtgccccgcctccccgaaacaggctactctcctcggccccctccatcgggctgaggaagcacagcagcatcttcaaacatgtacaaaatcgattggctttaaacacccttcacataccctccccccaaattatccccaattatccccacacataaaaaatcaaaacattaaactaacccccttcccccccccccacaacaaccctcttaaaactaattggctttttagaaacaccccacaaaagctcagaaattggctttaaaaaaaacaaccaccaaaaaaaatcaattggctaaaaaaaaaaagtattaaaaacgaattggctgagaaacaattggcaaaataaaggaatttggcactccccacccccctctttctcttctcccttggactttgagtcaaattggcctggacttgagtccctgaaccagcaaagagaaaagaaggaccccagaaatcacaggtgggcacgtcgctgctaccgccatctcccttctcacgggaattttcagggtaaactggccatccgaaaatagcaacaacccagactggctcctcactcccttttccatcactaaaaatcacagagcagtcagagggacccagtaagaccaaaggaggggaggacagagcatgaaaaccaaaatccatgcaaatgaaatgtaattggcacgaccctcacccccaaatcttacatctcaattcccatcctaaaaagcactcatactttatgcatccccgcagctacacacacacaacacacagcacacgcatgaacacagcacacacacgagcacagcacacacacaaacgcacagcacacacagcacacagatgagcacacagcacacacacaaacgcacagcacacacacgcacacacatgcacacacagcacacaaacgcacggcacacacacgcacacacatgcacacacagcacacacacaaacgcacagcacacacaaacgcacagcacacacgcacacacagcacacacacgagcacacagcacacaaacgcacagcacacgcacacacatgcacacacagcacacacactagcacacagcacacacacaaagacacagcacacacatgcacacacagcacacacacgcgaacacagcacacacgaacacagcacacacagcacacacacaaacacagcacacacatgcacacagcacacgcacacacagcacacacatgaacacagcacacagcacacacatgcacacacagcacacacgcatgcacagcacacatgaacacagcacacacacaaacacacagcacacacatgcacacacagcacacacactcatgcgcagcacatacatgaacacagctcacagcacacaaacacgcagcacacacgttgcacacgcaagcacccacctgcacacacacatgcgcacacacacgcacacccccacaaaattggatgaaaacaataagcatatctaagcaactacgatatctgtatggatcaggccaaagtcccgctaagattctccaatgttttcatggtctgagccccgctcctgttcccatctccactgcccctcggccctgtctgtgccctgcctctcagaggagggggctcagatggtgcggcctgagtgtgcggccggcggcatttgggatacacccgtagggtgggcggggtgtgtcccaggcctaattccatctttccaccatgacagagatgcccttgtgaggctggcctccttggcgcctgtccccacggcccccgcagcgtgagccacgatgctccccataccccacccattcccgatacaccttacttactgtgtgttggcccagccagagtgaggaaggagtttggccacattggagatggcggtagctgagcagacatgcccccacgagtagcctgactccctggtgtgctcctggaaggaagatcttggggacccccccaccggagcacacctagggatcatctttgcccgtctcctggggaccccccaagaaatgtggagtcctcgggggccgtgcactgatgcggggagtgtgggaagtctggcggttggaggggtgggtggggggcagtgggggctgggcggggggagttctggggtaggaagtggtcccgggagattttggatggaaaagtcaggaggattgacagcagacttgcagaattacatagagaaattaggaacccccaaatttcatgtcaattgatctattccccctctttgtttcttggggcatttttccttttttttttttttttgttttttttttacccctccttagctttatgcgctcagaaaccaaattaaaccccccccccatgtaacaggggggcagtgacaaaagcaagaacgcacgaagccagcctggagaccaccacgtcctgccccccgccatttatcgccctgattggattttgtttttcatctgtccctgttgcttgggttgagttgagggtggagcctcctggggggcactggccactgagcccccttggagaagtcagaggggagtggagaaggccactgtccggcctggcttctggggacagtggctggtccccagaagtcctgagggcggaggggggggttgggcagggtctcctcaggtgtcaggagggtgctcggaggccacaggagggggctcctggctggcctgaggctggccggaggggaaggggctagcaggtgtgtaaacagagggttccatcaggctggggcagggtggccgccttccgcacacttgaggaaccctcccctctccctcggtgacatcttgcccgcccctcagcaccctgccttgtctccaggaggtccgaagctctgtgggacctcttgggggcaaggtggggtgaggccggggagtagggaggtcaggcgggtctgagcccacagagcaggagagctgccaggtctgcccatcgaccaggttgcttgggccccggagcccacgggtctggtgatgccatagcagccaccaccgcggcgcctagggctgcggcagggactcggcctctgggaggtttacctcgcccccacttgtgcccccagctcagcccccctgcacgcagcccgactagcagtctagaggcctgaggcttctgggtcctggtgacggggctggcatgaccccgggggtcgtccatgccagtccgcctcagtcgcagagggtccctcggcaagcgccctgtgagtgggccattcggaacattggacagaagcccaaagagccaaattgtcacaattgtggaacccacattggcctgagatccaaaacgcttcgaggcaccccaaattacctgcccattcgtcaggacacccacccacccagtgttatattctgcctcgccggagtgggtgttcccgggggcacttgccgaccagccccttgcgtccccaggtttgcagctctcccctgggccactaaccatcctggcccgggctgcctgtctgacctccgtgcctagtcgtggctctccatcttgtctcctccccgtgtccccaatgtcttcagtggggggccccctcttgggtcccctcctctgccatcacctgaagacccccacgccaaacactgaatgtcacctgtgcctgccgcctcggtccaccttgcggcccgtgtttgactcaactcaactcctttaacgctaatatttccggcaaaatcccatgcttgggttttgtctttaaccttgtaacgcttgcaatcccaataaagcattaaaagtcatgatcttc

SEQ ID NO: 45168 - DNA, 5585 bp, Artificial Sequence
  derived and/or modified sequence
gcctgctctccggcggagctgcgtgaggcccggccggccccggccccccccttccggccgcccccgcctcctggcccacgcctgcccgcgctctgcccaccagcgcctccatcgggcaaggcggccccgcgtcgacgccgcccgctgcctcgctgctgactcccgtcccgggcgccgtccgcggggtcgcgctccgccgggcctgcggattccccgccgcctcctcttcatctacctcaactccccccatccccgcttcgcccgaggaggcggttccccccgcaggcagtccggctcgcaggccgccggcgttgtcacccccccccgcgctccccctccagccctccccccggcgcgcagcctcgggccgctcccctttccgcgctgcgtcccggagcggccccggtgccgccaccgcctgtccccctcccgaggcccgggctcgcgacggcagagggctccgtcggcccaaaccgagctgggcgcccgcggtccgggtgcagcctccactccgccccccagtcaccgcctcccccggcccctcgacgtggcgcccttccctccgcttctctgtgctccccgcgcccctcttggcgtctggccccggcccccgctctttctcccgcaaccttcccttcgctccctcccgtcccccccagctcctagcctccgactccctccccccctcacgcccgccctctcgccttcgccgaaccaaagtggattaattacacgctttctgtttctctccgtgctgttctctcccgctgtgcgcctgcccgcctctcgctgtcctctctccccctcgccctctcttcggcccccccctttcacgttcactctgtctctcccactatctctgcccccctctatccttgatacaacagctgacctcatttcccgataccttttcccccccgaaaagtacaacatctggcccgccccagcccgaagacagcccgtcctccctggacaatcagacgaattctccccccccccccaaaaaaaagccatccccccgctctgccccgtcgcacattcggcccccgcgactcggccagagcggcgctggcagaggagtgtccggcaggagggccaacgcccgctgttcggtttgcgacacgcagcagggaggtgggcggcagcgtcgccggcttccagacaccaatgggaatcccaatggggaagtcgatgctggtgcttctcaccttcttggccttcgcctcgtgctgcattgctgcttaccgccccagtgagaccctgtgcggcggggagctggtggacaccctccagttcgtctgtggggaccgcggcttctacttcagcaggcccgcaagccgtgtgagccgtcgcagccgtggcatcgttgaggagtgctgtttccgcagctgtgacctggccctcctggagacgtactgtgctacccccgccaagtccgagagggacgtgtcgacccctccgaccgtgcttccggacaacttccccagataccccgtgggcaagttcttccaatatgacacctggaagcagtccacccagcgcctgcgcaggggcctgcctgccctcctgcgtgcccgccggggtcacgtgctcgccaaggagctcgaggcgttcagggaggccaaacgtcaccgtcccctgattgctctacccacccaagaccccgcccacgggggcgcccccccagagatggccagcaatcggaagtgagcaaaactgccgcaagtctgcagcccggcgccaccatcctgcagcctcctcctgaccacggacgtttccatcaggttccatcccgaaaatctctcggttccacgtccccctggggcttctcctgacccagtccccgtgccccgcctccccgaaacaggctactctcctcggccccctccatcgggctgaggaagcacagcagcatcttcaaacatgtacaaaatcgattggctttaaacacccttcacataccctccccccaaattatccccaattatccccacacataaaaaatcaaaacattaaactaacccccttcccccccccccacaacaaccctcttaaaactaattggctttttagaaacaccccacaaaagctcagaaattggctttaaaaaaaacaaccaccaaaaaaaatcaattggctaaaaaaaaaaagtattaaaaacgaattggctgagaaacaattggcaaaataaaggaatttggcactccccacccccctctttctcttctcccttggactttgagtcaaattggcctggacttgagtccctgaaccagcaaagagaaaagaaggaccccagaaatcacaggtgggcacgtcgctgctaccgccatctcccttctcacgggaattttcagggtaaactggccatccgaaaatagcaacaacccagactggctcctcactcccttttccatcactaaaaatcacagagcagtcagagggacccagtaagaccaaaggaggggaggacagagcatgaaaaccaaaatccatgcaaatgaaatgtaattggcacgaccctcacccccaaatcttacatctcaattcccatcctaaaaagcactcatactttatgcatccccgcagctacacacacacaacacacagcacacgcatgaacacagcacacacacgagcacagcacacacacaaacgcacagcacacacagcacacagatgagcacacagcacacacacaaacgcacagcacacacacgcacacacatgcacacacagcacacaaacgcacggcacacacacgcacacacatgcacacacagcacacacacaaacgcacagcacacacaaacgcacagcacacacgcacacacagcacacacacgagcacacagcacacaaacgcacagcacacgcacacacatgcacacacagcacacacactagcacacagcacacacacaaagacacagcacacacatgcacacacagcacacacacgcgaacacagcacacacgaacacagcacacacagcacacacacaaacacagcacacacatgcacacagcacacgcacacacagcacacacatgaacacagcacacagcacacacatgcacacacagcacacacgcatgcacagcacacatgaacacagcacacacacaaacacacagcacacacatgcacacacagcacacacactcatgcgcagcacatacatgaacacagctcacagcacacaaacacgcagcacacacgttgcacacgcaagcacccacctgcacacacacatgcgcacacacacgcacacccccacaaaattggatgaaaacaataagcatatctaagcaactacgatatctgtatggatcaggccaaagtcccgctaagattctccaatgttttcatggtctgagccccgctcctgttcccatctccactgcccctcggccctgtctgtgccctgcctctcagaggagggggctcagatggtgcggcctgagtgtgcggccggcggcatttgggatacacccgtagggtgggcggggtgtgtcccaggcctaattccatctttccaccatgacagagatgcccttgtgaggctggcctccttggcgcctgtccccacggcccccgcagcgtgagccacgatgctccccataccccacccattcccgatacaccttacttactgtgtgttggcccagccagagtgaggaaggagtttggccacattggagatggcggtagctgagcagacatgcccccacgagtagcctgactccctggtgtgctcctggaaggaagatcttggggacccccccaccggagcacacctagggatcatctttgcccgtctcctggggaccccccaagaaatgtggagtcctcgggggccgtgcactgatgcggggagtgtgggaagtctggcggttggaggggtgggtggggggcagtgggggctgggcggggggagttctggggtaggaagtggtcccgggagattttggatggaaaagtcaggaggattgacagcagacttgcagaattacatagagaaattaggaacccccaaatttcatgtcaattgatctattccccctctttgtttcttggggcatttttccttttttttttttttttgttttttttttacccctccttagctttatgcgctcagaaaccaaattaaaccccccccccatgtaacaggggggcagtgacaaaagcaagaacgcacgaagccagcctggagaccaccacgtcctgccccccgccatttatcgccctgattggattttgtttttcatctgtccctgttgcttgggttgagttgagggtggagcctcctggggggcactggccactgagcccccttggagaagtcagaggggagtggagaaggccactgtccggcctggcttctggggacagtggctggtccccagaagtcctgagggcggaggggggggttgggcagggtctcctcaggtgtcaggagggtgctcggaggccacaggagggggctcctggctggcctgaggctggccggaggggaaggggctagcaggtgtgtaaacagagggttccatcaggctggggcagggtggccgccttccgcacacttgaggaaccctcccctctccctcggtgacatcttgcccgcccctcagcaccctgccttgtctccaggaggtccgaagctctgtgggacctcttgggggcaaggtggggtgaggccggggagtagggaggtcaggcgggtctgagcccacagagcaggagagctgccaggtctgcccatcgaccaggttgcttgggccccggagcccacgggtctggtgatgccatagcagccaccaccgcggcgcctagggctgcggcagggactcggcctctgggaggtttacctcgcccccacttgtgcccccagctcagcccccctgcacgcagcccgactagcagtctagaggcctgaggcttctgggtcctggtgacggggctggcatgaccccgggggtcgtccatgccagtccgcctcagtcgcagagggtccctcggcaagcgccctgtgagtgggccattcggaacattggacagaagcccaaagagccaaattgtcacaattgtggaacccacattggcctgagatccaaaacgcttcgaggcaccccaaattacctgcccattcgtcaggacacccacccacccagtgttatattctgcctcgccggagtgggtgttcccgggggcacttgccgaccagccccttgcgtccccaggtttgcagctctcccctgggccactaaccatcctggcccgggctgcctgtctgacctccgtgcctagtcgtggctctccatcttgtctcctccccgtgtccccaatgtcttcagtggggggccccctcttgggtcccctcctctgccatcacctgaagacccccacgccaaacactgaatgtcacctgtgcctgccgcctcggtccaccttgcggcccgtgtttgactcaactcaactcctttaacgctaatatttccggcaaaatcccatgcttgggttttgtctttaaccttgtaacgcttgcaatcccaataaagcattaaaagtcatgatcttc

SEQ ID NO: 45169 - DNA, 934 bp, Artificial Sequence
  derived and/or modified sequence
ggcactgaccagcctgcaaactggacattagcttctcctgtgaaagagacttccagcttcctcctcctcctcttcctcctcctcctcctgccccagcgagccttctgctgagctacaccaatgggaatcccaatggggaagtcgatgctggtgcttctcaccttcttggccttcgcctcgtgctgcattgctgcttaccgccccagtgagaccctgtgcggcggggagctggtggacaccctccagttcgtctgtggggaccgcggcttctacttcagcaggcccgcaagccgtgtgagccgtcgcagccgtggcatcgttgaggagtgctgtttccgcagctgtgacctggccctcctggagacgtactgtgctacccccgccaagtccgagagggacgtgtcgacccctccgaccgtgcttccggacaacttccccagataccccgtgggcaagttcttccaatatgacacctggaagcagtccacccagcgcctgcgcaggggcctgcctgccctcctgcgtgcccgccggggtcacgtgctcgccaaggagctcgaggcgttcagggaggccaaacgtcaccgtcccctgattgctctacccacccaagaccccgcccacgggggcgcccccccagagatggccagcaatcggaagtgagcaaaactgccgcaagtctgcagcccggcgccaccatcctgcagcctcctcctgaccacggacgtttccatcaggttccatcccgaaaatctctcggttccacgtccccctggggcttctcctgacccagtccccgtgccccgcctccccgaaacaggctactctcctcggccccctccatcgggctgaggaagcacagcagcatcttcaaacatgtacaaaatcgattggctttaaacacccttcacataccctccccccaaattatccc

SEQ ID NO: 45170 - DNA, 1583 bp, Artificial Sequence
  derived and/or modified sequence
cactgcagcttccccaaccccgcgcacagcgggcactggtttcgggcctctctgtctcctacgaagtccccagagcaactcggatttgggaaatttctctctagcgttgcccaaacacacttgggtcggccgcgcgccctcaggacgtggacagggagggcttccccgtgtccaggaaagcgaccgggcattgcccccagtctcccccaaatttgggcattgtccccgggtcttccaacggactgggcgttgctcccggacactgaggactggccccggggtctcgctcaccttcagcagcgtccaccgcctgccacagagcgttcgatcgctcgctgcctgagctcctggtgcgcccgcggacgcagcctccagcttcgcggagatggtttccccagacccccaaattatcgtggtggcccccgagaccgaactcgcgtctatgcaagtccaacgcactgaggacggggtaaccattatccagatattttgggtgggccgcaaaggcgagctacttagacgcaccccggtgagctcggccatgcagacaccaatgggaatcccaatggggaagtcgatgctggtgcttctcaccttcttggccttcgcctcgtgctgcattgctgcttaccgccccagtgagaccctgtgcggcggggagctggtggacaccctccagttcgtctgtggggaccgcggcttctacttcagcaggcccgcaagccgtgtgagccgtcgcagccgtggcatcgttgaggagtgctgtttccgcagctgtgacctggccctcctggagacgtactgtgctacccccgccaagtccgagagggacgtgtcgacccctccgaccgtgcttccggacaacttccccagataccccgtgggcaagttcttccaatatgacacctggaagcagtccacccagcgcctgcgcaggggcctgcctgccctcctgcgtgcccgccggggtcacgtgctcgccaaggagctcgaggcgttcagggaggccaaacgtcaccgtcccctgattgctctacccacccaagaccccgcccacgggggcgcccccccagagatggccagcaatcggaagtgagcaaaactgccgcaagtctgcagcccggcgccaccatcctgcagcctcctcctgaccacggacgtttccatcaggttccatcccgaaaatctctcggttccacgtccccctggggcttctcctgacccagtccccgtgccccgcctccccgaaacaggctactctcctcggccccctccatcgggctgaggaagcacagcagcatcttcaaacatgtacaaaatcgattggctttaaacacccttcacataccctccccccaaattatccccaattatccccacacataaaaaatcaaaacattaaactaacccccttcccccccccccacaacaaccctcttaaaactaattggctttttagaaacaccccacaaaagctcagaaattggctttaaaaaaaacaaccaccaaaaaaaatcaattggctaaaaaaaaaaagtattaaaaacgaattggctgagaaacaattggcaaaataaaggaat

SEQ ID NO: 45171 - DNA, 711 bp, Artificial Sequence
  derived and/or modified sequence
atggtgagccccgacccccagatcatcgtggtggcccccgagaccgagctggcttcaatgcaggtgcagcggaccgaggacggcgtgaccattattcagattttttgggtaggtagaaaaggagagcttctcagaaggacaccagtctcttccgcgatgcagacacctatgggaatccctatgggcaaatccatgctggttctattgacatttctggcctttgcaagctgctgcatcgctgcctatagaccaagcgagactctttgtgggggagaacttgtcgacactctacagttcgtgtgtggagacagaggcttttacttctctcgtcccgcttcccgagtatcccgcagatctcgagggattgtcgaggagtgctgtttcaggtcctgcgacttggcgctcttggagacttattgtgctacacctgccaagagcgagcgtgacgtgagcactccccccactgtactccccgacaactttccccggtaccctgtgggaaagtttttccagtatgatacctggaagcagtcgacccagcgtctcaggcgggggcttcccgccttactgcgcgctagaaggggccacgtgcttgctaaagagctggaagccttccgggaggctaagcgtcaccgaccactcatagcattgcctacccaggatcctgcccacggcggcgccccccctgaaatggccagtaaccggaagtag

SEQ ID NO: 45172 - DNA, 711 bp, Artificial Sequence
  derived and/or modified sequence
atggtctccccagatcctcagatcatagtagtagcaccggaaaccgagctggcatcaatgcaagtccagcgtacagaggatggtgtgacaatcattcaaatcttttgggtaggacggaaaggcgaactcctgcgaaggactccagtatcctccgcaatgcaaacacccatggggattcccatgggaaaaagcatgctggtcctgttgactttcttggcatttgccagctgttgtatcgctgcctataggccatccgagacactttgcggcggtgaattggttgacactctgcaattcgtgtgtggagaccgcggtttttacttcagccgcccagcttcccgtgtgagccgcaggtctcgaggtattgttgaggagtgttgcttcagatcttgtgacctagcgctgttagagacatattgcgcaacccccgcaaaaagcgagcgcgatgtctccacaccccctacggtgctgcccgataacttccctcgttacccagtgggaaaattttttcagtatgacacatggaaacaatcaacacagcgcttgcgacgcggtctgcctgctctactgcgagcacggaggggtcacgttctcgcaaaggagctggaagccttcagagaggctaaaagacaccggcctcttatagcactccccacccaggaccccgctcacggcggagctccccctgagatggcctctaaccgcaaatag

SEQ ID NO: 45173 - protein, 643 aa, Artificial Sequence
  derived and/or modified sequence
MVDAGGVENITQLPQELPQMMAAAADGLGSIAIDTTQLNMSVTDPTAWATAMNNLGMVPVGLPGQQLVSDSICVPGFDPSLNMMTGITPINPMIPGLGLVPPPPPTEVAVVKEIIHCKSCTLFPQNPNLPPPSTRERPPGCKTVFVGGLPENATEEIIQEVFEQCGDITAIRKSKKNFCHIRFAEEFMVDKAIYLSGYRMRLGSSTDKKDSGRLHVDFAQARDDFYEWECKQRMRAREERHRRKLEEDRLRPPSPPAIMHYSEHEAALLAEKLKDDSKFSEAITVLLSWIERGEVNRRSANQFYSMVQSANSHVRRLMNEKATHEQEMEEAKENFKNALTGILTQFEQIVAVFNASTRQKAWDHFSKAQRKNIDIWRKHSEELRNAQSEQLMGIRREEEMEMSDDENCDSPTKKMRVDESALAAQAYALKEENDSLRWQLDAYRNEVELLKQEKEQLFRTEENLTKDQQLQFLQQTMQGMQQQLLTIQEELNNKKSELEQAKEEQSHTQALLKVLQEQLKGTKELVETNGHSHEDSNEINVLTVALVNQDRENNIEKRSQGLKSEKEALLIGIISTFLHVHPFGANIEYLWSYMQQLDSKISANEIEMLLMRLPRMFKQEFTGVGATLEKRWKLCAFEGIKTT

SEQ ID NO: 45174 - protein, 235 aa, Artificial Sequence
  derived and/or modified sequence
MVDKAIYLSGYRMRLGSSTDKKDSGRLHVDFAQARDDFYEWECKQRMRAREERHRRKLEEDRLRPPSPPAIMHYSEHEAALLAEKLKDDSKFSEAITVLLSWIERGEVNRRSANQFYSMVQSANSHVRRLMNEKATHEQEMEEAKENFKNALTGILTQFEQIVAVFNASTRQKAWDHFSKAQRKNIDIWRKHSEELRNAQSEQLMGIRREEEMEMSDDENCDSPTKKMRVDESGA

SEQ ID NO: 45175 - DNA, 1932 bp, Artificial Sequence
  derived and/or modified sequence
atggtggacgctggaggagtcgaaaatataacccaactgccccaagaactaccacagatgatggctgcagccgcagatgggcttggctccattgccatagacacaacccagctgaacatgtcagttacggaccccaccgcatgggccacagcgatgaataatttagggatggtgccagtgggactccccgggcaacagctggtgtcggactctatttgcgtacccggattcgatccctctcttaacatgatgacgggcatcacgccaataaacccaatgatccctgggctgggactagtaccccctccaccacctacagaggtcgctgtggtgaaagaaatcatacactgtaaaagctgtaccctgtttccccagaatcccaatttacctccaccctcaacccgcgagcggccaccagggtgcaagactgtgttcgtaggcgggctcccggagaacgcgacagaggagatcatccaggaagtttttgaacagtgcggggacatcactgccatcaggaaatctaaaaagaatttttgccatattaggttcgctgaagaattcatggtcgataaggccatttaccttagcggctaccgtatgagacttggttcatcaactgataagaaagattcgggtcgccttcatgtggactttgcccaggcccgtgacgatttctacgagtgggagtgtaagcagcggatgcgcgccagagaggaaaggcaccgccgtaaacttgaggaggacagacttcgtcccccttcccctcctgcaatcatgcactattctgaacatgaggccgcactattggccgagaagttgaaagacgactccaaattctctgaggctataaccgtgctgctatcatggatcgaacgtggggaggttaacaggcgcagtgcgaatcagttctatagtatggtgcagtccgccaattcccatgtgcgcagactgatgaatgaaaaggccacccatgaacaggaaatggaagaggcaaaggagaactttaagaatgcactgactggcatcctaacccaatttgagcagatcgtagctgtatttaacgcttccactcgtcagaaggcttgggaccatttttccaaggcccagaggaagaacattgatatctggaggaaacacagcgaagagcttcgcaatgcacagtcagagcaactgatggggatcagacgagaagaggagatggaaatgtccgacgacgaaaactgtgactctcccaccaagaagatgcgggtagatgagtcggccttggctgcccaggcctacgcgttaaaggaagaaaatgactccctgcgttggcagttggacgcataccggaatgaagtagaactcctgaaacaggaaaaggagcagctcttcagaacagaagaaaacttgacaaaggaccagcagctgcagtttctgcagcagactatgcaggggatgcaacaacagttgctgactatccaggaagagctcaataataaaaagtcagaactggaacaggctaaggaggaacagtcccatacccaggcacttctgaaggtcctgcaggaacaattgaaggggaccaaggagctggtggaaaccaacggacactcgcatgaggactccaacgaaatcaatgtccttacagttgccctggtaaatcaggatagggagaataacattgaaaaacggagtcaggggcttaaaagcgaaaaagaagctcttctcattggcattatcagtacttttctgcacgtgcatcccttcggagcaaatattgagtatctatggtcctatatgcagcagctcgattccaagattagcgcgaacgagatagagatgctactgatgagactccctcggatgtttaagcaggagttcacaggcgttggtgctaccctggaaaagagatggaagctgtgtgcttttgagggaatcaagactacatag

SEQ ID NO: 45176 - DNA, 1932 bp, Artificial Sequence
  derived and/or modified sequence
atggtggatgcgggtggcgtcgaaaatattacccaactgccccaggagcttccacagatgatggccgccgctgccgacggactgggtagtatcgctatcgacaccacacaattgaacatgtctgtgacagatccaactgcttgggccacagctatgaacaacctcgggatggtccccgttggcctgcccggccagcaactcgtctccgattctatttgcgtacccggctttgaccctagtctgaatatgatgacaggaatcactcccatcaaccctatgatccccggactggggctagtaccacctccaccccctacagaagtcgccgtggtgaaagagattatccactgcaagtcctgtaccctgttcccacagaatccaaacctccccccacccagcacccgagagcgtcctcctggatgcaagaccgtattcgtgggtggtctgcccgaaaatgccaccgaggagatcattcaggaggtgtttgagcagtgcggtgacatcacagctatccggaaatccaaaaagaacttttgccacattagattcgccgaggaattcatggtggataaagctatctatctcagcgggtacaggatgagattgggaagcagcaccgacaaaaaggattcaggccggcttcatgtggacttcgcccaagcgcgagacgatttttacgaatgggaatgtaaacagagaatgcgggcccgagaagaacggcaccggcggaagctcgaggaggatcgtctgcggcctcccagtccgcctgccattatgcactactccgaacacgaagccgccttgctggcggagaaactgaaggacgactcaaagttctccgaagccattactgtgctcctttcttggattgagaggggcgaagtcaataggcggtctgccaatcagttctacagcatggtccagagcgctaatagccatgtacgcaggctaatgaacgaaaaggccacgcatgagcaggagatggaagaagcgaaagaaaactttaagaacgctctgactggtatactcactcagttcgaacagatcgtggccgtctttaatgccagcacgcgacagaaagcctgggaccacttcagcaaggcccagagaaaaaacatcgatatctggcgaaaacacagcgaagagctgaggaacgcccagtccgagcagctcatgggaataaggcgggaagaggagatggagatgtccgatgacgagaactgtgatagtccaacaaagaagatgcgggtcgacgaatccgcactggccgcgcaagcttatgctctgaaagaggaaaacgactccctgcgatggcagctggatgcataccggaatgaggtggagctgctgaagcaggagaaggagcaactcttccggacagaagagaacctcacaaaagatcagcagttgcagttcctacagcagactatgcaggggatgcagcagcagctgctaaccatccaggaggagctgaataataaaaaaagcgagctcgagcaggccaaagaggagcagagccacactcaggccctattgaaggttttgcaggaacagctcaaaggaacaaaggagcttgtggagactaacggacattcccatgaggacagcaacgagatcaatgttctgacagtggctttagtcaaccaagaccgcgaaaacaatattgagaagcggagtcaagggttgaaatcagaaaaggaagcacttctgatcgggataatctctacatttttgcacgtgcatccttttggggccaacattgagtacctctggagctacatgcagcagttggatagcaagatcagtgccaacgaaattgaaatgctattaatgcggctgccacggatgttcaagcaagagttcactggcgtgggcgccaccctggaaaagagatggaaattgtgcgcttttgagggtatcaagacgacatag

SEQ ID NO: 45177 - DNA, 1932 bp, Artificial Sequence
  derived and/or modified sequence
atggtggatgctgggggcgtggagaacatcacccagctgccccaggagctgccccagatgatggctgctgctgctgatggcctgggcagcatcgccatcgacaccacccagctgaacatgtctgtgacagaccccacagcctgggccacagccatgaacaacctgggcatggtgcctgtgggcctgcccggccagcagctggtgtctgacagcatctgtgtgcccggctttgaccccagcctgaacatgatgacaggcatcacccccatcaaccccatgatccctggcctgggcctggtgcccccacctccacccacagaggtggccgtggtgaaggagatcatccactgcaagagctgcaccctcttcccccagaaccccaacctgcccccacccagcacccgggagcggcccccaggctgcaagacagtgtttgtgggcggcctgcctgaaaatgccacagaggagatcatccaggaggtgtttgagcagtgtggggacatcacagccatcaggaagagcaagaagaacttctgccacatccgctttgctgaggagttcatggtggacaaggccatctacctgagcggctacaggatgaggctgggcagcagcacagacaagaaggacagcggccgcctgcacgtggactttgcccaggccagagatgacttctatgagtgggagtgcaagcagaggatgagggcccgggaggagcggcacaggaggaagctggaggaggaccggctgcggccccccagccccccagccatcatgcactacagcgagcacgaggccgccctgctggccgagaagctgaaggatgacagcaagttcagcgaggccatcaccgtgctgctgtcctggattgaaagaggagaggtgaacagaagaagtgccaaccagttctacagcatggtgcagagcgccaacagccacgtgcggcggctgatgaatgagaaggccacccatgagcaggagatggaggaggccaaggagaacttcaagaatgccctgaccggcatcctgacccagtttgagcagatcgtggccgtgttcaatgccagcacccggcagaaggcctgggaccacttcagcaaggcccagaggaagaacatcgacatctggaggaagcacagcgaggagctgagaaatgcccagagcgagcagctgatgggcatcagaagagaggaggagatggagatgtctgatgatgagaactgtgacagccccaccaagaagatgagggtggatgagagcgccctggccgcccaggcctatgccctgaaggaggagaatgacagcctgcgctggcagctggatgcctacagaaatgaggtggagctgctgaagcaggagaaggagcagctgttcagaacagaggagaacctgaccaaggaccagcagctgcagttcctgcagcagaccatgcagggcatgcagcagcagctgctgaccatccaggaggagctgaacaacaagaagtctgagctggagcaggccaaggaggagcagagccacacccaggccctgctgaaggtgctgcaggagcagctgaagggcaccaaggagctggtggagaccaacggccacagccatgaggacagcaatgagatcaacgtgctgactgtggccctggtgaaccaggaccgggagaacaacatcgagaagaggagccagggcctgaagtctgagaaggaggccctgctgattggcatcatcagcaccttcctgcacgtgcacccctttggagccaacatcgagtacctgtggagctacatgcagcagctggacagcaagatcagcgccaatgaaattgagatgctgctgatgaggctgcccaggatgttcaagcaggagttcaccggggtgggcgccaccctggagaagcgctggaagctgtgtgcctttgagggcatcaagaccacctag

SEQ ID NO: 45178 - DNA, 1932 bp, Artificial Sequence
  derived and/or modified sequence
atggtggacgccggcggcgtggagaacatcacccagctgccccaggagctgccccagatgatggcagcagcggccgacggcctgggcagtatagcaattgacacaacacagttgaacatgtctgtaacagaccccacagcctgggcaactgccatgaacaacttgggcatggtgcccgtgggactgccgggccagcagctggtctccgactctatttgtgttccagggttcgacccatccctgaacatgatgacaggcatcacaccaatcaatcctatgattcctgggctggggctggtgccacctcctcctccaactgaggtggctgtcgtgaaagagattattcattgtaagagttgcacccttttcccgcaaaacccaaatctgccaccaccgtccacaagagagcgacccccgggctgcaagacagtgtttgtggggggattaccggaaaatgcaaccgaggagattatccaggaggtgttcgagcagtgtggcgacatcactgccatccgcaaatccaaaaagaatttctgccatattagattcgcagaggaatttatggtggacaaagccatttatctctctggctaccggatgcggttgggaagctccactgataagaaggattccggtcggctgcatgtcgactttgcccaggccagggatgatttttacgaatgggagtgtaagcaacgaatgcgggcccgagaggaacgccatcggcgcaaacttgaggaggaccggctgaggcctccaagccccccagctatcatgcactatagtgagcatgaggcagcgttgttggccgagaagctgaaggatgatagtaaattttccgaggccattacagtgctgctgtcatggattgagaggggggaagtgaaccgccgatctgccaaccagttttactcaatggtgcagagcgcaaactctcacgtccggcggctgatgaacgaaaaggctacacacgaacaggaaatggaagaggcgaaggagaatttcaagaatgccctcaccggtatccttacccagttcgaacaaattgtggcggtgttcaatgcctctacgaggcaaaaggcgtgggaccattttagtaaggcccagcgcaagaatatcgacatttggaggaaacattcagaggaactgcgtaatgctcagtcagaacaactcatgggcatccgtagggaagaggaaatggaaatgtcagacgacgagaactgcgactctcccaccaagaagatgagagtggatgagagtgcattagcagctcaggcatatgcacttaaggaggaaaacgacagcctccgctggcagctggatgcttaccgaaacgaagtagaactactaaaacaggagaaagagcagctatttagaactgaggagaacctgacgaaggatcaacagctccagttcttacagcagaccatgcaagggatgcagcaacagctcctcaccatacaggaggaactcaacaacaagaagtctgaactagagcaggcgaaagaggagcaatcccatacacaggctctgcttaaagtcttgcaggaacaactcaagggaactaaagagctggtagaaactaatgggcattcacatgaggacagtaacgagataaacgtgctcacagtggctctggttaatcaggacagagagaataatatcgagaagaggtcacagggcctcaagtctgagaaagaagctctgcttattggaattatcagcacatttctgcatgtgcaccccttcggggctaacattgagtacttatggagttacatgcagcagctagactccaagatttctgctaacgagatcgaaatgctactgatgcggttaccccgtatgttcaagcaggagttcacgggcgttggagctaccctggaaaagcggtggaaactctgcgcctttgaaggaattaagaccacctag

SEQ ID NO: 45179 - DNA, 1932 bp, Artificial Sequence
  derived and/or modified sequence
atggtggacgccggcggcgtggagaacatcacccagctgccccaggagctgccgcaaatgatggcagcagccgccgacggcctggggtccatagcaattgataccactcaattgaatatgtccgtcactgacccgacagcctgggcaaccgctatgaataaccttggaatggttccagtcggtctgccggggcagcagttggtgtcagattccatatgcgtccccggcttcgacccgtccctgaatatgatgacagggatcacaccaataaatccaatgatccccggcctcggcctggtaccacctcctccccctactgaggtagccgtcgtgaaggagatcattcattgcaaatcttgcaccttgtttccccagaatccgaacttgcccccccccagcaccagggagcggcctcctggctgtaagactgtttttgtcggcgggctgccagagaatgccacggaggagattattcaggaagtctttgagcagtgcggagatataacggccatcaggaaaagcaaaaagaacttttgccacatccgcttcgctgaggagttcatggtcgacaaagcaatctatctttcaggctataggatgcgcctcggttcttccacagataagaaggacagcggcagattgcatgtggacttcgctcaggccagggatgatttctacgagtgggaatgtaagcagaggatgcgtgctcgcgaagagaggcaccggaggaagctggaggaggacagactgcgtcctcccagtccacccgccatcatgcactactccgagcacgaggctgcattgctcgcagaaaagctgaaggacgattctaagtttagcgaagccattactgtgctgctatcttggatcgagcggggtgaagtgaaccgtcgatccgccaaccagttttactctatggtacagtcagccaattctcatgtgcggcgcctgatgaacgagaaagcaacacacgagcaggaaatggaggaggccaaggagaatttcaaaaacgccttgactggcattctgacccagtttgagcagattgttgctgtttttaatgccagtaccaggcagaaagcttgggaccacttctctaaggcgcaacgaaaaaacattgacatctggaggaagcattccgaggagctccgcaacgcgcaatctgagcagctgatgggaattaggcgagaggaggagatggaaatgtccgacgatgagaattgcgacagccctacaaagaagatgagggtggacgagtcagcgctagccgctcaggcttacgctctcaaggaggaaaacgacagtctcagatggcagctggatgcatatagaaacgaagtcgaattacttaagcaggaaaaggagcagctgttccggactgaggaaaatctcactaaagaccaacagctgcagtttctccagcagaccatgcagggcatgcaacagcaacttttgacaatacaggaagagctgaataacaagaagagcgaattggaacaggccaaggaagaacagagtcacacacaggctctcctaaaggttctgcaagagcaactgaaggggaccaaggagttggtggaaaccaatggacatagtcatgaagacagtaatgaaatcaatgttcttaccgtcgccctcgtcaaccaggatcgggaaaacaacatagagaaaaggtcccaagggctcaaatctgaaaaagaagcactgctgatcggtatcatctctactttcctgcatgttcatccctttggagccaacatagagtatctctggtcttatatgcagcagttggatagcaaaattagtgccaacgagatcgagatgctgttgatgagactgcccagaatgttcaaacaggagtttacgggagtcggcgcgacattggagaagcggtggaagttgtgtgccttcgaggggatcaagacaacctag

SEQ ID NO: 45180 - DNA, 1932 bp, Artificial Sequence
  derived and/or modified sequence
atggtggacgcagggggagttgagaacattacacagttgccccaggagttgccccaaatgatggcagccgcagccgacggcttagggagcattgccattgatacgactcagctgaatatgtccgtgaccgaccctaccgcatgggccacggcgatgaacaacttaggaatggttccggtgggtttgcccggtcaacagctcgtatctgatagtatctgcgttcccggttttgatcctagcctgaatatgatgaccgggattactccgataaaccctatgatccctggcttaggactggtgccgccaccccctcccacagaggtcgccgtggttaaggaaatcattcactgtaagtcatgcactctgtttccacagaaccctaatctgccccctccatccaccagggagagaccaccgggatgcaagacagtctttgtggggggactgcccgaaaacgccaccgaggagataatccaggaagtgttcgagcaatgcggagatatcacagccattcgaaagtccaaaaaaaatttctgtcacatcagattcgctgaggagtttatggtggacaaggctatttaccttagtgggtatagaatgcggctgggcagcagcaccgataaaaaggattcaggtagactccacgttgatttcgcccaggctcgcgacgacttctatgaatgggaatgcaaacagcggatgcgagccagggaggagcgccacagaaggaagctcgaggaggaccgactgaggccaccctctcctccagcgataatgcactattccgaacacgaagccgctcttctcgcagaaaagctcaaggatgactcaaagttctctgaggcgattactgtgctgttgagttggatagaaagaggagaagtgaatcggcgatcagctaaccaattctattccatggtacagtctgcgaacagccatgtgcggagactgatgaacgagaaagctacccatgagcaggagatggaggaagcaaaagaaaattttaagaacgcactcactggcatcctcactcagttcgagcagatcgtggcagtgtttaatgcgtccacaaggcagaaagcttgggaccatttttccaaagcacagcgaaagaacattgacatctggcgaaagcactcagaggaactaagaaacgcccagagcgagcagcttatgggaatacggcgtgaggaggagatggagatgagtgatgacgaaaattgtgactccccgactaaaaagatgcgggtcgacgagagcgccttagcagcacaagcctacgcactcaaggaagaaaatgactctctccgctggcagttagacgcttaccgcaacgaagtcgaactcctgaagcaggaaaaagagcagctgttcaggaccgaggaaaacctgacaaaggatcaacagctgcagttcttacagcaaactatgcaaggcatgcaacagcagcttctgaccatccaggaagagcttaacaataagaaatctgaacttgaacaggccaaagaggagcaaagtcacactcaggccctgcttaaggtgctccaagaacagctgaaaggaaccaaagaactggtggaaactaacggtcactcacatgaggattcaaacgaaataaacgttctcaccgttgctctagtgaaccaggaccgtgagaacaacatcgaaaaacggtcccagggcctcaaaagcgagaaggaggccctgctgatcggcattatttctactttcctgcatgttcacccgtttggagccaacatcgagtacctgtggtcatatatgcagcaacttgatagtaaaatctcagcgaacgaaattgagatgctcctgatgaggttgcctcgcatgttcaagcaggagtttacaggagtcggagctacactggaaaagaggtggaagctatgtgcctttgaaggcatcaagactacctag

SEQ ID NO: 45181 - DNA, 1932 bp, Artificial Sequence
  derived and/or modified sequence
atggtggacgccggtggcgtcgaaaatattacccagctccctcaggaactaccccaaatgatggccgctgcagccgacgggctcgggtcaatcgctatagatacgacccagctcaatatgtccgttactgaccccactgcgtgggccacggccatgaacaacctggggatggtcccagtagggctccctggccaacagctagtgagtgacagcatctgcgtacccggatttgatccctccctcaacatgatgaccggcataactcctatcaacccaatgatccctggcctggggctggttccccctccccctccaacagaggtcgcagtcgtgaaggagatcatccattgcaaatcatgcactttatttccccagaaccctaatctgcctcccccatcaacgagggagcggcctcctggttgtaagaccgtctttgtgggcggactcccggagaatgcgacagaggaaatcatccaggaggtgttcgagcagtgcggggacatcacagcaattagaaaatccaaaaaaaatttttgccacatccgctttgccgaggagtttatggttgacaaggccatctatttaagcggctataggatgcggctagggagctcaaccgacaagaaggattccggacggcttcacgtggactttgcacaagcacgggatgatttctacgagtgggagtgtaaacagcgcatgcgggcaagagaagaaagacataggcgaaagctggaggaggatagacttcgccctccttcgccgccagccattatgcactattcagagcacgaggctgcactgcttgccgaaaagctgaaggatgacagcaagttttctgaggccattactgttctgctcagttggatagagaggggtgaggtgaaccgtcgttctgcaaatcagttctattcaatggtccagagcgccaacagtcacgtgagacgactgatgaacgaaaaggctactcacgaacaagaaatggaagaggcaaaggagaacttcaaaaacgccttgacaggaatccttacccagttcgagcaaatagtagctgttttcaacgcttccacacgccaaaaggcctgggatcacttttccaaagcccagaggaagaacattgatatttggcggaaacacagtgaagaactcagaaacgcgcagtctgagcagttgatgggcatcaggagagaagaagagatggagatgtcggacgacgagaactgtgactcacctaccaaaaagatgagagtggacgagtctgccctggctgcccaggcttacgccctaaaagaagagaatgattctctgaggtggcaactggatgcttataggaatgaagtggaacttcttaagcaggaaaaggagcagttgttccgaaccgaggaaaatctcaccaaagaccaacagctccaattcctgcagcagactatgcaaggaatgcagcagcagctcctcactatccaggaagaactgaacaacaagaaatccgaactcgagcaagccaaggaggaacagtctcatactcaggctctcctaaaagtactgcaggagcaactaaaaggaaccaaagagctggtggagacaaacggccattcacatgaagacagtaacgagattaacgtcttaacagtggccctagtgaaccaagaccgcgagaataatatcgagaagcgtagccaaggtctcaaatctgagaaagaggctctactcattggtataatcagtacgttcctgcacgtccacccctttggcgcaaatatcgaatatctatggagttatatgcagcagctagattctaagattagcgctaacgaaatcgaaatgctcctgatgcgactgcccaggatgtttaagcaggaatttaccggtgtgggagctacactcgagaaacgatggaagctgtgcgctttcgaaggaatcaagacaacttag

SEQ ID NO: 45182 - DNA, 1932 bp, Artificial Sequence
  derived and/or modified sequence
atggtggacgccggcggcgtggagaacatcacccagctgccccaggagctgccccagatgatggccgccgccgccgacggcctgggcagcatcgccatcgacaccacccagctgaacatgagcgtgaccgaccccaccgcctgggccaccgccatgaacaacctgggcatggtgcccgtgggcctgcccggccagcagctggtgagcgacagcatctgcgtgcccggcttcgaccccagcctgaacatgatgaccggcatcacccccatcaaccccatgatccccggcctgggcctggtgcccccccccccccccaccgaggtggccgtggtgaaggagatcatccactgcaagagctgcaccctgttcccccagaaccccaacctgcccccccccagcaccagagagagaccccccggctgcaagaccgtgttcgtgggcggcctgcccgagaacgccaccgaggagatcatccaggaggtgttcgagcagtgcggcgacatcaccgccatcagaaagagcaagaagaacttctgccacatcagattcgccgaggagttcatggtggacaaggccatctacctgagcggctacagaatgagactgggcagcagcaccgacaagaaggacagcggcagactgcacgtggacttcgcccaggccagagacgacttctacgagtgggagtgcaagcagagaatgagagccagagaggagagacacagaagaaagctggaggaggacagactgagaccccccagcccccccgccatcatgcactacagcgagcacgaggccgccctgctggccgagaagctgaaggacgacagcaagttcagcgaggccatcaccgtgctgctgagctggatcgagagaggcgaggtgaacagaagaagcgccaaccagttctacagcatggtgcagagcgccaacagccacgtgagaagactgatgaacgagaaggccacccacgagcaggagatggaggaggccaaggagaacttcaagaacgccctgaccggcatcctgacccagttcgagcagatcgtggccgtgttcaacgccagcaccagacagaaggcctgggaccacttcagcaaggcccagagaaagaacatcgacatctggagaaagcacagcgaggagctgagaaacgcccagagcgagcagctgatgggcatcagaagagaggaggagatggagatgagcgacgacgagaactgcgacagccccaccaagaagatgagagtggacgagagcgccctggccgcccaggcctacgccctgaaggaggagaacgacagcctgagatggcagctggacgcctacagaaacgaggtggagctgctgaagcaggagaaggagcagctgttcagaaccgaggagaacctgaccaaggaccagcagctgcagttcctgcagcagaccatgcagggcatgcagcagcagctgctgaccatccaggaggagctgaacaacaagaagagcgagctggagcaggccaaggaggagcagagccacacccaggccctgctgaaggtgctgcaggagcagctgaagggcaccaaggagctggtggagaccaacggccacagccacgaggacagcaacgagatcaacgtgctgaccgtggccctggtgaaccaggacagagagaacaacatcgagaagagaagccagggcctgaagagcgagaaggaggccctgctgatcggcatcatcagcaccttcctgcacgtgcaccccttcggcgccaacatcgagtacctgtggagctacatgcagcagctggacagcaagatcagcgccaacgagatcgagatgctgctgatgagactgcccagaatgttcaagcaggagttcaccggcgtgggcgccaccctggagaagagatggaagctgtgcgccttcgagggcatcaagaccacctag

SEQ ID NO: 45183 - protein, 1172 aa, Artificial Sequence [sequence omitted]

SEQ ID NO: 45184 - protein, 188 aa, Artificial Sequence
  derived and/or modified sequence
MRPFFLLCFALPGLLHAQQACSRGACYPPVGDLLVGRTRFLRASSTCGLTKPETYCTQYGEWQMKCCKCDSRQPHNYYSHRVENVASSSGPMRWWQSQNDVNPVSLQLDLDRRFQLQEVMMEFQGPMPAGMLIERSSDFGKTWRVYQYLAADCTSTFPRVRQGRPQSWQDVRCQSLPQRPNARLNGGK

SEQ ID NO: 45185 - protein, 160 aa, Artificial Sequence
  derived and/or modified sequence
MNEIQAIAARLPNVDLVLSQTKQDIARARRLQAEAEEARSRAHAVEGQVEDVVGNLRQGTVALQEAQDTMQGTSRSLRLIQDRVAEVQQVLRPAEKLVTSMTKQLGDFWTRMEELRHQARQQGAEAVQAQQLAEGASEQALSAQEGFERIKQKYAELKDR

SEQ ID NO: 45186 - DNA, 3519 bp, Artificial Sequence
  derived and/or modified sequence
atgcgacctttcttcctcctctgtttcgccctcccagggctgctccatgcacagcaagcttgttcgagaggtgcctgttatccccccgtcggcgacttgctggtcggcagaacccgttttctgcgggctagcagcacttgcggcctgaccaagccggaaacctattgtacccaatacggagagtggcagatgaaatgttgtaagtgtgactcacggcaaccacacaactactacagccatcgtgttgaaaatgtcgcgagtagcagcggcccgatgcgatggtggcagtcccagaacgatgtgaaccccgtctcactgcagctcgacctggaccggagatttcagctgcaggaggtcatgatggagtttcagggaccgatgccagccgggatgctgattgagcgctcaagtgactttgggaagacctggcgcgtgtaccagtacctggcagctgattgtaccagtacttttcctcgcgttagacaggggcggcctcagtcttggcaggatgtgcgctgccagtccttgccgcagcgaccaaacgctcggctgaacggaggaaaagtgcaacttaatctgatggaccttgtgtcaggaatacccgcaacccagtcacagaagattcaggaggtgggagaaatcaccaacctgcgcgtgaactttacacggctcgcaccggtcccccaacgggggtatcacccaccatcagcgtactatgcggtgagccagctgaggctgcagggatcttgcttctgccacggccacgccgatagatgcgctccgaagccaggagcctccgcaggcccgtctaccgcagtacaggtgcacgatgtttgcgtctgccaacacaatacagccggccctaactgcgagcgatgcgcccccttctacaacaaccgcccttggcgcccagccgaggggcaggacgcccacgaatgccagcgctgtgattgtaatgggcattccgaaacatgccatttcgatccagcggtgttcgccgcctctcagggggcttacggcggagtctgtgataactgtagagatcataccgaagggaagaactgtgaacgatgccagctgcattattttagaaatcggaggccaggcgctagtatccaggaaacctgtataagttgcgaatgtgacccggacggagccgtgcccggcgccccatgtgaccccgtcaccgggcagtgcgtctgcaaagagcatgtgcagggagaacgatgtgacctctgcaagccgggttttaccggcctgacatacgctaacccccagggctgccataggtgtgattgtaatatcttggggagccgccgggatatgccctgtgacgaggagtctggtcgctgtttatgtctgccaaatgtagttgggcctaaatgtgaccaatgcgccccgtatcactggaagctcgccagcgggcaagggtgtgagccatgcgcttgtgatccacataactctctttcccctcaatgtaaccagtttaccggccaatgtccctgtcgggaagggttcgggggtctgatgtgcagtgcggccgccattagacaatgccctgatcgcacatacggcgacgttgccaccggctgtagagcctgcgattgtgatttcagaggtaccgagggccccgggtgtgacaaggcatcaggcagatgcctttgcagaccgggcctgacagggccacgatgtgaccagtgtcagcgtggatactgtaatcggtatcccgtgtgtgtagcatgtcacccgtgtttccagacctatgatgccgaccttagggaacaggcactccggttcggccggctaagaaatgccacagcatctctttggtccggcccgggtctggaggataggggcctggcctctcgtatccttgatgccaagagcaagattgagcaaatcagggcggtgctgtccagtcctgctgtaaccgagcaggaagtcgcccaggtggcctctgccattctgtccctgcgacgtaccctacagggtctacaattggacctgcctctcgaagaggagacgttgtccctcccaagggacctggagtctctcgatcggtcattcaacggtctgttaacaatgtatcagcgcaaaagagaacagttcgagaaaatctcatcggccgacccgagcggggcatttcggatgctgagtaccgcatatgagcagagcgctcaggccgcacaacaggtgtcagattccagtcgcctgctcgaccagctacgggattccagaagagaagctgaaaggctcgtgaggcaagctggaggggggggtgggaccgggtcacccaaactggtggcactacgcctggagatgtctagtctgcccgatctgacgcccacatttaataagctttgcggcaactctagacagatggcctgcactccaatcagttgccccggggagctgtgtccacaggataacggtacagcttgcggatctaggtgcagaggagtattgccccgagccgggggggcttttctgatggctggacaggtggctgagcagttacgaggcttcaatgcccagcttcagagaactcgacagatgatccgagccgctgaggagtctgcatctcaaatccaatcctccgctcaacggttggagacccaagtcagcgcctctaggtcacaaatggaagaagacgtcaggcgcactcgtcttctgattcagcaggttagggacttcctcactgatcctgacaccgacgcggcgaccatccaggaagtgagcgaagccgtcttagctttatggctgcccactgactccgccactgtgttgcagaaaatgaacgaaatacaggccattgccgcccgcctcccaaatgtcgatcttgtgttgagccagactaaacaggatattgctcgagctcggagactgcaggcagaggccgaagaggctcgcagtcgggctcacgcagtagaggggcaagtcgaggacgtcgttgggaacttgcggcaggggaccgtagctttacaggaggcacaagacactatgcaaggcactagccgcagcttgcgtctgatccaggatagagtggccgaagtacagcaggtcctgcgtccagcagagaagctggtgacttcgatgactaagcagctcggtgacttttggaccaggatggaagagctgaggcaccaggctcgacagcagggagcagaagccgtgcaggctcaacagcttgccgaaggcgctagcgagcaagcactgtctgcacaagagggctttgaaagaattaaacagaagtacgcagagcttaaagatcgattgggccagtcaagcatgctaggcgaacagggcgcacgtattcagtcagtgaaaacagaggccgaggaactgttcggggagactatggaaatgatggacaggatgaaagacatggagttggagttactcagagggagccaggcaataatgctgaggtcagctgacctcacaggactggagaaaagagtggagcagatcagggaccacatcaatggccgggtgctgtattacgcaacttgcaagtag

SEQ ID NO: 45187 - DNA, 3519 bp, Artificial Sequence
  derived and/or modified sequence
atgaggcccttcttcctcttgtgctttgccctgccgggactactgcatgcacagcaggcctgttctagaggtgcatgctacccccccgtgggggacctcttggtaggacggacacgctttctgcgggcatcaagcacctgtggactaaccaagcctgaaacatactgcactcagtatggtgagtggcagatgaaatgttgcaaatgcgattcgcgacagcctcacaattactacagtcatagggtggagaacgtagcttcgtctagtggtcccatgcgatggtggcagtcacagaacgacgtcaatccagtttcactgcagttggatttggacaggcggtttcagctgcaagaggtgatgatggagtttcagggccccatgcccgcagggatgcttatagagagatccagtgatttcgggaagacatggcgagtgtaccagtatctagcagccgattgtacaagcaccttccctagagtgcggcaaggtcgcccacagagctggcaagatgtgagatgccagagcctcccccagcgccctaacgcgcgcttaaacgggggaaaggttcagctcaatctaatggatttggtcagtggcattcccgctacccagtcccagaaaatccaggaagtgggcgagataacaaacctgagagtgaacttcaccaggctggcccctgtgcctcaaagggggtatcatccacctagtgcgtactatgctgtgagccagctgcggctgcagggcagctgcttttgccatggtcatgcagataggtgcgcccccaagccaggcgcctcggctggacccagtacagccgtgcaagttcacgatgtatgcgtttgccagcataatacagccggccccaactgcgaaagatgtgcccctttttataacaatcggccatggagaccagcggagggccaggacgcccacgagtgccagcggtgtgactgcaacggccactccgagacctgccattttgacccagctgtgtttgcagcaagtcagggggcctatgggggcgtgtgcgataactgtcgcgatcataccgagggcaaaaactgtgaaaggtgccagcttcactatttccgcaaccgcaggccgggcgcttcaatacaagagacttgtatttcttgcgaatgtgacccggacggcgcagtgcccggggcaccttgtgaccccgtgactggtcagtgcgtttgtaaggagcatgtgcaaggggagcgatgtgatctgtgtaagccaggcttcaccggactgacatacgccaaccctcaagggtgtcaccgttgtgattgtaacattctgggtagcaggcgcgatatgccatgcgacgaggaatcaggccgctgcctgtgcctgccaaatgtggtgggacccaaatgcgatcagtgtgctccttatcactggaaactggcctctggtcaaggctgtgagccgtgtgcctgcgatccccataattcactttctccccagtgcaaccaattcactggtcaatgcccttgtcgcgagggcttcggaggtctgatgtgttcggcagctgcaatacggcagtgcccagatcgcacgtatggagatgtggcaaccggatgccgtgcttgtgattgcgacttccggggcactgagggaccaggctgtgacaaggctagtggacgctgtctatgcaggcctggactgaccgggcccaggtgtgaccagtgccaaagagggtattgtaaccgttaccccgtatgcgtcgcctgccatccttgtttccagacatacgacgctgacttgcgggaacaagcactgcgctttgggaggctgcgcaatgccactgccagcttatggagcggaccgggtctcgaggatcgcggactggcttccagaatcctcgatgcaaaaagcaagatagaacagatccgcgcagtgctgtcctctcctgcagtgactgagcaagaggtggcccaggttgcgagcgccatcctgtccctgcggcgaactcttcagggactgcaacttgatctacctctggaagaggaaacactttcgctcccacgtgatctggaaagccttgaccgctcttttaatggtctcctgacaatgtaccaacggaagagggagcagttcgagaagatttcgtccgccgatccatccggcgccttccggatgctgagcaccgcatacgagcagtcagcccaggccgcccaacaagtgtccgactcgtctaggctcctggaccaactgcgagattccaggagggaggccgagcgcctggtgagacaagctggaggtggtggaggcaccggctcccctaaattggtggccctgcggcttgaaatgtctagtctgcccgatttaacacctacgttcaacaaactgtgtggcaattcgcgacagatggcctgtacacccatatcctgtccaggcgagctctgcccacaggataacggcactgcatgcggctcccgatgcagaggcgttctgccgagggctgggggcgcattcctgatggccgggcaggtggccgagcagctcagggggttcaacgcacaattgcaaagaacgcggcagatgatcagggccgcggaagaatcagcctctcagatccagagctcagctcagaggctggagacccaagtgtctgcatcccgcagccaaatggaggaagatgtacgccgcacccggctccttatccaacaggtgagagacttccttaccgaccccgatactgacgctgccaccatacaggaggttagcgaggccgttcttgcgttgtggctgccaacagattcagctacagtgctgcagaagatgaatgagattcaagcaattgccgcccgattgccgaacgtggaccttgtgttgtcccaaacaaaacaggacatcgctagggcacgtagactccaggccgaggcggaggaagcccgctcccgggcccacgccgttgagggccaagtcgaggacgttgtcggaaaccttcgacagggaacagttgctctgcaggaggctcaggacacgatgcaaggtacctctcgctcactgcgtctaattcaagatagggtcgcagaagtccagcaggtgttgcgaccggctgaaaagctcgtcacgtcaatgaccaaacagcttggggacttctggactcgcatggaggaactgcggcaccaagcacgacagcaaggtgccgaggcggttcaagcacaacagctcgcggagggagcatccgaacaggccctctcagcacaagaaggattcgaacgcataaagcaaaagtatgctgaactgaaggacagattaggccagtcatcaatgctgggagagcaaggagcccgcattcagagtgtgaaaacagaggccgaggagctcttcggagagacaatggaaatgatggaccgtatgaaggatatggagcttgagctgctccggggctcacaggccatcatgttgcggtctgcagacctgaccgggctggagaagagagtcgaacagataagggatcacattaacggcagagtcttgtattatgctacatgtaagtag

SEQ ID NO: 45188 - DNA, 3519 bp, Artificial Sequence
  derived and/or modified sequence
atgcgcccattcttccttctgtgcttcgccctgccggggctcctgcatgcccagcaggcgtgctcacggggggcatgctatccacctgtcggagacctcctagttgggaggacgcgcttcctgcgggccagtagtacctgcggcttgaccaagccagagacctattgtactcagtatggagaatggcagatgaagtgctgtaaatgtgattcgcggcagcctcacaattactattcacatagggtggagaatgtggccagcagctctggcccaatgcgatggtggcagtcccagaatgacgtcaaccctgtgagtctccagcttgatctggacagaaggtttcagctccaggaggtgatgatggagtttcagggacccatgcccgctggcatgctcattgagcggagtagcgactttggaaaaacgtggagagtctaccagtatctcgccgccgattgtacgtccacattcccccgagttcgccaaggtaggccccagtcatggcaggatgtacgatgtcagagcttgccccagcgtccgaacgctcgcttaaatggcggcaaggtgcagctcaatttgatggatctggtcagcggaattcccgcaactcagagccagaaaatccaggaggtgggtgagataactaatctaagggtaaacttcactaggctggctccagttccacagaggggatatcaccccccaagtgcgtattacgctgtgtcccagctgagacttcagggttcttgcttttgtcatggtcacgccgacagatgtgcccccaagcctggcgcttccgccggccccagtaccgccgtgcaggtgcacgatgtttgtgtgtgtcaacataatactgctggcccaaactgcgagcgatgtgctccattctacaacaatagaccctggagaccagctgaagggcaagatgcccacgaatgccaacggtgcgattgtaatggccattcagagacctgtcattttgatcccgctgtgttcgcagcgtcccagggtgcctatggcggcgtctgcgataactgtcgtgatcacactgaaggtaagaactgtgagcgatgccaactgcactatttcaggaacagacgcccgggcgcctctatacaggagacctgtatcagttgtgaatgcgacccggatggcgccgtgcccggggccccttgcgacccagttaccgggcaatgcgtatgcaaagaacacgtgcagggagaacgttgcgacctttgtaaaccaggatttaccgggctgacgtatgccaatcctcaaggatgtcaccgttgcgattgcaacatcctcggctctcggcgggatatgccgtgtgacgaggagagcggccggtgcctctgtctgcctaacgtcgtgggacctaagtgcgaccagtgcgctccctaccactggaagttagcatccggacagggatgcgagccttgcgcctgcgatccccacaattcgctgagtccccagtgtaaccagtttaccggacaatgcccctgcagggaggggtttgggggtttaatgtgctccgccgctgcaattcgccaatgcccagatcgaacgtacggcgatgttgccaccgggtgcagagcctgcgactgcgatttcaggggaacagagggaccaggatgcgacaaagctagcgggcgttgcttgtgccgacctggactaaccggcccaagatgtgatcagtgccagcggggctattgcaatcggtatccggtctgtgttgcctgccatccttgcttccagacgtatgatgccgatctcagagaacaggccttaaggttcggaagactcagaaacgccaccgcgagtttgtggtctggtcctggcttggaggataggggactagcctcacggatcctagacgccaaatccaaaattgagcaaattcgggcggtcttgagttctcctgcggtgaccgagcaggaggtagcacaagtggcttctgccattttatccctgagacgcactctccaggggctccagctagatctgcccttggaggaggagaccctcagtttaccccgggacctagagtcgctcgatcgaagcttcaatggtctgctaacaatgtaccagcggaagagagaacagttcgaaaaaattagcagtgctgatccctccggggcattcagaatgctgagcactgcgtacgagcagtccgctcaagcggctcagcaggtttctgactcctctcggctgttggatcagctacgcgacagccgacgggaggcagagaggttggtccgacaggccggcggcgggggcggtacaggcagccctaagctcgtggccttgaggttagagatgtcatccctgccagatttgacacctacttttaacaaactgtgcggaaacagccgccaaatggcttgtactcccataagctgcccaggcgaactatgtccgcaggataacggcactgcgtgcgggtctaggtgcaggggcgtgcttcccagggcaggaggtgcctttcttatggcaggacaagtagcagaacaactgcgcggctttaatgctcagctgcagcgcacacgccaaatgataagagctgctgaagagtccgctagtcagatccagtctagcgcccaacgactagagacccaggtctctgccagtagatcacagatggaagaggacgttcgtcgaactcggctgctcatccagcaggtgcgagatttcctgactgaccccgataccgatgccgctacgatccaagaggtgtccgaagccgttctcgctctctggctgcccacagatagcgctactgttctgcaaaagatgaacgagattcaggccattgcggccaggttgccgaacgtggacttggtcctgtcgcaaaccaaacaggacattgccagggcgcgtcggctccaggctgaagccgaggaagcaaggtcaagggctcatgcagtcgagggacaggtggaggacgtcgtgggcaatctgagacagggcaccgtggctctccaagaagcccaggacactatgcaaggcacttcacggtcactgaggttaatccaggaccgcgtggctgaggtgcaacaggtgctgcgacctgccgagaaacttgttactagcatgaccaaacaactaggtgatttttggactaggatggaagaacttaggcaccaggcgagacagcagggagctgaggccgtccaggctcagcaactggcagagggcgcaagcgaacaggccctgagcgcacaagaaggattcgagcgaatcaagcaaaaatacgccgagctcaaggatcggttaggccagtcatccatgttaggggaacagggtgcccggatccagagtgtcaagacggaggctgaagagctatttggcgagacaatggaaatgatggaccgcatgaaagacatggagctggagttgctacgcgggtctcaggcaatcatgctgcgaagtgccgacctcacggggctggaaaagcgagttgaacagatccgggaccacatcaatgggagggttctatattatgcaacttgcaaatag

SEQ ID NO: 45189 - DNA, 567 bp, Artificial Sequence
  derived and/or modified sequence
atgcgccctttctttctcttatgttttgccctacccggtctgcttcacgcccaacaggcgtgcagccgaggcgcatgttatccgccagtgggcgacctactggtaggccgaacccgctttcttcgagcctcctccacgtgtggtctcacgaaacctgagacctattgcacacagtacggcgagtggcagatgaaatgctgtaaatgcgactcacggcagcctcacaactattattcccacagggtggagaatgtggcaagcagttctggccctatgcgatggtggcaatcccagaacgacgtcaatcccgttagcctgcagctcgacctggaccgtagatttcagctccaagaggttatgatggaattccagggcccaatgcctgcaggcatgctaatcgagagatcttcggatttcggaaagacatggagagtttaccagtacctggcagccgattgtacatcaacattccccagggttaggcagggcaggccacagtcatggcaggatgtgcgttgccaatctctaccccagcgccctaacgcccggctcaatggtgggaaatag

SEQ ID NO: 45190 - DNA, 483 bp, Artificial Sequence
  derived and/or modified sequence
atgaatgagatccaggccattgctgctcgactccccaacgtagacctggtccttagtcagaccaaacaggacattgcccgggctcgaaggttacaggcagaggcggaagaggctcgatcccgcgcccacgctgtggaaggtcaggtggaggatgttgtaggtaacttaagacagggaactgtagccctgcaggaggcacaggacactatgcagggaacgtctcggtctcttcggttgatacaggaccgcgtggccgaggtgcagcaagtgttgagaccagctgaaaagcttgttacttccatgacaaagcagctcggtgatttctggaccagaatggaggagcttcggcatcaggcccgtcagcagggtgccgaagccgtccaggcacagcaactggctgagggggcctcagagcaggctctttctgctcaggagggcttcgagcgaatcaagcagaaatacgccgagttgaaagacagatag

SEQ ID NO: 45191 - DNA, 4033 bp, Artificial Sequence
  derived and/or modified sequence
ggctgttgtttaaaaacctggagccgggaggggagacccccacattcaagaggagctttcaggcgatctggagaaagaacggcagaacacacagcaaggaaaggtcctttctggggatcaccccattggctgaagatgagaccattcttcctcttgtgttttgccctgcctggcctcctgcatgcccaacaagcctgctcccgtggggcctgctatccacctgttggggacctgcttgttgggaggacccggtttctccgagcttcatctacctgtggactgaccaagcctgagacctactgcacccagtatggcgagtggcagatgaaatgctgcaagtgtgactccaggcagcctcacaactactacagtcaccgagtagagaatgtggcttcatcctccggccccatgcgctggtggcagtcacagaatgatgtgaaccctgtctctctgcagctggacctggacaggagattccagcttcaagaagtcatgatggagttccaggggcccatgcccgccggcatgctgattgagcgctcctcagacttcggtaagacctggcgagtgtaccagtacctggctgccgactgcacctccaccttccctcgggtccgccagggtcggcctcagagctggcaggatgttcggtgccagtccctgcctcagaggcctaatgcacgcctaaatggggggaaggtccaacttaaccttatggatttagtgtctgggattccagcaactcaaagtcaaaaaattcaagaggtgggggagatcacaaacttgagagtcaatttcaccaggctggcccctgtgccccaaaggggctaccaccctcccagcgcctactatgctgtgtcccagctccgtctgcaggggagctgcttctgtcacggccatgctgatcgctgcgcacccaagcctggggcctctgcaggcccctccaccgctgtgcaggtccacgatgtctgtgtctgccagcacaacactgccggcccaaattgtgagcgctgtgcacccttctacaacaaccggccctggagaccggcggagggccaggacgcccatgaatgccaaaggtgcgactgcaatgggcactcagagacatgtcactttgaccccgctgtgtttgccgccagccagggggcatatggaggtgtgtgtgacaattgccgggaccacaccgaaggcaagaactgtgagcggtgtcagctgcactatttccggaaccggcgcccgggagcttccattcaggagacctgcatctcctgcgagtgtgatccggatggggcagtgccaggggctccctgtgacccagtgaccgggcagtgtgtgtgcaaggagcatgtgcagggagagcgctgtgacctatgcaagccgggcttcactggactcacctacgccaacccgcagggctgccaccgctgtgactgcaacatcctggggtcccggagggacatgccgtgtgacgaggagagtgggcgctgcctttgtctgcccaacgtggtgggtcccaaatgtgaccagtgtgctccctaccactggaagctggccagtggccagggctgtgaaccgtgtgcctgcgacccgcacaactccctcagcccacagtgcaaccagttcacagggcagtgcccctgtcgggaaggctttggtggcctgatgtgcagcgctgcagccatccgccagtgtccagaccggacctatggagacgtggccacaggatgccgagcctgtgactgtgatttccggggaacagagggcccgggctgcgacaaggcatcaggccgctgcctctgccgccctggcttgaccgggccccgctgtgaccagtgccagcgaggctactgtaatcgctacccggtgtgcgtggcctgccacccttgcttccagacctatgatgcggacctccgggagcaggccctgcgctttggtagactccgcaatgccaccgccagcctgtggtcagggcctgggctggaggaccgtggcctggcctcccggatcctagatgcaaagagtaagattgagcagatccgagcagttctcagcagccccgcagtcacagagcaggaggtggctcaggtggccagtgccatcctctccctcaggcgaactctccagggcctgcagctggatctgcccctggaggaggagacgttgtcccttccgagagacctggagagtcttgacagaagcttcaatggtctccttactatgtatcagaggaagagggagcagtttgaaaaaataagcagtgctgatccttcaggagccttccggatgctgagcacagcctacgagcagtcagcccaggctgctcagcaggtctccgacagctcgcgccttttggaccagctcagggacagccggagagaggcagagaggctggtgcggcaggcgggaggaggaggaggcaccggcagccccaagcttgtggccctgaggctggagatgtcttcgttgcctgacctgacacccaccttcaacaagctctgtggcaactccaggcagatggcttgcaccccaatatcatgccctggtgagctatgtccccaagacaatggcacagcctgtggctcccgctgcaggggtgtccttcccagggccggtggggccttcttgatggcggggcaggtggctgagcagctgcggggcttcaatgcccagctccagcggaccaggcagatgattagggcagccgaggaatctgcctcacagattcaatccagtgcccagcgcttggagacccaggtgagcgccagccgctcccagatggaggaagatgtcagacgcacacggctcctaatccagcaggtccgggacttcctaacagaccccgacactgatgcagccactatccaggaggtcagcgaggccgtgctggccctgtggctgcccacagactcagctactgttctgcagaagatgaatgagatccaggccattgcagccaggctccccaacgtggacttggtgctgtcccagaccaagcaggacattgcgcgtgcccgccggttgcaggctgaggctgaggaagccaggagccgagcccatgcagtggagggccaggtggaagatgtggttgggaacctgcggcaggggacagtggcactgcaggaagctcaggacaccatgcaaggcaccagccgctcccttcggcttatccaggacagggttgctgaggttcagcaggtactgcggccagcagaaaagctggtgacaagcatgaccaagcagctgggtgacttctggacacggatggaggagctccgccaccaagcccggcagcagggggcagaggcagtccaggcccagcagcttgcggaaggtgccagcgagcaggcattgagtgcccaagagggatttgagagaataaaacaaaagtatgctgagttgaaggaccggttgggtcagagttccatgctgggtgagcagggtgcccggatccagagtgtgaagacagaggcagaggagctgtttggggagaccatggagatgatggacaggatgaaagacatggagttggagctgctgcggggcagccaggccatcatgctgcgctcagcggacctgacaggactggagaagcgtgtggagcagatccgtgaccacatcaatgggcgcgtgctctactatgccacctgcaagtgatgctacagcttccagcccgttgccccactcatctgccgcctttgcttttggttgggggcagattgggttggaatgctttccatctccaggagactttcatgcagcctaaagtacagcctggaccacccctggtgtgtagctagtaagattaccctgagctgcagctgagcctgagccaatgggacagttacacttgacagacaaagatggtggagattggcatgccattgaaactaagagctctcaagtcaaggaagctgggctgggcagtatcccccgcctttagttctccactggggaggaatcctggaccaagcacaaaaacttaacaaaagtgatgtaaaaatgaaaagccaaataaaaatctttggaaaagagc

SEQ ID NO: 45192 - DNA, 3931 bp, Artificial Sequence
  derived and/or modified sequence
gcgggaggaggactgtatctctggatgcctggggcctggtttcagggcctgatttattcctcttcctgggagctcactcaggaaaggtcctttctggggatcaccccattggctgaagatgagaccattcttcctcttgtgttttgccctgcctggcctcctgcatgcccaacaagcctgctcccgtggggcctgctatccacctgttggggacctgcttgttgggaggacccggtttctccgagcttcatctacctgtggactgaccaagcctgagacctactgcacccagtatggcgagtggcagatgaaatgctgcaagtgtgactccaggcagcctcacaactactacagtcaccgagtagagaatgtggcttcatcctccggccccatgcgctggtggcagtcacagaatgatgtgaaccctgtctctctgcagctggacctggacaggagattccagcttcaagaagtcatgatggagttccaggggcccatgcccgccggcatgctgattgagcgctcctcagacttcggtaagacctggcgagtgtaccagtacctggctgccgactgcacctccaccttccctcgggtccgccagggtcggcctcagagctggcaggatgttcggtgccagtccctgcctcagaggcctaatgcacgcctaaatggggggaaggtccaacttaaccttatggatttagtgtctgggattccagcaactcaaagtcaaaaaattcaagaggtgggggagatcacaaacttgagagtcaatttcaccaggctggcccctgtgccccaaaggggctaccaccctcccagcgcctactatgctgtgtcccagctccgtctgcaggggagctgcttctgtcacggccatgctgatcgctgcgcacccaagcctggggcctctgcaggcccctccaccgctgtgcaggtccacgatgtctgtgtctgccagcacaacactgccggcccaaattgtgagcgctgtgcacccttctacaacaaccggccctggagaccggcggagggccaggacgcccatgaatgccaaaggtgcgactgcaatgggcactcagagacatgtcactttgaccccgctgtgtttgccgccagccagggggcatatggaggtgtgtgtgacaattgccgggaccacaccgaaggcaagaactgtgagcggtgtcagctgcactatttccggaaccggcgcccgggagcttccattcaggagacctgcatctcctgcgagtgtgatccggatggggcagtgccaggggctccctgtgacccagtgaccgggcagtgtgtgtgcaaggagcatgtgcagggagagcgctgtgacctatgcaagccgggcttcactggactcacctacgccaacccgcagggctgccaccgctgtgactgcaacatcctggggtcccggagggacatgccgtgtgacgaggagagtgggcgctgcctttgtctgcccaacgtggtgggtcccaaatgtgaccagtgtgctccctaccactggaagctggccagtggccagggctgtgaaccgtgtgcctgcgacccgcacaactccctcagcccacagtgcaaccagttcacagggcagtgcccctgtcgggaaggctttggtggcctgatgtgcagcgctgcagccatccgccagtgtccagaccggacctatggagacgtggccacaggatgccgagcctgtgactgtgatttccggggaacagagggcccgggctgcgacaaggcatcaggccgctgcctctgccgccctggcttgaccgggccccgctgtgaccagtgccagcgaggctactgtaatcgctacccggtgtgcgtggcctgccacccttgcttccagacctatgatgcggacctccgggagcaggccctgcgctttggtagactccgcaatgccaccgccagcctgtggtcagggcctgggctggaggaccgtggcctggcctcccggatcctagatgcaaagagtaagattgagcagatccgagcagttctcagcagccccgcagtcacagagcaggaggtggctcaggtggccagtgccatcctctccctcaggcgaactctccagggcctgcagctggatctgcccctggaggaggagacgttgtcccttccgagagacctggagagtcttgacagaagcttcaatggtctccttactatgtatcagaggaagagggagcagtttgaaaaaataagcagtgctgatccttcaggagccttccggatgctgagcacagcctacgagcagtcagcccaggctgctcagcaggtctccgacagctcgcgccttttggaccagctcagggacagccggagagaggcagagaggctggtgcggcaggcgggaggaggaggaggcaccggcagccccaagcttgtggccctgaggctggagatgtcttcgttgcctgacctgacacccaccttcaacaagctctgtggcaactccaggcagatggcttgcaccccaatatcatgccctggtgagctatgtccccaagacaatggcacagcctgtggctcccgctgcaggggtgtccttcccagggccggtggggccttcttgatggcggggcaggtggctgagcagctgcggggcttcaatgcccagctccagcggaccaggcagatgattagggcagccgaggaatctgcctcacagattcaatccagtgcccagcgcttggagacccaggtgagcgccagccgctcccagatggaggaagatgtcagacgcacacggctcctaatccagcaggtccgggacttcctaacagaccccgacactgatgcagccactatccaggaggtcagcgaggccgtgctggccctgtggctgcccacagactcagctactgttctgcagaagatgaatgagatccaggccattgcagccaggctccccaacgtggacttggtgctgtcccagaccaagcaggacattgcgcgtgcccgccggttgcaggctgaggctgaggaagccaggagccgagcccatgcagtggagggccaggtggaagatgtggttgggaacctgcggcaggggacagtggcactgcaggaagctcaggacaccatgcaaggcaccagccgctcccttcggcttatccaggacagggttgctgaggttcagcaggtactgcggccagcagaaaagctggtgacaagcatgaccaagcagctgggtgacttctggacacggatggaggagctccgccaccaagcccggcagcagggggcagaggcagtccaggcccagcagcttgcggaaggtgccagcgagcaggcattgagtgcccaagagggatttgagagaataaaacaaaagtatgctgagttgaaggaccggttgggtcagagttccatgctgggtgagcagggtgcccggatccagagtgtgaagacagaggcagaggagctgtttggggagaccatggagatgatggacaggatgaaagacatggagttggagctgctgcggggcagccaggccatcatgctgcgctcagcggacctgacaggactggagaagcgtgtggagcagatccgtgaccacatcaatgggcgcgtgctctactatgccacctgcaagtgatgctacagcttccagcccgttgccccactcatctgccgcctttgcttttggttgggggcagattgggttggaatgctttccatctccaggagactttcatgcagcctaaagtacagcctggaccacccctggtgtgtagctagtaagattaccctgagctgcagctgagcctgagccaatgggacagttacacttgacagacaaagatggtggagattggcatgccattgaaactaagagctctcaagtcaaggaagctgggctgggcagtatcccccgcctttagttctccac

SEQ ID NO: 45193 - DNA, 4305 bp, Artificial Sequence
  derived and/or modified sequence
cttttctcctgcaaagggtccagccttttcctgctccccacgttgtccttacggctgtgtggggtagggcagggtccacactccttcccatccattttagaggaggaagctggagtctgggaagggatgggattttcccagggcaccctgtgagtcacatgccacttgagacaagggtctagagctccagcattttccaagctacaaatgtatctgctgctccaagtgtcctagatcaggaccctaggtaaagacttctgaaaaatacttgagtctagaaacagaaaagaaaaagggctagtgtgctctaggggtttgcactgttgtacccagtttgctttgctgtgtcctaggaaaggtcctttctggggatcaccccattggctgaagatgagaccattcttcctcttgtgttttgccctgcctggcctcctgcatgcccaacaagcctgctcccgtggggcctgctatccacctgttggggacctgcttgttgggaggacccggtttctccgagcttcatctacctgtggactgaccaagcctgagacctactgcacccagtatggcgagtggcagatgaaatgctgcaagtgtgactccaggcagcctcacaactactacagtcaccgagtagagaatgtggcttcatcctccggccccatgcgctggtggcagtcacagaatgatgtgaaccctgtctctctgcagctggacctggacaggagattccagcttcaagaagtcatgatggagttccaggggcccatgcccgccggcatgctgattgagcgctcctcagacttcggtaagacctggcgagtgtaccagtacctggctgccgactgcacctccaccttccctcgggtccgccagggtcggcctcagagctggcaggatgttcggtgccagtccctgcctcagaggcctaatgcacgcctaaatggggggaaggtccaacttaaccttatggatttagtgtctgggattccagcaactcaaagtcaaaaaattcaagaggtgggggagatcacaaacttgagagtcaatttcaccaggctggcccctgtgccccaaaggggctaccaccctcccagcgcctactatgctgtgtcccagctccgtctgcaggggagctgcttctgtcacggccatgctgatcgctgcgcacccaagcctggggcctctgcaggcccctccaccgctgtgcaggtccacgatgtctgtgtctgccagcacaacactgccggcccaaattgtgagcgctgtgcacccttctacaacaaccggccctggagaccggcggagggccaggacgcccatgaatgccaaaggtgcgactgcaatgggcactcagagacatgtcactttgaccccgctgtgtttgccgccagccagggggcatatggaggtgtgtgtgacaattgccgggaccacaccgaaggcaagaactgtgagcggtgtcagctgcactatttccggaaccggcgcccgggagcttccattcaggagacctgcatctcctgcgagtgtgatccggatggggcagtgccaggggctccctgtgacccagtgaccgggcagtgtgtgtgcaaggagcatgtgcagggagagcgctgtgacctatgcaagccgggcttcactggactcacctacgccaacccgcagggctgccaccgctgtgactgcaacatcctggggtcccggagggacatgccgtgtgacgaggagagtgggcgctgcctttgtctgcccaacgtggtgggtcccaaatgtgaccagtgtgctccctaccactggaagctggccagtggccagggctgtgaaccgtgtgcctgcgacccgcacaactccctcagcccacagtgcaaccagttcacagggcagtgcccctgtcgggaaggctttggtggcctgatgtgcagcgctgcagccatccgccagtgtccagaccggacctatggagacgtggccacaggatgccgagcctgtgactgtgatttccggggaacagagggcccgggctgcgacaaggcatcaggccgctgcctctgccgccctggcttgaccgggccccgctgtgaccagtgccagcgaggctactgtaatcgctacccggtgtgcgtggcctgccacccttgcttccagacctatgatgcggacctccgggagcaggccctgcgctttggtagactccgcaatgccaccgccagcctgtggtcagggcctgggctggaggaccgtggcctggcctcccggatcctagatgcaaagagtaagattgagcagatccgagcagttctcagcagccccgcagtcacagagcaggaggtggctcaggtggccagtgccatcctctccctcaggcgaactctccagggcctgcagctggatctgcccctggaggaggagacgttgtcccttccgagagacctggagagtcttgacagaagcttcaatggtctccttactatgtatcagaggaagagggagcagtttgaaaaaataagcagtgctgatccttcaggagccttccggatgctgagcacagcctacgagcagtcagcccaggctgctcagcaggtctccgacagctcgcgccttttggaccagctcagggacagccggagagaggcagagaggctggtgcggcaggcgggaggaggaggaggcaccggcagccccaagcttgtggccctgaggctggagatgtcttcgttgcctgacctgacacccaccttcaacaagctctgtggcaactccaggcagatggcttgcaccccaatatcatgccctggtgagctatgtccccaagacaatggcacagcctgtggctcccgctgcaggggtgtccttcccagggccggtggggccttcttgatggcggggcaggtggctgagcagctgcggggcttcaatgcccagctccagcggaccaggcagatgattagggcagccgaggaatctgcctcacagattcaatccagtgcccagcgcttggagacccaggtgagcgccagccgctcccagatggaggaagatgtcagacgcacacggctcctaatccagcaggtccgggacttcctaacagaccccgacactgatgcagccactatccaggaggtcagcgaggccgtgctggccctgtggctgcccacagactcagctactgttctgcagaagatgaatgagatccaggccattgcagccaggctccccaacgtggacttggtgctgtcccagaccaagcaggacattgcgcgtgcccgccggttgcaggctgaggctgaggaagccaggagccgagcccatgcagtggagggccaggtggaagatgtggttgggaacctgcggcaggggacagtggcactgcaggaagctcaggacaccatgcaaggcaccagccgctcccttcggcttatccaggacagggttgctgaggttcagcaggtactgcggccagcagaaaagctggtgacaagcatgaccaagcagctgggtgacttctggacacggatggaggagctccgccaccaagcccggcagcagggggcagaggcagtccaggcccagcagcttgcggaaggtgccagcgagcaggcattgagtgcccaagagggatttgagagaataaaacaaaagtatgctgagttgaaggaccggttgggtcagagttccatgctgggtgagcagggtgcccggatccagagtgtgaagacagaggcagaggagctgtttggggagaccatggagatgatggacaggatgaaagacatggagttggagctgctgcggggcagccaggccatcatgctgcgctcagcggacctgacaggactggagaagcgtgtggagcagatccgtgaccacatcaatgggcgcgtgctctactatgccacctgcaagtgatgctacagcttccagcccgttgccccactcatctgccgcctttgcttttggttgggggcagattgggttggaatgctttccatctccaggagactttcatgcagcctaaagtacagcctggaccacccctggtgtgtagctagtaagattaccctgagctgcagctgagcctgagccaatgggacagttacacttgacagacaaagatggtggagattggcatgccattgaaactaagagctctcaagtcaaggaagctgggctgggcagtatcccccgcctttagttctccactggggaggaatcctggaccaagcacaaaaacttaacaaaagtgatgtaaaaatgaaaagccaaataaaaatctttggaaaagagcctggaggttcaacgagg

SEQ ID NO: 45194 - DNA, 908 bp, Artificial Sequence
  derived and/or modified sequence
ccctgagaaaagccagccctctctcttggggctggaactaggtcttggccctttctacagcttttctcctgcaaagggtccagccttttcctgctccccacgttgtccttacggctgtgtggggtagggcagggtccacactccttcccatccattttagaggaggaagctggagtctgggaagggatgggattttcccagggcaccctgtgagtcacatgccacttgagacaagggtctagagctccagcattttccaagctacaaatgtatctgctgctccaagtgtcctagatcaggaccctaggaaaggtcctttctggggatcaccccattggctgaagatgagaccattcttcctcttgtgttttgccctgcctggcctcctgcatgcccaacaagcctgctcccgtggggcctgctatccacctgttggggacctgcttgttgggaggacccggtttctccgagcttcatctacctgtggactgaccaagcctgagacctactgcacccagtatggcgagtggcagatgaaatgctgcaagtgtgactccaggcagcctcacaactactacagtcaccgagtagagaatgtggcttcatcctccggccccatgcgctggtggcagtcacagaatgatgtgaaccctgtctctctgcagctggacctggacaggagattccagcttcaagaagtcatgatggagttccaggggcccatgcccgccggcatgctgattgagcgctcctcagacttcggtaagacctggcgagtgtaccagtacctggctgccgactgcacctccaccttccctcgggtccgccagggtcggcctcagagctggcaggatgttcggtgccagtccctgcctcagaggcctaatgcacgcctaaatggggggaag

SEQ ID NO: 45195 - DNA, 710 bp, Artificial Sequence
  derived and/or modified sequence
agggggcagcagctccttgggacaccacggtagaggggccactgtgggtgccttccacaagtgctgctcagctaggagaggcctcgtatctctggggaggttagtgggctcctacagtcaaatgcgtgttgtcttccagaccccgacactgatgcagccactatccaggaggtcagcgaggccgtgctggccctgtggctgcccacagactcagctactgttctgcagaagatgaatgagatccaggccattgcagccaggctccccaacgtggacttggtgctgtcccagaccaagcaggacattgcgcgtgcccgccggttgcaggctgaggctgaggaagccaggagccgagcccatgcagtggagggccaggtggaagatgtggttgggaacctgcggcaggggacagtggcactgcaggaagctcaggacaccatgcaaggcaccagccgctcccttcggcttatccaggacagggttgctgaggttcagcaggtactgcggccagcagaaaagctggtgacaagcatgaccaagcagctgggtgacttctggacacggatggaggagctccgccaccaagcccggcagcagggggcagaggcagtccaggcccagcagcttgcggaaggtgccagcgagcaggcattgagtgcccaagagggatttgagagaataaaacaaaagtatgctgagttgaaggaccg

SEQ ID NO: 45196 - DNA, 598 bp, Artificial Sequence
  derived and/or modified sequence
atgtcttgccagcagagccagcagcagtgccagccccctcccaagtgcactcccaagtgccctcccaagtgccccacaccgaagtgccccccaaagtgtccccctaagtgccctcctgtctcttcctgctgcagcgtcagctccggaggctgctgtggctccagctctgggggctgctgcagctctgggggtggtggctgctgcagctctgggggaggcggctgttgcctgagccaccacagacggcgtaggtcccaccgccacagaccccagagctctgactgctgcagccagccctcagcgggctccagctgctgcggagggggcagtggccagcactctggaggctgctgctgaagtggaccctgtgcctaaaagagcagatttagaggcatgaaaggggcaacttcatcttccttgggactgactgtgttgctgggacattttagtaaagatttcaaactctgtcctggaagattcctccgacctagaatccagaaatctgccctctcacaagaattcctcttctgacctctgattccatctgtgcgcctggcctgggaataccaaatagaagtccttgcctcattcccctgat

SEQ ID NO: 45197 - DNA, 3519 bp, Artificial Sequence
  derived and/or modified sequence
atgaggcccttcttcctgctgtgctttgccctgcccggcctgctgcacgcccagcaggcctgcagcagaggagcctgctacccacctgtgggggacctgctggtgggccgcacccgcttcctgcgggccagcagcacctgtggcctgaccaagccagagacctactgcacccagtatggagagtggcagatgaagtgctgcaagtgtgacagccggcagccccacaactactacagccaccgggtggagaatgtggccagcagcagcggccccatgcgctggtggcagagccagaatgatgtgaaccctgtgtccctgcagctggacctggaccggcgcttccagctgcaggaggtgatgatggagttccagggccccatgcctgctggcatgctgattgaaagaagcagtgactttgggaagacctggagggtgtaccagtacctggccgctgactgcaccagcaccttcccccgggtgcggcagggccggccccagagctggcaggatgtgcgctgccagagcctgccccagaggcccaatgcccggctgaatggaggcaaggtgcagctgaacctgatggacctggtgtctggcatcccagccacccagagccagaagatccaggaggtgggggagatcaccaacctgcgggtgaacttcacccggctggcccctgtgccccagaggggctaccacccccccagcgcctactatgctgtgtcccagctgcggctgcagggcagctgcttctgccacggccacgccgacagatgtgcccccaagccaggggccagcgctggccccagcacagctgtgcaggtgcatgatgtgtgtgtgtgccagcacaacacagctggccccaactgtgagcgctgtgcccccttctacaacaaccggccctggaggcctgctgagggccaggatgcccacgagtgccagagatgtgactgcaatggccacagcgagacctgccactttgatcctgctgtgtttgctgccagccagggcgcctatggaggagtgtgtgacaactgccgggaccacacagagggcaagaactgtgagcgctgccagctgcactacttcaggaacagaagacctggggccagcatccaggagacctgcatcagctgtgaatgtgaccctgatggagctgtgcctggggccccctgtgaccctgtgacaggccagtgtgtgtgcaaggagcacgtgcagggcgagcgctgtgacctgtgcaagccaggcttcaccggcctgacctacgccaacccccagggctgccaccgctgtgactgcaacatcctgggcagcagaagagacatgccctgtgatgaggagagcggccgctgcctgtgcctgcccaacgtggtgggccccaagtgtgaccagtgtgccccctaccactggaagctggccagcggccagggctgtgagccctgtgcctgtgacccccacaacagcctgagcccccagtgcaaccagttcaccggccagtgcccctgccgggagggctttggaggcctgatgtgcagcgctgctgccatccggcagtgcccagacaggacctatggagatgtggccaccggctgccgggcctgtgactgtgacttccggggcacagagggccctggctgtgacaaggccagcggccgctgcctgtgcaggcctggcctgaccggcccccgctgtgaccagtgccagaggggctactgcaaccgctaccctgtgtgtgtggcctgccacccctgcttccagacctatgatgctgacctgcgggagcaggccctgcgcttcggccgcctgagaaatgccacagccagcctgtggagcggccctggcctggaggaccggggcctggccagccgcatcctggatgccaagagcaagattgagcagatccgggctgtgctgagcagccctgctgtgacagagcaggaggtggcccaggtggccagcgccatcctgagcctgcggaggaccctgcagggcctgcagctggacctgcccctggaggaggagaccctgagcctgccccgggacctggagagcctggacaggagcttcaacggcctgctgaccatgtaccagaggaagcgggagcagtttgagaagatcagcagcgctgaccccagcggggccttcaggatgctgagcacagcctatgagcagagcgcccaggccgcccagcaggtgtctgacagcagccggctgctggaccagctgcgggacagccggcgggaggccgagcggctggtgcggcaggccggcggcggcggcggcaccggcagccccaagctggtggccctgcggctggagatgagcagcctgcctgacctgacccccaccttcaacaagctgtgtggcaacagccggcagatggcctgcacccccatcagctgccctggagagctgtgcccccaggacaatggaacagcctgtggcagccgctgccggggcgtgctgcccagggctggaggagccttcctgatggccggccaggtggccgagcagctgcggggcttcaatgcccagctgcagaggacccggcagatgatccgggctgctgaggagagcgccagccagatccagagcagcgcccagaggctggagacccaggtgtctgccagccgcagccagatggaggaggatgtgcggaggacccggctgctgatccagcaggtgcgggacttcctgacagatcctgacacagatgctgccaccatccaggaggtgtctgaggccgtgctggccctgtggctgcccacagattctgccaccgtgctgcagaagatgaatgagatccaggccatcgccgcccggctgcccaacgtggacctggtgctgagccagaccaagcaggacatcgcccgggcccggcggctgcaggccgaggccgaggaggcccggagccgggcccatgctgtggagggccaggtggaggatgtggtgggcaacctgcggcagggcaccgtggccctgcaggaggcccaggacaccatgcagggcaccagccgcagcctgcggctcatccaggacagagtggccgaggtgcagcaggtgctgcggcctgctgagaagctggtgacctccatgaccaagcagctgggggacttctggaccaggatggaggagctgcggcaccaggcccggcagcagggcgctgaggccgtgcaggcccagcagctggccgagggcgccagcgagcaggccctgagcgcccaggagggctttgagcgcatcaagcagaagtatgcagagctgaaggaccggctgggccagagctccatgctgggggagcagggcgcccgcatccagagcgtgaagacagaggccgaggagctgtttggagagaccatggagatgatggacaggatgaaggacatggagctggagctgctgcggggcagccaggccatcatgctgcggtctgctgacctgaccggcctggagaagagggtggagcagatccgggaccacatcaatggccgggtgctgtactatgccacctgcaagtag

SEQ ID NO: 45198 - DNA, 567 bp, Artificial Sequence
  derived and/or modified sequence
atgaggcccttcttcctgctgtgctttgccctgcccggcctgctgcacgcccagcaggcctgcagcagaggagcctgctacccacctgtgggggacctgctggtgggccgcacccgcttcctgcgggccagcagcacctgtggcctgaccaagccagagacctactgcacccagtatggagagtggcagatgaagtgctgcaagtgtgacagccggcagccccacaactactacagccaccgggtggagaatgtggccagcagcagcggccccatgcgctggtggcagagccagaatgatgtgaaccctgtgtccctgcagctggacctggaccggcgcttccagctgcaggaggtgatgatggagttccagggccccatgcctgctggcatgctgattgaaagaagcagtgactttgggaagacctggagggtgtaccagtacctggccgctgactgcaccagcaccttcccccgggtgcggcagggccggccccagagctggcaggatgtgcgctgccagagcctgccccagaggcccaatgcccggctgaatggaggcaagtag

SEQ ID NO: 45199 - DNA, 483 bp, Artificial Sequence
  derived and/or modified sequence
atgaatgagatccaggccatcgccgcccggctgcccaacgtggacctggtgctgagccagaccaagcaggacatcgcccgggcccggcggctgcaggccgaggccgaggaggcccggagccgggcccatgctgtggagggccaggtggaggatgtggtgggcaacctgcggcagggcaccgtggccctgcaggaggcccaggacaccatgcagggcaccagccgcagcctgcggctcatccaggacagagtggccgaggtgcagcaggtgctgcggcctgctgagaagctggtgacctccatgaccaagcagctgggggacttctggaccaggatggaggagctgcggcaccaggcccggcagcagggcgctgaggccgtgcaggcccagcagctggccgagggcgccagcgagcaggccctgagcgcccaggagggctttgagcgcatcaagcagaagtatgcagagctgaaggacagatag

SEQ ID NO: 45200 - DNA, 3519 bp, Artificial Sequence
  derived and/or modified sequence
atgcggcccttcttcctgctgtgcttcgccctgcccggcctgctgcacgcccagcaggcgtgctctagaggcgcctgttacccaccagttggggatctcctggtaggccgtacccggtttttgcgggcctcgagcacatgtggactcaccaagccagagacctattgcacacaatacggggagtggcagatgaaatgctgtaagtgcgacagtcgtcagccccataactactattcccaccgagtcgagaacgtcgccagctcctcaggacccatgcgctggtggcagtcgcagaatgacgtaaacccagtctccctccagctcgatctcgataggagatttcagctgcaagaggtcatgatggagttccaggggccaatgcccgctgggatgctgatcgaacgctctagtgatttcgggaagacctggcgtgtctaccagtatctggccgctgattgtacatcgaccttcccccgtgtccgccagggcaggcctcaatcttggcaggacgtccgctgtcaaagcctcccccagcgccccaatgccagactgaacggtgggaaggttcagctcaacctgatggatttggtgagtggaattcctgctacccaatctcagaagatccaggaggttggcgagattaccaacctgcgcgtcaattttacaagactggctccagtgccgcaaagaggatatcatcctccttctgcgtactacgcagtcagccagttgaggttgcaagggtcctgcttttgccacggacatgccgacaggtgcgcccccaaacccggcgctagcgccggccccagtactgcggtgcaggtgcacgatgtgtgtgtgtgtcagcataatacggccggccctaactgcgagaggtgtgctcccttttacaacaacaggccctggcgacccgccgaaggccaggacgcccatgagtgccaaagatgcgattgtaacggccactccgagacatgccactttgatccagctgtgttcgccgcatcacagggggcctatgggggagtgtgcgacaattgcagggatcacaccgaggggaaaaattgcgagaggtgccaactccactacttcagaaacaggcgacctggggcaagcatccaagagacatgcatctcatgcgagtgcgatcctgatggtgctgtgcctggcgctccttgcgacccggttacgggccagtgtgtctgtaaagaacacgtccagggtgagcgctgtgatctttgcaagcctggattcacaggcttaacttatgctaaccctcagggctgtcatcgttgtgactgcaacattctgggaagcaggcgagatatgccgtgtgacgaggaatcgggaagatgcttatgcctgccaaacgtcgtaggcccgaaatgtgatcagtgcgcgccgtaccattggaaactcgcctcgggccaggggtgtgagccttgcgcatgcgaccctcacaattcacttagcccccaatgcaatcagttcactggccagtgtccctgtcgcgagggattcggaggcctgatgtgttctgctgctgcgatccggcagtgtccagaccgtacgtatggcgacgtcgctactggctgcagagcctgtgactgcgattttcgtgggaccgaagggccggggtgtgacaaggccagcgggcgatgtctgtgccgtcccggtctcacaggcccacggtgcgatcagtgtcagcgggggtattgcaatcgctaccccgtgtgcgtggcctgccacccgtgcttccaaacttatgacgccgacttgcgtgaacaagccctgcgattcggccgtctgaggaatgccacggcctccctgtggagcggccccggcctagaagatagaggcctggcctccaggatcctcgacgctaagagcaagattgaacagatcagggccgttctttcctctcctgcagtgaccgagcaagaggtggcccaggtggcttctgcaatactctccctgcggcgcactctgcagggacttcaactcgatctaccactcgaggaagagaccctctcccttcctagggatctcgagtcactcgacagatccttcaacggactgttaactatgtatcaaagaaaacgcgagcagtttgagaaaatcagcagcgccgacccttccggggccttcagaatgctgagcactgcatatgagcaatccgcacaggcagctcagcaggtgtccgacagcagtaggcttttagatcagttgcgcgacagtcgtcgcgaggcagaacgccttgttcgacaggcagggggcggcgggggcactggctctccaaagctggtggccctgagattagagatgtcttcactgcctgatcttacccccacatttaataaactttgcgggaattcgagacaaatggcgtgtactccaatcagctgtccgggtgaactctgcccccaggacaatggtaccgcatgcggcagccgctgtcggggcgtattacccagggctggcggtgcatttcttatggctggccaggtggccgaacaactgcgcggattcaacgcccaacttcagagaacacgccagatgattagagctgcagaagaatccgccagccagatccaatcgtccgcacagagactggagacacaggtgtccgcctctcgttctcaaatggaagaggacgtcaggagaaccaggctactgatccagcaagttagagactttctcacagacccagataccgacgccgctacaatacaggaagtttccgaggctgtgttggccctgtggttgcctaccgatagcgctaccgtgctccaaaaaatgaatgagattcaggccatcgccgccaggctccccaatgtagatctcgtgctcagccagactaagcaagatattgcgcgcgctcgccgcctgcaggcggaggctgaggaggctcggtccagggcacatgcagtggaagggcaggtagaggatgttgtaggaaatctaaggcagggtactgtcgccctgcaggaagcccaggacacgatgcaaggcacatccagaagtctgcgactcatccaggacagagtcgctgaagtccagcaggtgctcagacctgcagaaaagctggttacctctatgaccaaacagctgggtgatttttggacccgaatggaagagttaagacaccaagcccgacagcagggcgccgaagcagttcaagcccagcagctggccgagggcgcatcagagcaggctctgtcagcccaggaaggatttgagcggatcaaacagaagtatgccgagctgaaggacagacttgggcagtcatcgatgctcggagagcagggtgcgaggatacaatcggtcaagactgaggccgaagagctctttggtgagaccatggagatgatggacagaatgaaggatatggaacttgagcttctgagagggtcccaggctatcatgctgcgaagcgctgatctgaccgggctagagaagcgtgtggaacagattcgcgatcatataaacggacgcgtgctgtattatgccacctgtaagtag

SEQ ID NO: 45201 - DNA, 3519 bp, Artificial Sequence
  derived and/or modified sequence
atgcggcccttcttcctgctgtgcttcgccctgcccggcctgctgcacgcccagcaggcatgctcacgaggagcatgctatccccccgtaggagatctgttagtggggaggactcgcttcctgcgcgcatcctcaacttgtggattaaccaaaccggaaacatactgcacacagtatggcgaatggcaaatgaaatgttgtaagtgtgatagcaggcagcctcacaactactactctcatcgggttgagaacgtggcttcatcttccggccccatgcgctggtggcagagccagaatgacgtaaatcccgtctccctccagctggatctcgacagacgttttcagttgcaagaggtaatgatggagtttcaagggcccatgccggctggaatgctgattgaaagatctagtgacttcggaaagacttggcgcgtgtatcaatacttggccgccgattgtacctcaacttttcctcgtgttcgccaggggaggccgcagtcttggcaggatgtccgctgccaatccttaccacaaagacccaacgcaagactgaatggggggaaggtgcagctgaatctcatggatctcgtgagcgggattcctgcgacccagtctcagaagattcaggaggtcggagagattaccaacctgagggtcaactttactcgactggcgccggttccccagcgcggttaccacccaccctcggcatattatgctgtgagccaacttagacttcaaggatcatgtttctgccacgggcacgcagaccgctgtgccccaaagcccggagcctctgcaggaccatctactgctgtgcaggtgcatgacgtttgtgtatgccagcataacacagcgggcccaaattgtgaaaggtgtgctccattctacaataaccgtccgtggcgccccgcagaagggcaggatgctcacgagtgtcagcggtgtgattgtaatggccattctgaaacatgtcatttcgatcccgccgttttcgcagcttcccagggggcttatgggggcgtgtgcgataattgtagagatcatacagaagggaaaaactgtgagcgttgtcagctgcactatttccgtaacaggaggccaggggcttctattcaggagacctgcattagttgcgagtgtgatccagacggagcggtgcctggagctccctgcgatcctgtgactggccagtgtgtttgtaaggaacatgtgcagggcgaacggtgtgatctttgtaaaccaggattcacaggcctcacctatgccaacccacaaggctgtcatagatgtgactgcaatatcttgggttctcgcagggatatgccttgtgatgaggagagcggcaggtgtctatgcctacctaatgtcgttggacccaagtgcgaccagtgtgccccataccactggaaactcgcgagcggtcaaggatgcgagccttgcgcctgcgacccccataattcacttagtcctcagtgcaatcagttcactggtcagtgtccttgtagagagggatttggtggactcatgtgcagcgccgccgctattcgccagtgtccagaccgcacatatggcgatgtggctacggggtgccgagcctgtgactgcgacttcaggggaacagaagggccgggttgtgataaggcttctgggaggtgcctctgccgacctggccttacaggcccacgttgcgatcagtgtcaaagaggttattgtaataggtatcctgtgtgtgtcgcttgccatccttgtttccagacatatgacgctgacctgcgagaacaggccttaagatttggaagactgcgcaatgccactgcctccctctggtcagggcccggtctggaggatcgtggtcttgcttcgaggattctggatgctaagtccaagatcgaacagatccgggcggttctcagttcccccgcggtgactgaacaggaagtggcccaagtggctagcgccattctgagcctgcggaggacactgcagggactgcagctggacttaccactggaagaggagaccctcagcctcccgcgcgatctggagtccctcgaccgaagcttcaacgggctgctgacaatgtaccaacgtaagcgggaacagttcgagaagatatcctctgccgacccctcaggggctttccggatgctctccaccgcctacgagcagtcagcccaggccgcacagcaggtgtccgactcatcacgcctcttggatcaattacgagacagccggcgcgaagccgagagactcgtgagacaggccgggggggggggtggcaccggatctccgaagctcgtcgctctgcggctggaaatgagttctctgcccgatctaacaccaactttcaacaaactgtgtggcaactcaaggcagatggcatgcactccaatctcctgcccaggagaactctgcccccaggacaatggtaccgcttgcggcagcagatgtagaggagtcttgccaagggccgggggcgcctttcttatggccggtcaggtcgcagagcaattgcgaggatttaatgctcagctgcagcgtacccgtcagatgatccgagccgctgaggaatccgccagccagatccagtccagtgctcagaggctcgaaacgcaggtaagtgcttcaagatcccaaatggaggaagacgtgagaagaactcgtctccttatccagcaggtgcgcgactttttgaccgatccggatactgacgccgccactatccaggaagtttccgaggctgtgctcgcattgtggttgccaaccgattcggcaaccgtgcttcagaaaatgaatgagatccaggccattgcagcccggctgcccaatgtggacttggtgctgtcacagacaaaacaggatatcgctcgagcaagaaggctccaggcagaggcggaggaagctcgctctcgggctcacgcagtagaagggcaggtggaagatgtggtgggcaacctgcgccagggtaccgtcgctctgcaggaagcccaagatacaatgcagggcacttctagaagcttacggctgattcaggatcgggtggctgaagttcagcaggttcttcggccagctgaaaagctagtgacctcgatgactaagcagcttggtgatttttggacacggatggaggagctccggcatcaggccagacaacaaggcgctgaggctgtgcaggctcaacagcttgctgaaggggctagcgaacaagccttaagcgcgcaggaaggttttgaaagaattaaacaaaagtatgccgagcttaaggataggctggggcagagcagcatgctgggagaacaaggagctcgtattcaatccgtgaaaactgaagccgaggaattatttggcgaaaccatggagatgatggaccggatgaaggacatggagctggaactgctgagaggttcccaggctattatgctgcgaagtgccgacctaaccgggctggaaaagagggtggagcagattcgagatcatatcaatgggagggtgctgtactatgctacgtgtaagtag

SEQ ID NO: 45202 - DNA, 3519 bp, Artificial Sequence
  derived and/or modified sequence
atgcggcccttcttcctgctgtgcttcgccctgcccggcctgctgcacgcccagcaggcgtgcagccgtggagcttgctacccaccggtgggcgatctgctcgtaggacggacccggttcctgagagcttccagcacgtgcgggttgactaaacctgaaacctactgcacgcagtatggagagtggcagatgaaatgctgtaagtgcgattccagacaaccccacaattactactcccatagagtcgagaacgtcgcctccagcagcggccccatgcggtggtggcagagccagaacgacgtgaaccccgtctctctgcaactcgacctcgaccgtagattccagcttcaagaagtgatgatggagtttcaaggccctatgcccgccgggatgctgatcgagcgttctagtgacttcggaaaaacctggcgtgtctatcagtacttagctgccgattgtaccagcaccttcccacgcgtgagacagggaagaccccagagttggcaggacgtgcgctgccagtctctgccacagcgcccaaacgccaggttgaatggtggcaaagtgcagctcaatctcatggatctggtgagcggaatccccgctacacagtctcaaaaaattcaggaagttggggaaataaccaatctcagggtgaacttcactaggctggcccccgtgcctcaacgaggctatcatccgccatccgcgtactatgcagtctcgcagttacgcctccaaggtagctgtttctgccatgggcacgcggacagatgcgcacccaaacccggtgcctccgcaggcccctcaactgccgtccaagtccacgatgtgtgcgtgtgtcagcacaataccgcaggtccaaattgtgagcgttgtgctcctttctacaacaatcggccatggcgccctgccgaggggcaggatgcccatgagtgtcagcgttgcgactgtaacggccacagcgagacctgccacttcgatcccgccgtgttcgcagcttcacagggggcttacggaggagtgtgcgacaattgcagagatcacactgaaggcaaaaattgcgagcgatgccagctccattactttcgcaacaggagacctggtgccagcatccaggagacatgtatatcatgcgagtgtgaccctgacggagccgttccaggcgccccttgcgacccggtgacaggccagtgcgtgtgtaaggagcatgtacagggtgagcgatgtgacttatgtaagcctggtttcacgggcttaacttatgctaacccacaaggatgccatagatgtgattgtaatatcctggggagccggcgcgacatgccgtgcgatgaggaatcgggtagatgtctgtgtctccctaatgtcgtcggcccaaaatgcgaccagtgtgctccttaccattggaagctcgcatccggccaaggctgcgaaccctgtgcttgtgacccgcacaacagtttgagtccacaatgtaaccaattcactggccagtgtccctgccgcgaggggttcggtggcttgatgtgctctgccgcagccattcgtcagtgccccgaccgcacctatggagacgtcgctaccggctgccgagcttgtgattgtgatttccgaggcacagagggtccgggatgtgataaagctagcgggcggtgtttgtgcagacctggcctaaccggccctcgatgtgaccaatgtcaaagaggatactgtaatagatatcccgtgtgcgtggcatgtcacccttgctttcagacctacgatgctgacctccgcgagcaggcactccggttcggcaggctcaggaacgccactgccagcctgtggagtgggccggggctcgaggacaggggattggccagccggatactcgacgcaaagagcaagattgagcagatacgtgccgtgctgagttcgccagctgtgaccgagcaagaggtggcccaggtggcctccgccatccttagcctacgaagaacactccagggcctgcagcttgatctgcccctggaagaggaaacactgtcattgccacgggatcttgaatcactcgaccgaagctttaacggcctcctcaccatgtaccagaggaagcgagaacagtttgagaaaatcagttctgccgacccttccggcgcattccgaatgctatccacggcttatgagcaatcggcacaagccgcccagcaagtctccgatagtagtagactgttggaccaattgagagatagccgaagggaggcagagaggctagtgcgacaggcaggcggcggcgggggcacaggaagccccaaacttgtggccctcaggctggagatgtcctcgctgccagacctgaccccaacctttaataagctgtgtggtaactccaggcagatggcatgtactccgatctcctgtcccggcgaactatgtccccaggacaacggcacggcctgtggttcccgctgccggggagtactgcctagggcaggcggtgcgtttctaatggcaggtcaggtggccgaacagctgcgcggcttcaacgctcagcttcagcggacaaggcagatgatccgagccgcagaagagagcgcatcacagatccagtcctcagcacagcggcttgagactcaggtgagcgcctcgcggagccagatggaagaagatgtgagaaggacccgcttgctcatccagcaagtgagagacttcctcaccgatcctgataccgatgccgccaccattcaagaagtctcagaagctgttctggccctgtggctgcccaccgattctgccactgtattgcagaaaatgaatgagatacaggccatcgcagcccggttgcccaatgtggacctcgttctgtctcagactaaacaagacatcgctagagctcgccgcttgcaggctgaagctgaagaggcccgctccagagcgcatgccgtggaggggcaggtagaagacgtagtgggaaatctacgtcagggcaccgttgccctgcaggaagctcaggatacgatgcaaggcacaagccgtagcttgcgactcatacaagatagggtcgcggaagtgcaacaagtgctgcgtcctgccgagaaactggttacctccatgacaaagcagctgggagatttttggaccagaatggaggaactgagacatcaggcacggcagcagggggccgaagctgtacaggcacagcagcttgcggagggggcatccgaacaagctctgtcagcgcaggagggatttgaacgcattaagcagaagtatgctgaactgaaggatcggctgggccagtcatccatgttgggcgagcagggcgctaggattcagagtgttaaaaccgaagctgaagaattgttcggggagacaatggaaatgatggacaggatgaaggacatggagttggagctacttcggggatcacaggctattatgcttcggtccgctgatttgactggtctggagaagagagtggaacagatccgggaccacatcaacggcagggtgttgtattatgcaacctgcaagtag

SEQ ID NO: 45203 - DNA, 567 bp, Artificial Sequence
  derived and/or modified sequence
atgcggcccttcttcctgctgtgcttcgccctgcccggcctgctgcacgcgcagcaagcctgcagcaggggagcttgctatcctccagtcggagatcttttggtaggccggacccgcttccttagagcctccagcacatgtggtctcactaaaccagaaacatattgcactcagtacggcgaatggcagatgaagtgttgcaaatgcgactcaaggcagccccataactattattcacacagggtcgaaaacgtggcctcaagcagcggtccaatgagatggtggcagagccagaatgacgtgaaccctgtgtccctgcagctggatcttgaccggcgtttccaactgcaggaggtgatgatggagttccaaggcccaatgccagcaggaatgctgattgagcgctcctcagactttgggaaaacctggagagtttatcaatacttggcagctgactgcacttccacgttcccccgggtaagacagggccgcccacagagctggcaagacgtcagatgtcagtcactgcctcagcggcccaacgccaggttgaatggaggtaagtag

SEQ ID NO: 45204 - DNA, 483 bp, Artificial Sequence
  derived and/or modified sequence
atgaacgagatccaggccatcgccgcccggctgcccaacgtggacctggtgctctcccagactaagcaggatatcgcaagagcgcgccgactgcaggctgaagctgaggaggcccgctcccgcgcgcacgccgttgagggccaggtggaggatgtggtgggcaacctccgtcagggaactgtggctctccaggaagctcaagataccatgcagggaacttcccgaagcctcaggttaatacaggacagggtggccgaggttcagcaggtattgcggcctgcagagaagctcgtcacaagtatgacaaaacaattgggtgacttctggactcggatggaggaactgcgccatcaagccaggcaacagggagccgaagccgtgcaagcccagcaactggccgagggggctagcgagcaggcactgtccgcccaggagggcttcgaaagaataaagcaaaaatatgccgaacttaaagacaggtag

SEQ ID NO: 45205 - DNA, 3519 bp, Artificial Sequence
  derived and/or modified sequence
atgaggcctttttttctgctgtgttttgctctgcccggactccttcatgcacagcaagcgtgcagtagaggagcgtgctatccgcctgtcggcgatctgctggtgggccgaaccaggtttttgcgcgcaagcagtacctgcggactaacaaagcccgaaacgtactgcacccagtacggggagtggcagatgaaatgctgcaagtgcgactcccgccagccacacaactactattcccacagggtggagaatgtggcttctagctcaggcccaatgaggtggtggcagtctcagaacgatgtcaatcccgtatcattacagttggatctcgacaggcgatttcagcttcaggaggtgatgatggaattccaggggccaatgccggctggcatgctgattgagagatcttccgatttcggcaaaacctggcgggtgtatcagtatctagccgctgattgtacctccaccttccccagggtgagacaggggcgtcctcaatcatggcaggacgttcgttgccagtcactcccgcaacgcccaaatgccagactgaatggcggaaaagtccagctgaatctgatggacctggtgagtggcatacctgcaacacagtcccagaaaattcaggaagtcggggaaatcaccaatctgagagtgaactttactaggctggcccctgtgccccaacggggttaccaccccccttctgcctattatgccgtgtcccagctgcggcttcagggtagctgtttttgtcacgggcatgctgaccggtgcgctcctaagccaggggcaagcgcaggcccttcaactgctgttcaggtgcatgacgtgtgtgtgtgtcagcacaatactgccggaccaaactgtgaacgttgtgcaccattctataataacagaccatggagaccagcagaaggccaagatgcccatgagtgccagcgttgcgactgtaatggccactctgaaacctgccattttgacccggcagtgttcgccgcatcgcagggtgcctatggcggagtgtgtgacaactgccgagaccacacagaaggaaagaattgtgagagatgccagttgcactactttaggaaccgtagacctggggcatctatccaagagacatgcatctcttgtgagtgcgatccagacggagctgtcccaggagctccctgcgaccccgtcacgggacagtgcgtgtgcaaggaacatgtgcagggagagcggtgcgacctctgcaagccaggatttaccggcttaacttatgccaacccccagggttgtcatcgctgtgattgcaatattctcggcagtagaagagacatgccatgtgatgaggagtcaggcaggtgtctgtgcctccccaatgtggttgggccaaagtgtgatcaatgtgctccttaccactggaaactcgcttccggacagggttgtgagccctgcgcctgcgatcctcacaattcattgtccccccagtgtaatcaattcaccggacagtgcccctgtcgcgaaggctttgggggtctaatgtgttccgccgctgcgattcgtcagtgccccgaccgcacgtacggcgacgtggcgacgggctgtcgagcttgtgactgtgactttcggggaactgagggccctggatgtgataaggcgtcggggcgatgtttgtgcaggcctggccttaccggccctcgctgcgaccagtgtcagagaggatattgcaaccggtatccagtgtgcgtagcttgtcacccatgctttcagacctacgatgcggatctgagagagcaggctttaaggttcggacgtcttcggaatgccactgccagcctgtggtctggtcccggtttggaagacagaggactggcctcgcgcattttggatgccaaaagtaaaatcgagcagattagagctgtcctttcgtctccagcggtgacggaacaggaagtcgcccaggtggcctccgccatactgtcactgcgaaggacgctgcagggtcttcaactcgatttaccacttgaagaggaaaccttaagtttgccccgagacctggagagcctcgaccgctccttcaacggccttcttaccatgtatcagcgtaagagagagcaattcgagaagatttcttccgctgacccgagcggtgcctttagaatgctgtcaaccgcttacgagcagtccgctcaggctgctcagcaggtctcagacagctcccggctactcgaccaactccgggattccaggagggaggccgaaagactggtgagacaggcagggggtggtggcggtaccggctctcccaagctggtggccctgcgcctggaaatgtctagcttgccggatcttactccgaccttcaacaaattatgtggcaatagtagacaaatggcatgtactcccattagttgccctggcgagctgtgtccccaagacaacggcacggcctgcggaagccgatgtagaggggtactccccagggcagggggtgcttttctgatggcaggtcaggtggcagagcagttacgaggctttaatgcccagctacagaggacacgccagatgatccgtgctgccgaggagagcgcttcccaaatacagagtagcgcacagcggctcgaaacacaagttagcgcttccagaagccagatggaagaggatgtcaggcgcacaaggctgctgatacagcaggtgcgtgacttcttaacagacccagataccgacgctgctacgatccaggaagtttctgaggcggtgctcgcgctctggctgccgacagactccgcaaccgtgctgcagaagatgaatgagattcaggcaattgcagccaggctgccgaatgtagacctggtgctatcccagaccaagcaggatattgcccgtgcacgaaggctgcaggccgaagccgaagaggccaggagcagagcgcacgccgtggaagggcaggtcgaggatgtggttggcaatttgaggcagggaaccgtggcgcttcaagaagctcaagacaccatgcaggggacatcccgctccttacgactcatacaggatagagtggccgaagtacaacaggtacttcgccctgctgagaaattagtcacatcaatgaccaaacagctgggtgatttctggacaaggatggaagagcttagacatcaggcacggcagcaaggagcggaggctgtccaggcacaacagctggctgagggggcttctgagcaggccctttcggcccaggaaggatttgagagaatcaagcaaaaatacgcggagctgaaggacaggctggggcagagctccatgctgggtgagcaaggtgccagaattcaatccgtgaagactgaagccgaagagcttttcggagaaacaatggaaatgatggataggatgaaagacatggagttggaacttctgcgtggtagtcaggctattatgctgcgttcagccgacctgaccggactggagaaaagggtggaacagataagggaccatataaatggcagagtgctctactatgctacatgtaagtag

SEQ ID NO: 45206 - DNA, 3519 bp, Artificial Sequence
  derived and/or modified sequence
atgcggccattttttttattgtgtttcgccctgccaggcctcctgcatgcacagcaagcttgctcaagaggagcatgctaccccccagtgggcgacttgctggtcggcaggacacgatttttgagggcctctagtacatgcggcctgaccaaaccggaaacgtactgtacacagtacggcgaatggcagatgaagtgctgtaagtgcgactctcgacagcctcacaactactactcgcacagagtggaaaacgtcgcgtcgtcctctggaccaatgcggtggtggcagtctcagaacgacgtgaacccggtgagcctgcagctggatctcgaccgcagattccagcttcaagaggtgatgatggaattccaaggcccaatgcccgctgggatgttaattgagcgaagctcggatttcggaaagacttggcgagtctaccagtacctcgcggcagattgcacctctacattcccccgtgtgcgacaggggagacctcagtcatggcaagacgtgagatgtcagtcacttccacagcgccctaacgccaggctgaacggcggaaaggttcagctgaacttgatggatctggtctctgggataccggcaactcagtcacaaaagattcaggaggtgggagagataacaaatcttcgggtcaattttactcggttggccccagttccacagcgcggataccatccaccaagcgcatattacgctgtgtcccagctacgcctgcagggctcctgcttctgtcacggccatgccgatcggtgcgccccaaagcctggtgcctccgcaggccctagcactgccgtgcaggtgcacgacgtgtgcgtgtgccagcataacaccgctggcccaaactgtgagcgttgtgctcctttctataacaacagaccctggcggccagcggaaggacaggatgctcatgagtgtcagcggtgcgactgcaatggccactcagaaacttgtcactttgaccccgctgtatttgccgcttcacaaggcgcatacggcggagtctgcgacaattgtcgtgatcacacagaagggaagaactgtgaacgctgccaattgcactacttccgtaaccgaaggcctggggcatctatccaggagacttgcatatcttgtgaatgtgatccagatggcgcagtgccaggtgcaccctgtgacccagtgacaggccagtgtgtatgtaaagagcatgtgcagggggaacgctgtgacctgtgcaaacccggattcacgggcctgacctatgccaaccctcagggatgtcaccggtgcgactgcaacatcttgggaagcagacgggacatgccttgcgacgaggaatcaggccgatgtttgtgtctgcccaatgtcgtgggccctaaatgtgaccaatgcgctccgtatcattggaagctcgccagtgggcagggatgtgagccgtgcgcgtgcgatccccacaattccctttctcctcagtgcaaccagttcacagggcagtgcccatgccgcgaagggttcggcggtctgatgtgcagtgccgcagctattcgccaatgtccagaccgtacatatggagatgtcgccaccggctgccgtgcctgtgattgcgatttccggggaactgaggggccaggctgcgacaaagccagtggccgatgcctctgtcgacccggacttactggccctcggtgtgatcagtgccagcgcggttattgcaatcggtacccagtttgcgtggcatgccacccctgctttcaaacctatgacgcagatttgagagagcaggcgctgagatttggccgactccggaatgctacagccagtctgtggtcaggccctggactggaagacagaggccttgcaagtcgaattctggatgcgaagagcaaaatcgagcaaattagggctgttctatctagtccagcagtaaccgaacaggaagtcgcccaggtggctagcgcaatcctgtcgctgcggagaaccttgcagggactgcagttagacctgcccctggaggaagagacgctaagtctacccagggatctggagagcttagatcggagcttcaacgggctgttaacaatgtaccagaggaagcgcgagcaattcgaaaagatctccagcgccgatccaagtggcgcatttagaatgctgagtacggcttatgagcaatccgcccaggccgctcaacaggtttcagattcttcacggctcctggaccagctcagggattccaggcgcgaagctgaaaggcttgtgagacaggctggagggggtgggggaacagggagtccgaaactggtggctctcaggctggagatgagctcattacctgaccttactcctacctttaataagctgtgcggcaactcccggcagatggcctgcactcccatttcttgtcctggggaattgtgcccccaagacaatggaaccgcctgcggcagccgatgcaggggagtgctccctcgagccggaggggctttccttatggcaggccaggttgctgaacagttgagagggttcaatgctcaattgcaacggacccgacagatgattagggccgcagaggagtcagcgtctcagatccagtcttctgctcaacggctggagacccaggtgagtgcatcacggagtcaaatggaagaggacgtcaggcgaactaggctcctcatccagcaggtgagggattttcttacggatccagataccgacgctgccactatccaggaagtgtccgaagcagtactggccctgtggctccccacggacagcgcaacggtactccaaaaaatgaacgaaatccaagcaatcgccgcacggttacctaatgtcgacttagtgctgtcacagactaagcaagatatagcaagagccaggaggttgcaagccgaggccgaggaggcgcgatctcgcgctcacgccgtagaaggacaggtggaagatgttgtgggcaacctccgacaaggtaccgttgctctacaggaggctcaggataccatgcagggcacatccagatctttgcgactgatccaagatcgtgtggcagaggtacagcaggtgctgcgacctgcagagaagctcgtaacttcaatgaccaaacagctgggcgacttttggacacgcatggaagagttgcggcatcaggctcgccagcagggggcagaggctgtgcaggctcaacaactcgctgagggagcttccgagcaggccctgtctgcccaagagggttttgagcggataaaacagaaatacgccgaactgaaagatcgcctggggcagtcaagtatgttaggagaacagggcgctagaattcagtccgtaaagactgaagctgaagagctgttcggggagaccatggaaatgatggaccgaatgaaggacatggagctcgagcttctgcggggatctcaggccattatgctcaggagcgcagacctcactggccttgagaaacgagtcgaacaaatcagagaccacatcaacggtcgagtcctgtactatgccacgtgcaaatag

SEQ ID NO: 45207 - DNA, 3519 bp, Artificial Sequence
  derived and/or modified sequence
atgcgcccatttttcctcctttgttttgccctaccaggcctcttgcatgctcagcaagcttgctcccgcggagcttgttacccccctgtaggcgacctactggtgggaagaacaagattcctccgggcatcctctacctgtgggctgactaaaccggaaacatattgtactcagtatggagaatggcagatgaagtgctgtaagtgtgactccaggcagcctcataactactattctcaccgggtggagaatgtcgcatcgagtagtggccctatgcgctggtggcagtcccagaatgatgtgaaccctgtcagtcttcagctcgacttggatcggcgatttcagctgcaggaggtgatgatggagttccaaggtccaatgcctgcagggatgttgatcgaacgctcgtccgacttcggcaagacctggagagtgtaccagtaccttgccgctgactgtacatccaccttccccagagtgcgccaaggtcgccctcagagttggcaggatgtccggtgccagagcttgccccaaagaccaaatgccaggctgaacggaggaaaagtacaactcaatttgatggacctcgtaagcggaattccagccactcaatcccagaaaatccaagaggtgggcgagatcactaatctaagggtaaatttcacaaggctggcccctgtgccgcagagagggtaccatccaccaagcgcttattatgcagtatctcagctgcggctgcagggctcttgcttttgtcacggtcacgcagaccgttgtgcaccgaagcccggagcctcggccggtccgtctacggcagtgcaggtgcatgacgtgtgtgtgtgtcagcacaataccgcaggaccaaattgtgaacggtgtgcaccgttttacaataatcgcccttggagacctgcggaggggcaggatgcccacgagtgccaaagatgcgactgtaatggacatagcgagacctgtcactttgatcctgcagtgttcgccgcatctcagggcgcttatggaggcgtttgtgataactgccgcgaccacacagagggcaaaaactgtgagaggtgccagcttcattactttcgaaatcggaggcctggggcttccattcaggagacctgcatatcctgcgaatgcgatcctgacggggcagttccaggtgcgccttgcgacccggtgaccggacagtgtgtctgcaaggagcatgtgcagggggaaaggtgtgatctctgtaagcccggtttcactggactgacgtatgcgaatcctcaagggtgtcacaggtgcgattgcaacatactgggctccagacgtgatatgccttgtgatgaagagtccggaaggtgtctctgcctgccaaacgtggtgggccctaaatgcgatcagtgcgcaccgtatcactggaaactcgccagcggccaggggtgcgaaccttgtgcctgcgacccccacaatagcttatctcctcaatgtaatcagtttaccggccaatgcccatgtcgggaaggcttcggcggtctcatgtgtagtgcagccgcaatcaggcagtgtccagatcgcacctacggtgacgtggccaccggatgcagagcctgcgactgtgatttcagagggaccgaaggtcctggatgcgataaggccagcggaaggtgcctgtgtagaccagggctgacgggacccagatgcgatcagtgtcagcggggttattgcaatcgttaccctgtatgcgttgcatgtcacccatgcttccagacctacgatgcagacctgagggagcaagctctccggtttggtagattacggaatgccaccgcaagcctttggtcaggtcccggactcgaggaccgcggtcttgcttcacggatcctggacgccaagtctaagattgagcagatcagggctgtgctatcaagcccagctgtgactgaacaggaggtggcacaggtagcctctgctatcctgtcacttcgtcgaaccttgcagggcctgcagctggacctgcccctggaggaagaaaccctgtcgttaccgagagacctcgagtccttggacaggagtttcaacggtttgcttacgatgtatcagcgtaagagggaacagtttgagaagatcagctctgctgacccatcaggtgcgtttcgtatgctaagcaccgcttatgaacaaagtgctcaggcagcgcagcaagtcagcgattcttctcgattattagaccagctcagggacagtcgcagggaggccgaacgactagtgcgtcaagccggaggaggaggaggtaccggcagtccaaagctggtggcattgcgactggagatgagtagcctgcctgatctcacccctactttcaacaaattatgtgggaattcccggcagatggcttgtacccccataagttgcccgggagagctttgtccccaggacaatgggacggcttgtggatctaggtgccgcggagtgcttccccgtgccggaggtgcgtttctcatggctggccaagttgccgagcagctgaggggcttcaatgcccagctgcagcgcactcgccaaatgatacgcgctgctgaggaatctgctagccagatccagtcttccgcccagaggctcgagacacaggtgtcagcctctagatctcagatggaagaagatgttcgcagaacccggttgcttatccagcaggtccgggattttctaacagacccagataccgacgccgcaactattcaggaagtgtccgaggctgttctagctctttggctgcctacagattccgccactgtgctgcaaaaaatgaatgagattcaggccattgccgctcgcctgcccaacgtggatctggttctgagccaaacgaagcaggatattgctagggctcgcagactgcaggccgaggcagaagaggctaggagccgtgcacatgctgtggagggtcaagttgaagatgtggtagggaacctgcgacagggaactgtggccctgcaggaggcccaagatactatgcagggcacttcacggtcactgcgccttatccaagacagggtggctgaggttcagcaagtcctgaggcctgccgagaagctggtgacttctatgactaaacagcttggcgatttttggacaaggatggaggagcttaggcaccaggccaggcagcagggggcagaggcggtgcaggctcagcaactggcagagggcgctagtgagcaggccctttcggcccaggagggattcgagcggatcaaacagaagtacgccgagctgaaagatcgtttaggacagtcctctatgcttggggaacagggtgcccgaatccaaagtgtgaagaccgaggctgaggagctgttcggtgagacaatggaaatgatggatcgaatgaaggatatggagcttgagctgctgagaggatctcaagccatcatgctgaggtccgcagacctgactgggctggagaaacgcgtagagcagataagagaccacatcaacggcagagtgctctactatgcgacttgtaaatag

SEQ ID NO: 45208 - DNA, 567 bp, Artificial Sequence
  derived and/or modified sequence
atgaggcccttcttcctcttgtgctttgccctcccgggtctgcttcacgctcaacaggcctgcagtcgcggtgcctgctacccaccggtgggagacctgctcgttggaagaactaggtttctccgcgcttcctccacatgcggattgactaaacccgagacctattgcactcagtatggcgagtggcagatgaagtgttgcaaatgtgatagtcgacaaccgcacaattattacagtcacagagtggaaaacgtggcctcttcttctggacctatgagatggtggcagtcacagaacgacgtgaatcccgtgtccctgcagctggacctagataggcgcttccagttgcaagaggtaatgatggaattccagggccctatgcctgctggtatgctgatagaacggtctagtgattttggcaagacgtggcgggtctatcaatatctagccgcagattgcacttcaacattcccaagagtccggcaggggaggcctcaatcttggcaggatgtgcgatgccagagtttaccgcagcggccaaacgcgagacttaacgggggaaagtag

SEQ ID NO: 45209 - DNA, 483 bp, Artificial Sequence
  derived and/or modified sequence
atgaacgaaatccaggcgatagcagccagattaccaaacgtcgatctggtgctctctcagacaaagcaagacatcgctcgcgctaggcgcctgcaggcagaggccgaagaagccagatctagagcccacgccgtcgaaggccaggtggaggacgtcgttggcaacctcaggcagggtaccgttgccctacaggaagctcaggacacgatgcagggaacaagtaggagcctccgcctcatacaagaccgggtcgctgaagtgcagcaagtgttacgccctgccgaaaaactggtcacctctatgaccaagcagctgggagacttttggactagaatggaagagttaagacaccaggccaggcaacagggggcagaggccgtgcaggctcaacagttggccgagggcgcttctgaacaggccctatccgcccaggaagggttcgaaaggatcaaacaaaaatacgccgaactgaaggaccgttag

SEQ ID NO: 45210 - DNA, 3519 bp, Artificial Sequence
  derived and/or modified sequence
atgagacccttcttcctgctgtgcttcgccctgcccggcctgctgcacgcccagcaggcctgcagcagaggcgcctgctacccccccgtgggcgacctgctggtgggcagaaccagattcctgagagccagcagcacctgcggcctgaccaagcccgagacctactgcacccagtacggcgagtggcagatgaagtgctgcaagtgcgacagcagacagccccacaactactacagccacagagtggagaacgtggccagcagcagcggccccatgagatggtggcagagccagaacgacgtgaaccccgtgagcctgcagctggacctggacagaagattccagctgcaggaggtgatgatggagttccagggccccatgcccgccggcatgctgatcgagagaagcagcgacttcggcaagacctggagagtgtaccagtacctggccgccgactgcaccagcaccttccccagagtgagacagggcagaccccagagctggcaggacgtgagatgccagagcctgccccagagacccaacgccagactgaacggcggcaaggtgcagctgaacctgatggacctggtgagcggcatccccgccacccagagccagaagatccaggaggtgggcgagatcaccaacctgagagtgaacttcaccagactggcccccgtgccccagagaggctaccacccccccagcgcctactacgccgtgagccagctgagactgcagggcagctgcttctgccacggccacgccgacagatgcgcccccaagcccggcgccagcgccggccccagcaccgccgtgcaggtgcacgacgtgtgcgtgtgccagcacaacaccgccggccccaactgcgagagatgcgcccccttctacaacaacagaccctggagacccgccgagggccaggacgcccacgagtgccagagatgcgactgcaacggccacagcgagacctgccacttcgaccccgccgtgttcgccgccagccagggcgcctacggcggcgtgtgcgacaactgcagagaccacaccgagggcaagaactgcgagagatgccagctgcactacttcagaaacagaagacccggcgccagcatccaggagacctgcatcagctgcgagtgcgaccccgacggcgccgtgcccggcgccccctgcgaccccgtgaccggccagtgcgtgtgcaaggagcacgtgcagggcgagagatgcgacctgtgcaagcccggcttcaccggcctgacctacgccaacccccagggctgccacagatgcgactgcaacatcctgggcagcagaagagacatgccctgcgacgaggagagcggcagatgcctgtgcctgcccaacgtggtgggccccaagtgcgaccagtgcgccccctaccactggaagctggccagcggccagggctgcgagccctgcgcctgcgacccccacaacagcctgagcccccagtgcaaccagttcaccggccagtgcccctgcagagagggcttcggcggcctgatgtgcagcgccgccgccatcagacagtgccccgacagaacctacggcgacgtggccaccggctgcagagcctgcgactgcgacttcagaggcaccgagggccccggctgcgacaaggccagcggcagatgcctgtgcagacccggcctgaccggccccagatgcgaccagtgccagagaggctactgcaacagataccccgtgtgcgtggcctgccacccctgcttccagacctacgacgccgacctgagagagcaggccctgagattcggcagactgagaaacgccaccgccagcctgtggagcggccccggcctggaggacagaggcctggccagcagaatcctggacgccaagagcaagatcgagcagatcagagccgtgctgagcagccccgccgtgaccgagcaggaggtggcccaggtggccagcgccatcctgagcctgagaagaaccctgcagggcctgcagctggacctgcccctggaggaggagaccctgagcctgcccagagacctggagagcctggacagaagcttcaacggcctgctgaccatgtaccagagaaagagagagcagttcgagaagatcagcagcgccgaccccagcggcgccttcagaatgctgagcaccgcctacgagcagagcgcccaggccgcccagcaggtgagcgacagcagcagactgctggaccagctgagagacagcagaagagaggccgagagactggtgagacaggccggcggcggcggcggcaccggcagccccaagctggtggccctgagactggagatgagcagcctgcccgacctgacccccaccttcaacaagctgtgcggcaacagcagacagatggcctgcacccccatcagctgccccggcgagctgtgcccccaggacaacggcaccgcctgcggcagcagatgcagaggcgtgctgcccagagccggcggcgccttcctgatggccggccaggtggccgagcagctgagaggcttcaacgcccagctgcagagaaccagacagatgatcagagccgccgaggagagcgccagccagatccagagcagcgcccagagactggagacccaggtgagcgccagcagaagccagatggaggaggacgtgagaagaaccagactgctgatccagcaggtgagagacttcctgaccgaccccgacaccgacgccgccaccatccaggaggtgagcgaggccgtgctggccctgtggctgcccaccgacagcgccaccgtgctgcagaagatgaacgagatccaggccatcgccgccagactgcccaacgtggacctggtgctgagccagaccaagcaggacatcgccagagccagaagactgcaggccgaggccgaggaggccagaagcagagcccacgccgtggagggccaggtggaggacgtggtgggcaacctgagacagggcaccgtggccctgcaggaggcccaggacaccatgcagggcaccagcagaagcctgagactgatccaggacagagtggccgaggtgcagcaggtgctgagacccgccgagaagctggtgaccagcatgaccaagcagctgggcgacttctggaccagaatggaggagctgagacaccaggccagacagcagggcgccgaggccgtgcaggcccagcagctggccgagggcgccagcgagcaggccctgagcgcccaggagggcttcgagagaatcaagcagaagtacgccgagctgaaggacagactgggccagagcagcatgctgggcgagcagggcgccagaatccagagcgtgaagaccgaggccgaggagctgttcggcgagaccatggagatgatggacagaatgaaggacatggagctggagctgctgagaggcagccaggccatcatgctgagaagcgccgacctgaccggcctggagaagagagtggagcagatcagagaccacatcaacggcagagtgctgtactacgccacctgcaagtag

SEQ ID NO: 45211 - DNA, 567 bp, Artificial Sequence
  derived and/or modified sequence
atgagacccttcttcctgctgtgcttcgccctgcccggcctgctgcacgcccagcaggcctgcagcagaggcgcctgctacccccccgtgggcgacctgctggtgggcagaaccagattcctgagagccagcagcacctgcggcctgaccaagcccgagacctactgcacccagtacggcgagtggcagatgaagtgctgcaagtgcgacagcagacagccccacaactactacagccacagagtggagaacgtggccagcagcagcggccccatgagatggtggcagagccagaacgacgtgaaccccgtgagcctgcagctggacctggacagaagattccagctgcaggaggtgatgatggagttccagggccccatgcccgccggcatgctgatcgagagaagcagcgacttcggcaagacctggagagtgtaccagtacctggccgccgactgcaccagcaccttccccagagtgagacagggcagaccccagagctggcaggacgtgagatgccagagcctgccccagagacccaacgccagactgaacggcggcaagtag

SEQ ID NO: 45212 - DNA, 483 bp, Artificial Sequence
  derived and/or modified sequence
atgaacgagatccaggccatcgccgccagactgcccaacgtggacctggtgctgagccagaccaagcaggacatcgccagagccagaagactgcaggccgaggccgaggaggccagaagcagagcccacgccgtggagggccaggtggaggacgtggtgggcaacctgagacagggcaccgtggccctgcaggaggcccaggacaccatgcagggcaccagcagaagcctgagactgatccaggacagagtggccgaggtgcagcaggtgctgagacccgccgagaagctggtgaccagcatgaccaagcagctgggcgacttctggaccagaatggaggagctgagacaccaggccagacagcagggcgccgaggccgtgcaggcccagcagctggccgagggcgccagcgagcaggccctgagcgcccaggagggcttcgagagaatcaagcagaagtacgccgagctgaaggacagatag

SEQ ID NO: 45213 - protein, 456 aa, Artificial Sequence
  derived and/or modified sequence
MRKSPGLSDCLWAWILLLSTLTGRSYGQPSLQDELKDNTTVFTRILDRLLDGYDNRLRPGLGERVTEVKTDIFVTSFGPVSDHDMEYTIDVFFRQSWKDERLKFKGPMTVLRLNNLMASKIWTPDTFFHNGKKSVAHNMTMPNKLLRITEDGTLLYTMRLTVRAECPMHLEDFPMDAHACPLKFGSYAYTRAEVVYEWTREPARSVVVAEDGSRLNQYDLLGQTVDSGIVQSSTGEYVVMTTHFHLKRKIGYFVIQTYLPCIMTVILSQVSFWLNRESVPARTVFGVTTVLTMTTLSISARNSLPKVAYATAMDWFIAVCYAFVFSALIEFATVNYFTKRGYAWDGKSVVPEKPKKVKDPLIKKNNTYAPTATSYTPNLARGDPGLATIAKSATIEPKEVKPETKPPEPKKTFNSVSKIDRLSRIAFPLLFGIFNLVYWATYLNREPQLKAPTPHQ

SEQ ID NO: 45214 - protein, 123 aa, Artificial Sequence
  derived and/or modified sequence
MRKSPGLSDCLWAWILLLSTLTGRSYGQPSLQDELKDNTTVFTRILDRLLDGYDNRLRPGLGERVTEVKTDIFVTSFGPVSDHDMEYTIDVFFRQSWKDERLKFKGPMTVLRLNNLMASKIWT

SEQ ID NO: 45215 - DNA, 2083 bp, Artificial Sequence
  derived and/or modified sequence
aacagaagatgccggagaaggggggggaaaagtagatgcggatttcgtcctgacttctaaaaattcctcctctccctctcccattttcctaatccgagaatgatggagctcgaggcaaaggaatgattccggaaatggagatatgattctcaaacctagaaatgatcggagtgatttattagttaaatattcttcgtccaggaacccagcacaattcagagctgcagattggatattgggaagcaaatttgggtgtgaaatcttcagcaaaggagcacgcagagtccatgatggctcagaccaagtgagtgagaggcagagcgaggacgcccctctgctctggcgcgcccggactcggactcgcagactcgcgctggctccagtctctccacgattctctctcccagacttttccccggtcttaagagatcctgtgtccagagggggccttagctgctccagcccgcgatgaggaaaagtccaggtctgtctgactgtctttgggcctggatcctccttctgagcacactgactggaagaagctatggacagccgtcattacaagatgaacttaaagacaataccactgtcttcaccaggattttggacagactcctagatggttatgacaatcgcctgagaccaggattgggagagcgtgtaaccgaagtgaagactgatatcttcgtcaccagtttcggacccgtttcagaccatgatatggaatatacaatagatgtatttttccgtcaaagctggaaggatgaaaggttaaaatttaaaggacctatgacagtcctccggttaaataacctaatggcaagtaaaatctggactccggacacatttttccacaatggaaagaagtcagtggcccacaacatgaccatgcccaacaaactcctgcggatcacagaggatggcaccttgctgtacaccatgaggctgacagtgagagctgaatgtccgatgcatttggaggacttccctatggatgcccatgcttgcccactaaaatttggaagttatgcttatacaagagcagaagttgtttatgaatggaccagagagccagcacgctcagtggttgtagcagaagatggatcacgtctaaaccagtatgaccttcttggacaaacagtagactctggaattgtccagtcaagtacaggagaatatgttgttatgaccactcatttccacttgaagagaaagattggctactttgttattcaaacatacctgccatgcataatgacagtgattctctcacaagtctccttctggctcaacagagagtctgtaccagcaagaactgtctttggagtaacaactgtgctcaccatgacaacattgagcatcagtgccagaaactccctccctaaggtggcttatgcaacagctatggattggtttattgccgtgtgctatgcctttgtgttctcagctctgattgagtttgccacagtaaactatttcactaagagaggttatgcatgggatggcaaaagtgtggttccagaaaagccaaagaaagtaaaggatcctcttattaagaaaaacaacacttacgctccaacagcaaccagctacacccctaatttggccaggggcgacccgggcttagccaccattgctaaaagtgcaaccatagaacctaaagaggtcaagcccgaaacaaaaccaccagaacccaagaaaacctttaacagtgtcagcaaaattgaccgactgtcaagaatagccttcccgctgctatttggaatctttaacttagtctactgggctacgtatttaaacagagagcctcagctaaaagcccccacaccacatcaatagatcttttactcacattctgttgttcagtcctctgcactgggaatttatttatgttctcaacgcagtaattcccatctgctttattgcctctgtcttaaagaatttgaaagtttccttattttcataattcatttaagaacaagagacccctgtctggcagtctggagcaaagcagactatgcagcttggagacaggattctgacagagcaagcgaaagagcaaagtcatgtcagaaggagacag

SEQ ID NO: 45216 - DNA, 2119 bp, Artificial Sequence
  derived and/or modified sequence
aaaaagagaagcttgcagcagattgtagaaggatttgagcctgcagctagagagaaggggattagggccagagtggtgcaagttaaattgtgctgcatataaaaaatgggcggattggtctccagatccagaggctggtaccaccttcctttctaaaataaaatctctctggcatgaagtcaccgcctatttcacatccggtttgccctgggacgtattactactgtcttggtaaagagaaatcttttgttgtatagctgcagattggatattgggaagcaaatttgggtgtgaaatcttcagcaaaggagcacgcagagtccatgatggctcagaccaagtgagtgagaggcagagcgaggacgcccctctgctctggcgcgcccggactcggactcgcagactcgcgctggctccagtctctccacgattctctctcccagacttttccccggtcttaagagatcctgtgtccagagggggccttagctgctccagcccgcgatgaggaaaagtccaggtctgtctgactgtctttgggcctggatcctccttctgagcacactgactggaagaagctatggacagccgtcattacaagatgaacttaaagacaataccactgtcttcaccaggattttggacagactcctagatggttatgacaatcgcctgagaccaggattgggagagcgtgtaaccgaagtgaagactgatatcttcgtcaccagtttcggacccgtttcagaccatgatatggaatatacaatagatgtatttttccgtcaaagctggaaggatgaaaggttaaaatttaaaggacctatgacagtcctccggttaaataacctaatggcaagtaaaatctggactccggacacatttttccacaatggaaagaagtcagtggcccacaacatgaccatgcccaacaaactcctgcggatcacagaggatggcaccttgctgtacaccatgaggctgacagtgagagctgaatgtccgatgcatttggaggacttccctatggatgcccatgcttgcccactaaaatttggaagttatgcttatacaagagcagaagttgtttatgaatggaccagagagccagcacgctcagtggttgtagcagaagatggatcacgtctaaaccagtatgaccttcttggacaaacagtagactctggaattgtccagtcaagtacaggagaatatgttgttatgaccactcatttccacttgaagagaaagattggctactttgttattcaaacatacctgccatgcataatgacagtgattctctcacaagtctccttctggctcaacagagagtctgtaccagcaagaactgtctttggagtaacaactgtgctcaccatgacaacattgagcatcagtgccagaaactccctccctaaggtggcttatgcaacagctatggattggtttattgccgtgtgctatgcctttgtgttctcagctctgattgagtttgccacagtaaactatttcactaagagaggttatgcatgggatggcaaaagtgtggttccagaaaagccaaagaaagtaaaggatcctcttattaagaaaaacaacacttacgctccaacagcaaccagctacacccctaatttggccaggggcgacccgggcttagccaccattgctaaaagtgcaaccatagaacctaaagaggtcaagcccgaaacaaaaccaccagaacccaagaaaacctttaacagtgtcagcaaaattgaccgactgtcaagaatagccttcccgctgctatttggaatctttaacttagtctactgggctacgtatttaaacagagagcctcagctaaaagcccccacaccacatcaatagatcttttactcacattctgttgttcagtcctctgcactgggaatttatttatgttctcaacgcagtaattcccatctgctttattgcctctgtcttaaagaatttgaaagtttccttattttcataattcatttaagaacaagagacccctgtctggcagtctggagcaaagcagactatgcagcttggagacaggattctgacagagcaagcgaaagagcaaagtcatgtcagaaggagacag

SEQ ID NO: 45217 - DNA, 4067 bp, Artificial Sequence
  derived and/or modified sequence
ggaaggcacgctcttgtcctggctgcaaaattgcctgtttttccctttccagtggacgctggtgaaatgccctcttgtgtaggggtctctcccattctgaacacgaaaactcaacttagtctttgatatggatggcatgggatgctgctccagcccgcgatgaggaaaagtccaggtctgtctgactgtctttgggcctggatcctccttctgagcacactgactggaagaagctatggacagccgtcattacaagatgaacttaaagacaataccactgtcttcaccaggattttggacagactcctagatggttatgacaatcgcctgagaccaggattgggagagcgtgtaaccgaagtgaagactgatatcttcgtcaccagtttcggacccgtttcagaccatgatatggaatatacaatagatgtatttttccgtcaaagctggaaggatgaaaggttaaaatttaaaggacctatgacagtcctccggttaaataacctaatggcaagtaaaatctggactccggacacatttttccacaatggaaagaagtcagtggcccacaacatgaccatgcccaacaaactcctgcggatcacagaggatggcaccttgctgtacaccatgaggctgacagtgagagctgaatgtccgatgcatttggaggacttccctatggatgcccatgcttgcccactaaaatttggaagttatgcttatacaagagcagaagttgtttatgaatggaccagagagccagcacgctcagtggttgtagcagaagatggatcacgtctaaaccagtatgaccttcttggacaaacagtagactctggaattgtccagtcaagtacaggagaatatgttgttatgaccactcatttccacttgaagagaaagattggctactttgttattcaaacatacctgccatgcataatgacagtgattctctcacaagtctccttctggctcaacagagagtctgtaccagcaagaactgtctttggagtaacaactgtgctcaccatgacaacattgagcatcagtgccagaaactccctccctaaggtggcttatgcaacagctatggattggtttattgccgtgtgctatgcctttgtgttctcagctctgattgagtttgccacagtaaactatttcactaagagaggttatgcatgggatggcaaaagtgtggttccagaaaagccaaagaaagtaaaggatcctcttattaagaaaaacaacacttacgctccaacagcaaccagctacacccctaatttggccaggggcgacccgggcttagccaccattgctaaaagtgcaaccatagaacctaaagaggtcaagcccgaaacaaaaccaccagaacccaagaaaacctttaacagtgtcagcaaaattgaccgactgtcaagaatagccttcccgctgctatttggaatctttaacttagtctactgggctacgtatttaaacagagagcctcagctaaaagcccccacaccacatcaatagatcttttactcacattctgttgttcagtcctctgcactgggaatttatttatgttctcaacgcagtaattcccatctgctttattgcctctgtcttaaagaatttgaaagtttccttattttcataattcatttaagaacaagagacccctgtctggcagtctggagcaaagcagactatgcagcttggagacaggattctgacagagcaagcgaaagagcaaagtcatgtcagaaggagacagaatgagagagaaaagagggggaagatggttcaaagatacaagaaaaagtagaaaaaaaaataacacttaactaaaacccctaggtcatttgtagatatatatttccaaatattctaaaaaagatactgtatatgtcaaaaatatttttatgtgaaggtgtttcaaagggtaaattataaatgtttcatgaagaaaaaattttaaaaatctacgtctttattacacaaactatggtgtgcttatgtttttgttttgctttttaaactgatgtatagctttaacattttgtttccaaagctgaagatccccattctttctctttgaaaaaaaaaaaggcctaatgcattattttgtcataaaatgctattttaaaattcatggaactttcatacgtaaaggtgcagttgctcattgtagagcacatttagtccaatgaagataaatgctttaaatagtttacttcactttcatctgagcttttaccactagactcaaggaagaataattttaacagacatgtatactccatagaaactaaactaaaatagtttaaaaatattccctttttcaccctattttcagatagcacatgagcccaacactcacttaattctcattatgaagatgtttttagaggggcaaaaatattttgcaagctctggaattgttgaatgtattcttttatataactacattaaaagctttagattgaaatttatgactagcaaacaaaaatagaatatataaacgatatatgtaaatatacagcatgagattgtacattttttacttttttaaaattgtgttcttaaaatattgtgtaagaatcactgcacttagctgttggaatgttgttaaatgctatggaaatacatttagaacctgcatttaagaacagaacagcaagtatgaaccacatggaacttaaaacatatgggtgtgaagtccacttatgtagacaaaacttataatttccaaactgttgtctagtatacagtgatcagttgctctctgttcaagtcattccacacatttccctattttaggctattataatatagaaagaaaatgggaagcattagttggagctagaaaatgaactgtatattattgctatatttgctaataccaactatttcaataagtgttgtaccatatgtagcattaaatataaaatacataaaagaatgtacagaaaatagcttttattgagtaatattacatttcatttatactgtagcaatatatttgtaggtatactatgtaagggctttaaataaaagaggtccattaatacttccttataaaaattctagtctgtttcattactgcccagatgttttagagataaatatttatgcagaaggtatttttgaagtctccttttgtctgatagagtttaacagatatttaaatttagtgctcagaatccacaagtcacggtctaaacacacttagaatactacagcataaatctgttagcattattgccaaataagacagttgggatccaaacccaagtcttgagcaatgtttttctcaaaaagctgctatccaatgatataggaaaatacattgtgttttcctaaacacacttttctttttaaatgtgcttcattgtttgatttggtcctgcctaaatttcacaagctaggccaatgaaggctgaatcaaagacatttcatccaccaatatcatgtgtagatattatgtatagaaaataaaataaattatggctctaacttctgtgttgctgtttatcttgttatttttcggcgttatactaatgtgtttattgagagcattttaccttccagacttctcatggctaacttttggtctgtattttgctccttagatgtgaatatttcttattagtctgcttcctgctacgcaatgactgcatttctatcatttctcagtttgttagtatatgtggatagtattctactgtataaatgattgcaaagtttatcaaaaacaaattattatatgtagcttttctacagtgctttgctaaaccatgtagtactagttaagtcttccttgaaaataaagatacactcttataggggacagttcctgttcactcccaggaaacttttttaaaagatgacactgaatgtttattgcactttagtgcagtgaagtggcaataaaacctaacatgaatcaaggttgtttatggcagatgcatgtgttgctttacagagtttagcaaaagctcttaattttatgtcatactgtattctactgaataataaagctaacattattcaataataaaatggaa

SEQ ID NO: 45218 - DNA, 4273 bp, Artificial Sequence
  derived and/or modified sequence
gggagagaggcgagacgagtgctctccccacacgtgtaaccctgcatctcccagtttcagagcttgcgttcattcatatgcaggcagtggtttaatatttgatcaaagctgcagattggatattgggaagcaaatttgggtgtgaaatcttcagcaaaggagcacgcagagtccatgatggctcagaccaagtgagtgagaggcagagcgaggacgcccctctgctctggcgcgcccggactcggactcgcagactcgcgctggctccagtctctccacgattctctctcccagacttttccccggtcttaagagatcctgtgtccagagggggccttagctgctccagcccgcgatgaggaaaagtccaggtctgtctgactgtctttgggcctggatcctccttctgagcacactgactggaagaagctatggacagccgtcattacaagatgaacttaaagacaataccactgtcttcaccaggattttggacagactcctagatggttatgacaatcgcctgagaccaggattgggagagcgtgtaaccgaagtgaagactgatatcttcgtcaccagtttcggacccgtttcagaccatgatatggaatatacaatagatgtatttttccgtcaaagctggaaggatgaaaggttaaaatttaaaggacctatgacagtcctccggttaaataacctaatggcaagtaaaatctggactccggacacatttttccacaatggaaagaagtcagtggcccacaacatgaccatgcccaacaaactcctgcggatcacagaggatggcaccttgctgtacaccatgaggctgacagtgagagctgaatgtccgatgcatttggaggacttccctatggatgcccatgcttgcccactaaaatttggaagttatgcttatacaagagcagaagttgtttatgaatggaccagagagccagcacgctcagtggttgtagcagaagatggatcacgtctaaaccagtatgaccttcttggacaaacagtagactctggaattgtccagtcaagtacaggagaatatgttgttatgaccactcatttccacttgaagagaaagattggctactttgttattcaaacatacctgccatgcataatgacagtgattctctcacaagtctccttctggctcaacagagagtctgtaccagcaagaactgtctttggagtaacaactgtgctcaccatgacaacattgagcatcagtgccagaaactccctccctaaggtggcttatgcaacagctatggattggtttattgccgtgtgctatgcctttgtgttctcagctctgattgagtttgccacagtaaactatttcactaagagaggttatgcatgggatggcaaaagtgtggttccagaaaagccaaagaaagtaaaggatcctcttattaagaaaaacaacacttacgctccaacagcaaccagctacacccctaatttggccaggggcgacccgggcttagccaccattgctaaaagtgcaaccatagaacctaaagaggtcaagcccgaaacaaaaccaccagaacccaagaaaacctttaacagtgtcagcaaaattgaccgactgtcaagaatagccttcccgctgctatttggaatctttaacttagtctactgggctacgtatttaaacagagagcctcagctaaaagcccccacaccacatcaatagatcttttactcacattctgttgttcagtcctctgcactgggaatttatttatgttctcaacgcagtaattcccatctgctttattgcctctgtcttaaagaatttgaaagtttccttattttcataattcatttaagaacaagagacccctgtctggcagtctggagcaaagcagactatgcagcttggagacaggattctgacagagcaagcgaaagagcaaagtcatgtcagaaggagacagaatgagagagaaaagagggggaagatggttcaaagatacaagaaaaagtagaaaaaaaaataacacttaactaaaacccctaggtcatttgtagatatatatttccaaatattctaaaaaagatactgtatatgtcaaaaatatttttatgtgaaggtgtttcaaagggtaaattataaatgtttcatgaagaaaaaattttaaaaatctacgtctttattacacaaactatggtgtgcttatgtttttgttttgctttttaaactgatgtatagctttaacattttgtttccaaagctgaagatccccattctttctctttgaaaaaaaaaaaggcctaatgcattattttgtcataaaatgctattttaaaattcatggaactttcatacgtaaaggtgcagttgctcattgtagagcacatttagtccaatgaagataaatgctttaaatagtttacttcactttcatctgagcttttaccactagactcaaggaagaataattttaacagacatgtatactccatagaaactaaactaaaatagtttaaaaatattccctttttcaccctattttcagatagcacatgagcccaacactcacttaattctcattatgaagatgtttttagaggggcaaaaatattttgcaagctctggaattgttgaatgtattcttttatataactacattaaaagctttagattgaaatttatgactagcaaacaaaaatagaatatataaacgatatatgtaaatatacagcatgagattgtacattttttacttttttaaaattgtgttcttaaaatattgtgtaagaatcactgcacttagctgttggaatgttgttaaatgctatggaaatacatttagaacctgcatttaagaacagaacagcaagtatgaaccacatggaacttaaaacatatgggtgtgaagtccacttatgtagacaaaacttataatttccaaactgttgtctagtatacagtgatcagttgctctctgttcaagtcattccacacatttccctattttaggctattataatatagaaagaaaatgggaagcattagttggagctagaaaatgaactgtatattattgctatatttgctaataccaactatttcaataagtgttgtaccatatgtagcattaaatataaaatacataaaagaatgtacagaaaatagcttttattgagtaatattacatttcatttatactgtagcaatatatttgtaggtatactatgtaagggctttaaataaaagaggtccattaatacttccttataaaaattctagtctgtttcattactgcccagatgttttagagataaatatttatgcagaaggtatttttgaagtctccttttgtctgatagagtttaacagatatttaaatttagtgctcagaatccacaagtcacggtctaaacacacttagaatactacagcataaatctgttagcattattgccaaataagacagttgggatccaaacccaagtcttgagcaatgtttttctcaaaaagctgctatccaatgatataggaaaatacattgtgttttcctaaacacacttttctttttaaatgtgcttcattgtttgatttggtcctgcctaaatttcacaagctaggccaatgaaggctgaatcaaagacatttcatccaccaatatcatgtgtagatattatgtatagaaaataaaataaattatggctctaacttctgtgttgctgtttatcttgttatttttcggcgttatactaatgtgtttattgagagcattttaccttccagacttctcatggctaacttttggtctgtattttgctccttagatgtgaatatttcttattagtctgcttcctgctacgcaatgactgcatttctatcatttctcagtttgttagtatatgtggatagtattctactgtataaatgattgcaaagtttatcaaaaacaaattattatatgtagcttttctacagtgctttgctaaaccatgtagtactagttaagtcttccttgaaaataaagatacactcttataggggacagttcctgttcactcccaggaaacttttttaaaagatgacactgaatgtttattgcactttagtgcagtgaagtggcaataaaacctaacatgaatcaaggttgtttatggcagatgcatgtgttgctttacagagtttagcaaaagctcttaattttatgtcatactgtattctactgaataataaagctaacattattcaataataaaatggaatacttgactc

SEQ ID NO: 45219 - DNA, 4087 bp, Artificial Sequence
  derived and/or modified sequence
gatacacagacagagctttgaacgtggcttttcctagctggagagacaggaatgttatagtcggggggggggggcggggggagacggggggagagagagagagagagaagaaggagagcgagcgagcgagcaagggagcgagcaggacaggagcctgatcccacagcagctgctccagcccgcgatgaggaaaagtccaggtctgtctgactgtctttgggcctggatcctccttctgagcacactgactggaagaagctatggacagccgtcattacaagatgaacttaaagacaataccactgtcttcaccaggattttggacagactcctagatggttatgacaatcgcctgagaccaggattgggagagcgtgtaaccgaagtgaagactgatatcttcgtcaccagtttcggacccgtttcagaccatgatatggaatatacaatagatgtatttttccgtcaaagctggaaggatgaaaggttaaaatttaaaggacctatgacagtcctccggttaaataacctaatggcaagtaaaatctggactccggacacatttttccacaatggaaagaagtcagtggcccacaacatgaccatgcccaacaaactcctgcggatcacagaggatggcaccttgctgtacaccatgaggctgacagtgagagctgaatgtccgatgcatttggaggacttccctatggatgcccatgcttgcccactaaaatttggaagttatgcttatacaagagcagaagttgtttatgaatggaccagagagccagcacgctcagtggttgtagcagaagatggatcacgtctaaaccagtatgaccttcttggacaaacagtagactctggaattgtccagtcaagtacaggagaatatgttgttatgaccactcatttccacttgaagagaaagattggctactttgttattcaaacatacctgccatgcataatgacagtgattctctcacaagtctccttctggctcaacagagagtctgtaccagcaagaactgtctttggagtaacaactgtgctcaccatgacaacattgagcatcagtgccagaaactccctccctaaggtggcttatgcaacagctatggattggtttattgccgtgtgctatgcctttgtgttctcagctctgattgagtttgccacagtaaactatttcactaagagaggttatgcatgggatggcaaaagtgtggttccagaaaagccaaagaaagtaaaggatcctcttattaagaaaaacaacacttacgctccaacagcaaccagctacacccctaatttggccaggggcgacccgggcttagccaccattgctaaaagtgcaaccatagaacctaaagaggtcaagcccgaaacaaaaccaccagaacccaagaaaacctttaacagtgtcagcaaaattgaccgactgtcaagaatagccttcccgctgctatttggaatctttaacttagtctactgggctacgtatttaaacagagagcctcagctaaaagcccccacaccacatcaatagatcttttactcacattctgttgttcagtcctctgcactgggaatttatttatgttctcaacgcagtaattcccatctgctttattgcctctgtcttaaagaatttgaaagtttccttattttcataattcatttaagaacaagagacccctgtctggcagtctggagcaaagcagactatgcagcttggagacaggattctgacagagcaagcgaaagagcaaagtcatgtcagaaggagacagaatgagagagaaaagagggggaagatggttcaaagatacaagaaaaagtagaaaaaaaaataacacttaactaaaacccctaggtcatttgtagatatatatttccaaatattctaaaaaagatactgtatatgtcaaaaatatttttatgtgaaggtgtttcaaagggtaaattataaatgtttcatgaagaaaaaattttaaaaatctacgtctttattacacaaactatggtgtgcttatgtttttgttttgctttttaaactgatgtatagctttaacattttgtttccaaagctgaagatccccattctttctctttgaaaaaaaaaaaggcctaatgcattattttgtcataaaatgctattttaaaattcatggaactttcatacgtaaaggtgcagttgctcattgtagagcacatttagtccaatgaagataaatgctttaaatagtttacttcactttcatctgagcttttaccactagactcaaggaagaataattttaacagacatgtatactccatagaaactaaactaaaatagtttaaaaatattccctttttcaccctattttcagatagcacatgagcccaacactcacttaattctcattatgaagatgtttttagaggggcaaaaatattttgcaagctctggaattgttgaatgtattcttttatataactacattaaaagctttagattgaaatttatgactagcaaacaaaaatagaatatataaacgatatatgtaaatatacagcatgagattgtacattttttacttttttaaaattgtgttcttaaaatattgtgtaagaatcactgcacttagctgttggaatgttgttaaatgctatggaaatacatttagaacctgcatttaagaacagaacagcaagtatgaaccacatggaacttaaaacatatgggtgtgaagtccacttatgtagacaaaacttataatttccaaactgttgtctagtatacagtgatcagttgctctctgttcaagtcattccacacatttccctattttaggctattataatatagaaagaaaatgggaagcattagttggagctagaaaatgaactgtatattattgctatatttgctaataccaactatttcaataagtgttgtaccatatgtagcattaaatataaaatacataaaagaatgtacagaaaatagcttttattgagtaatattacatttcatttatactgtagcaatatatttgtaggtatactatgtaagggctttaaataaaagaggtccattaatacttccttataaaaattctagtctgtttcattactgcccagatgttttagagataaatatttatgcagaaggtatttttgaagtctccttttgtctgatagagtttaacagatatttaaatttagtgctcagaatccacaagtcacggtctaaacacacttagaatactacagcataaatctgttagcattattgccaaataagacagttgggatccaaacccaagtcttgagcaatgtttttctcaaaaagctgctatccaatgatataggaaaatacattgtgttttcctaaacacacttttctttttaaatgtgcttcattgtttgatttggtcctgcctaaatttcacaagctaggccaatgaaggctgaatcaaagacatttcatccaccaatatcatgtgtagatattatgtatagaaaataaaataaattatggctctaacttctgtgttgctgtttatcttgttatttttcggcgttatactaatgtgtttattgagagcattttaccttccagacttctcatggctaacttttggtctgtattttgctccttagatgtgaatatttcttattagtctgcttcctgctacgcaatgactgcatttctatcatttctcagtttgttagtatatgtggatagtattctactgtataaatgattgcaaagtttatcaaaaacaaattattatatgtagcttttctacagtgctttgctaaaccatgtagtactagttaagtcttccttgaaaataaagatacactcttataggggacagttcctgttcactcccaggaaacttttttaaaagatgacactgaatgtttattgcactttagtgcagtgaagtggcaataaaacctaacatgaatcaaggttgtttatggcagatgcatgtgttgctttacagagtttagcaaaagctcttaattttatgtcatactgtattctactgaataataaagctaacattattcaataataaaa

SEQ ID NO: 45220 - DNA, 4223 bp, Artificial Sequence
  derived and/or modified sequence
agcttaaaaattttaatgcacagttcactgtggaaactgaaatcttaaaagtccaaatatttagatgataaacaacaagaagagaataaaccaaactatattctaaatataaaacctagagataaacaactcacagtttttatgttgagcaatactgtcacctgaaagcgtttcagcttgtattcttttacaggagaataaggacactgatatatttctgaatggagaaatggaagggaaagtggagaatggatggtccaggtttccattgcttccaatgaggtgtcatatcccagtgagctgctccagcccgcgatgaggaaaagtccaggtctgtctgactgtctttgggcctggatcctccttctgagcacactgactggaagaagctatggacagccgtcattacaagatgaacttaaagacaataccactgtcttcaccaggattttggacagactcctagatggttatgacaatcgcctgagaccaggattgggagagcgtgtaaccgaagtgaagactgatatcttcgtcaccagtttcggacccgtttcagaccatgatatggaatatacaatagatgtatttttccgtcaaagctggaaggatgaaaggttaaaatttaaaggacctatgacagtcctccggttaaataacctaatggcaagtaaaatctggactccggacacatttttccacaatggaaagaagtcagtggcccacaacatgaccatgcccaacaaactcctgcggatcacagaggatggcaccttgctgtacaccatgaggctgacagtgagagctgaatgtccgatgcatttggaggacttccctatggatgcccatgcttgcccactaaaatttggaagttatgcttatacaagagcagaagttgtttatgaatggaccagagagccagcacgctcagtggttgtagcagaagatggatcacgtctaaaccagtatgaccttcttggacaaacagtagactctggaattgtccagtcaagtacaggagaatatgttgttatgaccactcatttccacttgaagagaaagattggctactttgttattcaaacatacctgccatgcataatgacagtgattctctcacaagtctccttctggctcaacagagagtctgtaccagcaagaactgtctttggagtaacaactgtgctcaccatgacaacattgagcatcagtgccagaaactccctccctaaggtggcttatgcaacagctatggattggtttattgccgtgtgctatgcctttgtgttctcagctctgattgagtttgccacagtaaactatttcactaagagaggttatgcatgggatggcaaaagtgtggttccagaaaagccaaagaaagtaaaggatcctcttattaagaaaaacaacacttacgctccaacagcaaccagctacacccctaatttggccaggggcgacccgggcttagccaccattgctaaaagtgcaaccatagaacctaaagaggtcaagcccgaaacaaaaccaccagaacccaagaaaacctttaacagtgtcagcaaaattgaccgactgtcaagaatagccttcccgctgctatttggaatctttaacttagtctactgggctacgtatttaaacagagagcctcagctaaaagcccccacaccacatcaatagatcttttactcacattctgttgttcagtcctctgcactgggaatttatttatgttctcaacgcagtaattcccatctgctttattgcctctgtcttaaagaatttgaaagtttccttattttcataattcatttaagaacaagagacccctgtctggcagtctggagcaaagcagactatgcagcttggagacaggattctgacagagcaagcgaaagagcaaagtcatgtcagaaggagacagaatgagagagaaaagagggggaagatggttcaaagatacaagaaaaagtagaaaaaaaaataacacttaactaaaacccctaggtcatttgtagatatatatttccaaatattctaaaaaagatactgtatatgtcaaaaatatttttatgtgaaggtgtttcaaagggtaaattataaatgtttcatgaagaaaaaattttaaaaatctacgtctttattacacaaactatggtgtgcttatgtttttgttttgctttttaaactgatgtatagctttaacattttgtttccaaagctgaagatccccattctttctctttgaaaaaaaaaaaggcctaatgcattattttgtcataaaatgctattttaaaattcatggaactttcatacgtaaaggtgcagttgctcattgtagagcacatttagtccaatgaagataaatgctttaaatagtttacttcactttcatctgagcttttaccactagactcaaggaagaataattttaacagacatgtatactccatagaaactaaactaaaatagtttaaaaatattccctttttcaccctattttcagatagcacatgagcccaacactcacttaattctcattatgaagatgtttttagaggggcaaaaatattttgcaagctctggaattgttgaatgtattcttttatataactacattaaaagctttagattgaaatttatgactagcaaacaaaaatagaatatataaacgatatatgtaaatatacagcatgagattgtacattttttacttttttaaaattgtgttcttaaaatattgtgtaagaatcactgcacttagctgttggaatgttgttaaatgctatggaaatacatttagaacctgcatttaagaacagaacagcaagtatgaaccacatggaacttaaaacatatgggtgtgaagtccacttatgtagacaaaacttataatttccaaactgttgtctagtatacagtgatcagttgctctctgttcaagtcattccacacatttccctattttaggctattataatatagaaagaaaatgggaagcattagttggagctagaaaatgaactgtatattattgctatatttgctaataccaactatttcaataagtgttgtaccatatgtagcattaaatataaaatacataaaagaatgtacagaaaatagcttttattgagtaatattacatttcatttatactgtagcaatatatttgtaggtatactatgtaagggctttaaataaaagaggtccattaatacttccttataaaaattctagtctgtttcattactgcccagatgttttagagataaatatttatgcagaaggtatttttgaagtctccttttgtctgatagagtttaacagatatttaaatttagtgctcagaatccacaagtcacggtctaaacacacttagaatactacagcataaatctgttagcattattgccaaataagacagttgggatccaaacccaagtcttgagcaatgtttttctcaaaaagctgctatccaatgatataggaaaatacattgtgttttcctaaacacacttttctttttaaatgtgcttcattgtttgatttggtcctgcctaaatttcacaagctaggccaatgaaggctgaatcaaagacatttcatccaccaatatcatgtgtagatattatgtatagaaaataaaataaattatggctctaacttctgtgttgctgtttatcttgttatttttcggcgttatactaatgtgtttattgagagcattttaccttccagacttctcatggctaacttttggtctgtattttgctccttagatgtgaatatttcttattagtctgcttcctgctacgcaatgactgcatttctatcatttctcagtttgttagtatatgtggatagtattctactgtataaatgattgcaaagtttatcaaaaacaaattattatatgtagcttttctacagtgctttgctaaaccatgtagtactagttaagtcttccttgaaaataaagatacactcttataggggacagttcctgttcactcccaggaaacttttttaaaagatgacactgaatgtttattgcactttagtgcagtgaagtggcaataaaacctaacatgaatcaaggttgtttatggcagatgcatgtgttgctttacagagtttagcaaaagctcttaattttatgtcatactgtattctactgaataataaagctaacattattcaataataaaatggaa

SEQ ID NO: 45221 - DNA, 583 bp, Artificial Sequence
  derived and/or modified sequence
atatttctgaatggagaaatggaagggaaagtggagaatggatggtccaggtttccattgcttccaatgaggtgtcatatcccagtgaggtcatttcctgacttcaaagcattcatctaaactgcctcagtcagccctggtggttataacctgatgtttcttgctagagacattgatctctacttattctacttttcagctgctccagcccgcgatgaggaaaagtccaggtctgtctgactgtctttgggcctggatcctccttctgagcacactgactggaagaagctatggacagccgtcattacaagatgaacttaaagacaataccactgtcttcaccaggattttggacagactcctagatggttatgacaatcgcctgagaccaggattgggagagcgtgtaaccgaagtgaagactgatatcttcgtcaccagtttcggacccgtttcagaccatgatatggaatatacaatagatgtatttttccgtcaaagctggaaggatgaaaggttaaaatttaaaggacctatgacagtcctccggttaaataacctaatggcaagtaaaatctggact

SEQ ID NO: 45222 - DNA, 1371 bp, Artificial Sequence
  derived and/or modified sequence
atgcgcaaaagtcctggcctcagtgactgcttgtgggcttggattctgttattgtctacactgaccggccggagctatggccagcccagtctccaggatgagctgaaggataatacaactgtgtttacgcgaattctcgaccgccttctcgatggatatgacaatagactgcgaccggggctgggggaaagggtgaccgaggtgaagacagacatatttgtgacaagcttcgggcctgtctctgatcatgacatggaatatactatagacgtcttctttcggcaatcatggaaggacgagagattgaaatttaaagggccaatgactgtactgcgcctgaataacctgatggctagtaaaatttggacacccgatactttttttcataacgggaagaaatccgtggctcacaatatgaccatgccaaataagttgctgagaattactgaagatggaaccttgctctacaccatgagactgaccgtgagggctgaatgtccgatgcatctcgaggacttccccatggacgctcatgcctgtcctctgaagtttggctcttatgcctatacgagggctgaagtggtgtatgagtggacccgggagccagctaggtcggtcgttgtggcagaagacggctcccgacttaatcagtacgacctgttgggccaaactgtcgatagcgggatcgtccaaagcagtaccggggagtacgtggtgatgactacccactttcacctcaagcggaagatcggctattttgtgattcaaacttaccttccttgcattatgactgtgatcctgagccaggtctcattctggcttaacagagagtctgtgcccgcccggactgtctttggcgtgacgacagtcctgaccatgactacccttagcatcagtgcgaggaacagtttgccaaaagtagcctacgccacagctatggattggttcatcgcagtttgctatgcctttgtgttctctgcgctgatcgaattcgccacagttaattacttcacaaaaaggggttacgcatgggacggtaaaagcgtggtgcccgaaaagcctaagaaagtgaaagaccctctcattaagaaaaataacacctacgcaccaaccgccactagctatacacccaacttagctaggggggatccagggctggccacgatagccaaaagcgctacaattgagccaaaggaggtgaagcccgagaccaagcccccagagccaaagaagactttcaattctgtgtcaaaaatagacagactatcaaggattgcttttcctctgcttttcggaatcttcaatctcgtttactgggctacatacttgaacagggagccacagctgaaggctcccactccccaccaatag

SEQ ID NO: 45223 - DNA, 1371 bp, Artificial Sequence
  derived and/or modified sequence
atgcggaaatctcctggtctctccgattgcctctgggcctggatcctcctgctgtctaccttgacggggcgctcttatggtcagccctccctacaagacgagctgaaggataacacaaccgtgttcactcgcattctcgataggttgcttgatggctatgacaatagactgagaccaggcctcggagagcgggtgacagaagtgaaaactgacatcttcgtcacctcttttggtcccgtcagcgatcacgacatggaatataccatcgacgtattctttaggcaaagctggaaggatgaacggctgaaatttaaagggccaatgacggtgctccgtctcaacaacttgatggcaagcaagatttggacccctgatactttcttccacaacggtaaaaagtcagtggctcataatatgaccatgccgaataaactcctgcgaattacagaggacggcacactcctttacaccatgaggctgaccgtgcgtgcagagtgtcccatgcacctggaggatttccctatggacgcacatgcttgtcccctgaaatttggatcttacgcatatacacgggccgaggtagtgtacgagtggactcgcgagccagccagatccgtggtggtggctgaggacgggtctcgtcttaaccagtacgacctccttgggcagaccgtcgatagtggcatcgttcagtcgtccaccggcgaatacgtggtaatgaccacccatttccatctgaaaagaaaaatcgggtacttcgttatccagacgtacctgccatgtattatgaccgtgattctgtcccaggtgtctttttggctgaatcgggagtccgtaccggcgaggacagtcttcggcgtaaccacagttcttaccatgactaccctatctatttcagctcggaactctctccccaaggttgcatacgctacagctatggactggttcattgcagtttgctacgcatttgtattctctgccctcatagaattcgccactgtcaactactttactaaaagagggtacgcctgggacggcaaaagtgtggtgccggaaaaacccaaaaaagtgaaggatcccctcattaagaagaataatacatatgctccgactgcgacgagctatactcctaatctggccagaggcgaccctgggcttgccaccatagcaaaaagtgctaccattgagcccaaggaagtgaagcccgagaccaaaccaccagagcctaaaaagaccttcaattccgtgagcaagatcgacagactgtcccggatcgccttcccattgctgtttggcatattcaacctggtgtactgggccacttaccttaaccgggaaccgcaactgaaagcgccaactccgcaccaatag

SEQ ID NO: 45224 - DNA, 1371 bp, Artificial Sequence
  derived and/or modified sequence
atgcggaaaagtcccggactcagcgactgcctgtgggcttggatactgctgctgtcaacactgaccgggcggtcatatggacagcccagcctgcaggatgaacttaaggataataccactgtgtttacccgcatcctggatcgcctcttggacggctacgataacaggctccgccccggtttgggcgagcgcgtgacagaggtcaaaacagatatcttcgtaacctcctttggaccagttagtgaccacgatatggaatacacaattgatgttttcttcagacagagttggaaggacgaacggcttaagttcaagggccccatgacagtgctgagattaaataatttaatggcttcgaaaatctggacgccagatacattctttcataacggaaaaaagagtgtggcgcacaacatgaccatgccaaataagttgctacggatcactgaagatgggacgcttctgtacacgatgcgactgacagtgcgagctgagtgtccaatgcatctggaagacttcccaatggacgctcacgcttgccccctgaaattcggatcatacgcctatacccgggccgaggtggtatatgagtggacaagagaacctgctcgtagcgtggtggtcgcagaagacgggtctcggcttaaccagtatgacctgctgggacagactgtggactcaggaattgtgcagagttctacaggggagtatgtggtgatgacaacccatttccatctcaaacgcaagatcggctacttcgtaatccagacgtatcttccctgtattatgaccgtgatccttagtcaggtgtccttttggctcaatagagagagcgtgccagcacgcaccgtgtttggagtgactactgtcctaacaatgaccaccttgtcaattagcgcacggaatagccttccgaaggtggcttacgcgacagctatggattggttcattgcagtgtgttatgcgttcgtcttttcagcactgattgagttcgccacagtcaactacttcacgaaacggggctacgcatgggacgggaaatcggttgtacccgagaagccaaaaaaggtgaaagatcccctcataaagaaaaataatacctacgctccgacagccaccagctacacccctaacctcgcccgtggcgatccaggacttgcgactattgctaagtctgccacgattgaacctaaggaggtcaaacctgagacgaagccgcctgaacctaaaaagacctttaatagcgtctcaaaaattgatcggctgtcacgcatcgcatttccccttctgttcggtatattcaatcttgtgtactgggctacgtatctcaacagggagccccagctgaaagcccccacccctcatcagtag

SEQ ID NO: 45225 - DNA, 1371 bp, Artificial Sequence
  derived and/or modified sequence
atgcgcaagagtccgggtctctccgattgtctgtgggcctggattctgctgctgtccactctgaccggtagaagctacgggcagccaagtttgcaggacgaactaaaggacaatacgaccgtatttactcgcatccttgataggctactagacggctatgataatagactcagacccggtctgggagaaagagtgaccgaggttaaaacggatattttcgttacctcttttggacccgtgtccgaccacgacatggagtataccatcgatgtgtttttccgccagtcttggaaggatgagcgactgaagttcaaggggccgatgaccgtgttgagattaaataatctgatggcttcgaagatttggacacctgacactttctttcataatggcaaaaagagtgtagcacacaatatgaccatgccgaacaaacttttaagaataaccgaggatggaaccctgttgtacacaatgaggctgaccgttcgcgccgaatgtcctatgcacctcgaggattttccaatggatgcgcatgcctgcccgctcaaatttggttcttacgcctatactcgtgcagaggtcgtgtatgagtggacccgcgagcccgcccgtagtgtggttgtcgccgaagacggctcgcggcttaatcagtatgatcttctgggccagaccgtggattccggtatcgtgcaatctagcacgggcgagtatgtagttatgactacccatttccacctcaagcgaaaaatcggctacttcgtgatacaaacatatcttccgtgcatcatgacggttattctgtcccaggtcagcttttggctgaacagagagtctgtccctgccagaaccgtgtttggcgttaccaccgtgttaacaatgactaccctctcaattagcgccaggaattcacttccgaaggttgcttatgccacagccatggactggttcattgccgtgtgttatgctttcgtattcagcgccctcatcgagtttgcgactgtgaattatttcacaaagcgcgggtacgcgtgggacggcaagagcgtcgtaccagaaaaacctaagaaagtgaaggatcctcttataaagaagaacaacacatacgcacccactgctacttcttacactcccaacctagctcggggcgacccggggttagccaccattgctaaatccgcaactatcgaacccaaggaggtgaaacctgagacgaagcctccagagccaaagaaaaccttcaattcagtgtccaagattgaccggctgagccgcatagcttttccccttcttttcgggatctttaatctggtgtactgggccacctaccttaacagagaaccacagttaaaggccccaacgccccaccagtag

SEQ ID NO: 45226 - DNA, 1371 bp, Artificial Sequence
  derived and/or modified sequence
atgcgtaagagccccggtctgtccgattgcttgtgggcctggattctgcttttatccactctgacgggaaggagttatggccagccaagtctgcaggatgagcttaaagacaacactacggtcttcacccgcatattagacaggctgcttgacggctacgataaccgcctgaggccagggctcggggaacgtgtcacggaggtcaagaccgacatctttgtgacatcttttggaccggtgagcgatcacgatatggagtacaccatcgacgttttctttcggcagtcttggaaggatgagcgtttgaagttcaagggcccaatgaccgtcctacgactcaataatttgatggcttcaaagatctggacgcctgacaccttcttccacaacggcaagaagtccgttgctcacaacatgaccatgccaaataaattattgcggattacggaggacggcactctcttatacaccatgcggttaaccgtgcgagcagaatgtccaatgcatctcgaggattttcctatggacgcccacgcttgtcctctgaagtttgggtcctatgcatataccagggcagaggtggtgtacgagtggacaagagagccggccaggagcgtagtggtggcagaagacggatctagactgaaccaatacgatctccttggacagacagtggacagcggaattgtgcagtcaagcacaggtgagtatgtggtgatgactactcattttcatctgaagcgcaagattggatatttcgtgatccaaacctaccttccctgcattatgactgtgatcctgtctcaagtgagcttttggttgaacagggaatctgtgcctgctagaactgtttttggcgtcacaactgttcttaccatgaccactctctcaatcagcgcccgaaatagcttaccaaaggttgcctatgccactgccatggactggtttattgctgtctgttatgccttcgtgttcagcgcactgatcgagttcgctacagtgaactacttcactaaaagggggtatgcatgggacggaaagtcggtggtgccagagaaaccgaagaaggtcaaagaccctctgattaagaaaaacaatacttacgcgccaacagccacctcctacaccccgaacttagctaggggggatcccggcttggcaaccatcgctaagtcggcaactattgagccgaaggaagtgaaacccgagacaaagccgccggagcccaagaagacttttaactccgtgagtaagatcgatcgactgagtcgcatagctttcccactgctgttcggaatcttcaacctcgtctactgggcaacctaccttaatagggaacctcagttgaaagctccgacaccgcatcagtag

SEQ ID NO: 45227 - DNA, 1371 bp, Artificial Sequence
  derived and/or modified sequence
atgagaaagagccctgggctctcagactgcctatgggcctggatacttcttctgtcaaccctgactgggcggtcttacggacaaccttccctacaggatgagcttaaggacaacacaacggtattcactaggatcttagataggctgctggacggctatgacaacagattgcgtcctggcctgggtgaaagagtaaccgaagttaagaccgatatctttgttacttcctttgggccagtatctgaccatgacatggagtatactatcgacgtgtttttccggcagtcatggaaggacgaacgattgaagttcaaagggccgatgacagtgctgcggctgaacaatctgatggcaagcaaaatatggactcctgacaccttctttcataatgggaagaaaagcgttgcacacaacatgaccatgcctaacaagctgttacgcattaccgaggacggaaccttgttatacaccatgaggttaacagtccgagctgagtgtcctatgcacctagaggatttcccaatggatgctcacgcatgtcccctaaagtttggatcctatgcctacacccgcgcagaggtcgtctacgaatggacccgcgaaccagcccggtcggtggtagtggcagaagacggcagccgcctcaaccagtacgatctgctaggccagaccgtcgactccggaattgtccagtctagcacgggcgaatatgtagtaatgactactcattttcatttgaaacgcaagatcggctatttcgtgattcaaacctatttaccctgcatcatgaccgtgatattgtcacaggtctccttctggcttaatagagagtcagtgccagccaggaccgtcttcggtgtcactacggttctcaccatgacgactctttccatatcggcaaggaactctcttccaaaagtcgcctatgcgacagccatggactggtttattgctgtgtgttatgcctttgtcttctcggccttgatagagtttgccactgtcaattacttcactaagcgtggctatgcctgggatggtaagagcgttgtgcctgagaaacccaaaaaggttaaagatcctctgattaagaaaaataatacgtacgctccaaccgccacaagttacaccccaaaccttgcccgaggggatcctggactggccacaattgccaagtcagcgaccatagagcctaaggaggtgaagcccgagactaagcctccagagcccaagaagacctttaattctgtatctaagattgatcgactgagccgcattgcctttcccctgctctttggaatattcaatttggtctattgggccacttacctcaaccgtgaaccacagctgaaggctccaacaccgcatcagtag

SEQ ID NO: 45228 - DNA, 372 bp, Artificial Sequence
  derived and/or modified sequence
atgcgaaaatccccaggccttagcgactgcctctgggcctggattcttctattatctaccttgaccgggcgaagctatgggcagccaagtctacaagatgagctgaaggacaacacaacagtgtttactcgaattctggaccgactgctggacggatatgacaatcgtttacggcctgggctgggggaaagggtaaccgaggtgaagaccgatatattcgtcacttcattcggtccggtgtctgaccatgatatggagtacacgatcgacgttttcttcagacaaagctggaaggatgagcggctcaagttcaaaggtcccatgactgtgctgcgtcttaacaatcttatggccagcaagatctggacctag

SEQ ID NO: 45229 - DNA, 1371 bp, Artificial Sequence
  derived and/or modified sequence
atgaggaagagccctggcctgagtgactgcctgtgggcctggatcctgctgctgagcaccctgaccggccgctcctatggccagcccagcctgcaggatgagctgaaggacaacaccaccgtcttcacccgcatcctggaccggctgctggatggctatgacaaccggctgcggcccggcctgggggagcgggtgacagaggtgaagacagacatctttgtgaccagctttggacctgtgtctgaccatgacatggagtacaccattgatgtgttcttccggcagagctggaaggatgagcggctgaagttcaagggccccatgacagtgctgcggctgaacaacctgatggccagcaagatctggaccccagacaccttcttccacaacgggaagaagtctgtggcccacaacatgaccatgcccaacaagctgctgcgcatcacagaagatggcaccctgctgtacaccatgaggctgactgtgcgggcagaatgtcccatgcacctggaggacttccccatggatgcccacgcctgccccctgaagtttggcagctatgcctacaccagggctgaggtggtgtatgagtggacccgggagcccgcccggtctgtggtggtggccgaggatggcagccggctgaaccagtatgacctgctgggccagacagtggacagcggcatcgtgcagagcagcactggagaatatgtggtgatgaccacccacttccacctgaagaggaagattggctactttgtgatccagacctacctgccctgcatcatgaccgtcatcctgagccaggtgtccttctggctgaaccgggagagcgtgcctgccaggacagtgtttggagtgaccaccgtgctgaccatgaccaccctgagcatcagcgccaggaacagcctgcccaaggtggcctatgccacagccatggactggttcatcgctgtgtgctacgcctttgtgttcagcgccctgattgaatttgccaccgtgaactacttcaccaagaggggctacgcctgggatggcaagtctgtggtgcctgagaagcccaagaaggtgaaggaccccctcatcaagaagaacaacacctacgcccccacagccaccagctacacccccaacctggcccggggggaccccggcctggccaccatcgccaagagcgccaccatcgagcccaaggaggtgaagccagagaccaagcccccagagcccaagaagaccttcaacagcgtgtccaagattgaccggctgagcagaattgccttccccctgctgtttggcatcttcaacctggtgtactgggccacctacctgaaccgggagccccagctgaaggcccccaccccccaccagtag

SEQ ID NO: 45230 - DNA, 372 bp, Artificial Sequence
  derived and/or modified sequence
atgaggaagagccctggcctgagtgactgcctgtgggcctggatcctgctgctgagcaccctgaccggccgctcctatggccagcccagcctgcaggatgagctgaaggacaacaccaccgtcttcacccgcatcctggaccggctgctggatggctatgacaaccggctgcggcccggcctgggggagcgggtgacagaggtgaagacagacatctttgtgaccagctttggacctgtgtctgaccatgacatggagtacaccattgatgtgttcttccggcagagctggaaggatgagcggctgaagttcaagggccccatgacagtgctgcggctgaacaacctgatggccagcaagatctggacctag

SEQ ID NO: 45231 - DNA, 1371 bp, Artificial Sequence
  derived and/or modified sequence
atgcggaagagccccggcctgagcgactgcctgtgggcctggatcctcttgcttagcaccctgacagggcggtcgtatgggcagcctagcttacaggatgagctgaaggataataccacagtttttacgcggatccttgaccgcctccttgacggttatgataacagacttagaccgggcctaggagagcgcgtgaccgaagttaaaacggatatcttcgtaacttctttcggccctgtgtcagatcacgacatggagtataccatcgatgtgttctttcgacagtcttggaaggatgaacgcctgaaatttaagggtccaatgaccgtcctgcgtctcaacaaccttatggctagcaagatctggactccagacacattcttccacaatggaaagaagagcgtggcccacaacatgaccatgcctaacaaactcctgcggattactgaggacggaactctgctctacacaatgcggttgacagtccgcgccgaatgcccaatgcacttggaagactttcccatggacgcccacgcgtgtccactaaaattcggcagttatgcttatactagggcggaggtcgtgtacgagtggacaagggagcccgcaagatctgtggtggtggccgaagatggctcacgactgaatcaatatgacctgttggggcagactgtcgactctgggatcgtgcagtcctcaactggagaatatgtggtcatgacaacacacttccatcttaagcgaaagatcggttacttcgttatccaaacgtatcttccatgcatcatgactgttattctctcacaggtcagcttttggttgaaccgcgagtccgtccctgcccgcaccgtgttcggcgtaacaacagtcctgactatgacaactctgagtatatccgcccgaaactctttgccgaaggtggcgtatgctacagcaatggattggtttatagcggtctgctacgcctttgtgttttctgcactcatagaatttgctaccgtgaactactttacaaaacgtgggtacgcatgggatggaaagtcagtggtgccagagaagccaaagaaagtgaaggaccctcttattaagaaaaataatacctatgccccgaccgctacatcatacacgccaaatctggcgcgtggtgacccaggcctcgcaacaatcgcgaagagtgcgacaatcgagcccaaagaggtcaagcccgaaactaaacctcccgaaccgaagaaaacgttcaactccgtctctaagattgataggttgtctcgcatagcatttcccctgctgtttgggatatttaatctcgtctattgggccacttatttaaatcgggaaccacaattgaaagctccaaccccccatcagtag

SEQ ID NO: 45232 - DNA, 1371 bp, Artificial Sequence
  derived and/or modified sequence
atgcggaagagccccggcctgagcgactgcctgtgggcctggatcttgttactgtcaacattaactgggcgcagctatgggcagccaagcctccaggacgaactgaaagataacaccaccgtcttcacacggatcctggaccgcctactggacggctacgacaatcgcctgcgacctggcttgggcgaaagagtgaccgaggttaaaaccgatatcttcgttacttctttcggtccagtctctgaccatgatatggaatacactattgacgtcttcttccgccagtcatggaaggatgagcgcctgaagtttaagggtccgatgacagtactaaggctgaacaatttgatggcgagcaagatttggacccccgatacatttttccacaacggcaaaaagtcagtggcacacaacatgaccatgcctaataagctgctgaggattacggaagacgggacacttctgtacactatgcggctaacagtgcgtgccgagtgtcctatgcatctggaagatttccccatggatgcccatgcctgccccctgaaattcggcagctacgcttacactcgggcagaagtggtgtacgagtggacaagggaaccggcacgatcagtcgtcgttgcagaagacggttcccggcttaaccaatacgacctcctagggcagacagtagattcagggatagtgcaatcatcaactggggagtatgtggtgatgacaacccattttcacctgaagagaaaaataggatatttcgtcattcagacctacctaccatgcattatgacagtcatcctttcacaggttagcttttggctgaaccgcgaatctgtccctgctcgcaccgtcttcggagtcacaactgtgctgaccatgactactttgtccatttcagctcgcaactctctgcctaaggtggcttacgcaacggccatggattggtttattgccgtatgttacgcctttgtcttcagtgctctgattgaatttgctactgtgaattacttcacaaagcgggggtacgcgtgggacggcaaatccgtggtgcctgaaaagcctaagaaggtgaaagacccccttatcaagaagaacaacacctatgcccccaccgctacgtcctatactcccaacctggctcggggcgatccaggactggcaaccattgcgaaatccgctactatcgagccaaaagaggttaaaccagagactaagcccccggaacctaaaaaaacattcaacagtgtatctaagatagatcgactgtccagaatcgccttcccactcttgttcggcatcttcaaccttgtgtactgggcaacctacttgaaccgggaaccccagctgaaagctccaaccccgcaccagtag

SEQ ID NO: 45233 - DNA, 1371 bp, Artificial Sequence
  derived and/or modified sequence
atgcggaagagccccggcctgagcgactgcctgtgggcctggatcctgctcctgagcaccttgactggccgcagttacggtcagccttcgctgcaggatgaattaaaagataatactacagtcttcactaggattctggacaggctcttggacggctacgataacagactgcgacctgggctgggggagcgggttactgaggtcaaaacggatatttttgtgactagcttcggaccagtttcggaccatgatatggagtatacaatcgacgtgttctttagacagagctggaaagacgaaagattgaagttcaagggaccaatgaccgtgcttcggctgaacaacctgatggcttcaaagatttggacaccagatacatttttccacaacggtaagaagagcgttgctcacaacatgacgatgccaaataagctgttgcggataaccgaagacgggacactgctctataccatgagacttaccgtgagagccgagtgtccgatgcacctggaagattttccaatggacgctcacgcatgccctctgaagtttgggtcgtacgcatatacccgggccgaagtcgtgtacgagtggaccagggagcccgctcgtagcgtggttgtggctgaagatggtagccggctcaaccagtacgatctactgggtcagacggtggacagcggcatagtccaaagttcaaccggtgaatacgtggtaatgaccacacatttccatctcaagagaaagattggctacttcgtcattcagacctatctgccttgtattatgacggttattttgagccaggtgagtttctggcttaatagagagtctgttcccgctcgcacagttttcggggtgacaaccgtattgaccatgaccaccctgtccatctcagcccgcaattccctgcctaaggtagcgtatgcgaccgcgatggattggttcatagctgtttgttatgcctttgtgttctctgctttgattgagttcgcgaccgtcaactacttcacaaaacggggatatgcatgggacgggaaatccgtcgtaccagaaaagcctaagaaggttaaagatcctctgatcaagaagaataacacctacgccccgaccgctacatcgtacacgccaaatcttgcgaggggcgaccccgggctcgccacgatagccaagtccgctacaatcgaaccaaaagaggtgaagcctgagactaagcctccagaacccaagaaaaccttcaacagtgtgtccaaaattgacaggctgtccaggatagctttcccattgttgtttggaatcttcaacttggtctattgggcaacatatctgaatagagaaccccaacttaaggctccaacacctcatcaatag

SEQ ID NO: 45234 - DNA, 1371 bp, Artificial Sequence
  derived and/or modified sequence
atgcggaagagccccggcctgagcgactgcctgtgggcctggatcctgcttctgtccacactgacaggccgctcttacggtcaaccctctctccaggatgagctgaaagacaacaccaccgtatttacacggatactcgaccgattgctggatggctacgacaatcggcttcggccgggcttgggcgaacgggtgacagaagtgaagactgacatttttgttacttcttttggccccgtgtctgaccacgatatggagtacactattgatgtgttcttccgacaatcttggaaggacgaacgattaaagtttaagggaccaatgacagttttgagacttaacaatctaatggcctctaagatctggactcctgacactttcttccacaacgggaagaaatcagtagcccataatatgacaatgccgaataagctgttgaggataaccgaggacgggacactgctgtatacaatgcgattgacagtgagggctgagtgcccaatgcatctggaagacttcccgatggacgcacacgcctgtccactcaagtttggctcttatgcctatactagggccgaggtcgtgtacgagtggacacgcgaacctgcacgctctgtcgtggtggcagaggatgggtctagactcaaccaatatgacctcctggggcagacagtggattccggcatcgtgcagtcaagcacaggggagtacgtcgtcatgaccactcacttccacctgaagcgaaagattggttattttgttatacagacatacttaccatgcatcatgactgtgattttaagccaggtttcgttctggttgaatcgggagagcgtgcccgcccggaccgtgttcggggtgaccaccgtcctaaccatgactacgctgtcaatctctgctcggaattctctacccaaggtcgcgtacgccacagcaatggactggtttattgcagtatgttacgctttcgtcttttccgcgctcatagaatttgcaacagtgaattattttacgaaacgagggtacgcatgggacggcaagtctgtcgtccccgagaaaccaaagaaggtgaaggatcccctgatcaagaaaaacaatacttatgccccaacagccacttcgtacacccctaacctcgccagaggcgaccctggtctggctacaattgccaaatctgccacaatcgagcctaaggaggtgaaacctgaaacgaaacccccagagccaaaaaaaacatttaactcagtgagcaagattgatcgcttgagcagaatcgctttccctttgcttttcggcattttcaatctggtgtactgggcaacatacctcaaccgggagccacaactcaaagccccaaccccgcaccaatag

SEQ ID NO: 45235 - DNA, 1371 bp, Artificial Sequence
  derived and/or modified sequence
atgcggaagagccccggcctgagcgactgcctgtgggcctggatcctgcttttgagcaccctaaccgggaggtcatatggccagcccagcctccaggatgaattgaaggacaatactacggttttcacacgtatcttggaccggcttctcgacgggtatgacaaccgactgcgacctggactgggtgagcgcgtgaccgaggtgaaaactgacatcttcgtcacgagttttggccctgtgagcgatcatgatatggagtacacaatcgatgtatttttcaggcagtcttggaaagatgagcgactgaaattcaagggaccaatgacagtgctgcgcctgaacaatctcatggccagcaaaatttggacccctgatacctttttccacaacggaaagaagtccgtagcccataatatgactatgcccaataaactcctgaggattaccgaggatggcacattattgtacacaatgaggctgaccgtaagagctgagtgtcccatgcacctcgaggactttcctatggatgcccacgcttgccctctgaagtttggaagctatgcatacacccgcgcagaggtcgtctacgaatggacccgagagccagcgcgttccgtggtggtcgcggaagacgggagtcggcttaatcagtacgatctgctgggacagacagtcgactcggggattgtgcagagttcaaccggcgaatacgtggtgatgaccacacattttcatttaaagcgcaagatcggatactttgtgatccagacttacctaccttgtatcatgaccgtcatcttgtcacaggtctctttctggctgaatagggagtctgttcctgccagaacagtctttggcgtaaccactgtactgacgatgaccactctgagcatttccgccagaaactcactaccgaaggtggcctatgcgaccgcgatggattggtttattgcagtgtgttacgccttcgttttttcagctctcattgaattcgccacagtcaactattttactaagagaggctatgcctgggatggcaagagtgtcgtaccagagaaacccaagaaagttaaagaccctctgattaaaaaaaacaacacatacgcacctacagccacttcatacacccctaatctggctcgcggcgacccaggtctcgctacaatcgccaagtctgcaaccatcgagcccaaagaggtaaaacccgaaacaaaacctccagaacccaagaaaacattcaactctgtgtcaaagattgatagactgagtaggatcgcttttcccctgctgttcggcatttttaacctcgtgtactgggcaacgtacctgaaccgggaaccacaactgaaggcccccaccccacatcagtag

SEQ ID NO: 45236 - DNA, 1371 bp, Artificial Sequence
  derived and/or modified sequence
atgcggaagagccccggcctgagcgactgcctgtgggcctggatcctcctgctctccaccctgacagggcgctcatatggtcaaccttccctgcaggatgagctcaaagacaacacaactgttttcacaagaattctcgataggctgttggatggatatgataatcgattgaggcccggtctgggagagcgtgttaccgaagtgaaaacggacattttcgtaacatctttcggaccagtgtcagaccacgacatggagtacacaatcgatgtattctttcgccaaagctggaaggacgaacgccttaaattcaaggggccaatgactgtgctaagactgaataatctaatggctagtaagatttggacccctgacacattctttcataatggcaaaaaaagcgtcgcccataatatgacaatgccgaacaagctgttaagaataaccgaagacggtaccctcttgtataccatgagactgacggtgcgtgccgaatgtccgatgcacctcgaagacttccctatggacgcccacgcatgtcccctcaagttcggatcttacgcctatacacgcgccgaagtagtgtatgagtggacgagggaaccggcccggtccgtggtggttgccgaggacggcagtagactgaaccaatacgatttgttgggacaaaccgtcgattcagggatagtgcagtcgtccactggagagtatgtggtgatgaccacccattttcatcttaaaagaaagattggatacttcgtgatccagacatacctcccttgtataatgaccgtgattctcagccaggtgagcttttggctgaacagagaatcagtaccagccaggacagtcttcggagtcacgacagtgttgacaatgactaccctgtcaatttcagccaggaatagtttaccaaaggtggcctatgcaaccgcaatggactggtttattgccgtttgttacgcatttgttttctctgcgttgatcgagtttgcaactgtgaactattttacgaagagggggtatgcttgggacgggaaaagcgtcgtccccgagaagccaaaaaaggttaaggacccactgatcaagaagaataatacgtatgcccctaccgctacctcctacacaccaaacttggcccgcggagatccgggtctggcaaccatcgctaagagcgctaccatcgaacctaaagaggtcaaaccagagacgaagccccctgaacctaagaaaacctttaattccgtttctaagatagacaggttgagtagaattgccttccccctcctttttgggatattcaatctcgtttattgggccacctaccttaatcgggaaccccaactcaaggcacctaccccgcaccaatag

SEQ ID NO: 45237 - DNA, 372 bp, Artificial Sequence
  derived and/or modified sequence
atgcggaagagccccggcctgagcgactgcctgtgggcctggatcctgctcctgagcacgctaactggtagatcctatggacaaccttctctgcaagacgaattgaaggataacaccaccgtgtttactcggatcctcgatcgcttactcgatgggtacgataataggctaagacccggcctgggcgaaagagtgaccgaagtgaaaactgatatcttcgtcacatctttcggccccgtgagtgaccatgacatggagtatacaatagacgtgttcttccggcagtcctggaaagatgagaggctgaaattcaaggggccgatgaccgtcttgcgcctgaataatctcatggcctccaagatctggacttag

SEQ ID NO: 45238 - DNA, 1371 bp, Artificial Sequence
  derived and/or modified sequence
atgcgaaaatcacccggtctgagtgactgcctgtgggcatggattcttctcttatccacactgactggcaggagctacgggcagccatctttacaagacgagcttaaagataacacaaccgtgtttacgcggatcctggatcgtctcctcgacggatatgacaaccgattaaggcctggcctgggcgagagagtgaccgaggttaagaccgatatattcgttaccagctttgggccagttagtgaccatgacatggagtatacaatagacgtctttttcaggcagagctggaaagatgagcgtcttaaattcaagggcccaatgacagtgctgagacttaacaatttaatggcctccaagatttggacaccggataccttcttccacaacggaaagaaatcagtagcccataacatgacgatgccaaacaaactcctgcgaattactgaagatggcactttactctatacaatgaggcttaccgtacgggcagagtgtccaatgcacctcgaggacttccccatggatgcccatgcttgcccgcttaaatttgggtcttacgcctacactcgggcagaggtggtttacgagtggacccgtgagcctgcacggtccgtggtggtggccgaggatggttcaaggctgaaccagtatgacctgctgggccagactgtggatagcggcatcgtccagtcaagcacaggcgaatatgttgttatgaccacacatttccatctaaagaggaaaataggttacttcgtcatccagacatatctcccctgcatcatgacagtgatcctgtctcaggtctccttctggctcaacagagaaagcgtgcctgctagaacggtgttcggtgtgactacggtcctcactatgacaaccttgtcgatatccgctagaaattcactccctaaagtggcttacgcaacagccatggattggtttatagccgtatgttacgcgtttgtgttcagtgcactcatcgagtttgcaaccgtgaattatttcacaaaacgagggtatgcgtgggatggcaagagtgttgtcccggagaagccaaagaaagtaaaagaccctttaatcaagaagaataacacctacgcccctaccgccacaagctatacccccaaccttgccagaggagaccccggactggccacaattgccaaaagcgccacaatcgagcccaaggaggttaaaccagaaactaagcctcctgaaccaaaaaagactttcaactccgtgtccaagatcgatagattaagtcggatcgccttcccattattgttcggcattttcaacctggtttattgggccacctaccttaatcgggaacctcagttgaaagctcctaccccccatcagtag

SEQ ID NO: 45239 - DNA, 1371 bp, Artificial Sequence
  derived and/or modified sequence
atgcgcaaatcaccaggcttgtctgattgcttatgggcatggatcctgctactgtctacattaacaggaaggtcatatggtcagccctctttacaggacgaacttaaggacaataccaccgttttcacacggattctagatcgcctactggatggttatgataatcgcctgaggccaggtctcggggaacgagtgaccgaagtgaagacagatatcttcgtcacaagttttggcccagtgtctgaccatgacatggagtacacgattgatgtttttttcagacagtcctggaaagatgagcgactgaaattcaaggggcctatgaccgttctccgtttgaataaccttatggcatcgaaaatctggacccctgataccttcttccacaacggcaagaagtctgttgctcacaacatgacaatgcccaataaattattgcgcatcacagaggacgggactctgttatacacaatgcgcctcacagtccgagccgagtgtcccatgcacctcgaggatttcccaatggatgctcacgcttgcccactcaaatttgggtcatatgcttatactcgcgctgaagtggtctacgagtggaccagggaacccgcacgtagtgtggtggtggcagaagatgggagcagactcaatcaatatgacctactcggacagaccgtcgatagcgggattgtgcagtcgtctaccggagaatacgtggttatgacgacgcatttccatctgaaacggaagattggttacttcgtcatacaaacatacctaccttgtatcatgacggttatcctgtcacaggtgagcttctggctgaatcgtgagagcgtccccgcacgcaccgtattcggggtgacgacggtgttgacaatgacgacactgtcgatttccgccaggaatagcttgcctaaggtggcatatgctacagccatggattggtttatcgccgtctgctacgcattcgtattcagtgccttgatcgagtttgcaaccgtgaattattttacaaagagaggatatgcgtgggacgggaaatccgtggtcccagaaaagcccaagaaagtgaaggaccccttaattaagaagaataatacatacgcccctaccgctacttcctacaccccaaacttagcccgaggcgacccaggactggccacgattgccaaaagcgccaccatcgagcctaaggaggtgaagcctgagaccaagcctcctgagccgaagaagacctttaattcggtgagcaaaattgaccgattgagcagaattgcgtttcctctattgttcggcattttcaaccttgtgtattgggccacctatctgaaccgagaaccccagctgaaagctcccactccacaccaatag

SEQ ID NO: 45240 - DNA, 1371 bp, Artificial Sequence
  derived and/or modified sequence
atgcgaaagtctcctggtctctctgattgcctctgggcgtggattcttttattgagcacgcttactgggagatcctatggacagccatccctacaggacgagttgaaggacaatacgacggtgttcacaagaatactggatcgtctactcgatggctacgacaatagactacgcccaggcttgggcgagcgggtcacagaggtgaagacggatatttttgtgacaagtttcgggcctgttagcgatcatgacatggaatacaccatcgacgtattctttagacagagctggaaagacgagcggctaaagtttaaggggcctatgacagtgctgaggctgaataacctgatggcctccaagatttggacccctgacacattctttcacaacggtaagaagtccgtggcacacaacatgaccatgccaaacaaactgctcagaatcaccgaggatgggaccctgttatatactatgcggctgacggtgcgcgctgagtgtccaatgcacctcgaagacttccctatggacgctcacgcctgcccgttgaagttcggcagttacgcatatactagagctgaggtcgtatacgaatggaccagagagcccgcaagatccgtagtggtcgctgaggatggcagtcgcctaaaccaatatgacctgctcgggcagacagtggattcgggcatagttcagtcgagtacaggtgagtatgttgtgatgaccactcatttccacctgaagagaaagatcgggtatttcgtcattcaaacctatttgccatgcattatgaccgtcattctttcccaggtctccttttggctgaacagggaaagtgtgcctgcaagaactgtgtttggcgtgactaccgtgctgacaatgactacgttgagtatttctgctcggaacagcctgcccaaggttgcctatgctactgctatggattggtttatcgctgtgtgctacgcgttcgtttttagtgcccttattgaattcgccacggtgaactatttcaccaagaggggatacgcctgggacggcaagtccgttgtacctgagaaacccaaaaaggtgaaagatcctctcataaagaaaaacaacacatacgcgcctaccgccactagctatacccctaacctggcaagaggtgatcccggattggccacaattgccaaaagcgccaccatcgaacctaaggaggtcaaaccggagactaagccccctgagcccaaaaagactttcaactccgtgtccaagatcgacaggttatctagaattgcctttcccctcctctttgggatctttaatctcgtttattgggccacatacctgaatcgtgagccccagctcaaggccccaactccacatcaatag

SEQ ID NO: 45241 - DNA, 1371 bp, Artificial Sequence
  derived and/or modified sequence
atgaggaagtcccctggactttctgattgtctctgggcgtggattctgcttcttagtacacttactggaagatcctacgggcagccatctctgcaggatgagctgaaggacaatactacagttttcaccaggatattagaccgactgctggatggttacgataaccgattgaggccgggactcggcgaacgcgtgaccgaggtgaagacagatatattcgtgacttcatttgggccagtcagcgaccacgacatggaatacaccattgacgtgttttttaggcagtcttggaaagacgagcggttgaagtttaaaggtccaatgaccgttctgcgactgaacaacctgatggctagcaaaatctggactccagatacctttttccacaatggaaagaagtccgtcgctcacaacatgacaatgccaaataagctgctgcgcatcacagaagacggcaccctcctgtataccatgcggctgaccgtcagagccgagtgccctatgcatcttgaagacttcccaatggacgcccacgcgtgtccactcaagttcggaagttatgcatatacccgagccgaggtggtttatgagtggacccgtgaaccagccaggagcgtcgtcgtagctgaagatggcagcaggttgaatcagtatgacctgctcgggcagaccgtggacagcggcatcgttcagagttctactggcgaatatgtggtgatgaccacacacttccatcttaaacgcaagatcggatatttcgtaatccagacctaccttccctgtattatgactgtgatcctcagccaggtgtccttctggctgaatcgcgagtcggtaccagccagaactgtatttggggtgacaaccgttctcaccatgacgacactgagtatcagtgcacgaaatagcctgccaaaggtggcttacgccaccgccatggattggttcatcgcggtttgctacgctttcgtgttctcagctctgatcgagtttgctacagtgaactacttcacaaagagaggctacgcttgggatgggaaatcagtggttccagaaaagcccaagaaagttaaagacccattgatcaagaaaaataacacatacgcccctaccgcgactagctatactcctaacctggctagaggagacccaggactggcaaccatcgctaagagcgccaccatagagcccaaggaagttaaacccgagaccaagccccctgaaccgaagaagacgttcaactcggtgtcaaagatcgatcggctttccagaatcgccttcccactgctgttcgggatctttaatctcgtatactgggctacgtacctgaaccgcgaaccgcagctgaaggccccaacaccacaccagtag

SEQ ID NO: 45242 - DNA, 1371 bp, Artificial Sequence
  derived and/or modified sequence
atgcgtaagtcccctggcctgagcgactgcctctgggcctggatcctccttctttccaccctgaccgggcgtagctacggacagcctagcctccaggatgagctgaaggacaataccacggtcttcaccaggattctggatcgattattggacgggtatgacaatcgcctgcgcccaggcctgggggaacgcgttactgaggtgaaaacggacattttcgtcacatccttcggacctgtgtcagaccacgacatggaatacacaattgacgttttttttagacagtcctggaaagacgagcgactgaaatttaaggggcctatgacagtactgagactcaataacctcatggcctccaagatctggactcctgataccttttttcataacggaaaaaaatcggtggcccacaatatgacaatgcccaacaagctgctgaggattactgaagatggaaccctactgtatactatgcggctcactgtgagagccgagtgccccatgcaccttgaagattttccaatggacgcgcacgcatgtcctcttaagtttgggtcttacgcctacactcgagcggaagttgtgtacgaatggacccgagagcctgcccgttcagttgttgtcgctgaggatggatctaggctgaaccagtacgatttactaggtcagaccgtggatagtggcatcgtgcagtctagcaccggtgaatatgtggttatgacaacgcattttcacctcaaacgcaagatcgggtactttgtaatccaaacctatctgccttgcattatgacagtgatactgtcgcaagtttcattttggctgaaccgtgagtctgtgcccgcacggacggtctttggggtgacgaccgttctgacaatgactacactaagtatctcagcccgaaacagtttgccgaaagtggcctacgctaccgctatggactggttcattgctgtgtgctatgcattcgtgttctccgctctaatcgaattcgctactgtcaattatttcaccaagagaggatatgcatgggacggcaaatcagtggtgcccgagaagcctaaaaaagtcaaagaccccctgattaaaaaaaacaacacatacgcccctacagccacatcttatacccctaatctggctcgcggagatcctggactcgcaacaatcgctaagtctgctaccatagaacccaaggaagttaagcccgagacaaaaccccctgagcctaagaagacgtttaactccgtgtcgaagatcgataggttgtccagaatcgctttcccactcctgtttggcatatttaacctcgtatactgggccacttacctgaacagagaacctcagctgaaagctcccaccccccatcagtag

SEQ ID NO: 45243 - DNA, 1371 bp, Artificial Sequence
  derived and/or modified sequence
atgcgtaagagccccggactgtccgactgtctttgggcctggatcctgctcctgagtaccctgaccggaagaagctatggccagccttccctccaagatgaacttaaagacaatactacggtgttcactcgcattttagatcgcttgcttgacgggtatgataacagactcagacctgggttgggtgaacgcgttactgaggtgaagaccgacatctttgtaacatcatttggccctgtttccgatcatgacatggaatatacaatagacgtcttcttccggcagtcttggaaggacgagcgcttgaaatttaagggcccaatgacagttctgaggctgaataatctcatggcttctaaaatctggaccccagacactttcttccacaatgggaaaaagtcagtcgcccacaacatgaccatgccgaataaactgctgagaattactgaagacggtacccttctgtacaccatgaggttaaccgtccgagccgaatgcccaatgcacctcgaggactttcctatggatgcccacgcatgccctcttaagttcggttcctacgcgtacacgcgggcagaagtcgtctatgaatggacacgagaaccagcgaggagcgttgtggtggcggaagacggatccaggctgaaccagtatgatctgttaggtcagacagtagacagcgggatcgtgcagagctcaaccggagagtacgtggttatgaccacacactttcacctgaagagaaaaatcggttactttgtgatccagacctatctgccttgcataatgaccgtaatcctatcccaagtttctttttggctgaatagggaaagcgtgccggctcgaaccgtcttcggtgtgaccaccgtgctgaccatgactactctgagtatcagtgcccgaaatagccttcctaaggttgcttacgctacagctatggactggtttatcgcagtatgctacgcttttgttttctccgctttgatagaatttgccacggtaaattacttcactaaaaggggatacgcctgggacgggaaaagcgtggttcccgagaagccaaaaaaagttaaggatcctctgattaagaaaaacaatacatatgctcccacagcgactagctacacgcccaacctagcaaggggggaccccggattggcaacaatcgccaagagcgccaccatcgaaccaaaggaggtaaagcctgagaccaaacctcccgagccaaaaaagacctttaacagcgtctctaaaatcgaccgtctctccagaattgcttttcccctgttgttcggaatcttcaatctcgtctactgggctacttacctgaaccgcgagccccagctgaaagcgccaacccctcaccagtag

SEQ ID NO: 45244 - DNA, 372 bp, Artificial Sequence
  derived and/or modified sequence
atgagaaagtctcccggacttagcgattgtctgtgggcttggatcttgctcctgtccacattgaccggaaggagctacgggcagccgtcactgcaggatgaactgaaggacaataccaccgtttttaccaggatcttggatcgcctcttggatggttacgacaaccgactgagacctgggttgggtgaacgagtcactgaggtgaagaccgatattttcgtgaccagctttgggcctgtaagcgaccacgatatggaatatactattgacgtatttttccgacagtcttggaaagacgagaggctcaagtttaagggtccaatgaccgtgctcagactcaataacctgatggctagcaagatctggacatag

SEQ ID NO: 45245 - DNA, 1371 bp, Artificial Sequence
  derived and/or modified sequence
atgaggaagtcacctgggctctccgattgtctgtgggcttggatcctattgctctccacccttactggaaggtcatatggccagcctagcctgcaggatgagctcaaagataatacgacagtctttacacgcatactggataggcttctggatggctacgacaaccgcctccgcccgggacttggggagagggtgactgaagtgaagaccgatatatttgttacatctttcggtccagtatctgaccacgatatggagtacacaatagatgtcttttttaggcagagctggaaggacgagcggcttaagtttaaaggacctatgacagtgctacggctgaataatttgatggcttccaagatctggaccccggatacattcttccacaacgggaaaaagagtgtcgcgcacaacatgaccatgccaaacaaactgcttaggataaccgaagacgggactctgctttacaccatgaggctgactgtgagagccgaatgtcccatgcacctagaggatttccctatggatgcccatgcatgtccattgaagtttgggtcatacgcttataccagagcagaagtggtttacgaatggacccgagagcctgctagatctgtcgtcgtggctgaggatggcagcaggcttaaccaatacgatctgctggggcagactgtcgatagcggcatcgtacaatcttcaactggcgagtacgtggtgatgacgacacacttccacctcaaacgtaagatcggatacttcgtcattcaaacatacctgccgtgcataatgacagtgatattaagccaggtctccttttggctgaatagagagtccgtgcccgctagaacggtgtttggcgtgacaacggtgctgacgatgactactttatccatctccgctaggaactccctaccaaaagtcgcatatgctactgcaatggactggttcattgcagtctgctatgctttcgttttctctgctctaatcgagttcgccacggttaactactttacgaaaagaggctatgcttgggacggaaagagcgtagttccagaaaagcctaaaaaagtaaaggacccactgattaaaaagaataatacttatgcacccacagctacttcatatactccaaatctcgcccggggggacccaggacttgcaacaatagcaaaaagcgccacaatcgaacccaaagaagtgaaacctgagaccaagcccccagagccaaagaaaacctttaatagcgtctctaagatcgatagactctcccgaatcgccttcccgctcctttttggaatatttaacctggtgtactgggcaacgtatttaaatcgggaaccacaattgaaagccccaaccccacatcagtag

SEQ ID NO: 45246 - DNA, 1371 bp, Artificial Sequence
  derived and/or modified sequence
atgagaaagtcgcccggtctctcggattgcctgtgggcctggatattactgctcagcacattaaccggaagatcttatggacagccttcactgcaggatgagttaaaagataacacaactgtcttcactagaatactggatagactccttgatggctatgataatcggcttagaccgggcctgggggaacgggttacggaggttaagacagacatctttgtaacaagctttggtcccgtatccgaccacgatatggagtacactatcgacgtgttttttcgccaatcctggaaagatgaaaggctcaagtttaaagggcccatgactgtcctaaggctgaacaacctcatggcatctaagatttggacccccgacacattttttcacaatggcaaaaagagcgtagctcacaatatgacaatgcccaacaagctcctgcgaatcaccgaagacggaactcttctctatactatgcgccttaccgtgagagcagaatgccctatgcacctcgaagattttcctatggacgcacatgcctgcccactcaaattcggtagttacgcttacactcgtgccgaggtcgtatatgaatggactcgcgaacctgctagatctgtggtggtggcagaagacggctccaggctgaaccaatacgacctcttggggcagactgtggattctggaattgtgcaatcatctactggcgaatatgtagtgatgacaactcactttcacctgaaaaggaagatcggttacttcgttatacagacttacctaccttgcatcatgaccgtcatcttatcccaggtttccttctggctgaatcgggaaagtgtgcccgcgaggacggtgttcggcgtcacaacagtgctgacaatgactaccttgagcatttcggctaggaactctctgccaaaagttgcttacgccaccgccatggactggttcatagccgtctgttatgccttcgtgttttccgctctcatcgaatttgctaccgttaactattttacgaaaagagggtacgcttgggatgggaagtctgtcgtgcccgagaagcctaaaaaagtgaaagatccgcttattaagaagaataacacttatgctcccaccgctaccagctacaccccgaatttagccagaggagaccccggattggctacaattgccaagagcgccactattgaacccaaggaggtcaaacccgaaacgaaaccgcccgaacctaaaaaaacatttaattcagtgagtaaaatcgatcgtctgtcccgcattgctttccctttgctgtttggcatattcaacctcgtatattgggccacttacctgaatcgcgagccccagctcaaagcacctactccacatcaatag

SEQ ID NO: 45247 - DNA, 1371 bp, Artificial Sequence
  derived and/or modified sequence
atgagaaagagccccggcctgagcgactgcctgtgggcctggatcctgctgctgagcaccctgaccggcagaagctacggccagcccagcctgcaggacgagctgaaggacaacaccaccgtgttcaccagaatcctggacagactgctggacggctacgacaacagactgagacccggcctgggcgagagagtgaccgaggtgaagaccgacatcttcgtgaccagcttcggccccgtgagcgaccacgacatggagtacaccatcgacgtgttcttcagacagagctggaaggacgagagactgaagttcaagggccccatgaccgtgctgagactgaacaacctgatggccagcaagatctggacccccgacaccttcttccacaacggcaagaagagcgtggcccacaacatgaccatgcccaacaagctgctgagaatcaccgaggacggcaccctgctgtacaccatgagactgaccgtgagagccgagtgccccatgcacctggaggacttccccatggacgcccacgcctgccccctgaagttcggcagctacgcctacaccagagccgaggtggtgtacgagtggaccagagagcccgccagaagcgtggtggtggccgaggacggcagcagactgaaccagtacgacctgctgggccagaccgtggacagcggcatcgtgcagagcagcaccggcgagtacgtggtgatgaccacccacttccacctgaagagaaagatcggctacttcgtgatccagacctacctgccctgcatcatgaccgtgatcctgagccaggtgagcttctggctgaacagagagagcgtgcccgccagaaccgtgttcggcgtgaccaccgtgctgaccatgaccaccctgagcatcagcgccagaaacagcctgcccaaggtggcctacgccaccgccatggactggttcatcgccgtgtgctacgccttcgtgttcagcgccctgatcgagttcgccaccgtgaactacttcaccaagagaggctacgcctgggacggcaagagcgtggtgcccgagaagcccaagaaggtgaaggaccccctgatcaagaagaacaacacctacgcccccaccgccaccagctacacccccaacctggccagaggcgaccccggcctggccaccatcgccaagagcgccaccatcgagcccaaggaggtgaagcccgagaccaagccccccgagcccaagaagaccttcaacagcgtgagcaagatcgacagactgagcagaatcgccttccccctgctgttcggcatcttcaacctggtgtactgggccacctacctgaacagagagccccagctgaaggcccccaccccccaccagtag

SEQ ID NO: 45248 - DNA, 372 bp, Artificial Sequence
  derived and/or modified sequence
atgagaaagagccccggcctgagcgactgcctgtgggcctggatcctgctgctgagcaccctgaccggcagaagctacggccagcccagcctgcaggacgagctgaaggacaacaccaccgtgttcaccagaatcctggacagactgctggacggctacgacaacagactgagacccggcctgggcgagagagtgaccgaggtgaagaccgacatcttcgtgaccagcttcggccccgtgagcgaccacgacatggagtacaccatcgacgtgttcttcagacagagctggaaggacgagagactgaagttcaagggccccatgaccgtgctgagactgaacaacctgatggccagcaagatctggacctag

SEQ ID NO: 45249 - protein, 305 aa, Artificial Sequence
  derived and/or modified sequence
MKSDSSTSAAPLRGLGGPLRSSEPVRAVPARAPAVDLLEEAADLLVVHLDFRAALETCERAWQSLANHAVAEEPAGTSLEVKCSLCVVGIQALAEMDRWQEVLSWVLQYYQVPEKLPPKVLELCILLYSKMQEPGAVLDVVGAWLQDPANQNLPEYGALAEFHVQRVLLPLGCLSEAEELVVGSAAFGEERRLDVLQAIHTARQQQKQEHSGSEEAQKPNLEGSVSHKFLSLPMLVRQLWDSAVSHFFSLPFKKSLLAALILCLLVVRFDPASPSSLHFLYKLAQLFRWIRKAAFSRLYQLRIRD

SEQ ID NO: 45250 - protein, 365 aa, Artificial Sequence
  derived and/or modified sequence
MKSDSSTSAAPLRGLGGPLRSSEPVRAVPARAPAVDLLEEAADLLVVHLDFRAALETCERAWQSLANHAVAEEPAGTSLEVKCSLCVVGIQALAEMDRWQEVLSWVLQYYQVPEKLPPKVLELCILLYSKMQEPGAVLDVVGAWLQDPANQNLPEYGALAEFHVQRVLLPLGCLSEAEELVVGSAAFGEERRLDVLQAIHTARQQQKQEHSGSEEAQKPNLEGSVSHKFLSLPMLVRQLWDSAVSHFFSLPFKKSLLAALILCLLVVRFDPASPSSLHFLYKLAQLFAGSGRLHFLASTSSASVTEGPCAPQPLCSSRPWPQKQSDRATHPQAPLGKWDQPNLAECTVSCCLGALSFAPYFGWSR

SEQ ID NO: 45251 - DNA, 918 bp, Artificial Sequence
  derived and/or modified sequence
atgaaaagtgacagctccacctccgcagctcccttacggggtctgggaggacccttgcggtcctctgagcccgttcgcgccgttccagcaagggcaccagcagtggacctgcttgaggaggccgcggacctgctggtcgtacacctagactttcgcgcggcactggaaacctgcgaacgcgcatggcagagccttgctaatcatgccgtcgctgaagagcccgcaggcacatcattggaagttaaatgctccttatgtgtggtgggtatccaggccctggcagaaatggatcggtggcaggaggttctttcttgggtgttacagtactaccaggtgccagagaagctgcctcctaaggtcctggagctgtgcattctcctgtatagcaagatgcaagagcctggcgctgttctggatgtcgtgggggcctggttacaggatccagcaaatcagaatttacccgagtatggagcacttgccgagtttcatgttcagagggtcctccttcccctggggtgtcttagcgaggctgaggaactcgtggttggttccgccgcttttggggaggagcggcgcctggacgtgctgcaggctatacacactgcgagacagcagcagaaacaagagcattccgggtcagaagaggcccagaaacctaacctggaagggagcgtgagccacaagtttctgtccctgcccatgctggtgcggcagctgtgggacagcgcggtgtctcatttcttcagccttccattcaagaagtcactgctcgctgctctgattctgtgtttattggtggttaggttcgaccccgcttcaccaagctcacttcatttcttgtataagctggcccagctcttcagatggattagaaaagcagccttttccagactataccaattaagaattcgggattag

SEQ ID NO: 45252 - DNA, 918 bp, Artificial Sequence
  derived and/or modified sequence
atgaagtctgactccagtacatccgctgccccactcagaggactgggggggcctctgagaagttcggaaccagtgcgcgctgtgccagcccgcgcccccgcagttgacctcctcgaggaagcggccgacctcctggttgtgcatctggactttcgcgccgcattggagacttgcgagcgcgcgtggcagtcgttggcaaaccatgctgttgcagaggagcccgctggcacatcgctcgaagtaaagtgctctctgtgcgtggtaggaatccaggccctggcagagatggaccgatggcaggaggtcctgagttgggtacttcagtactaccaggtccctgaaaagctgccccccaaggttctggagctgtgcatcctgttgtattcaaaaatgcaggagcccggtgctgtcctggacgtggtgggggcatggctgcaggaccctgccaatcagaacttgcccgaatatggtgcattagctgaatttcatgttcagagggtactgttgccactaggctgcttatccgaagcagaggagttagttgtcggttctgctgcatttggagaagagcgccgactggatgtgctgcaggcaatacacaccgctcggcagcaacaaaagcaggaacactctgggagcgaagaggctcagaaaccaaaccttgagggcagtgtgtcacataaatttctcagcctcccaatgctggtcagacagctgtgggacagcgccgtcagccactttttctctctaccattcaaaaagtcactgctcgccgctctgatcctctgcctccttgtagtgagatttgatccagcatctccttctagccttcactttctgtacaagctggctcagctttttcgatggatcaggaaggcagccttctccagactgtaccagctgaggatcagagattag

SEQ ID NO: 45253 - DNA, 1098 bp, Artificial Sequence
  derived and/or modified sequence
atgaaaagtgattcttccacctctgcagcgcccttgcgtgggctgggcggcccacttcggagttccgaaccagtccgcgccgtccccgcccgcgcccccgcagtcgacctgctggaagaagccgcagacctactcgtggtacacctggatttccgcgctgcactggagacatgcgagagggcatggcagagtctggcaaatcacgctgtggccgaagagcctgccggcacttctcttgaagttaagtgttctttgtgtgtggtcgggatccaggcactagcagaaatggataggtggcaagaagttctatcatgggtacttcaatattatcaagtgccggaaaagctaccccctaaagttcttgagctctgcatcctgctctacagcaagatgcaggagcccggtgcggtcctggacgtggtaggcgcctggttacaggacccagcgaatcaaaacctgcccgaatatggcgcactggcagaattccatgtgcagagggtgctcctcccacttggttgtctcagcgaggccgaggagctggtggtgggcagcgccgccttcggcgaagagagaaggctggacgtactccaggccatccatactgccagacaacagcagaaacaggagcattctggatccgaagaggcgcagaagcctaatctagaagggtccgtgtcacacaagtttctgtccctgccaatgttagtgagacaactatgggatagcgccgtctcccactttttctccctgccatttaaaaagtcccttctggcggcactgatcctgtgtctcctagtggtacgcttcgaccctgccagcccctcgtctctgcattttctgtataaacttgcacagctgtttgccggatccggtcgtctccatttcctggcaagcacttctagtgccagtgttactgaagggccctgtgccccacagcctctctgcagctcacgcccctggccgcagaaacagagcgatcgtgccacgcaccctcaggcacctctggggaaatgggaccagcctaatttggcagaatgcaccgtgtcgtgttgtctgggcgccctgtcctttgcaccttattttgggtggagccggtag

SEQ ID NO: 45254 - DNA, 918 bp, Artificial Sequence
  derived and/or modified sequence
atgaagagtgacagcagcaccagcgctgcccccctgcggggcctgggcggccccctgcggagcagcgagcctgtgcgggctgtgcctgcccgggccccagctgtggacctgctggaggaggccgctgacctgctggtggtgcacctggacttccgggccgccctggagacctgtgagcgggcctggcagagcctggccaaccacgctgtggccgaggagcctgctggcaccagcctggaggtgaagtgcagcctgtgtgtggtgggcatccaggccctggccgagatggaccgctggcaggaggtgctgtcctgggtgctgcagtactaccaggtgcctgagaagctgccccccaaggtgctggagctgtgcatcctgctgtacagcaagatgcaggagcccggggctgtgctggatgtggtgggcgcctggctgcaggaccctgccaaccagaacctgcctgaatatggagccctggccgagttccacgtgcagagggtgctgctgcccctgggctgcctgtctgaggccgaggagctggtggtgggcagcgctgcctttggagaggagcggcggctggatgtgctgcaggccatccacacagcccggcagcagcagaagcaggagcacagcggcagcgaggaggcccagaagcccaacctggagggctctgtgagccacaagttcctgagcctgcccatgctggtgcggcagctgtgggacagcgctgtgagccacttcttcagcctgcccttcaagaagagcctgctggccgccctgatcctgtgcctgctggtggtgcgctttgatcctgccagccccagcagcctgcacttcctgtacaagctggcccagctgttccgctggatcaggaaggccgccttcagccggctgtaccagctgcgcatccgggactag

SEQ ID NO: 45255 - DNA, 1098 bp, Artificial Sequence
  derived and/or modified sequence
atgaagagtgacagcagcaccagcgctgcccccctgcggggcctgggcggccccctgcggagcagcgagcctgtgcgggctgtgcctgcccgggccccagctgtggacctgctggaggaggccgctgacctgctggtggtgcacctggacttccgggccgccctggagacctgtgagcgggcctggcagagcctggccaaccacgctgtggccgaggagcctgctggcaccagcctggaggtgaagtgcagcctgtgtgtggtgggcatccaggccctggccgagatggaccgctggcaggaggtgctgtcctgggtgctgcagtactaccaggtgcctgagaagctgccccccaaggtgctggagctgtgcatcctgctgtacagcaagatgcaggagcccggggctgtgctggatgtggtgggcgcctggctgcaggaccctgccaaccagaacctgcctgaatatggagccctggccgagttccacgtgcagagggtgctgctgcccctgggctgcctgtctgaggccgaggagctggtggtgggcagcgctgcctttggagaggagcggcggctggatgtgctgcaggccatccacacagcccggcagcagcagaagcaggagcacagcggcagcgaggaggcccagaagcccaacctggagggctctgtgagccacaagttcctgagcctgcccatgctggtgcggcagctgtgggacagcgctgtgagccacttcttcagcctgcccttcaagaagagcctgctggccgccctgatcctgtgcctgctggtggtgcgctttgatcctgccagccccagcagcctgcacttcctgtacaagctggcccagctgtttgctggcagcggccgcctgcacttcctggccagcaccagcagcgcctctgtgacagagggcccctgtgccccccagcccctgtgcagcagccggccctggccccagaagcagagcgaccgggccacccacccccaggcccccctgggcaagtgggaccagcccaacctggctgaatgtactgtgtcctgctgcctgggcgccctgagctttgccccctacttcggctggagcaggtag

SEQ ID NO: 45256 - DNA, 918 bp, Artificial Sequence
  derived and/or modified sequence
atgaagagcgacagcagcaccagcgccgcccccctgcggggcctgggaggccctttgagatcttctgagccagtccgagccgtgccagccagagccccagctgttgacttgttagaagaggctgctgatcttctcgtggtacatctggactttcgcgccgcccttgagacctgtgaacgcgcctggcagtccctcgccaaccacgctgtggccgaagaacccgccggaacaagtttagaggtcaaatgttccttatgtgttgtggggattcaagcccttgctgaaatggaccggtggcaggaagtgcttagctgggtgctgcagtactaccaggtgcctgagaagctgccgccaaaagtgctggagttgtgcattctgctgtatagtaagatgcaggaaccaggagccgtgcttgatgtggttggtgcatggctgcaagatcccgctaatcagaatttacccgaatacggcgctctggccgaatttcatgtacagcgtgtacttctgcctctgggctgtctcagcgaagccgaagagcttgtcgttggctcggccgccttcggagaagagaggcgactcgatgtattgcaggccattcacaccgcaagacagcaacagaagcaggagcactccggctcggaggaagcccagaagccgaacctggagggatctgtgagtcacaaatttttgagcctgcctatgctggtccgccaactgtgggactctgccgtctcacatttcttctctctgcccttcaagaagtccctcctagccgctctcattctatgtctattagtggtgagatttgatccagcatccccaagctcactccactttctgtacaaattagcccagctctttcgctggattaggaaagctgcatttagcagactgtaccagctgcgcatccgggactag

SEQ ID NO: 45257 - DNA, 918 bp, Artificial Sequence
  derived and/or modified sequence
atgaagagcgacagcagcaccagcgccgcccccctgcggggcctgggaggccctctgcgcagttccgaacccgtgcgcgcagtgcctgcaagggccccagctgtcgatttgctggaggaggccgcagacctcttggtagtacaccttgatttccgcgccgccttggagacctgcgagcgggcctggcaatccctcgcgaaccacgcagtggcggaagaaccagcaggcacctcacttgaggttaaatgctcattgtgtgtggtggggatacaggccctcgctgaaatggatagatggcaggaggtcttaagttgggtcctgcagtattaccaagtgccagagaaactgccccccaaagtgctggaactgtgcatccttctctacagtaagatgcaggaacctggcgcggtactcgacgttgttggcgcatggttacaggaccccgctaaccaaaacctgcccgaatacggcgctctggccgaattccatgtgcagcgcgtacttctgcctctcggctgccttagcgaagcggaggagctggtcgtggggagtgccgccttcggcgaggaacggcgactggacgtcctgcaggccatacacacggcaaggcagcagcaaaaacaggagcacagtggatccgaggaagcacagaagcctaatctggagggaagcgtgtcacataagttcctgtctctgcctatgctggtgcgacagctgtgggattcagctgtctctcacttcttttccttaccattcaaaaagtcgctcctcgcagctctaatactttgccttctggtggttaggtttgaccccgcatcaccctcatccctccacttcctatataagttggcacagctgtttaggtggattcggaaggccgcgttttcaaggctgtaccaactgagaattagggactag

SEQ ID NO: 45258 - DNA, 1098 bp, Artificial Sequence
  derived and/or modified sequence
atgaagagcgacagcagcaccagcgccgcccccctgcggggcctggggggccccctcagaagcagtgaaccagtgagagccgtacctgcccgggcccctgcagtggacctactggaggaagcagcagaccttctggttgtgcatttagactttagagccgcactggaaacctgcgaacgagcctggcaatccctggcgaatcacgcggtcgcagaggagcctgctggaactagtctcgaagtgaaatgcagcctgtgtgttgttggcatccaggccctggcagaaatggaccgctggcaggaagtattatcctgggttctccagtattaccaagtacccgaaaagctgccacctaaggttctggaactgtgcatactgctctatagtaagatgcaagaacccggcgctgtactcgacgttgtgggcgcctggctgcaagacccggcaaatcaaaacttgcccgagtatggggccctggccgaattccatgtgcaacgcgtgctgctgcccctgggatgtctgtctgaggccgaggaactcgttgtcgggagtgctgccttcggcgaggaacggcgccttgatgtcttgcaagccatacacaccgccaggcagcaacagaagcaagaacactcaggctccgaggaggcccagaagcctaacctcgagggcagcgttagtcataagttcttaagtctgcccatgttggtccggcagttgtgggactcggcagtgagtcacttcttttccttgcccttcaagaagtccctattggccgccctgatcctctgtctgctcgtagtgaggttcgacccagcttcacccagtagtctccacttcttgtacaaattggcccaattattcgctgggtctggccgccttcacttcttggcttctacctcatctgcttccgtcacagaaggcccatgcgccccccagcccctttgtagcagtcggccatggccacagaaacagtccgatcgtgccacacacccccaagcacccctgggcaagtgggaccaacctaatctggctgagtgtaccgtcagttgttgtttgggcgctcttagcttcgccccgtattttggttggagtagatag

SEQ ID NO: 45259 - DNA, 4519 bp, Artificial Sequence
  derived and/or modified sequence
acagaaggcgatgggccgagagctgaggaactacaactcctagagtactccgcgccgccgggacgccgcgcggctgcggggctgggcgagcgcaaagatgtccgcgcccgctgccgggaggcgaggccaactcgggatatcccggagcctctggggaggcggtcactccgacgtctgaggacctgggccttggacccggactcgttatgaagagcgattcttcgacctctgcagcccccctcagggggctcgggggacccctgcgcagcagcgagccggtgcgcgcggtcccggcccgggcgccggccgtggaccttctggaggaggcggccgacctcctggtggtgcacctggacttccgggcggcgctggagacctgcgagcgggcctggcagagtctggccaaccacgccgtggcagaggaacccgcgggcacctcattggaggtgaagtgctccctgtgtgttgtggggatccaggccctggcagaaatggatcggtggcaagaagtcctctcctgggtccttcagtattaccaggtccctgaaaagctaccccccaaagtcctggagctgtgcattcttttatacagcaaaatgcaagagcctggagctgtgctggatgtggtgggtgcctggctccaagacccagccaatcaaaaccttccagaatatggagccttggcagaatttcacgtgcagcgggtgctgctgcctctgggctgcttatcggaggctgaggagctagtggtgggctctgcagcctttggtgaggagcggcgactggatgtacttcaggccattcacacagcgaggcagcagcagaaacaggaacactcaggctctgaggaggcccagaagccaaacctggaaggctctgtctcccacaagttcctgtcactaccgatgttggttcgccagctttgggactctgcggtgagccacttcttttctctgcccttcaaaaagagtctcctggctgccttgatcctctgtctcctggtggtgagatttgatccagcttccccttcctccctgcacttcctctacaagctggcccagctcttccgctggatccggaaggctgcattttctcgcctctaccagctccgcatccgtgactgagggtccctgcgcaccacagcctctctgctcctcacgtccgtggccacagaagcagagcgacagagcgacacatccacaggcgcccctggggaaatgggaccagcctaatctcgcggagtgcactgtgtcttgctgcctgggtgccctctcctttgcaccctacttcggctggtcgcggtagatgatgtggaaacaaagcaggaccagcaggcacagcacctccagaacagtgccccggatgaccagaggccccttgaaaaggaggggtttggggacagggactgtgtccatgaaacattccatcttcttggtgaaggcaaggggttggttcttcaggtcaggatgttaatggagctggaagttcagaaaaagcctggtgaagtgacccttggcctttcacttcttgagaaacatacttctttgctgggcatggtgactcacgcctgtaatcccagcactttggaagggtgaggtgggtggatcacttgtggccaggagttcaaaacctgcctggccaacatggtgaaaccccatctctactaaaaatacaaaaattagctagatgtggtgcacgcctatagtcctagctacttgggaggctgaggcaggagaatcacttgagccagggaggcaaaagttgcagtgagctgagattgtgctaccgcactctctcaaaacaaacaaaaaaacatgccccacaggacagtaccttaattagctagagtagatctgagagggcctcttcttgcctgcactgtgctccccagagctgatctaattctgtatcaataggctgttcccatggtcttgccatgcgcttgaagctgcaggagccttctcactgttcaggctggggtgtggttttcagaaccaccgggttgactactgaaaaccaagtgagccttacagctcttatcgctgggtaaagtgatcttgcctggtgcctcttggtcttcagctcaattttccaggttgtcctggccaagtcttgctctgttacgctcagtgcctctgcccactctttccccgccagcccttccctcccgccctgcaaacttgtcccttggctgtttcaccaggttctgcctgtatccttgcctccttggtacacaccatttcaggttcttccctttctgtgtcccattgtcctagttatgttctgttgtttgtgtaatgcccaaatttttctgctcgtgtggccttgaaaagtaggccagcctcagaggctgctgagctgaaaatggaactgagtaatcaggtgagctggaagggatgtggggggcggggcagacgggagacatgggttttgaaggcagtgaacaataaaaccttagggaggtggcaccgaggccttagcatttgaggagctgaaatgtttcagtgttgttttctcaccagccacaagcatcttatgagtttctgtgcaaggaagcgtagagcactgctgtgctgtcaggatgaagaagggctttctgcaggggctggcctttctctacccagaggccaagcaggctgccctgcactgtgtccttggtgttgatgcccaaaatagagaaggtgcttgctagcttttccttggtacattttcgggggttgcaaggcaacaagttttcttttgttttgtttgtttgtttgtttgtttgtttttgagatggagtctctgtcacccaggctggagtgcagtggcgtgatctcagctcactgcaagctccgcctcccgggttcatgccattctcctgcctcagcctcccgagtagctgggactacaggtgcccaccacctcgcctggctaatatttttgtatttttagtagagtctgggtttcactgtgttagccgggatggtctcgatctcctgaacttgtgatccacccacctaggcctcccaaagtgctgggattacaggtgtgagccatcgcgcccggccaacttttctttagaaaaatgagtaaagtaggtaaacttcacaggccccttagaattaaatccttagggcatggttcaagtctgtaggaagcaaatctatacttttttatatgggcttttaagtaaagcttagaaccctggggggagaaaagcagtcaggtgaggtttgagattccttctatagaatgatttcttaaaatgaaaatctgggcccacttaactaccctagataaaacgcttcaatggcttcccatggctcactggataacatctaaattcttcatggaattgaaggcccctatgtgctggttttggctaagatctcccctttgatgtgggtcccctgttgattatatgtgcggccttccagctgcccaccatcacagctacagctcgctccccttggcctctgtgccttggctcgcactgttcctactgaaggcctagcacctgctcttggcctggtgagcccctccaccttccaggcttactcaaagaattctttctgcccctccctgtgtcccgggacctgtttcatatcgcttctgtggtcgtgaccccatggtcttgtaattgtgaacttctttgctgccccttcgaagctggggagtgcttgttgcagatgcatccaagaggggtaattgcgtatcaacagtggatttgctggttgtttctacagggttctgaagcatgcaacatagaacagatacctttaaatttaggggcgctaaggaaagcaggaaccagtaatcctcttctgtggtgggatgggagggtgggggagaggggtggaatggagaggaaacaggctattgttggccagccctgggtggaggtgggtgcaagcaggacagatagtgcctgggggtgggggcggagggttcgcctctaggaaggggctagaagggatgaggaaatagttcatagcttcgtgcaggtgatccctattctgcgtgtatgtgtttgcacatgagtgtttgtagaccatagaccattaaaaaatacggaattcaaaagttacaaaaagggtattcttggaaaagaaagttgtttttttttagtcttgctgtgttgcccaggctggacctgaactcctgggcttgagcaagtcttcccctcagcctctggagtagctgggcctacagtgtgtgctgccacacccagctaatacagtctttctactcccgctctctattccccagtttcttgcccagaggcaacccttgccagtctgtttatccctccagatacagtctctgatagtaaacttttctttctcttacacaaatgatagtagtcacatacactacacacactgtgccacgtttaaaaagaaaaaaaacaattctcggctgggcgcggtggcgcatgcctgtaatcccagcactttgggaggccaaggtgggtgaatcacctgaagtcaggagttcgagatcagcatggccaacatggtgaaaccccatctctact

SEQ ID NO: 45260 - DNA, 1672 bp, Artificial Sequence
  derived and/or modified sequence
gcgagcgcaaagatgtccgcgcccgctgccgggaggcgaggtgagtctttgatcgtaaccaggagcccggagctgaggcagttcctgcacgtgtcgcggggccggagaagctagggccaggtattccagggatgcaagaatcctgcaaatctgacgtgtaaactgcttccccagcctccaggcgagcccagcttttgcctcagataggccccttccttttccttctcggggaatcgacctcgggaaggggtgtgggcaaagagatgaggactctccctcttcgcccaggccaactcgggatatcccggagcctctggggaggcggtcactccgacgtctgaggacctgggccttggacccggactcgttatgaagagcgattcttcgacctctgcagcccccctcagggggctcgggggacccctgcgcagcagcgagccggtgcgcgcggtcccggcccgggcgccggccgtggaccttctggaggaggcggccgacctcctggtggtgcacctggacttccgggcggcgctggagacctgcgagcgggcctggcagagtctggccaaccacgccgtggcagaggaacccgcgggcacctcattggaggtgaagtgctccctgtgtgttgtggggatccaggccctggcagaaatggatcggtggcaagaagtcctctcctgggtccttcagtattaccaggtccctgaaaagctaccccccaaagtcctggagctgtgcattcttttatacagcaaaatgcaagagcctggagctgtgctggatgtggtgggtgcctggctccaagacccagccaatcaaaaccttccagaatatggagccttggcagaatttcacgtgcagcgggtgctgctgcctctgggctgcttatcggaggctgaggagctagtggtgggctctgcagcctttggtgaggagcggcgactggatgtacttcaggccattcacacagcgaggcagcagcagaaacaggaacactcaggctctgaggaggcccagaagccaaacctggaaggctctgtctcccacaagttcctgtcactaccgatgttggttcgccagctttgggactctgcggtgagccacttcttttctctgcccttcaaaaagagtctcctggctgccttgatcctctgtctcctggtggtgagatttgatccagcttccccttcctccctgcacttcctctacaagctggcccagctcttccgctggatccggaaggctgcattttctcgcctctaccagctccgcatccgtgactgagggtccctgcgcaccacagcctctctgctcctcacgtccgtggccacagaagcagagcgacagagcgacacatccacaggcgcccctggggaaatgggaccagcctaatctcgcggagtgcactgtgtcttgctgcctgggtgccctctcctttgcaccctacttcggctggtcgcggtagatgatgtggaaacaaagcaggaccagcaggcacagcacctccagaacagtgccccggatgaccagaggccccttgaaaaggaggggtttggggacagggactgtgtccatgaaacattccatcttcttggtgaaggcaaggggttggttcttcaggtcaggatgttaatggagctggaagttcagaaaaagcctggtgaagtga

SEQ ID NO: 45261 - DNA, 1098 bp, Artificial Sequence
  derived and/or modified sequence
atgaagagcgattcttcgacctctgcagcccccctcagggggctcgggggacccctgcgcagcagcgagccggtgcgcgcggtcccggcccgggcgccggccgtggaccttctggaggaggcggccgacctcctggtggtgcacctggacttccgggcggcgctggagacctgcgagcgggcctggcagagtctggccaaccacgccgtggcagaggaacccgcgggcacctcattggaggtgaagtgctccctgtgtgttgtggggatccaggccctggcagaaatggatcggtggcaagaagtcctctcctgggtccttcagtattaccaggtccctgaaaagctaccccccaaagtcctggagctgtgcattcttttatacagcaaaatgcaagagcctggagctgtgctggatgtggtgggtgcctggctccaagacccagccaatcaaaaccttccagaatatggagccttggcagaatttcacgtgcagcgggtgctgctgcctctgggctgcttatcggaggctgaggagctagtggtgggctctgcagcctttggtgaggagcggcgactggatgtacttcaggccattcacacagcgaggcagcagcagaaacaggaacactcaggctctgaggaggcccagaagccaaacctggaaggctctgtctcccacaagttcctgtcactaccgatgttggttcgccagctttgggactctgcggtgagccacttcttttctctgcccttcaaaaagagtctcctggctgccttgatcctctgtctcctggtggtgagatttgatccagcttccccttcctccctgcacttcctctacaagctggcccagctcttcgctggatccggaaggctgcattttctcgcctctaccagctccgcatccgtgactgagggtccctgcgcaccacagcctctctgctcctcacgtccgtggccacagaagcagagcgacagagcgacacatccacaggcgcccctggggaaatgggaccagcctaatctcgcggagtgcactgtgtcttgctgcctgggtgccctctcctttgcaccctacttcggctggtcgcggtag

SEQ ID NO: 45262 - DNA, 918 bp, Artificial Sequence
  derived and/or modified sequence
atgaaaagcgacagtagcaccagcgccgctcccctaaggggcctgggcggaccactcagaagtagcgaaccggtccgagctgtgcccgctcgagctccagccgttgatttgctggaggaagctgccgatttgcttgtagtccacctggatttcagagccgctttggagacttgcgagcgcgcatggcagtctcttgctaaccatgccgttgcggaggaaccagccggaacctccctggaggttaaatgcagcctgtgcgttgttgggatccaagccctcgcggaaatggataggtggcaggaagtgctgtcatgggtgctgcagtactaccaggtgcccgaaaagctacccccaaaagtactcgagctgtgtatattgctgtattcaaaaatgcaggagcctggggctgtcttggacgttgtaggggcatggctgcaggatcccgctaatcagaatctgccagagtacggggcactggctgaatttcacgtccagcgggtgttgctgccgcttggatgcctaagtgaggccgaagagcttgtcgtggggtcagctgcctttggagaagagcggagactggatgtgcttcaagcgatccacaccgcaagacagcagcagaagcaggagcattcggggagtgaagaggcacaaaagcccaacctagagggctccgtctctcataaattcttatcactacccatgctcgtgaggcagctctgggacagtgcggtctctcacttcttttctctgcctttcaagaagagcctcctcgctgccctcatcctctgcctgctggtcgtgcggtttgaccctgcttctcctagctcattacactttctttacaagcttgcccagctcttcagatggattaggaaggccgcttttagccgactttaccagctgcgcatccgggactag

SEQ ID NO: 45263 - DNA, 918 bp, Artificial Sequence
  derived and/or modified sequence
atgaaaagcgactcctccacatccgcagcccctctacgcggactagggggtcctctgcgcagcagcgagcccgtccgcgcagttccagcccgagccccagcagtggatctgctggaagaagctgctgacttgctggtggtccatctcgatttcagggcagctctggaaacctgtgaacgcgcatggcaaagtctcgccaatcatgctgttgcagaagagcctgctggtacctctcttgaagtgaagtgcagcttatgcgtggtcgggattcaggccctggcggaaatggacaggtggcaggaggtgctctcttgggttcttcaatattatcaggtgccggagaagcttccacctaaagtgttagaactgtgtatcttactttattcaaagatgcaggagccaggtgcagtgctggacgttgtaggggcttggctacaagaccccgcaaaccagaatctgcccgaatatggagctttagccgagtttcacgtacagcgcgtgttgctgccactgggatgtctgtccgaggcagaggagctggtggtggggtccgccgcatttggcgaggagcgacgtctggacgtgctgcaggcaatccatacagctagacaacagcaaaaacaggaacatagcggctcagaggaagcacagaagccaaacctcgagggctcagtctcccacaagttcttgagcctgcctatgctggtgagacagctctgggattccgcggtctcacactttttcagcctgccattcaaaaaaagcttgctcgccgcactgatattgtgcttactggtcgtgagatttgatccagccagtcccagcagccttcatttcctctacaagttagcgcagctgttccggtggatccggaaggcagcctttagccgcttatatcagctacgaattcgggactag

SEQ ID NO: 45264 - DNA, 1098 bp, Artificial Sequence
  derived and/or modified sequence
atgaagagtgatagtagtacctcggccgcacctctgagaggacttggaggcccactgcgaagctctgagccggtcagagctgtccctgcacgtgccccagctgtcgacttactggaggaggcagctgatctcctggtcgtgcatctggattttagggctgccctcgagacctgcgaacgggcttggcaatctctcgccaaccatgctgttgcggaggaacctgcgggtacttcactggaagtcaaatgttctctgtgcgtcgttggcatacaagctctggccgagatggatcgctggcaggaggtgctgtcatgggtgctgcagtactaccaagtaccagagaaactcccacctaaagttctggagttgtgtatacttctatacagcaaaatgcaagagcctggcgctgtgcttgacgtcgtgggggcttggctgcaagaccccgctaatcagaacctacccgagtacggggctctggctgagtttcatgtgcagagagttttgctgcctctgggatgcctgagcgaagctgaggaactggttgtagggtctgcggcatttggagaggagcggaggctcgacgttctgcaggctatccacacagcacgacagcagcagaaacaggagcattctgggtctgaggaagctcagaagccgaacctggaggggagtgtgtcccacaaattcctgagtctgcctatgctggtgcggcaactctgggactctgccgtgagtcattttttcagcctgccttttaaaaagtccctgctcgccgcactcatcctgtgcctcctagtcgtaagattcgatcccgcatctcctagcagcctacacttcctgtacaagctggcccaactgttcgccggatcgggcaggctccatttcttagccagcacatctagtgctagtgtcaccgaaggaccatgcgcacctcaaccactttgttcttctcgcccttggccccagaagcagagtgatcgggcaacacatcctcaagctccactgggcaagtgggaccaaccaaatctcgccgagtgtaccgtatcttgctgccttggcgctctatcctttgccccttacttcggctggtctcgctag

SEQ ID NO: 45265 - DNA, 918 bp, Artificial Sequence
  derived and/or modified sequence
atgaagagcgacagcagcaccagcgccgcccccctgagaggcctgggcggccccctgagaagcagcgagcccgtgagagccgtgcccgccagagcccccgccgtggacctgctggaggaggccgccgacctgctggtggtgcacctggacttcagagccgccctggagacctgcgagagagcctggcagagcctggccaaccacgccgtggccgaggagcccgccggcaccagcctggaggtgaagtgcagcctgtgcgtggtgggcatccaggccctggccgagatggacagatggcaggaggtgctgagctgggtgctgcagtactaccaggtgcccgagaagctgccccccaaggtgctggagctgtgcatcctgctgtacagcaagatgcaggagcccggcgccgtgctggacgtggtgggcgcctggctgcaggaccccgccaaccagaacctgcccgagtacggcgccctggccgagttccacgtgcagagagtgctgctgcccctgggctgcctgagcgaggccgaggagctggtggtgggcagcgccgccttcggcgaggagagaagactggacgtgctgcaggccatccacaccgccagacagcagcagaagcaggagcacagcggcagcgaggaggcccagaagcccaacctggagggcagcgtgagccacaagttcctgagcctgcccatgctggtgagacagctgtgggacagcgccgtgagccacttcttcagcctgcccttcaagaagagcctgctggccgccctgatcctgtgcctgctggtggtgagattcgaccccgccagccccagcagcctgcacttcctgtacaagctggcccagctgttcagatggatcagaaaggccgccttcagcagactgtaccagctgagaatcagagactag

SEQ ID NO: 45266 - DNA, 1098 bp, Artificial Sequence
  derived and/or modified sequence
atgaagagcgacagcagcaccagcgccgcccccctgagaggcctgggcggccccctgagaagcagcgagcccgtgagagccgtgcccgccagagcccccgccgtggacctgctggaggaggccgccgacctgctggtggtgcacctggacttcagagccgccctggagacctgcgagagagcctggcagagcctggccaaccacgccgtggccgaggagcccgccggcaccagcctggaggtgaagtgcagcctgtgcgtggtgggcatccaggccctggccgagatggacagatggcaggaggtgctgagctgggtgctgcagtactaccaggtgcccgagaagctgccccccaaggtgctggagctgtgcatcctgctgtacagcaagatgcaggagcccggcgccgtgctggacgtggtgggcgcctggctgcaggaccccgccaaccagaacctgcccgagtacggcgccctggccgagttccacgtgcagagagtgctgctgcccctgggctgcctgagcgaggccgaggagctggtggtgggcagcgccgccttcggcgaggagagaagactggacgtgctgcaggccatccacaccgccagacagcagcagaagcaggagcacagcggcagcgaggaggcccagaagcccaacctggagggcagcgtgagccacaagttcctgagcctgcccatgctggtgagacagctgtgggacagcgccgtgagccacttcttcagcctgcccttcaagaagagcctgctggccgccctgatcctgtgcctgctggtggtgagattcgaccccgccagccccagcagcctgcacttcctgtacaagctggcccagctgttcgccggcagcggcagactgcacttcctggccagcaccagcagcgccagcgtgaccgagggcccctgcgccccccagcccctgtgcagcagcagaccctggccccagaagcagagcgacagagccacccacccccaggcccccctgggcaagtgggaccagcccaacctggccgagtgcaccgtgagctgctgcctgggcgccctgagcttcgccccctacttcggctggagcagatag

SEQ ID NO: 45267 - DNA, 2767 bp, Artificial Sequence
  derived and/or modified sequence
tcccgcccgcgccctgcccaccccggccgcgcgcaccacaacgcccccgccccgccgcccggaaccagctgagcgcagctggacccagcagccgctgtctccagtgccgcagcagcaggtagtgctcatagctctctttgtccagtgcttcggccttggtcccagcgccttcccacggagcagcactcttcaccctgcacagccttgttaggagaaggggatgaatgaatacaggacttacgcgtctgctgtggcccagctggcttccagatggtgacatgagccacccacagccggagctgttcctctttcccaaagctcagcccaacagcatggtggtggaacaccccgagttcctcaaggcagggaaggagcctggcctgcagatctggcgtgtggagaagttcgatctggtgcccgtgcccaccaacctttatggagacttcttcacgggcgacgcctacgtcatcctgaagacagtgcagctgaggaacggaaatctgcagtatgacctccactactggctgggcaatgagtgcagccaggatgagagcggggcggccgccatctttaccgtgcagctggatgactacctgaacggccgggccgtgcagcaccgtgaggtccagggcttcgagtcggccaccttcctaggctacttcaagtctggcctgaagtacaagaaaggaggtgtggcatcaggattcaagcacgtggtacccaacgaggtggtggtgcagagactcttccaggtcaaagggcggcgtgtggtccgtgccaccgaggtacctgtgtcctgggagagcttcaacaatggcgactgcttcatcctggacctgggcaacaacatccaccagtggtgtggttccaacagcaatcggtatgaaagactgaaggccacacaggtgtccaagggcatccgggacaacgagcggagtggccgggcccgagtgcacgtgtctgaggagggcactgagcccgaggcgatgctccaggtgctgggccccaagccggctctgcctgcaggtaccgaggacaccgccaaggaggatgcggccaaccgcaagctggccaagctctacaaggtctccaatggtgcagggaccatgtccgtctccctcgtggctgatgagaaccccttcgcccagggggccctgaagtcagaggactgcttcatcctggaccacggcaaagatgggaaaatctttgtctggaaaggcaagcaggcaaacacggaggagaggaaggctgccctcaaaacagcctctgacttcatcaccaagatggactaccccaagcagactcaggtctcggtccttcctgagggcggtgagaccccactgttcaagcagttcttcaagaactggcgggacccagaccagacagatggcctgggcttgtcctacctttccagccatatcgccaacgtggagcgggtgcccttcgacgccgccaccctgcacacctccactgccatggccgcccagcacggcatggatgacgatggcacaggccagaaacagatctggagaatcgaaggttccaacaaggtgcccgtggaccctgccacatatggacagttctatggaggcgacagctacatcattctgtacaactaccgccatggtggccgccaggggcagataatctataactggcagggtgcccagtctacccaggatgaggtcgctgcatctgccatcctgactgctcagctggatgaggagctgggaggtacccctgtccagagccgtgtggtccaaggcaaggagcccgcccacctcatgagcctgtttggtgggaagcccatgatcatctacaagggcggcacctcccgcgagggcgggcagacagcccctgccagcacccgcctcttccaggtccgcgccaacagcgctggagccacccgggctgttgaggtattgcctaaggctggtgcactgaactccaacgatgcctttgttctgaaaaccccctcagccgcctacctgtgggtgggtacaggagccagcgaggcagagaagacgggggcccaggagctgctcagggtgctgcgggcccaacctgtgcaggtggcagaaggcagcgagccagatggcttctgggaggccctgggcgggaaggctgcctaccgcacatccccacggctgaaggacaagaagatggatgcccatcctcctcgcctctttgcctgctccaacaagattggacgttttgtgatcgaagaggttcctggtgagctcatgcaggaagacctggcaacggatgacgtcatgcttctggacacctgggaccaggtctttgtctgggttggaaaggattctcaagaagaagaaaagacagaagccttgacttctgctaagcggtacatcgagacggacccagccaatcgggatcggcggacgcccatcaccgtggtgaagcaaggctttgagcctccctcctttgtgggctggttccttggctgggatgatgattactggtctgtggaccccttggacagggccatggctgagctggctgcctgaggaggggcagggcccacccatgtcaccggtcagtgccttttggaactgtccttccctcaaagaggccttagagcgagcagagcagctctgctatgagtgtgtgtgtgtgtgtgtgttgtttcttttttttttttttacagtatccaaaaatagccctgcaaaaattcagagtccttgcaaaattgtctaaaatgtcagtgtttgggaaattaaatccaataaaaacattttgaagtgtg

SEQ ID NO: 45268 - protein, 138 aa, Artificial Sequence
  derived and/or modified sequence
NISLCPEICFQKIESQVYFVRVDSGIQPGSDISIYYDPMISKLITYGSDRTEALKRMADALDNYVIRGVTHNIALLREVIINSRFVKGDISTKFLSDVYPDGFKGHMLTKSEKNQLLAIASSLFVAFQLRAQHFQENS

SEQ ID NO: 45269 - protein, 120 aa, Artificial Sequence
  derived and/or modified sequence
MSIQFLGTVYKVNILTRLAAELNKFMLEKVTEDTSSVLRSPMPGVVVAVSVKPGDAATSSLSVEICLFWTFQVAEGQEICVIEAMKMQNSMTAGKTGTVKSVHCQAGDTVGEGDLLVELE

SEQ ID NO: 45270 - protein, 702 aa, Artificial Sequence
  derived and/or modified sequence
MAGFWVGTAPLVAAGRRGRWPPQQLMLSAALRTLKTFDKILVANRGEIACRVIRTCKKMGIKTVAIHSDVDASSVHVKMADEAVCVGPAPTSKSYLNMDAIMEAIKKTRAQAVHPGYGFLSENKEFARCLAAEDVVFIGPDTHAIQAMGDKIESKLLAKKAEVNTIPGFDGVVKDAEEAVRIAREIGYPVMIKASAGGGGKGMRIAWDDEETRDGFRLSSQEAASSFGDDRLLIEKFIDNPRHIEIQVLGDKHGNALWLNERECSIQRRNQKVVEEAPSIFLDAETRRAMGEQAVALARAVKYSSAGTVEFLVDSKKNFYFLEMNTRLQVEHPVTECITGLDLVQEMIRVAKGYPLRHKQADIRINGWAVECRVYAEDPYKSFGLPSIGRLSQYQEPLHLPGVRVDSGIQPGSDISIYYDPMISKLITYGSDRTEALKRMADALDNYVIRGVTHNIALLREVIINSRFVKGDISTKFLSDVYPDGFKGHMLTKSEKNQLLAIASSLFVAFQLRAQHFQENSRMPVIKPDIANWELSVKLHDKVHTVVASNNGSVFSVEVDGSKLNVTSTWNLASPLLSVSVDGTQRTVQCLSREAGGNMSIQFLGTVYKVNILTRLAAELNKFMLEKVTEDTSSVLRSPMPGVVVAVSVKPGDAVAEGQEICVIEAMKMQNSMTAGKTGTVKSVHCQAGDTVGEGDLLVELE

SEQ ID NO: 45271 - protein, 111 aa, Artificial Sequence
  derived and/or modified sequence
YKVNILTRLAAELNKFMLEKVTEDTSSVLRSPMPGVVVAVSVKPGDAATSSLSVEICLFWTFQVAEGQEICVIEAMKMQNSMTAGKTGTVKSVHCQAGDTVGEGDLLVELE

SEQ ID NO: 45272 - protein, 102 aa, Artificial Sequence
  derived and/or modified sequence
SDVYPDGFKGHMLTKSEKNQLLAIASSLFVAFQLRAQHFQENSRMPVIKPDIANWELSVKLHDKVHTVVASNNGSVFSVEVDGSKLNVTSTWNLFALIVCQR

SEQ ID NO: 45273 - DNA, 363 bp, Artificial Sequence
  derived and/or modified sequence
atgagcatccagtttctcggaactgtgtacaaagtgaacattctgacaagactcgcagcagaactgaataagtttatgcttgagaaggtaactgaagataccagttccgtgctgcggtcccctatgcctggggttgtagtcgccgtttccgtgaaaccaggcgacgccgcgacgtctagtctgtccgttgagatttgtctgttctggacgtttcaagtcgcagagggacaggagatatgcgtcatcgaggcgatgaagatgcaaaactcaatgactgccggcaagaccgggactgtaaaaagtgtgcactgtcaggcaggcgataccgtaggcgaaggcgatctgctcgtcgaactggagtag

SEQ ID NO: 45274 - DNA, 2109 bp, Artificial Sequence
  derived and/or modified sequence
atggcgggtttttgggtaggcaccgccccattggtggcagcaggccgtcgggggcggtggccgccccagcagttaatgctgagtgcggctctcaggactctcaagaccttcgataagatcctggtcgccaataggggagagatagcgtgcagggtgattaggacatgcaagaagatgggcattaagactgtggccatccactccgatgtcgatgctagctccgtgcacgtcaagatggcagatgaggctgtttgcgttggtcccgcccctacttccaaatcctatctcaatatggacgctattatggaagctatcaagaaaacccgcgctcaagccgtgcatccagggtatggtttcctttccgaaaacaaagagttcgctcgctgcctggccgcagaggacgttgtgttcattggtccagacacccacgctatacaggctatgggcgacaagatcgaatccaagctcctggccaagaaggccgaggttaataccatcccaggctttgacggggtggttaaagatgcggaagaggccgtacggattgcacgcgaaatcggatatcctgtcatgatcaaagctagcgccggaggaggagggaagggcatgcgtatcgcctgggacgacgaggagacaagagacgggtttaggcttagtagccaagaggccgcctcctcctttggggatgacaggctgctcatcgaaaagttcattgacaaccctcgccacatcgagatacaagtgctgggtgacaagcacggcaacgccctgtggctgaatgagagagagtgttccatacaaagaagaaaccagaaggtggttgaggaggcgcccagcattttccttgacgccgagactaggcgcgcaatgggtgagcaagccgtagctttagctagagctgtgaaatactcatccgctgggaccgtggagtttctcgtggattcgaaaaaaaacttttactttctcgaaatgaataccagactgcaagtcgaacacccggtgacagagtgcatcaccggcctggatctggtgcaggagatgattagagtggcaaaaggataccccctgaggcacaagcaggcagatatccgaatcaacggatgggcggttgagtgtcgggtgtacgccgaggacccatataagtctttcgggcttccctccatcggaaggctgagccagtaccaagaacctctgcatctccctggcgtgcgcgtggactcgggaatacaacctggttcggatatctctatttactacgatcctatgatcagcaagctgatcacatacgggagtgaccgtacagaagccctaaagagaatggccgatgcgctggacaattacgtgattagaggcgtgacccataacattgcccttcttagggaggtaatcattaacagcaggttcgtgaaaggggacatctcaaccaaatttctcagcgacgtgtatcctgacggtttcaaaggccacatgttgactaagagcgagaagaatcaattactggccatcgctagctctcttttcgtcgcatttcagttgcgtgcccagcacttccaggagaactcacggatgcccgtaattaaaccagatattgccaactgggagttgagcgtgaagctccacgacaaggtccacaccgtggtggcttctaacaacgggagtgtgttttccgtggaggtcgatggctcaaagctgaacgtgactagcacgtggaatttggcctctccattgctgtccgtgtcagttgatggcacacaaaggacggttcagtgcctctccagagaagctggggggaatatgtccattcagtttctcggcacagtttacaaagtgaatatcctgacccgcttggccgccgagctgaacaagtttatgctggagaaagtaacggaagatacttcctccgtgctacgtagtcccatgcccggggtggtggttgctgtctctgtgaagcctggagacgcagtggctgagggacaggagatctgcgtcatcgaagccatgaaaatgcagaactctatgacagctggaaaaacgggaactgtaaaaagcgtccactgtcaggccggagacacagtgggcgagggagatctgctggtcgagctggagtag

SEQ ID NO: 45275 - DNA, 336 bp, Artificial Sequence
  derived and/or modified sequence
tataaagtaaatattctgacgagactcgccgccgaactaaacaaatttatgctagagaaagtgactgaagatacatcttccgtgttacgtagtccgatgcctggtgtcgtagtggcagtgtccgttaagcctggggacgctgccacttcctctctctcagttgaaatctgtctgttctggacattccaggttgctgagggccaggaaatttgcgtgattgaggccatgaagatgcaaaattcgatgacagcaggtaagaccggcactgtaaaaagtgttcactgccaggccggcgacaccgtcggggaaggggatttgctggtggaattggagtag

SEQ ID NO: 45276 - DNA, 363 bp, Artificial Sequence
  derived and/or modified sequence
atgagcatccagttcctgggcaccgtgtacaaggtgaacatcctgacccggctggccgctgagctgaacaagttcatgctggagaaggtgacagaggacaccagctctgtgctgcggagccccatgcctggggtggtggtggccgtgtctgtgaagccaggagatgctgccaccagcagcctgtctgtggagatctgcctcttctggaccttccaggtggccgagggccaggagatctgtgtgattgaggccatgaagatgcagaacagcatgacagctgggaagacaggcaccgtgaagtctgtgcactgccaggccggggacacagtgggggagggggacctgctggtggagctggagtag

SEQ ID NO: 45277 - DNA, 2109 bp, Artificial Sequence
  derived and/or modified sequence
atggccggcttctgggtgggcacagcccccctggtggccgccggccggcggggccgctggccaccccagcagctgatgctgtctgctgccctgcggaccctgaagacctttgacaagatcctggtggccaacagaggagagatcgcctgcagggtcatccgcacctgcaagaagatgggcatcaagacagtggccatccacagtgatgtggatgccagctctgtgcacgtgaagatggctgatgaagctgtgtgtgtgggccctgcccccaccagcaagagctacctgaacatggatgccatcatggaggccatcaagaagacccgggcccaggccgtgcaccctggctacggcttcctgtctgagaacaaggagtttgcccgctgcctggccgcagaagatgtggtgttcatcggccctgacacccacgccatccaggccatgggagacaagattgagagcaagctgctggccaagaaggccgaggtgaacaccatccctggctttgatggagtggtgaaggatgctgaggaggccgtgcgcatcgcccgggagatcggctaccctgtgatgatcaaggccagcgctgggggcggcggcaagggcatgagaattgcctgggatgatgaggagaccagagatggcttccggctgagcagccaggaggccgccagcagctttggagatgaccggctgctgattgagaagttcatcgacaaccccaggcacatcgagatccaggtgctgggggacaagcatggaaatgccctgtggctgaatgaaagagaatgttccatccagaggaggaaccagaaggtggtggaggaggcccccagcatcttcctggatgctgagacccggcgggccatgggagagcaggccgtggccctggcccgggctgtgaagtacagcagcgctggcaccgtggagttcctggtggacagcaagaagaacttctacttcctggagatgaacacccggctgcaggtggagcaccctgtgacagagtgcatcaccggcctggacctggtgcaggagatgatccgggtggccaagggctaccccctgcggcacaagcaggccgacatccgcatcaatggctgggccgtggagtgccgggtgtatgcagaggacccctacaagagctttggcctgcccagcatcggccgcctgagccagtaccaggagcccctgcacctgcccggggtgcgggtggacagcggcatccagcccggcagtgacatcagcatctactatgaccccatgatcagcaagctgatcacctacggcagtgacagaacagaggccctgaagaggatggctgatgccctggacaactacgtgatccggggcgtgacccacaacatcgccctgctgcgggaggtgatcatcaacagcagatttgtgaagggggacatcagcaccaagttcctgagtgatgtgtacccagatggcttcaagggccacatgctgaccaagtctgagaagaaccagctgctggccatcgccagcagcctgtttgtggccttccagctgcgggcccagcacttccaggagaacagcaggatgcctgtgatcaagccagacatcgccaactgggagctgtctgtgaagctgcatgacaaggtgcacacagtggtggccagcaacaatggatctgtgttttctgtggaggtggatggcagcaagctgaatgtgaccagcacctggaacctggccagccccctgctgtctgtgtctgtggatggcacccagaggacagtgcagtgcctgagccgggaggccggcggcaacatgagcatccagttcctgggcaccgtgtacaaggtgaacatcctgacccggctggccgctgagctgaacaagttcatgctggagaaggtgacagaggacaccagctctgtgctgcggagccccatgcctggggtggtggtggccgtgtctgtgaagccaggagatgctgtggccgagggccaggagatctgtgtgattgaggccatgaagatgcagaacagcatgacagctgggaagacaggcaccgtgaagtctgtgcactgccaggccggggacacagtgggggagggggacctgctggtggagctggagtag

SEQ ID NO: 45278 - DNA, 336 bp, Artificial Sequence
  derived and/or modified sequence
tacaaggtgaacatcctgacccggctggccgctgagctgaacaagttcatgctggagaaggtgacagaggacaccagctctgtgctgcggagccccatgcctggggtggtggtggccgtgtctgtgaagccaggagatgctgccaccagcagcctgtctgtggagatctgcctcttctggaccttccaggtggccgagggccaggagatctgtgtgattgaggccatgaagatgcagaacagcatgacagctgggaagacaggaacagtgaagtctgtgcactgccaggccggggacacagtgggggagggggacctgctggtggagctggagtag

SEQ ID NO: 45279 - DNA, 363 bp, Artificial Sequence
  derived and/or modified sequence
atgagcatccagttcctgggcaccgtgtacaaggtgaacatcctgacgaggctcgcagctgagctgaataagttcatgctagaaaaggttactgaggacacctccagcgtcctgcggtccccgatgcctggagttgttgtggcggtctccgtgaaaccgggtgacgctgctacctcgagcctgagtgtcgagatatgcttgttttggacctttcaagtggctgagggacaggaaatttgtgtgatcgaggcaatgaaaatgcagaactccatgactgccggtaagaccgggactgtgaagtccgtgcactgccaggccggcgatactgtaggggaaggagaccttctggtggaattggagtag

SEQ ID NO: 45280 - DNA, 2109 bp, Artificial Sequence
  derived and/or modified sequence
atggccggcttctgggtgggcaccgcccccctggtggccgccggccggcggggccgctggcctcctcagcagttgatgctgagcgctgcgctgcgaaccctgaaaacctttgataagattttggtggcaaacagaggggagatcgcctgcagagtgattcggacttgcaaaaagatgggcataaaaaccgttgctattcatagcgacgttgatgcttcttcagtgcacgtcaaaatggctgatgaagccgtttgcgtcgggccagcacccacctctaagagctacttgaacatggacgccattatggaggcaatcaagaaaactagggcccaagctgtgcacccagggtatgggtttctgtccgaaaacaaggaattcgctaggtgcctcgctgcagaggatgtggtcttcattggaccagacacgcacgctatccaggccatgggggataagatcgagtctaagctgctggcaaaaaaagctgaggtgaataccatccccggattcgacggcgtcgttaaagacgccgaggaggccgtacgcatcgctagggagatcggctacccagtgatgatcaaggcttctgcaggcggaggtggaaagggcatgcgcatcgcatgggatgatgaagagacccgtgatggattccgtctctcatctcaggaggccgcatcatcattcggggacgaccgtctgctgatcgaaaagtttattgataacccccggcatattgagatccaggtactcggggacaagcacggtaatgccttgtggttaaatgagcgtgagtgttcgatccagcgacgcaatcaaaaggtggtagaggaagccccttctatattcctagatgccgaaactcggcgtgccatgggggagcaggcggtcgctctagccagagccgtgaaatactcttccgccggcactgttgaattcctcgtggactcaaaaaaaaacttctattttctcgaaatgaataccaggctgcaggtagagcaccctgtgacggagtgtattaccggccttgacctagtgcaggaaatgatcagagtagcaaaaggataccctctccgccacaagcaggcagacatcaggataaatggctgggccgtcgagtgtcgcgtgtacgcggaggatccgtataagtcctttggcttgccttcaataggacgcctaagccagtatcaggaacctctgcatctaccaggtgtgcgagtcgattctggcattcaaccaggaagtgacattagcatctactacgaccctatgattagtaagcttattacgtatgggagtgatcgcacagaggcgttgaagcgtatggctgatgccctagacaactacgttatccggggtgtgacccacaatatcgccctactcagagaagttataattaacagtcgcttcgtgaaaggggatatctctacaaaattcctgagcgacgtgtatccagatggctttaaaggacacatgctcaccaagtcggaaaaaaaccaattgctggccatagccagtagcctctttgtagcattccagcttagagcccagcactttcaagaaaatagtcggatgccggtcattaagcccgatatcgctaattgggaacttagcgtgaaactgcacgacaaggtgcacactgtagtcgcgagtaataatgggagtgttttcagcgtagaggtggacgggtctaaattgaatgtcacatcaacctggaatctcgcatcccctctgttatcagtgagcgtggacggtacccagcgtacggttcagtgtctgtcccgggaggccggcggcaacatgtccatacagtttctcggtactgtgtataaggtgaatattctgacaagactggccgcagagctcaacaaatttatgctagagaaagtcaccgaggatacctcttctgttctgcggagtcccatgccaggtgtagtggtggcggtgtctgtgaagcccggggacgcggttgcggagggccaggagatttgcgtgatcgaagccatgaaaatgcagaatagtatgacagccggcaagaccgggacagtcaagtccgttcactgccaagccggagacaccgtgggagaaggtgacctattggtggaattggaatag

SEQ ID NO: 45281 - DNA, 336 bp, Artificial Sequence
  derived and/or modified sequence
tacaaggtgaacatcctgacccggctggccgccgagctgaacaagttcatgctcgaaaaggtgaccgaggacacctcttcagttctgcgatctcccatgcctggagtggtggttgctgtgtccgtgaagcctggagatgcagctacttcatccctcagcgtagagatctgcctgttctggacattccaggtggccgagggtcaagagatatgcgtgatcgaagccatgaagatgcaaaattccatgacagcgggaaaaactggtaccgtgaagtcagtgcattgtcaagctggagacacggttggggaaggagatctgttggtggaactcgaatag

SEQ ID NO: 45282 - DNA, 363 bp, Artificial Sequence
  derived and/or modified sequence
atgagtatccaattcctcggcaccgtttataaagtcaacattctaacccgcctggcagcagaattaaacaagtttatgctcgagaaggtgacagaagatacttctagtgtgctgcggtctccgatgcccggtgtagttgtggccgtatcagtgaagcctggggatgccgcaacatcatctctttctgtcgaaatttgcctgttctggactttccaggttgcagaaggacaagaaatatgcgttatcgaggctatgaaaatgcagaactcaatgaccgcaggaaaaaccggaactgtcaaaagtgtgcattgtcaagcaggagataccgtcggcgagggagatctgctggtagaactcgagtag

SEQ ID NO: 45283 - DNA, 2109 bp, Artificial Sequence
  derived and/or modified sequence
atggctgggttctgggtgggaaccgcgcctctggtcgctgctgggaggaggggtcgttggccgccacagcagttgatgctgtcagcggcactacggactttgaagacattcgataaaatcctggtagccaatcggggagaaatcgcctgcagagttatccgcacttgtaaaaaaatgggcataaaaacagtggcaatccattctgatgttgatgcttcctccgtgcatgtgaaaatggccgacgaagctgtttgcgtgggcccagcccctacctcaaagtcatacctgaacatggacgcaattatggaagccatcaaaaagacaagggcgcaggcagttcaccctgggtatggattcctgagcgaaaataaggaatttgcacgttgcctggctgctgaggacgtggtgttcataggaccagatacccatgccattcaggccatgggcgacaagatcgagtcaaaactcctggcaaaaaaagccgaggtgaatactatccctggattcgatggagttgtgaaggacgccgaggaggcagtaaggatcgccagagaaataggctacccagtaatgatcaaagcctctgctgggggaggcggtaaggggatgagaatcgcatgggatgacgaggagacaagagacggttttcgactgagtagccaggaggcagcatccagctttggagatgaccgactcctgatagagaagttcatcgataaccccagacacattgaaatccaagtgcttggagacaagcatgggaatgcactctggcttaacgaaagagagtgctccatacagcgcagaaatcagaaagtggtagaggaggcacccagtatttttctggacgccgagacccggagagctatgggcgagcaagccgtagcccttgcacgcgcagtgaaatattcatcggcaggcactgtcgagttcctcgtggactcaaagaaaaatttctacttcttggaaatgaacacgcgcctgcaggtagaacatcccgttactgagtgtatcaccgggctggacctcgtgcaggaaatgatccgcgttgccaagggctaccccctccgtcataaacaagctgacatcagaatcaatggctgggccgtggaatgtcgcgtatacgccgaagatccctataagagctttggtttaccatctattggacgactgtctcagtatcaagagccccttcatctccctggcgtaagagtcgattccggcatccaacctggctccgacatcagcatctattacgaccctatgattagcaagttgatcacctacggctcagatcgcaccgaggccctgaagagaatggcagatgcattggacaattatgtgattagaggtgttactcataatatcgctctgttgcgcgaagtaattatcaactcgcgctttgtaaagggggacatctccaccaaattcttgagtgatgtctacccggatgggttcaaaggccacatgcttaccaaatccgaaaagaatcagctgctggcaattgcatcttcactgttcgtcgcttttcagcttcgagcccagcatttccaagagaatagccgtatgcccgtcataaagcctgatattgcgaactgggaactgagcgtcaaactgcacgacaaggttcacaccgtggtggcatctaataatggcagcgtgttttcagtggaagttgacggcagcaagctgaacgtcacgtcaacctggaacctggcgagtccactcttgagtgtctcggtcgatggtacccagcgcactgtgcagtgtctgtcccgcgaagcagggggaaacatgtccattcagttccttggaacggtatataaagtcaatatcttgactcggctcgccgcagaactgaacaaattcatgctggaaaaagtgaccgaggacacaagctccgtgctgagaagcccaatgccgggtgttgtcgtcgctgtttccgtgaagccaggtgatgctgtcgccgaaggccaggagatctgtgtcattgaagcaatgaaaatgcagaacagcatgaccgccggtaaaacaggtactgtcaagtccgttcactgtcaagctggcgacaccgtgggcgaaggagatctgctcgtcgagttggagtag

SEQ ID NO: 45284 - DNA, 336 bp, Artificial Sequence
  derived and/or modified sequence
tacaaagttaacatccttacccgcctcgctgcagaactgaacaaattcatgctagaaaaagttacggaagatacaagttcagtgctgaggtcacccatgcctggggtggtcgtggccgtgtcggtcaagcccggagatgccgcaacatctagcctcagcgtcgaaatttgtctgttctggacattccaagtggctgagggacaggagatctgtgttatcgaggccatgaaaatgcagaactcaatgacggccggtaaaaccggaacggttaagagcgtgcactgtcaggccggtgatacagtgggcgagggcgacctgctcgtcgaattagagtag

SEQ ID NO: 45285 - DNA, 1226 bp, Artificial Sequence
  derived and/or modified sequence
aacatcagtttatgtcctgaaatatgttttcagaaaatagaaagccaagtatatttcgtccgagtggacagtggcatccaaccaggaagtgatattagcatttattatgatcctatgatttcaaaactaatcacatatggctctgatagaactgaggcactgaagagaatggcagatgcactggataactatgttattcgaggtgttacacataatattgcattacttcgagaggtgataatcaactcacgctttgtaaaaggagacatcagcactaaatttctctccgatgtgtatcctgatggcttcaaaggacacatgctaaccaagagtgagaagaaccagttattggcaatagcatcatcattgtttgtggcattccagttaagagcacaacattttcaagaaaattcaagaatgcctgttattaaaccagacatagccaactgggagctctcagtaaaattgcatgataaagttcataccgtagtagcatcaaacaatgggtcagtgttctcggtggaagttgatgggtcgaaactaaatgtgaccagcacgtggaacctggcttcgcccttattgtctgtcagcgttgatggcactcagaggactgtccagtgtctttctcgagaagcaggtggaaacatgagcattcagtttcttggtacagtgtacaaggtgaatatcttaaccagacttgccgcagaattgaacaaatttatgctggaaaaagtgactgaggacacaagcagtgttctgcgttccccgatgcccggagtggtggtggccgtctctgtcaagcctggagacgcggtagcagaaggtcaagaaatttgtgtgattgaagccatgaaaatgcagaatagtatgacagctgggaaaactggcacggtgaaatctgtgcactgtcaagctggagacacagttggagaaggggatctgctcgtggagctggaatgaaggatttataacctttcagtcatcacccaatttaattagccatttgcatgatgctttcacacacaattgattcaagcattatacaggaacacccctgtgcagctacgtttacgtcgtcatttattccacagagtcaagaccaatattctgccaaaaaatcaccaatggaaattttcattgatataaatacttgtacatatgatttgtacttctgctgtgagattccctagtgtcaaaattaaatcaataaaactgagcatttgtct

SEQ ID NO: 45286 - DNA, 2481 bp, Artificial Sequence
  derived and/or modified sequence
ggcatcgggtttctggctcgtgatttgccggagctcctgcgctccccttctccaccccctccggctgtgtgagaggtcagcagaggggcggtctgcggggacaacaatggcggggttctgggtcgggacagcaccgctggtcgctgccggacggcgtgggcggtggccgccgcagcagctgatgctgagcgcggcgctgcggaccctgaagacttttgataaaattcttgttgctaatagaggagaaattgcatgtcgggttattagaacttgcaagaagatgggcattaagacagttgccatccacagtgatgttgatgctagttctgttcatgtgaaaatggcggatgaggctgtctgtgttggcccagctcccaccagtaaaagctacctcaacatggatgccatcatggaagccattaagaaaaccagggcccaagctgtacatccaggttatggattcctttcagaaaacaaagaatttgccagatgtttggcagcagaagatgtcgttttcattggacctgacacacatgctattcaagccatgggcgacaagattgaaagcaaattattagctaagaaagcagaggttaatacaatccctggctttgatggagtagtcaaggatgcagaagaagctgtcagaattgcaagggaaattggctaccctgtcatgatcaaggcctcagcaggtggtggtgggaaaggcatgcgcattgcttgggatgatgaagagaccagggatggttttagattgtcatctcaagaagctgcttctagttttggcgatgatagactactaatagaaaaatttattgataatcctcgtcatatagaaatccaggttctaggtgataaacatgggaatgctttatggcttaatgaaagagagtgctcaattcagagaagaaatcagaaggtggtggaggaagcaccaagcatttttttggatgcggagactcgaagagcgatgggagaacaagctgtagctcttgccagagcagtaaaatattcctctgctgggaccgtggagttccttgtggactctaagaagaatttttatttcttggaaatgaatacaagactccaggttgagcatcctgtcacagaatgcattactggcctggacctagtccaggaaatgatccgtgttgctaagggctaccctctcaggcacaaacaagctgatattcgcatcaacggctgggcagttgaatgtcgggtttatgctgaggacccctacaagtcttttggtttaccatctattgggagattgtctcagtaccaagaaccgttacatctacctggtgtccgagtggacagtggcatccaaccaggaagtgatattagcatttattatgatcctatgatttcaaaactaatcacatatggctctgatagaactgaggcactgaagagaatggcagatgcactggataactatgttattcgaggtgttacacataatattgcattacttcgagaggtgataatcaactcacgctttgtaaaaggagacatcagcactaaatttctctccgatgtgtatcctgatggcttcaaaggacacatgctaaccaagagtgagaagaaccagttattggcaatagcatcatcattgtttgtggcattccagttaagagcacaacattttcaagaaaattcaagaatgcctgttattaaaccagacatagccaactgggagctctcagtaaaattgcatgataaagttcataccgtagtagcatcaaacaatgggtcagtgttctcggtggaagttgatgggtcgaaactaaatgtgaccagcacgtggaacctggcttcgcccttattgtctgtcagcgttgatggcactcagaggactgtccagtgtctttctcgagaagcaggtggaaacatgagcattcagtttcttggtacagtgtacaaggtgaatatcttaaccagacttgccgcagaattgaacaaatttatgctggaaaaagtgactgaggacacaagcagtgttctgcgttccccgatgcccggagtggtggtggccgtctctgtcaagcctggagacgcggtagcagaaggtcaagaaatttgtgtgattgaagccatgaaaatgcagaatagtatgacagctgggaaaactggcacggtgaaatctgtgcactgtcaagctggagacacagttggagaaggggatctgctcgtggagctggaatgaaggatttataacctttcagtcatcacccaatttaattagccatttgcatgatgctttcacacacaattgattcaagcattatacaggaacacccctgtgcagctacgtttacgtcgtcatttattccacagagtcaagaccaatattctgccaaaaaatcaccaatggaaattttcattgatataaatacttgtacatatgatttgtacttctgctgtgagattccctagtgtcaaaattaaatcaataaaactgagcatttgtct

SEQ ID NO: 45287 - DNA, 602 bp, Artificial Sequence
  derived and/or modified sequence
tacaaggtgaatatcttaaccagacttgccgcagaattgaacaaatttatgctggaaaaagtgactgaggacacaagcagtgttctgcgttccccgatgcccggagtggtggtggccgtctctgtcaagcctggagacgcggcaacctcgagtctgtctgtagagatctgcctattctggacatttcaggtagcagaaggtcaagaaatttgtgtgattgaagccatgaaaatgcagaatagtatgacagctgggaaaactggcacggtgaaatctgtgcactgtcaagctggagacacagttggagaaggggatctgctcgtggagctggaatgaaggatttataacctttcagtcatcacccaatttaattagccatttgcatgatgctttcacacacaattgattcaagcattatacaggaacacccctgtgcagctacgtttacgtcgtcatttattccacagagtcaagaccaatattctgccaaaaaatcaccaatggaaattttcattgatataaatacttgtacatatgatttgtacttctgctgtgagattccctagtgtcaaaattaaatcaataaaactgagcatttgtct

SEQ ID NO: 45288 - DNA, 363 bp, Artificial Sequence
  derived and/or modified sequence
atgagcatacagtttttaggcacagtatacaaggtgaatattctgacccgcctggccgccgaactcaacaagtttatgttagaaaaggtcaccgaagacacgagtagcgtgctgcgtagtcccatgcctggtgtggtggttgctgttagcgttaaacccggtgatgctgccacttcctccctgagtgtagagatctgccttttttggactttccaggtggctgaaggtcaggaaatttgtgtaatcgaggccatgaaaatgcagaacagcatgaccgccggcaaaaccggtacagtaaaaagtgttcactgtcaggccggcgataccgtcggtgaaggagacctgcttgtggaattggaatag

SEQ ID NO: 45289 - DNA, 2109 bp, Artificial Sequence
  derived and/or modified sequence
atggccggtttctgggttggcactgcgcctcttgttgcagccggaaggagaggcagatggcctccacagcaactgatgctatccgccgcacttcggactctgaagacctttgataagattctggtggcaaacagaggcgaaattgcttgtagggtaatccgtacgtgtaaaaaaatgggaataaagacagtggcaattcactccgatgtcgacgcaagcagcgtccacgtaaaaatggccgacgaggcagtctgtgtcgggcccgcccctaccagtaaatcctacctcaatatggacgcaatcatggaagcaattaaaaagacccgggctcaagctgtgcatccaggatatggtttcctctccgagaacaaagagttcgcgagatgtctggcagcagaagacgttgtgttcatcgggccggatacccacgcaatccaggcgatgggcgataagattgagtccaagctactggccaagaaagcagaagtaaacactatacctggttttgatggagtcgtgaaggatgcagaagaggcggtacgcatcgcccgtgaaatagggtaccctgtgatgattaaggctagcgccggcgggggcggcaagggtatgagaatcgcatgggacgatgaggagaccagagatggcttccgcttgagctcgcaagaggctgcttcatctttcggcgacgaccggttactcatcgagaagttcatcgacaatcctagacacattgaaatccaggtgctgggcgataagcatggtaatgctttgtggctcaacgagagagagtgtagtatccagaggaggaatcaaaaagttgtcgaagaggctcctagcatcttcctggacgccgaaacccggagagcaatgggcgagcaagccgtagcactggctagggctgtaaagtactcatctgccgggactgttgagttcctggtggatagcaaaaaaaacttctactttttggagatgaacactcgcttgcaagtggaacacccagtgactgaatgtataacaggccttgatttggtgcaggagatgatcagagtcgcgaagggctaccccctgcgacataagcaggccgatattcgcattaacggctgggccgtagaatgccgtgtgtacgctgaagatccctacaagagtttcggccttccgtccatcgggcgcctaagtcagtatcaggaaccgttacatctgccaggcgtgagggttgactctggtatccagcccgggtcagacatttctatctattatgacccaatgatttccaaactgatcacctatggctcagaccggaccgaggccttaaagagaatggctgacgctctggacaactatgtgataagaggagtcacacacaatattgccctcctacgcgaagtcatcataaactctaggttcgtaaagggcgacatttcaacaaaatttctctcagatgtttatcccgacggatttaaaggtcacatgcttaccaaaagcgaaaaaaaccaactattagccattgcttcttctctgtttgtggcttttcagctgagggcccagcatttccaagaaaactctagaatgccagttatcaagccagatatcgctaattgggaactgtccgtcaagttacatgacaaggtacataccgttgttgcctcaaataatgggtctgtcttctctgtggaagttgatggaagcaaacttaacgtaacaagtacatggaatttggcgtcacctctgcttagcgtgagcgtagatggaactcagcgcaccgtgcaatgtctgagtcgagaagctggcggaaatatgtccatccagttcttaggaactgtatataaggtgaacatactgacaagactcgccgctgaattaaacaaattcatgctggaaaaggtaactgaagatacaagtagcgtcctgagaagccctatgccaggcgttgtcgtggcagtgtccgtgaaacctggagatgcagtcgccgagggacaagagatctgcgtaattgaggctatgaaaatgcaaaactccatgaccgccgggaagactgggacagttaagagtgtccactgtcaggctggggacaccgtgggggagggcgacctgcttgtcgaactggaatag

SEQ ID NO: 45290 - DNA, 336 bp, Artificial Sequence
  derived and/or modified sequence
tataaagttaatattcttacacgactggccgctgagctcaataagtttatgctagaaaaagtgacagaagatacgtcaagcgtcctcagatcccctatgcctggtgtagtcgttgcggttagcgtaaaacccggagacgcagcaacttcctccctatctgtcgagatctgtctgttttggacttttcaagtagcggaaggacaggaaatttgcgtgatcgaggcgatgaagatgcagaatagcatgacagcgggcaagacgggaaccgtgaaatcagtgcattgccaggcaggggacaccgtgggcgagggagacctactggttgaactggaatag

SEQ ID NO: 45291 - DNA, 363 bp, Artificial Sequence
  derived and/or modified sequence
atgtccatccaatttcttgggactgtgtacaaggtcaatattctcactagacttgcagccgaattgaacaaatttatgcttgagaaagttacggaggacacatctagcgtgctgcgaagtccaatgcctggagtggtggtggccgtttctgttaagcctggcgatgcagcgacaagtagcctgagcgttgagatttgcctgttttggaccttccaggttgcggagggccaggagatttgtgtgattgaagcaatgaaaatgcagaatagcatgactgctggcaagactggaaccgtcaaatcagtgcactgtcaggctggggacacagtcggggaaggcgatttgttagtagaactcgagtag

SEQ ID NO: 45292 - DNA, 2109 bp, Artificial Sequence
  derived and/or modified sequence
atggctgggttctgggtgggtacagctcctctcgtggcggctgggcggagaggcagatggccgccacagcagttgatgttatccgccgccttgcgcactctcaaaacatttgataaaatactggttgcgaaccggggcgaaattgcatgcagggtaatcaggacttgtaaaaagatgggcatcaagaccgtagctattcattccgatgtcgacgcttcttccgtgcacgtgaaaatggctgacgaggcagtctgtgtggggcctgcaccaacgtctaaaagttacctgaacatggatgctataatggaagctataaaaaagacaagagctcaggcagtccatccaggatacggttttctgagcgagaacaaggaattcgcccggtgcctcgccgcggaggatgttgtatttattggccctgatacccacgccatccaggcaatgggagataaaatcgagtcaaaattgctggcaaaaaaagccgaggtcaacacgatacctggcttcgacggagttgtgaaggacgcagaagaggccgtgagaatagcccgagagataggttaccctgtaatgatcaaagcctcggccgggggggggggtaaaggaatgcgaattgcatgggatgatgaagagacaagggacgggttcagactgagttcacaggaagccgcgagcagctttggagatgaccgtctgcttatagaaaaatttattgacaaccccaggcatatcgagatacaagtgctgggggataaacatggcaacgctctctggcttaatgagcgggagtgtagtatacagagacgcaatcagaaggtcgtggaagaagccccttccattttcttggatgcagaaacaagaagggcaatgggcgagcaggcagtcgcgctggccagggccgtaaaatattcctctgcgggcacggttgaattcctcgtggacagcaagaagaacttttactttctggaaatgaatacacggctacaggttgaacatccagtgacagagtgcatcactggcctggacctcgtgcaagagatgataagggtagcaaagggatatccactgagacacaaacaggctgacattagaataaatggatgggcagtggaatgccgcgtgtatgccgaggacccatacaagtcatttggacttccttctatcggtagattatcccagtatcaagagcccctccatctgcccggcgttagggtagactccggtatccaacctggttccgatataagcatatactatgatcccatgataagcaaactaataacgtacgggagtgatcgtacagaggccctgaaacgcatggctgacgcccttgataattacgtgatccgtggtgtcactcacaatattgccctgctccgtgaagtgattatcaattctagatttgtaaaaggggacatctctaccaagttcttatctgacgtatacccagacgggttcaagggacacatgctcaccaagagcgaaaaaaaccaactcttagcaattgcctcaagcctttttgtcgcattccaactgcgtgcccagcactttcaggaaaacagtagaatgcctgttattaaaccagacatagccaattgggagctgagcgttaaactgcacgataaagtacacactgtggttgcctctaacaatggctcggtttttagcgttgaggtagatggaagcaaattgaacgtgactagtacatggaatttagcgtcacctttactttccgtgagcgtcgacggtacgcaacggaccgtacagtgtctatctcgagaggcaggcggtaatatgtcaattcagtttttaggaaccgtttacaaagtcaatattctcacaaggcttgctgcagagctcaacaagttcatgctggagaaagttacagaagacacaagctccgtactgagaagtcccatgcccggggtggtggtcgccgtctcagtgaaaccaggggacgccgttgcagaaggacaagagatttgtgtgatcgaggctatgaaaatgcagaacagcatgactgccggtaaaacaggcaccgtgaagagcgtacactgccaggctggggacacagtgggggaaggcgacctgctggtggagctggaatag

SEQ ID NO: 45293 - DNA, 336 bp, Artificial Sequence
  derived and/or modified sequence
tataaagttaatattcttacacgactggccgctgagctcaataagtttatgctagaaaaagtgacagaagatacgtcaagcgtcctcagatcccctatgcctggtgtagtcgttgcggttagcgtaaaacccggagacgcagcaacttcctccctatctgtcgagatctgtctgttttggacttttcaagtagcggaaggacaggaaatttgcgtgatcgaggcgatgaagatgcagaatagcatgacagcgggcaagacgggaaccgtgaaatcagtgcattgccaggcaggggacaccgtgggagagggcgatctgttggtggagttggaatag

SEQ ID NO: 45294 - DNA, 363 bp, Artificial Sequence
  derived and/or modified sequence
atgagcatccagttcctgggcaccgtgtacaaggtgaacatcctgaccagactggccgccgagctgaacaagttcatgctggagaaggtgaccgaggacaccagcagcgtgctgagaagccccatgcccggcgtggtggtggccgtgagcgtgaagcccggcgacgccgccaccagcagcctgagcgtggagatctgcctgttctggaccttccaggtggccgagggccaggagatctgcgtgatcgaggccatgaagatgcagaacagcatgaccgccggcaagaccggcaccgtgaagagcgtgcactgccaggccggcgacaccgtgggcgagggcgacctgctggtggagctggagtag

SEQ ID NO: 45295 - DNA, 2109 bp, Artificial Sequence
  derived and/or modified sequence
atggccggcttctgggtgggcaccgcccccctggtggccgccggcagaagaggcagatggcccccccagcagctgatgctgagcgccgccctgagaaccctgaagaccttcgacaagatcctggtggccaacagaggcgagatcgcctgcagagtgatcagaacctgcaagaagatgggcatcaagaccgtggccatccacagcgacgtggacgccagcagcgtgcacgtgaagatggccgacgaggccgtgtgcgtgggccccgcccccaccagcaagagctacctgaacatggacgccatcatggaggccatcaagaagaccagagcccaggccgtgcaccccggctacggcttcctgagcgagaacaaggagttcgccagatgcctggccgccgaggacgtggtgttcatcggccccgacacccacgccatccaggccatgggcgacaagatcgagagcaagctgctggccaagaaggccgaggtgaacaccatccccggcttcgacggcgtggtgaaggacgccgaggaggccgtgagaatcgccagagagatcggctaccccgtgatgatcaaggccagcgccggcggcggcggcaagggcatgagaatcgcctgggacgacgaggagaccagagacggcttcagactgagcagccaggaggccgccagcagcttcggcgacgacagactgctgatcgagaagttcatcgacaaccccagacacatcgagatccaggtgctgggcgacaagcacggcaacgccctgtggctgaacgagagagagtgcagcatccagagaagaaaccagaaggtggtggaggaggcccccagcatcttcctggacgccgagaccagaagagccatgggcgagcaggccgtggccctggccagagccgtgaagtacagcagcgccggcaccgtggagttcctggtggacagcaagaagaacttctacttcctggagatgaacaccagactgcaggtggagcaccccgtgaccgagtgcatcaccggcctggacctggtgcaggagatgatcagagtggccaagggctaccccctgagacacaagcaggccgacatcagaatcaacggctgggccgtggagtgcagagtgtacgccgaggacccctacaagagcttcggcctgcccagcatcggcagactgagccagtaccaggagcccctgcacctgcccggcgtgagagtggacagcggcatccagcccggcagcgacatcagcatctactacgaccccatgatcagcaagctgatcacctacggcagcgacagaaccgaggccctgaagagaatggccgacgccctggacaactacgtgatcagaggcgtgacccacaacatcgccctgctgagagaggtgatcatcaacagcagattcgtgaagggcgacatcagcaccaagttcctgagcgacgtgtaccccgacggcttcaagggccacatgctgaccaagagcgagaagaaccagctgctggccatcgccagcagcctgttcgtggccttccagctgagagcccagcacttccaggagaacagcagaatgcccgtgatcaagcccgacatcgccaactgggagctgagcgtgaagctgcacgacaaggtgcacaccgtggtggccagcaacaacggcagcgtgttcagcgtggaggtggacggcagcaagctgaacgtgaccagcacctggaacctggccagccccctgctgagcgtgagcgtggacggcacccagagaaccgtgcagtgcctgagcagagaggccggcggcaacatgagcatccagttcctgggcaccgtgtacaaggtgaacatcctgaccagactggccgccgagctgaacaagttcatgctggagaaggtgaccgaggacaccagcagcgtgctgagaagccccatgcccggcgtggtggtggccgtgagcgtgaagcccggcgacgccgtggccgagggccaggagatctgcgtgatcgaggccatgaagatgcagaacagcatgaccgccggcaagaccggcaccgtgaagagcgtgcactgccaggccggcgacaccgtgggcgagggcgacctgctggtggagctggagtag

SEQ ID NO: 45296 - DNA, 336 bp, Artificial Sequence
  derived and/or modified sequence
tacaaggtgaacatcctgaccagactggccgccgagctgaacaagttcatgctggagaaggtgaccgaggacaccagcagcgtgctgagaagccccatgcccggcgtggtggtggccgtgagcgtgaagcccggcgacgccgccaccagcagcctgagcgtggagatctgcctgttctggaccttccaggtggccgagggccaggagatctgcgtgatcgaggccatgaagatgcagaacagcatgaccgccggcaagaccggcaccgtgaagagcgtgcactgccaggccggcgacaccgtgggcgagggcgacctgctggtggagctggagtag

SEQ ID NO: 45297 - protein, 480 aa, Artificial Sequence
  derived and/or modified sequence
MIRAAPPPLFLLLLLLLLLVSWASRGEAAPDQDEIQRLPGLAKQPSFRQYSGYLKGSGSKHLHYWFVESQKDPENSPVVLWLNGGPGCSSLDGLLTEHGPFLVQPDGVTLEYNPYSWNLIANVLYLESPAGVGFSYSDDKFYATNDTEVAQSNFEALQDFFRLFPEYKNNKLFLTGESYAGIYIPTLAVLVMQDPSMNLQGLAVGNGLSSYEQNDNSLVYFAYYHGLLGNRLWSSLQTHCCSQNKCNFYDNKDLECVTNLQEVARIVGNSGLNIYNLYAPCAGGVPSHFRYEKDTVVVQDLGNIFTRLPLKRMWHQALLRSGDKVRMDPPCTNTTAASTYLNNPYVRKALNIPEQLPQWDMCNFLVNLQYRRLYRSMNSQYLKLLSSQKYQILLYNGDVDMACNFMGDEWFVDSLNQKMEVQRRPWLVKYGDSGEQIAGFVKEFSHIAFLTIKGAGHMVPTDKPLAAFTMFSRFLNKQPY

SEQ ID NO: 45298 - protein, 289 aa, Artificial Sequence
  derived and/or modified sequence
MIRAAPPPLFLLLLLLLLLVSWASRGEAAPDQDEIQRLPGLAKQPSFRQYSGYLKGSGSKHLHYWFVESQKDPENSPVVLWLNGGPGCSSLDGLLTEHGPFLVQPDGVTLEYNPYSWNLIANVLYLESPAGVGFSYSDDKFYATNDTEVAQSNFEALQDFFRLFPEYKNNKLFLTGESYAGIYIPTLAVLVMQDPSMNLQGLAVGNGLSSYEQNDNSLVYFAYYHGLLGNRLWSSLQTHCCSQNKCNFYDNKDLECVTNLQEVARIVGNSGLNIYNLYAPCAGGVPSHF

SEQ ID NO: 45299 - DNA, 1443 bp, Artificial Sequence
  derived and/or modified sequence
atgatccgggccgccccacctccgctgtttttactgctgttacttctgctgctgctggtgtcctgggcctctcggggtgaagctgcccctgatcaggatgaaattcagagactcccaggccttgccaagcagccatccttccgtcagtatagcggctatctcaaaggctctgggtctaaacatctccactattggtttgtagaaagccaaaaggatccagaaaactctcccgtggtgctgtggctgaacggcggcccaggctgcagcagcctcgatggattattgacggaacacggacctttcctggtgcagcccgacggagttaccttggagtacaatccgtactcttggaatcttatcgccaacgtgctgtatttagagagtcccgcaggagtgggattttcctatagtgacgacaagttctacgcaacaaacgatacggaagtcgcccagtctaattttgaggccttgcaggactttttccggttatttcctgagtacaaaaacaacaagctatttttaacaggggagtcatatgcaggaatatatatccccactctggctgtccttgtaatgcaggacccatcaatgaacctgcagggtctagccgtagggaatgggttatccagttacgagcagaacgacaattctctggtgtactttgcatattaccacgggctcctagggaatcggctatggtccagcctccagacccactgttgctcccagaataagtgcaatttctacgataataaagacctggagtgcgtcacaaatctgcaggaagttgctagaatcgtaggtaatagcggcctcaatatctataacctgtatgcaccatgtgcaggaggagtgccgtctcacttcaggtacgagaaagatacggtggtggtgcaggatctgggcaatatcttcacccgcctgccactcaaacgcatgtggcaccaagccttactgcgcagcggcgacaaagtgcgaatggatcccccatgcacgaacacaacagcagccagtacatatttaaacaatccatacgtaagaaaggctctgaatatacctgaacagctgccacaatgggatatgtgcaatttcctggttaaccttcaatacagacggttatatcggagcatgaacagtcagtatctgaagcttttgtctagtcagaaataccagatcctcctctataacggagacgttgatatggcctgtaattttatgggtgatgagtggtttgtcgactccctgaaccaaaaaatggaagttcagaggaggccctggcttgtaaagtacggtgactccggagaacagatcgcagggttcgtcaaggagttttcgcatatcgcgttcctgacaatcaagggagctgggcacatggtacctaccgataagcctctcgccgcctttactatgttttccagattcctgaataagcagccttactag

SEQ ID NO: 45300 - DNA, 870 bp, Artificial Sequence
  derived and/or modified sequence
atgattagggcagcgccacctccacttttcctcctacttcttttacttctactactggtttcatgggcaagcaggggcgaggccgcccctgaccaagacgaaatccagcgtctgccgggcctcgcaaagcagccatcttttaggcaatattccggctatctcaaaggctcaggatcaaagcacctgcattattggtttgtggagtctcagaaggatcctgaaaattccccagtcgtcctgtggcttaatggaggccccggttgttcatctctggatggcctgttgacggagcacggccccttcctggtgcagcctgacggggttactctggagtacaatccctacagctggaatctgattgcaaatgtgctgtacttggagagccctgctggagttggcttctcttattccgacgataagttttatgccacaaacgacaccgaagtcgctcaaagcaacttcgaagccttgcaggattttttcagacttttcccagagtataaaaataacaaattgttcctgactggcgagagttacgccgggatttacattcccacgctggccgttttagtcatgcaggatccctccatgaatcttcagggccttgccgtagggaatggtctatcaagttacgagcagaatgataattccctggtgtactttgcttactatcatgggctactgggcaatcgcctttggtcttccctccagactcattgttgcagccaaaataaatgtaatttttatgataataaggacttggagtgcgtgactaatcttcaagaggttgctcgaattgtgggcaattccggattgaacatctacaacttgtatgcaccatgtgccgggggcgtccctagccacttttag

SEQ ID NO: 45301 - DNA, 1443 bp, Artificial Sequence
  derived and/or modified sequence
atgatccgggccgcccctcctcctctcttcctgctgctgctgctgctgctgctgctggtgtcctgggccagcagaggagaggccgccccagaccaggatgagatccagaggctgcccggcctggccaagcagcccagcttccggcagtacagcggctacctgaagggcagcggcagcaagcacctgcactactggtttgtggagagccagaaggaccctgagaacagccctgtggtgctgtggctgaatggaggccctggctgcagcagcctggatggcctgctgacagagcacggccccttcctggtgcagccagatggagtgaccctggagtacaacccctacagctggaacctgattgccaacgtgctgtacctggagagccctgctggggtgggcttctcctacagtgatgacaagttctacgccaccaatgacacagaggtggcccagagcaactttgaggccctgcaggacttcttccgcctcttccctgagtacaagaacaacaagctgttcctgactggagagagctatgccggcatctacatccccaccctggccgtgctggtgatgcaggaccccagcatgaacctgcagggcctggccgtgggcaatggcctgagcagctatgagcagaatgacaacagcctggtgtactttgcctactaccacggcctgctgggcaaccggctgtggagcagcctgcagacccactgctgcagccagaacaagtgcaacttctatgacaacaaggacctggagtgtgtgaccaacctgcaggaggtggcccgcatcgtgggcaacagcggcctgaacatctacaacctgtatgccccctgtgccggcggcgtgcccagccacttccgctatgagaaggacacagtggtggtgcaggacctgggcaacatcttcacccggctgcccctgaagaggatgtggcaccaggccctgctgcggagcggggacaaggtgaggatggaccccccctgcaccaacaccacagctgccagcacctacctgaacaacccctacgtgaggaaggccctgaacatccctgagcagctgccccagtgggacatgtgcaacttcctggtgaacctgcagtacagaagactctaccgctccatgaacagccagtacctgaagctgctgagcagccagaagtaccagatcctgctgtacaatggagatgtggacatggcctgcaacttcatgggagatgagtggtttgtggacagcctgaaccagaagatggaggtgcagaggcggccctggctggtgaagtacggggacagcggggagcagattgctggctttgtgaaggagttcagccacatcgccttcctgaccatcaagggagctggccacatggtgcccacagacaagcccctggccgccttcaccatgttcagccgcttcctgaacaagcagccctactag

SEQ ID NO: 45302 - DNA, 870 bp, Artificial Sequence
  derived and/or modified sequence
atgatccgggccgcccctcctcctctcttcctgctgctgctgctgctgctgctgctggtgtcctgggccagcagaggagaggccgccccagaccaggatgagatccagaggctgcccggcctggccaagcagcccagcttccggcagtacagcggctacctgaagggcagcggcagcaagcacctgcactactggtttgtggagagccagaaggaccctgagaacagccctgtggtgctgtggctgaatggaggccctggctgcagcagcctggatggcctgctgacagagcacggccccttcctggtgcagccagatggagtgaccctggagtacaacccctacagctggaacctgattgccaacgtgctgtacctggagagccctgctggggtgggcttctcctacagtgatgacaagttctacgccaccaatgacacagaggtggcccagagcaactttgaggccctgcaggacttcttccgcctcttccctgagtacaagaacaacaagctgttcctgactggagagagctatgccggcatctacatccccaccctggccgtgctggtgatgcaggaccccagcatgaacctgcagggcctggccgtgggcaatggcctgagcagctatgagcagaatgacaacagcctggtgtactttgcctactaccacggcctgctgggcaaccggctgtggagcagcctgcagacccactgctgcagccagaacaagtgcaacttctatgacaacaaggacctggagtgtgtgaccaacctgcaggaggtggcccgcatcgtgggcaacagcggcctgaacatctacaacctgtatgccccctgtgccggcggcgtgcccagccacttctag

SEQ ID NO: 45303 - DNA, 1443 bp, Artificial Sequence
  derived and/or modified sequence
atgatccgggccgcccccccccccctgttcctgctgctgctgctgttgctgctcctggtgagctgggccagtaggggcgaggcagcccctgaccaggatgagatacagcgcctcccaggtctggccaaacagccctcctttcgacagtacagcggctatttgaaaggaagcgggagtaagcatttgcattattggttcgttgaaagtcagaaggacccagagaactcacccgtcgtcctgtggctaaacggcggccctggctgttcttcccttgacggcctcctcacggaacacggcccatttctcgttcagcctgatggggtcacccttgaatataacccatactcctggaatctcattgcaaatgtgctgtacttagagtcgccagccggggtgggattttcatacagtgatgacaagttctatgcgactaatgacactgaggtggcgcagagcaattttgaagcattgcaggatttctttcggctgtttcccgagtacaaaaataataagctgtttttaacaggagagtcttatgcaggcatctacatcccgacgctcgccgtgctcgtgatgcaggacccttccatgaatttgcagggactggccgtgggaaatggtctaagttcctacgagcagaatgataactccctggtctactttgcctactaccatgggcttctcgggaacagactgtggtcgagcctgcaaactcattgttgttcgcagaacaaatgcaatttctatgacaacaaggatctggaatgcgttacgaacttgcaagaagtggcaaggatcgtgggaaactcaggactcaatatctacaacctgtacgccccctgtgccggtggcgtcccctctcatttccgctacgagaaagatacagtggtcgttcaggacctaggcaatatctttaccaggctgcccttgaagagaatgtggcaccaggccctcttgcggtcaggcgacaaggtgcgcatggaccccccatgcactaataccacagccgcttccacctatctcaacaatccctatgttagaaaagcactgaatattccagagcagttgccccagtgggacatgtgcaatttcctcgtgaaccttcaatatcgccgcctgtacagatcaatgaactcacagtatttgaagctgctttcttcacagaaatatcagattctgctgtataatggcgatgttgatatggcctgtaatttcatgggcgacgagtggttcgtggactctcttaaccagaagatggaggtccaacgacgaccttggctggttaagtatggagactctggagagcagatcgcaggtttcgtgaaggagttcagccatatagcttttcttactatcaaaggggctggacacatggttccaacagataagccactggctgctttcacaatgtttagccgattcttgaataagcagccatactag

SEQ ID NO: 45304 - DNA, 870 bp, Artificial Sequence
  derived and/or modified sequence
atgatccgggccgcccccccccccctgttcctgctgctgctgctgctcctgcttttggttagttgggcctctaggggcgaggccgccccggatcaagatgagatccagcggttacctgggctcgctaagcagccaagcttccgccagtacagtggctatttaaagggctccggcagcaaacacctgcactactggttcgtggagtcgcaaaaggatccagaaaactctcccgtggttctctggctgaacggaggcccaggatgctcatccttagacggactcctgacagaacatggaccatttctggtacaaccggacggcgttactctcgagtataatccatactcttggaatctcatcgccaatgtactgtacctcgaaagccccgctggcgttgggtttagctattccgacgacaagttctacgctaccaacgacactgaggttgctcagagcaatttcgaggctctgcaagacttttttagacttttccctgaatataaaaacaacaagctgttcctcacaggcgagtcatatgcgggtatttacattccaaccttggccgtgttagttatgcaggatccctccatgaacctgcaagggctcgctgtggggaatggtctgtctagttatgagcagaacgataactccctggtgtacttcgcctattatcatggactgctgggaaacaggctctggtcatctcttcaaactcattgttgcagtcaaaacaagtgcaacttctacgacaataaagacctggaatgtgtcacgaatttgcaggaggtggcacgcattgtggggaactcaggtttgaacatctacaatctctatgccccttgtgccgggggggtgccatcacatttttag

SEQ ID NO: 45305 - DNA, 1443 bp, Artificial Sequence
  derived and/or modified sequence
atgattcgtgcagctccccctcccctgttcctgctgttgctcctcctcctgctcctcgtatcgtgggcttcacgcggtgaggcagctcccgaccaggatgaaatccagcggttacccggattagccaagcagccctccttcagacaatacagcggatacttaaagggtagtgggtcaaagcatctacattactggtttgtcgagtctcagaaggacccagagaattcgcccgtggtgctctggctcaatgggggacccggatgttcatcactagacggtctgctgactgaacatggcccatttctggtccaaccagatggcgttaccctggagtacaacccttattcctggaatttgatcgctaacgtgctctacctggaaagcccagctggcgtagggtttagctacagcgacgacaaattttacgccaccaacgacactgaagtggcccagtcaaattttgaggcgctccaagatttcttccggcttttcccggaatataaaaataataagctgtttttgaccggtgagtcgtatgccggaatctacatacccacacttgctgtgctcgtaatgcaggatccttcgatgaacctccaggggctcgcggtgggcaacggcctgtctagctacgagcaaaacgataacagtctggtctattttgcctactatcacgggctcctgggcaacaggttatggtcctctttgcaaactcactgctgctctcagaacaagtgcaatttctacgataataaagacctggagtgtgtgaccaaccttcaggaggtggcaaggatcgtcgggaactctggattaaatatctataacctgtatgccccttgcgccggtggcgtgccttcgcattttagatacgaaaaagataccgtagtagtgcaggacctgggaaatatctttacccggttgccgctgaagcggatgtggcaccaggcactattacgctcaggcgataaagtacggatggatcctccatgcactaacacaactgcggcatccacctatctgaacaacccttatgtgaggaaagctcttaacattccagagcagttaccacagtgggacatgtgtaacttcctggtgaacctccagtatagaagactctaccggagcatgaattcacagtatctgaaactgctttccagccaaaagtatcagattctgctgtacaacggggatgtagatatggcctgcaactttatgggggacgaatggttcgtggacagtctcaatcagaaaatggaagtccaacgtcgaccatggttggtgaagtatggggacagcggtgagcagatagccggttttgtgaaggagttttcccacatcgcctttcttaccatcaagggtgccggacacatggtaccgaccgataagcccctcgccgcttttaccatgtttagtcggttcctgaataaacagccatattag

SEQ ID NO: 45306 - DNA, 870 bp, Artificial Sequence
  derived and/or modified sequence
atgattagagcagccccaccccctctttttcttctcctcttgctcttactgctcctggtctcctgggcaagccgaggcgaagccgctcccgaccaggatgaaatccagcggctcccaggtctggcaaagcaaccctctttcaggcagtactccggctatctcaaagggagcggatctaagcaccttcattattggttcgtagagtctcagaaagatccagaaaattctccagtggtgttgtggctgaatgggggtcctggctgttcaagtctggacggactcctaacagaacacggcccttttctggtccaaccggatggggttacactggagtacaatccctattcatggaacttgatcgctaatgtgctgtacctggaatccccagcaggagtggggttttcttactccgatgacaaattctatgcaaccaacgacaccgaggtggcgcagtcaaacttcgaggcccttcaggatttctttagactgtttccagagtacaagaacaataagttatttctgaccggggagtcctacgcaggcatttatattccaactctggctgtgcttgtaatgcaggatccatctatgaacctacagggcttggccgtcggcaacggtctgagctcttacgaacagaatgacaatagcttagtttatttcgcatactaccatgggctgctaggtaaccggctctggagtagcctgcagacacactgctgttcccagaataagtgcaatttctacgataacaaagatcttgaatgtgtgaccaatctgcaggaggtagcgaggatagtggggaacagtgggttgaatatctacaatctttacgctccatgtgctgggggagtgccctcccatttctag

SEQ ID NO: 45307 - DNA, 1024 bp, Artificial Sequence
  derived and/or modified sequence
agcccgggatcggtgcgcggcagaggaggctcgcgggtgggagctggcgctggggccggggcttccctcgcggaggcgccgccagcaactccccgggggctgctgcacggaagcgctgaggagcgagtcaacagcccctctgctgcctcccgtagatgatccgagccgcgccgccgccgctgttcctgctgctgctgctgctgctgctgctagtgtcctgggcgtcccgaggcgaggcagcccccgaccaggacgagatccagcgcctccccgggctggccaagcagccgtctttccgccagtactccggctacctcaaaggctccggctccaagcacctccactactggtttgtggagtcccagaaggatcccgagaacagccctgtggtgctttggctcaatgggggtcccggctgcagctcactagatgggctcctcacagagcatggccccttcctggtccagccagatggtgtcaccctggagtacaacccctattcttggaatctgattgccaatgtgttatacctggagtccccagctggggtgggcttctcctactccgatgacaagttttatgcaactaatgacactgaggtcgcccagagcaattttgaggcccttcaagatttcttccgcctctttccggagtacaagaacaacaaacttttcctgaccggggagagctatgctggcatctacatccccaccctggccgtgctggtcatgcaggatcccagcatgaaccttcaggggctggctgtgggcaatggactctcctcctatgagcagaatgacaactccctggtctactttgcctactaccatggccttctggggaacaggctttggtcttctctccagacccactgctgctctcaaaacaagtgtaacttctatgacaacaaagacctggaatgcgtgaccaatcttcaggaagtggcccgcatcgtgggcaactctggcctcaacatctacaatctctatgccccgtgtgctggaggggtgcccagccattttag

SEQ ID NO: 45308 - DNA, 1443 bp, Artificial Sequence
  derived and/or modified sequence
atgatcagagccgcccccccccccctgttcctgctgctgctgctgctgctgctgctggtgagctgggccagcagaggcgaggccgcccccgaccaggacgagatccagagactgcccggcctggccaagcagcccagcttcagacagtacagcggctacctgaagggcagcggcagcaagcacctgcactactggttcgtggagagccagaaggaccccgagaacagccccgtggtgctgtggctgaacggcggccccggctgcagcagcctggacggcctgctgaccgagcacggccccttcctggtgcagcccgacggcgtgaccctggagtacaacccctacagctggaacctgatcgccaacgtgctgtacctggagagccccgccggcgtgggcttcagctacagcgacgacaagttctacgccaccaacgacaccgaggtggcccagagcaacttcgaggccctgcaggacttcttcagactgttccccgagtacaagaacaacaagctgttcctgaccggcgagagctacgccggcatctacatccccaccctggccgtgctggtgatgcaggaccccagcatgaacctgcagggcctggccgtgggcaacggcctgagcagctacgagcagaacgacaacagcctggtgtacttcgcctactaccacggcctgctgggcaacagactgtggagcagcctgcagacccactgctgcagccagaacaagtgcaacttctacgacaacaaggacctggagtgcgtgaccaacctgcaggaggtggccagaatcgtgggcaacagcggcctgaacatctacaacctgtacgccccctgcgccggcggcgtgcccagccacttcagatacgagaaggacaccgtggtggtgcaggacctgggcaacatcttcaccagactgcccctgaagagaatgtggcaccaggccctgctgagaagcggcgacaaggtgagaatggaccccccctgcaccaacaccaccgccgccagcacctacctgaacaacccctacgtgagaaaggccctgaacatccccgagcagctgccccagtgggacatgtgcaacttcctggtgaacctgcagtacagaagactgtacagaagcatgaacagccagtacctgaagctgctgagcagccagaagtaccagatcctgctgtacaacggcgacgtggacatggcctgcaacttcatgggcgacgagtggttcgtggacagcctgaaccagaagatggaggtgcagagaagaccctggctggtgaagtacggcgacagcggcgagcagatcgccggcttcgtgaaggagttcagccacatcgccttcctgaccatcaagggcgccggccacatggtgcccaccgacaagcccctggccgccttcaccatgttcagcagattcctgaacaagcagccctactag

SEQ ID NO: 45309 - DNA, 870 bp, Artificial Sequence
  derived and/or modified sequence
atgatcagagccgcccccccccccctgttcctgctgctgctgctgctgctgctgctggtgagctgggccagcagaggcgaggccgcccccgaccaggacgagatccagagactgcccggcctggccaagcagcccagcttcagacagtacagcggctacctgaagggcagcggcagcaagcacctgcactactggttcgtggagagccagaaggaccccgagaacagccccgtggtgctgtggctgaacggcggccccggctgcagcagcctggacggcctgctgaccgagcacggccccttcctggtgcagcccgacggcgtgaccctggagtacaacccctacagctggaacctgatcgccaacgtgctgtacctggagagccccgccggcgtgggcttcagctacagcgacgacaagttctacgccaccaacgacaccgaggtggcccagagcaacttcgaggccctgcaggacttcttcagactgttccccgagtacaagaacaacaagctgttcctgaccggcgagagctacgccggcatctacatccccaccctggccgtgctggtgatgcaggaccccagcatgaacctgcagggcctggccgtgggcaacggcctgagcagctacgagcagaacgacaacagcctggtgtacttcgcctactaccacggcctgctgggcaacagactgtggagcagcctgcagacccactgctgcagccagaacaagtgcaacttctacgacaacaaggacctggagtgcgtgaccaacctgcaggaggtggccagaatcgtgggcaacagcggcctgaacatctacaacctgtacgccccctgcgccggcggcgtgcccagccacttctag

SEQ ID NO: 45310 - protein, 354 aa, Artificial Sequence
  derived and/or modified sequence
MESIFHEKQEGSLCAQHCLNNLLQGEYFSPVELSSIAHQLDEEERMRMAEGGVTSEDYRTFLQVISNALKVWGLELILFNSPEYQRLRIDPINERSFICNYKEHWFTVRKLGKQWFNLNSLLTGPELISDTYLALFLAQLQQEGYSIFVVKGDLPDCEADQLLQMIRVQQMHRPKLIGEELAQLKEQRVHKTDLERVLEANDGSGMLDEDEEDLQRALALSRQEIDMEDEEADLRRAIQLSMQGSSRNISQDMTQTSGTNLTSEELRKRREAYFEKDQHFHILKQQQKQQQQQQQQQQGDLSGQSSHPCERPATSSGALGSDLGDAMSEEDMLQAAVTMSLETVRNDLKTEGKK

SEQ ID NO: 45311 - protein, 346 aa, Artificial Sequence
  derived and/or modified sequence
MESIFHEKQEGSLCAQHCLNNLLQGEYFSPVELSSIAHQLDEEERMRMAEGGVTSEDYRTFLQVISNALKVWGLELILFNSPEYQRLRIDPINERSFICNYKEHWFTVRKLGKQWFNLNSLLTGPELISDTYLALFLAQLQQEGYSIFVVKGDLPDCEADQLLQMIRVQQMHRPKLIGEELAQLKEQRVHKTDLERVLEANDGSGMLDEDEEDLQRALALSRQEIDMEDEEADLRRAIQLSMQGSSRNISQDMTQTSGTNLTSEELRKRREAYFEKQQQKQQQQQQQQQQGDLSGQSSHPCERPATSSGALGSDLGDAMSEEDMLQAAVTMSLETVRNDLKTEGKK

SEQ ID NO: 45312 - DNA, 1065 bp, Artificial Sequence
  derived and/or modified sequence
atggagagtattttccatgagaagcaggaggggagcttgtgcgcccagcattgtctgaacaatcttcttcagggagagtacttttctcccgtggagctgagttctatcgcgcatcagttggatgaagaggaacgcatgagaatggccgaagggggagtaaccagcgaagattaccggactttcttacaagtgatcagtaatgctttgaaggtgtggggcctagaactcatcctgttcaacagcccagagtatcagagattgcgtatcgacccaatcaacgaacgttccttcatctgtaattacaaggaacattggtttaccgtgaggaagcttggaaagcaatggttcaacctaaattctttgctcactggcccagagctgattagcgatacctacttggcattgtttctcgcgcagctccagcaggaaggatattccatctttgtggtgaaaggagacttgcccgattgcgaagctgatcagttgctgcaaatgatccgggtgcaacagatgcatcggccaaaacttatcggcgaagaactcgcccagctgaaggaacagcgggtacacaaaaccgacctcgaacgtgttctggaggctaacgacggttccggaatgctagatgaagacgaggaggatctgcagcgtgctttggccctctcccggcaggagattgacatggaagatgaggaggccgacctgaggagggccattcagctgagcatgcagggtagttcccgaaacatttcccaggatatgacacagacatctgggacgaatcttactagcgaggaactgaggaaaagacgcgaggcctactttgagaaggaccagcattttcatattctaaaacagcagcaaaagcaacaacagcagcagcagcagcagcagcagggtgatctcagtgggcagagttctcatccatgcgaacgcccagccacatctagtggagccctgggttctgacctgggagatgctatgagcgaggaagatatgctacaggccgccgtgacaatgagcctggagaccgtcagaaatgacttgaagactgagggaaaaaaatag

SEQ ID NO: 45313 - DNA, 1041 bp, Artificial Sequence
  derived and/or modified sequence
atggagtccatctttcacgagaaacaagaaggctcactgtgcgcccagcactgcctaaacaatctgctgcagggggaatatttctctcctgttgagctgtcttccatagcccatcagctggacgaggaggagaggatgcgcatggccgagggaggggttacatctgaggattatcgaaccttcctgcaggtgatttctaacgccctgaaggtgtgggggttagaactgatcctgtttaatagccccgagtatcaaagacttcgtattgatccaataaacgagagatcgtttatttgtaattacaaagaacactggtttaccgttcgaaagctgggtaagcagtggtttaatctaaactccttactcaccgggcccgagctgatatctgacacttacctggctttgtttcttgcccagctgcaacaggagggttacagtatttttgtcgtgaagggagatctgcctgattgcgaagcagaccagctattgcagatgatcagagtccaacagatgcacagaccaaagctgataggagaagagcttgcccagctgaaggaacaacgcgtccataagactgatctggaaagagtgttagaagccaatgacggatctggcatgctcgatgaggacgaagaggatctacagagggcactggccctcagccgccaggagattgacatggaagacgaggaggccgacctgaggcgggctatacaactatctatgcaaggttcttctagaaacatttctcaagacatgactcagacgagcgggaccaatcttacttcagaggagctccgaaagcgtcgggaggcgtattttgagaagcagcaacagaaacagcagcagcagcagcagcagcagcagcagggcgacctgagcggtcagtccagtcacccttgtgaacgacccgcaacatcctcaggagcgcttggctccgatctgggggatgcgatgtcagaagaggacatgctccaggctgccgtgaccatgagtctcgaaacagttcgaaacgatctgaagaccgaggggaaaaaatag

SEQ ID NO: 45314 - DNA, 1065 bp, Artificial Sequence
  derived and/or modified sequence
atggagagcatcttccacgagaagcaggagggcagcctgtgtgcccagcactgcctgaacaacctgctgcagggcgagtacttcagccctgtggagctgagcagcatcgcccaccagctggatgaggaggagaggatgaggatggccgagggcggcgtgaccagcgaggactaccgcaccttcctgcaggtgatcagcaatgccctgaaggtgtggggcctggagctgatcctcttcaacagccctgagtaccagaggctgagaattgaccccatcaatgaaagaagcttcatctgcaactacaaggagcactggttcaccgtgaggaagctgggcaagcagtggttcaacctgaacagcctgctgactggacctgagctgatcagtgacacctacctggccctcttcctggcccagctgcagcaggagggctacagcatctttgtggtgaagggggacctgcctgactgtgaggccgaccagctgctgcagatgatccgggtgcagcagatgcaccggcccaagctgattggagaggagctggcccagctgaaggagcagagggtgcacaagacagacctggagcgggtgctggaggccaatgatggcagcggcatgctggatgaagatgaggaggacctgcagagggccctggccctgagccggcaggagattgacatggaggatgaggaggccgacctgcggcgggccatccagctgtccatgcagggcagcagcaggaacatcagccaggacatgacccagaccagcggcaccaacctgaccagcgaggagctgaggaagagaagagaggcctactttgagaaggaccagcacttccacatcctgaagcagcagcagaagcagcagcagcagcagcagcagcagcagcagggcgacctgagcggccagagcagccacccctgtgagaggcctgccaccagcagcggggccctgggcagtgacctgggagatgccatgtctgaggaggacatgctgcaggccgctgtgaccatgagcctggagaccgtgagaaatgacctgaagacagagggcaagaagtag

SEQ ID NO: 45315 - DNA, 1041 bp, Artificial Sequence
  derived and/or modified sequence
atggagagcatcttccacgagaagcaggagggcagcctgtgtgcccagcactgcctgaacaacctgctgcagggcgagtacttcagccctgtggagctgagcagcatcgcccaccagctggatgaggaggagaggatgaggatggccgagggcggcgtgaccagcgaggactaccgcaccttcctgcaggtgatcagcaatgccctgaaggtgtggggcctggagctgatcctcttcaacagccctgagtaccagaggctgagaattgaccccatcaatgaaagaagcttcatctgcaactacaaggagcactggttcaccgtgaggaagctgggcaagcagtggttcaacctgaacagcctgctgactggacctgagctgatcagtgacacctacctggccctcttcctggcccagctgcagcaggagggctacagcatctttgtggtgaagggggacctgcctgactgtgaggccgaccagctgctgcagatgatccgggtgcagcagatgcaccggcccaagctgattggagaggagctggcccagctgaaggagcagagggtgcacaagacagacctggagcgggtgctggaggccaatgatggcagcggcatgctggatgaagatgaggaggacctgcagagggccctggccctgagccggcaggagattgacatggaggatgaggaggccgacctgcggcgggccatccagctgtccatgcagggcagcagcaggaacatcagccaggacatgacccagaccagcggcaccaacctgaccagcgaggagctgaggaagagaagagaggcctactttgagaagcagcagcagaagcagcagcagcagcagcagcagcagcagcagggcgacctgagcggccagagcagccacccctgtgagaggcctgccaccagcagcggggccctgggcagtgacctgggagatgccatgtctgaggaggacatgctgcaggccgctgtgaccatgagcctggagaccgtgagaaatgacctgaagacagagggcaagaagtag

SEQ ID NO: 45316 - DNA, 1065 bp, Artificial Sequence
  derived and/or modified sequence
atggagagcatcttccacgagaagcaggagggcagcctgtgcgcccagcactgcctaaataatcttctgcagggggaatatttcagccctgtagagctgagcagtattgctcaccagctggacgaggaggagcgaatgagaatggccgaaggtggagtcacatctgaagactaccgcaccttcctacaggtcatcagcaatgcacttaaagtgtggggcctggagctcatattattcaattctcctgaataccagaggcttaggatagacccaatcaatgaaagatccttcatctgtaattacaaggagcattggtttactgtcaggaagctaggaaagcagtggttcaatctcaattctttactcaccggccctgaattgatctctgatacatatctcgccctgtttcttgcccagctgcaacaggaaggctactctatctttgtggttaaaggggatctgcctgactgcgaggctgaccaacttttgcagatgatccgagtgcagcagatgcacagacccaaactcataggcgaggagcttgcacagctgaaagagcaacgcgtgcacaagacagaccttgagagagtcctggaagccaatgacggaagcggaatgctagacgaggacgaagaggacctacagagggctctggcattaagtaggcaggagatagatatggaggacgaggaggcagatctgaggagggcaattcaactctcaatgcagggatccagtcgaaacattagccaggacatgacgcagacaagcggaaccaacctgacgtccgaagagctgaggaagaggagggaggcttattttgagaaagatcaacactttcacatcctgaagcaacagcaaaagcagcagcaacaacagcagcagcaacaacagggggatctgagcgggcaatcctcacacccgtgcgagaggccagctacttcatctggagccctgggatcggacctgggagacgcaatgtccgaagaggatatgctgcaggccgctgtgaccatgagtcttgaaactgtcagaaacgatttaaaaacagagggcaaaaagtag

SEQ ID NO: 45317 - DNA, 1041 bp, Artificial Sequence
  derived and/or modified sequence
atggagagcatcttccacgagaagcaggagggcagcctgtgcgcccagcattgtttgaataatctcttacagggagagtattttagtccagtagaattgagctccattgctcatcaacttgacgaggaggagcgaatgagaatggctgaaggcggagtgacctccgaggactaccgaacattcctgcaggtcatcagtaatgcattaaaggtctggggactggagttaattctttttaactctcccgagtatcagcgacttaggatagaccctatcaatgagcgttcctttatttgtaactataaggaacattggttcactgtgaggaagcttgggaagcagtggtttaacttgaattcgctcctgactggcccagagttgatatctgatacttacttagcacttttcctggctcagttgcagcaggaggggtatagcatcttcgtggtgaagggagatctccccgattgtgaggccgaccagttgctgcagatgattagggtgcaacagatgcaccggcccaaactgattggagaggaacttgcacaactcaaggagcagagggtccacaaaacggatctggaaagggtcctagaggcaaatgatggttctggaatgctggacgaggatgaggaggatctgcaacgggcactagccctgtcaagacaggagatcgacatggaggacgaggaggcagacttgagacgagctattcagttaagtatgcagggatcttcgagaaacatctcacaggacatgacccagactagcggaaccaaccttacatccgaggaactgcgaaaacgacgggaggcctacttcgagaagcagcagcaaaagcagcaacagcaacaacaacaacagcagcagggcgacttatctggccagagctctcacccctgcgagcggcccgctacatcttctggcgccttaggcagcgacctcggcgacgccatgtcggaagaagatatgctgcaggccgctgtcacaatgagtctcgagaccgtgcgcaacgacttaaaaacggaaggaaagaagtag

SEQ ID NO: 45318 - DNA, 1065 bp, Artificial Sequence
  derived and/or modified sequence
atggagtctatcttccacgaaaagcaggagggatcactttgtgcccagcactgtctgaacaatttgctacaaggagaatactttagtccagtggagctgtcttctattgcccatcagctggacgaggaagagcggatgcggatggccgagggcggtgtcacctcagaggattatcgtactttcctgcaagttattagcaacgcattgaaggtctgggggctcgagctcattcttttcaacagccccgaataccagcgtctcaggatagaccccatcaacgaacgtagctttatctgcaattacaaagaacactggtttactgtgcgtaaactgggaaagcagtggttcaatctgaatagtttactgacaggtccggaactgataagcgacacctacctcgccctgttccttgcccaactgcagcaggagggctatagcatcttcgtggtaaagggggacctgccagattgtgaggcagaccaactgttacaaatgattcgtgtgcaacagatgcataggcctaaactgattggagaggagcttgctcagttaaaagagcaaagagtgcataagaccgacttggaaagggtcctggaggctaatgacggtagcggaatgttggacgaggacgaggaagacctacaaagggcactcgccctgtcacgtcaggaaatcgatatggaggacgaggaggctgatttacgtagagctatccagctgagcatgcagggatcgagtcgaaacatcagtcaggatatgacgcagactagtgggaccaatcttacctctgaagagctgagaaagaggagagaagcttacttcgaaaaggatcagcactttcatatcctgaagcagcagcagaaacagcaacagcagcagcaacaacagcagcagggagacctctccggacagagctcacacccttgtgagcggccagcaacaagctccggagcattgggaagtgacttaggcgatgccatgagtgaagaagatatgctgcaggctgctgtgaccatgtccctcgaaaccgtcagaaatgatcttaaaactgagggaaaaaaatag

SEQ ID NO: 45319 - DNA, 1041 bp, Artificial Sequence
  derived and/or modified sequence
atggagtctatcttccacgaaaagcaggaaggatcattatgtgctcagcattgcctgaacaatctcctgcagggtgagtattttagcccagtcgaactgagctcaattgcacatcagctggacgaggaggaacgtatgagaatggcggaaggaggagtaacgtctgaggattatcggacatttttacaggtgatttccaacgcgctgaaggtgtggggcctggagttaattctgttcaacagccccgaatatcaacggctcagaatcgaccccattaatgagaggtctttcatctgcaactacaaagaacactggttcaccgtgaggaagcttggtaaacagtggttcaacctaaattcactgttgacaggtcctgagctgatttctgacacatacttggcgctgtttctagctcagctgcagcaagaaggctattcaatcttcgtggtgaaaggagacttacccgattgcgaggctgaccagctgctgcagatgattcgggtacaacaaatgcaccggcctaagctgattggggaggagcttgcccagctcaaggagcagagggtgcataagacagatctggaacgcgtcttggaagccaatgacgggagcggcatgttggatgaagatgaggaagatctccagcgtgccctggcactttcccgacaagagatcgacatggaggacgaagaagccgacttacgtagggccatccagctgagcatgcagggatcttcgcggaacataagccaggacatgactcagacttctggaacaaatctaacctcggaggaactgcgcaagcgtcgtgaggcgtatttcgagaagcagcaacagaaacaacagcagcagcaacaacagcagcagcagggggacctgtctggtcaatcaagtcacccgtgtgaacgcccagccacctctagcggggctttgggatccgatctcggcgacgcaatgtccgaagaagatatgcttcaggccgcagtcaccatgtcactcgagaccgtgcgcaacgacttaaaaaccgaaggcaagaaatag

SEQ ID NO: 45320 - DNA, 6902 bp, Artificial Sequence
  derived and/or modified sequence
gagaggggcagggggcggagctggagggggtggttcggcgtgggggccgttggctccagacaaataaacatggagtccatcttccacgagaaacaagaaggctcactttgtgctcaacattgcctgaataacttattgcaaggagaatattttagccctgtggaattatcctcaattgcacatcagctggatgaggaggagaggatgagaatggcagaaggaggagttactagtgaagattatcgcacgtttttacaggttataagcaatgccttgaaagtttggggtttagaactaatcctgttcaacagtccagagtatcagaggctcaggatcgatcctataaatgaaagatcatttatatgcaattataaggaacactggtttacagttagaaaattaggaaaacagtggtttaacttgaattctctcttgacgggtccagaattaatatcagatacatatcttgcacttttcttggctcaattacaacaggaaggttattctatatttgtcgttaagggtgatctgccagattgcgaagctgaccaactcctgcagatgattagggtccaacagatgcatcgaccaaaacttattggagaagaattagcacaactaaaagagcaaagagtccataaaacagacctggaacgagtgttagaagcaaatgatggctcaggaatgttagacgaagatgaggaggatttgcagagggctctggcactaagtcgccaagaaattgacatggaagatgaggaagcagatctccgcagggctattcagctaagtatgcaaggtagttccagaaacatatctcaagatatgacacagacatcaggtacaaatcttacttcagaagagcttcggaagagacgagaagcctactttgaaaaggatcagcacttccatattttaaaacagcagcaaaagcagcaacagcagcagcagcagcagcagcagggggacctatcaggacagagttcacatccatgtgaaaggccagccaccagttcaggagcacttgggagtgatctaggtgatgctatgagtgaagaagacatgcttcaggcagctgtgaccatgtctttagaaactgtcagaaatgatttgaaaacagaaggaaaaaaataatacctttaaaaaataatttagatattcatactttccaacattatcctgtgtgattacagcatagggtccactttggtaatgtgtcaaagagatgaggaaataagacttttagcggtttgcaaacaaaatgatgggaaagtggaacaatgcgtcggttgtaggactaaataatgatcttccaaatattagccaaagaggcattcagcaattaaagacatttaaaatagttttctaaatgtttctttttcttttttgagtgtgcaatatgtaacatgtctaaagttagggcatttttcttggatctttttgcagactagctaattagctctcgcctcaggctttttccatatagtttgttttctttttctgtcttgtaggtaagttggctcacatcatgtaatagtggctttcatttcttattaaccaaattaacctttcaggaaagtatctctactttcctgatgttgataatagtaatggttctagaaggatgaacagttctcccttcaactgtataccgtgtgctccagtgttttcttgtgttgttttctctgatcacaacttttctgctacctggttttcattattttcccacaattcttttgaaagatggtaatcttttctgaggtttagcgttttaagccctacgatgggatcattatttcatgactggtgcgttcctaaactctgaaatcagccttgcacaagtacttgagaataaatgagcattttttaaaatgtgtgagcatgtgctttcccagatgctttatgaatgtcttttcacttatatcaaaaccttacagctttgttgcaaccccttcttcctgcgccttattttttcctttcttctccaattgagaaaactaggagaagcatagtatgcaggcaagtctccttctgttagaagactaaacatacgtacccaccatgaatgtatgatacatgaaatttggccttcaattttaatagcagttttattttattttttctcctatgactggagctttgtgttctctttacagttgagtcatggaatgtaggtgtctgcttcacatcttttagtaggtatagcttgtcaaagatggtgatctggaacatgaaaataatttactaatgaaaatatgtttaaatttatactgtgatttgacacttgcatcatgtttagatagcttaagaacaatggaagtcacagtacttagtggatctataaataagaaagtccatagttttgataaatattctctttaattgagatgtacagagagtttcttgctgggtcaataggatagtatcattttggtgaaaaccatgtctctgaaattgatgttttagtttcagtgttccctatccctcattctccatctccttttgaagctcttttgaatgttgaattgttcataagctaaaatccaagaaatttcagctgacaacttcgaaaattataatatggtatattgccctcctggtgtgtggctgcacacattttatcagggaaagttttttgatctaggatttattgctaactaactgaaaagagaagaaaaaatatcttttatttatgattataaaatagctttttcttcgatataacagattttttaagtcattattttgtgccaatcagttttctgaagtttcccttacacaaaaggatagctttattttaaaatctaaagtttcttttaatagttaaaaatgtttcagaagaattataaaactttaaaactgcaagggatgttggagtttagtactactccctcaagatttaaaaagctaaatattttaagactgaacatttatgttaattattaccagtgtgtttgtcatattttccatggatatttgttcattacctttttccattgaaaagttacattaaacttttcatacacttgaattgatgagctacctaatataaaaatgagaaaaccaatatgcattttaaagttttaactttagagtttataaagttcatatataccctagttaaagcacttaagaaaatatggcatgtttgacttttagttcctagagagtttttgtttttgtttttgtttttttttgagacggagtcttgctatgtctcccaggctggagggcagtggcatgatctcggctcactacaacttccacctcccgggttcaagcaattctcctgcctcagcctccagagtagctgggattacaggcgcccaccaccacacccggcagatttttgtatttttggtagagacgcggtttcatcatgtttggccaggctggtctcgaactcctgacctcaggtgatccgcctgccttggcctcccaaagtgttgggattacaggcatgagccactgcgcctggccagctagagagtttttaaagcagagctgagcacacactggatgcgtttgaatgtgtttgtgtagtttgttgtgaaattgttacatttagcaggcagatccagaagcactagtgaactgtcatcttggtggggttggcttaaatttaattgactgtttagattccatttcttaattgattggccagtatgaaaagatgccagtgcaagtaaccatagtatcaaaaaagttaaaaattattcaaagctatagtttatacatcaggtactgccatttactgtaaaccacctgcaagaaagtcaggaacaactaaattcacaagaactgtcctgctaagaagtgtattaaagatttccattttgttttactaattgggaacatcttaatgtttaatatttaaactattggtatcatttttctaatgtataatttgtattactgggatcaagtatgtacagtggtgatgctagtagaagtttaagccttggaaataccactttcatattttcagatgtcatggatttaatgagtaatttatgtttttaaaattcagaatagttaatctctgatctaaaaccatcaatctatgttttttacggtaatcatgtaaatatttcagtaatataaactgtttgaaaaggctgctgcaggtaaactctatactaggatcttggccaaataatttacaattcacagaatattttatttaaggtggtgctttttttttttgtccttaaaacttgatttttcttaactttattcatgatgccaaagtaaatgaggaaaaaaactcaaaaccagttgagtatcattgcagacaaaactaccagtagtccatattgtttaatattaagttgaataaaataaattttatttcagtcagagcctaaatcacattttgattgtctgaatttttgatactatttttaaaatcatgctagtggcggctgggcgtggtagctcacgcctgtaatcccagcattttgggaggccgaagtgggtggatcacgaggtcgggagttcgagaccagcttggccaaaatggtgaaaccccatctgtactaaaaactacaaaaattagctgggcgcggtggcaggtgcctgtaatcccagctacctgggagtctgaggcaggagaattgcttgaaccctggcgacagaggatgcagtgagccaagatggtgccactgtactccagactgggcgacagagtgagactctgtctcaaaaaaaaaaaaaaaatcatgctagtgccaagagctactaaattcttaaaaccggcccattggacctgtacagataaaaaatagattcagtgcataatcaaaatatgataattttaaaatcttaagtagaaaaataaatcttgatgttttaaattcttacgaggattcaatagttaatattgatgatctcccggctgggtgcagtggctcacgcctgtaatcccagcagttctggaggctgaggtgggcgaatcacttcaggccaggagttcaagaccagtctgggcaacatggtgaaacctcgtttctactaaaaatacaaaaattagccgggcgtggttgcacacacttgtaatcccagctactcaggaggctaagaatcgcatgagcctaggaggcagaggttgcagagtgccaagggctcaccactgcattccagcctgcccaacagagtgagacactgtttctgaaaaaaaaaaatatatatatatatatatatatgtgtgtatatatatatgtatatatatatgacttcctattaaaaactttatcccagtcgggggcagtggctcacgcctgtaatcccaacactttgggaggctgaggcaggtggatcacctgaagtccggagtttgagaccagcctggccaacatggtgaaaccccatctctactaaaaatacaaaacttaagccaggtatggtggcgggcacctgtaatcccagttacttgggaggctgaggcaggagaatcgtttaaacccaggaggtggaggttgcagtgagctgagatcgtgccattgcactctagcctgggcaacaagagtaaaactccatcttaaaggtttgtttgtttttttttaatccggaaacgaagaggcgttgggccgctattttctttttctttctttctttctttctttttttttttttctgagacggagtctagctctgctgcccaggctggagtacaatgacacgatgttggctcactgcaacctccacctcctgggttcaagcgattctcctgcctcagcctcccaagtacctgggattacaggcacctgccactacacctggcgaatatttgttttttttagtagagacgggcttttaccatgttaggctggtctcaaactcctgacctcaggtgatctgcctgccttggcctcccaaagtgctgggattacaggtgcaggccaccacacccggccttgggccactgttttcaaagtgaattgtttgttgtatcgagtccttaagtatggatatatatgtgaccctaattaagaactaccagattggatcaactaatcatgtcagcaatgtaaataactttatttttcatattcaaaataaaaactttcttttatttctggcccctttataaccagcatctttttgctttaaaaaatgacctggctttgtatttttttagtcttaaacataataaaaatatttttgttctaatttgctttcatgagtgaagattattgacatcgttggtaaattctagaattttgattttgttttttaatttgaagaaaatctttgctattattattttttccaagtggtctggcattttaagaattagtgctaataacgtaacttctaaatttgtcgtaattggcatgtttaatagcatatcaaaaaacattttaagcctgtggattcatagacaaagcaatgagaaacattagtaaaatataaatggatattcctgatgcatttaggaagctctcaattgtctcttgcatagttcaaggaatgttttctgaatttttttaatgctttttttttttttgaaagaggaaaacatacatttttaaatgtgattatctaatttttacaacactgggctattaggaataactttttaaaaattactgttctgtataaatatttgaaattcaagtacagaaaatatctgaaacaaaaagcattgttgtttggccatgatacaagtgcactgtggcagtgccgcttgctcaggacccagccctgcagcccttctgtgtgtgctccctcgttaagttcatttgctgttattacacacacaggccttcctgtctggtcgttagaaaagccgggcttccaaagcactgttgaacacaggattctgttgttagtgtggatgttcaatgagttgtattttaaatatcaaagattattaaataaagataatgtttgcttttcta

SEQ ID NO: 45321 - DNA, 1315 bp, Artificial Sequence
  derived and/or modified sequence
tggagggggtggttcggcgtgggggccgttggctccagacaaataaacatggagtccatcttccacgagaaacaagaaggctcactttgtgctcaacattgcctgaataacttattgcaaggagaatattttagccctgtggaattatcctcaattgcacatcagctggatgaggaggagaggatgagaatggcagaaggaggagttactagtgaagattatcgcacgtttttacaggttataagcaatgccttgaaagtttggggtttagaactaatcctgttcaacagtccagagtatcagaggctcaggatcgatcctataaatgaaagatcatttatatgcaattataaggaacactggtttacagttagaaaattaggaaaacagtggtttaacttgaattctctcttgacgggtccagaattaatatcagatacatatcttgcacttttcttggctcaattacaacaggaaggttattctatatttgtcgttaagggtgatctgccagattgcgaagctgaccaactcctgcagatgattagggtccaacagatgcatcgaccaaaacttattggagaagaattagcacaactaaaagagcaaagagtccataaaacagacctggaacgagtgttagaagcaaatgatggctcaggaatgttagacgaagatgaggaggatttgcagagggctctggcactaagtcgccaagaaattgacatggaagatgaggaagcagatctccgcagggctattcagctaagtatgcaaggtagttccagaaacatatctcaagatatgacacagacatcaggtacaaatcttacttcagaagagcttcggaagagacgagaagcctactttgaaaaacagcagcaaaagcagcaacagcagcagcagcagcagcagcagggggacctatcaggacagagttcacatccatgtgaaaggccagccaccagttcaggagcacttgggagtgatctaggtgatgctatgagtgaagaagacatgcttcaggcagctgtgaccatgtctttagaaactgtcagaaatgatttgaaaacagaaggaaaaaaataatacctttaaaaaataatttagatattcatactttccaacattatcctgtgtgattacagcatagggtccactttggtaatgtgtcaaagagatgaggaaataagacttttagcggtttgcaaacaaaatgatgggaaagtggaacaatgcgtcggttgtaggactaaataatgatcttccaaatattagccaaagaggcattcagcaattaaagacatttaaaata

SEQ ID NO: 45322 - DNA, 1065 bp, Artificial Sequence
  derived and/or modified sequence
atggagagcatcttccacgagaagcaggagggcagcctgtgcgcccagcactgcctgaacaacctgctgcagggcgagtacttcagccccgtggagctgagcagcatcgcccaccagctggacgaggaggagagaatgagaatggccgagggcggcgtgaccagcgaggactacagaaccttcctgcaggtgatcagcaacgccctgaaggtgtggggcctggagctgatcctgttcaacagccccgagtaccagagactgagaatcgaccccatcaacgagagaagcttcatctgcaactacaaggagcactggttcaccgtgagaaagctgggcaagcagtggttcaacctgaacagcctgctgaccggccccgagctgatcagcgacacctacctggccctgttcctggcccagctgcagcaggagggctacagcatcttcgtggtgaagggcgacctgcccgactgcgaggccgaccagctgctgcagatgatcagagtgcagcagatgcacagacccaagctgatcggcgaggagctggcccagctgaaggagcagagagtgcacaagaccgacctggagagagtgctggaggccaacgacggcagcggcatgctggacgaggacgaggaggacctgcagagagccctggccctgagcagacaggagatcgacatggaggacgaggaggccgacctgagaagagccatccagctgagcatgcagggcagcagcagaaacatcagccaggacatgacccagaccagcggcaccaacctgaccagcgaggagctgagaaagagaagagaggcctacttcgagaaggaccagcacttccacatcctgaagcagcagcagaagcagcagcagcagcagcagcagcagcagcagggcgacctgagcggccagagcagccacccctgcgagagacccgccaccagcagcggcgccctgggcagcgacctgggcgacgccatgagcgaggaggacatgctgcaggccgccgtgaccatgagcctggagaccgtgagaaacgacctgaagaccgagggcaagaagtag

SEQ ID NO: 45323 - DNA, 1041 bp, Artificial Sequence
  derived and/or modified sequence
atggagagcatcttccacgagaagcaggagggcagcctgtgcgcccagcactgcctgaacaacctgctgcagggcgagtacttcagccccgtggagctgagcagcatcgcccaccagctggacgaggaggagagaatgagaatggccgagggcggcgtgaccagcgaggactacagaaccttcctgcaggtgatcagcaacgccctgaaggtgtggggcctggagctgatcctgttcaacagccccgagtaccagagactgagaatcgaccccatcaacgagagaagcttcatctgcaactacaaggagcactggttcaccgtgagaaagctgggcaagcagtggttcaacctgaacagcctgctgaccggccccgagctgatcagcgacacctacctggccctgttcctggcccagctgcagcaggagggctacagcatcttcgtggtgaagggcgacctgcccgactgcgaggccgaccagctgctgcagatgatcagagtgcagcagatgcacagacccaagctgatcggcgaggagctggcccagctgaaggagcagagagtgcacaagaccgacctggagagagtgctggaggccaacgacggcagcggcatgctggacgaggacgaggaggacctgcagagagccctggccctgagcagacaggagatcgacatggaggacgaggaggccgacctgagaagagccatccagctgagcatgcagggcagcagcagaaacatcagccaggacatgacccagaccagcggcaccaacctgaccagcgaggagctgagaaagagaagagaggcctacttcgagaagcagcagcagaagcagcagcagcagcagcagcagcagcagcagggcgacctgagcggccagagcagccacccctgcgagagacccgccaccagcagcggcgccctgggcagcgacctgggcgacgccatgagcgaggaggacatgctgcaggccgccgtgaccatgagcctggagaccgtgagaaacgacctgaagaccgagggcaagaagtag

SEQ ID NO: 45324 - protein, 1094 aa, Artificial Sequence
  derived and/or modified sequence
MKIATVSVLLPLALCLIQDAASKNEDQEMCHEFQAFMKNGKLFCPQDKKFFQSLDGIMFINKCATCKMILEKEAKSQKRARHLARAPKATAPTELNCDDFKKGERDGDFICPDYYEAVCGTDGKTYDNRCALCAENAKTGSQIGVKSEGECKSSNPEQDVCSAFRPFVRDGRLGCTRENDPVLGPDGKTHGNKCAMCAELFLKEAENAKREGETRIRRNAEKDFCKEYEKQVRNGRLFCTRESDPVRGPDGRMHGNKCALCAEIFKQRFSEENSKTDQNLGKAEEKTKVKREIVKLCSQYQNQAKNGILFCTRENDPIRGPDGKMHGNLCSMCQAYFQAENEEKKKAEARARNKRESGKATSYAELCSEYRKLVRNGKLACTRENDPIQGPDGKVHGNTCSMCEVFFQAEEEEKKKKEGKSRNKRQSKSTASFEELCSEYRKSRKNGRLFCTRENDPIQGPDGKMHGNTCSMCEAFFQQEERARAKAKREAAKEICSEFRDQVRNGTLICTREHNPVRGPDGKMHGNKCAMCASVFKLEEEEKKNDKEEKGKVEAEKVKREAVQELCSEYRHYVRNGRLPCTRENDPIEGLDGKIHGNTCSMCEAFFQQEAKEKERAEPRAKVKREAEKETCDEFRRLLQNGKLFCTRENDPVRGPDGKTHGNKCAMCKAVFQKENEERKRKEEEDQRNAAGHGSSGGGGGNTQDECAEYREQMKNGRLSCTRESDPVRDADGKSYNNQCTMCKAKLEREAERKNEYSRSRSNGTGSESGKDTCDEFRSQMKNGKLICTRESDPVRGPDGKTHGNKCTMCKEKLEREAAEKKKKEDEDRSNTGERSNTGERSNDKEDLCREFRSMQRNGKLICTRENNPVRGPYGKMHINKCAMCQSIFDREANERKKKDEEKSSSKPSNNAKDQCRQVQNEAEDAKFRQPGRSLASVARMSTDECSEFRNYIRNNELICPRENDPVHGADGKFYTNKCYMCRAVFLTEALERAKLQEKPSHVRASQEEDSPDSFSSLDSEMCKDYRVLPRIGYLCPKDLKPVCGDDGQTYNNPCMLCHENLIRQTNTHIRSTGKCEESSTPGTTAASMPPSDE

SEQ ID NO: 45325 - DNA, 3285 bp, Artificial Sequence
  derived and/or modified sequence
atgaaaattgcaactgtgtcagtgctgctccctcttgctctgtgccttatccaagacgctgcctcaaaaaatgaggaccaagagatgtgccacgagtttcaggcttttatgaaaaacggaaagctgttctgcccacaggacaagaaattctttcagtcactcgatggcatcatgttcatcaataagtgtgccacatgcaaaatgattttggagaaagaagctaagtctcaaaagagagctagacacctcgcccgggcccccaaggccactgcgcccaccgaactcaactgcgacgatttcaagaagggcgaacgggacggggacttcatttgtccagactactacgaagccgtgtgtggaacagatggcaaaacatatgacaaccgctgtgcactttgcgcagagaatgctaaaaccgggagccagataggcgtgaagtctgagggagaatgcaagtccagtaatcctgagcaggatgtgtgtagcgcctttcgtcctttcgttcgagatggacgccttgggtgtacccgcgaaaatgaccccgtgttagggcctgatggcaagacccatggtaataagtgtgcgatgtgcgctgagctgtttctgaaagaagctgaaaatgccaaacgcgagggcgaaacccggattaggcgcaacgctgaaaaggatttctgtaaagagtacgaaaaacaagtgagaaatgggagactgttctgtacacgcgagagtgaccctgtacgcggtccagacggccggatgcacggtaataagtgtgcgctgtgtgccgaaattttcaaacagcggttctctgaggaaaactctaagacagaccagaacctggggaaagcagaggagaagaccaaggttaagcgggaaatcgtaaagttgtgctcccagtatcagaaccaggccaaaaatggcatcctattctgcactcgcgaaaatgatccaatcagggggccggacggcaagatgcacggtaatctgtgctccatgtgtcaggcatacttccaggcagaaaatgaggaaaagaaaaaagccgaagctcgggcaagaaataagagagaatcaggcaaggccaccagctatgcagagttgtgtagcgaatatagaaaactggtgcgtaatgggaagcttgcgtgtaccagggagaatgatcccatccaaggccctgacggtaaagtgcacgggaatacatgcagcatgtgtgaagtgttttttcaggccgaggaggaggagaagaagaagaaggaggggaagagtcggaacaagaggcaatccaagtcgacagcgtcattcgaagagttgtgcagcgagtacaggaagtcccgtaaaaatggaagacttttttgcacgcgggagaacgacccaattcagggacctgatggtaagatgcacggaaatacgtgctctatgtgcgaagcattcttccaacaggaagagcgcgcgcgcgccaaggccaaaagagaggcagctaaagagatctgctcagaattccgtgatcaggtgaggaacgggacccttatctgtacccgggaacataatcctgtccgtggtcctgacggcaagatgcacgggaacaaatgtgcgatgtgcgctagtgtatttaagcttgaggaggaggagaagaagaacgacaaagaagaaaaaggtaaagtagaagccgaaaaagttaagagagaggccgtgcaggaattgtgttcagaatatcgtcactacgtgcggaatggcaggctcccgtgcacacgggaaaacgaccccatagagggtctggatggcaaaatccacgggaatacgtgttctatgtgcgaggcctttttccaacaggaggctaaggagaaggagagagctgagccgcgagctaaggtgaaaagggaggcagagaaggaaacatgcgatgagttccgacgcctgctacagaacggaaagttattttgtacgcgcgaaaacgatccagtccgaggtccagatgggaaaacacatggaaacaagtgcgctatgtgtaaagccgtttttcaaaaggagaacgaggagaggaagcggaaagaggaagaggatcagcggaatgcagccggtcacggctcatccggtggaggggggggtaacacccaagacgagtgcgccgaatatcgcgaacagatgaagaacggcagactctcttgtacaagggaatctgacccagtcagagacgccgatggcaaaagctacaacaatcaatgcacaatgtgtaaagctaaattagagcgagaagctgagaggaagaatgaatactcccgctcccgatcaaatggcactggatccgagagtgggaaagacacttgcgatgaatttaggtcacagatgaagaacggcaagcttatttgcacaagagagtctgatcccgtccgtgggcctgatggaaaaacacacggaaataagtgcacaatgtgtaaggagaaactggagagggaagccgcagaaaaaaaaaaaaaggaagatgaggacaggtcaaacactggtgaacgctctaatacaggcgaacgctcaaatgataaggaagacctgtgtcgagaattccgaagcatgcaacgtaacggaaagcttatttgtacacgcgagaacaacccggtgcgaggcccttacggaaagatgcacataaacaaatgcgcaatgtgccagtccattttcgaccgagaggcaaacgagaggaagaagaaggacgaggagaagtcttcctcaaagcctagtaacaatgcaaaagaccagtgtcgtcaggtgcaaaacgaggccgaggacgcgaagttcagacagccaggacgttctctcgcctctgtggcccgtatgagcaccgatgaatgctcagagttccggaactacataaggaataatgaactcatttgtcctcgcgaaaacgatcccgttcatggggctgacggaaagttttacacgaacaagtgttacatgtgccgcgcagtcttcctcaccgaggcgctggaacgggctaaactccaggaaaagccaagtcacgtgcgcgctagtcaagaggaggacagtcctgacagcttctccagcctggattccgagatgtgcaaagactatagggtattacccagaatcgggtatctctgccccaaagatctgaagcccgtctgtggggacgatggccagacttacaataacccgtgcatgctatgccatgaaaacctgattcgacagaccaatactcacattcgatctaccggcaaatgcgaagagagtagtaccccgggcacgaccgcggctagcatgcccccttccgacgagtag

SEQ ID NO: 45326 - DNA, 2751 bp, Artificial Sequence
  derived and/or modified sequence
atgaaaattgctacagtgagcgtgctgctccctctggcactctgtcttatccaggacgctgccagcaagaatgaggatcaggagatgtgccacgagtttcaagcattcatgaaaaatggcaaattattctgtcctcaggacaagaaatttttccagagtctcgatggaattatgtttatcaacaagtgcgcaacttgcaagatgattctggagaaagaagctaaatcacagaaaagggcgagacacctggcccgcgcaccgaaagcaaccgcgcctaccgagctaaattgcgacgattttaagaaaggagagcgcgatggcgatttcatatgtccggattactatgaagccgtttgcggcacagatggcaagacttacgacaacagatgcgccttatgtgcagagaacgctaaaacgggaagccagattggtgtgaagagcgagggagagtgcaaatcctctaaccctgagcaggatgtttgttcagcttttaggccttttgttagggatggccgacttgggtgtaccagggaaaacgatcctgtgttaggacccgatggtaagacgcatgggaataaatgtgccatgtgcgccgagctttttctgaaggaggccgaaaacgctaagcgggaaggtgaaacccggattaggcgaaacgccgagaaggacttctgcaaggagtatgagaagcaggtgcgaaacgggcgcctgttttgcacccgggaatcagacccagtgcgaggccccgatggaagaatgcatggaaacaaatgcgcactctgtgcggaaatcttcaaacaaagatttagcgaggaaaactcaaaaactgaccaaaatctgggtaaagcggaagagaagacaaaagtgaagagggagatcgttaagctgtgcagtcagtatcaaaatcaagctaaaaatggaatactgttttgtacaagagagaacgaccctatcaggggccccgacggcaaaatgcatgggaatttgtgctctatgtgtcaggcttattttcaggccgaaaatgaagaaaagaagaaagctgaggccagggccagaaacaagagagaaagcggcaaagctacttcctatgctgagctgtgttcagagtatagaaaactggtccgaaacggtaaactcgcttgcacaagagagaacgatcccattcaggggcctgatggcaaagtgcacggcaacacttgctcaatgtgtgaggtcttttttcaggcagaagaggaagaaaagaaaaagaaagaaggaaagtcccggaataaaagacagagtaagtctactgcatccttcgaagaactgtgtagtgaatatagaaagtcccggaaaaatggccgccttttttgcacacgagagaacgaccctatccaaggccccgatgggaaaatgcacgggaacacctgctcaatgtgtgaggccttctttcagcaagaggagcgagctcgcgctaaggcaaaaagagaggccgccaaagaaatctgttcagaatttcgcgaccaagtgcgtaacggcacattgatttgtaccagggaacataacccagtgcgcgggcctgacgggaagatgcacggaaacaaatgcgcgatgtgcgccagcgtgttcaagctcgaggaggaggaaaaaaagaatgataaagaagagaaagggaaagtcgaagccgagaaagtgaaacgggaagccgtacaggagctttgctccgagtaccggcactacgtcagaaacggcagactgccatgtacaagagaaaacgatccgatcgagggtctcgacgggaagattcacggaaatacgtgttccatgtgtgaagcttttttccagcaggaggctaaggagaaggagagggctgagccacgagccaaagtgaagagagaagccgagaaggagacgtgtgatgagttcagacgcttgctgcagaacgggaagctattctgtacccgcgagaatgatcccgttaggggacccgatggaaagacgcatggtaacaagtgtgctatgtgcaaagctgtcttccagaaagaaaatgaggagagaaaacggaaagaggaagaagaccagcgtaatgccgccggacatggcagttcgggcggcggcggcggcaacactcaagatgagtgtgcagagtatagagagcagatgaagaacggccggctctcctgtaccagggaatccgaccctgttagagacgcagatggaaaaagttataacaaccagtgcaccatgtgtaaagcgaagctcgagcgggaggccgagagaaaaaatgaatacagccggagcaggtctaacggaaccggatctgagtcaggtaaggatacttgtgacgaatttcgcagtcagatgaagaacggaaaactaatctgcactcgagagtctgatccggttagaggtccagatggtaaaactcatggtaacaaatgtacgatgtgcaaggaaaaactggaacgcgaagccgcggaaaaaaagaagaaggaagatgaggatcggtccaatactggcgaacgctctaatactggtgagcggtccaacgacaaggaagatttatgtcgcgagttcagatctatgcaaagaaacggtaagctgatatgcacccgggagaacaatccagtccgggggccatacggaaagatgcatattaacaaatgcgctatgtgccaatctatcttcgaccgtgaggccaatgagagaaaaaaaaaagacgaggaaaagagctcctctaagccatcaaacaacgccaaggttatctactag

SEQ ID NO: 45327 - DNA, 3285 bp, Artificial Sequence
  derived and/or modified sequence
atgaagatcgccaccgtgtctgtgctgctgcccctggccctgtgcctgatccaggatgctgccagcaagaatgaagaccaggagatgtgccacgagttccaggccttcatgaagaatggcaagctgttctgcccccaggacaagaagttcttccagagcctggatggcatcatgttcatcaacaagtgtgccacctgcaagatgatcctggagaaggaggccaagagccagaagagggcccggcacctggcccgggcccccaaggccacagcccccacagagctgaactgtgatgacttcaagaagggggagagagatggagacttcatctgcccagactactatgaagctgtgtgtggcacagatggcaagacctatgacaacagatgtgccctgtgtgctgaaaatgccaagacaggcagccagattggagtgaagtctgagggggagtgcaagagcagcaaccctgagcaggatgtgtgcagcgccttccggccctttgtgagagatggccgcctgggctgcacccgggagaatgaccctgtgctgggcccagatggcaagacccacggcaacaagtgtgccatgtgtgccgagctgttcctgaaggaggccgagaatgccaagcgggagggggagacccgcatcagaagaaatgctgagaaggacttctgcaaggagtatgagaagcaggtgagaaatggccgcctcttctgcacccgggagagtgaccctgtgcggggcccagatggccgcatgcacggcaacaagtgtgccctgtgtgccgagatcttcaagcagcgcttcagcgaggagaacagcaagacagaccagaacctgggcaaggccgaggagaagaccaaggtgaagcgggagatcgtgaagctgtgcagccagtaccagaaccaggccaagaatggcatcctcttctgcacccgggagaatgaccccatccggggcccagatggcaagatgcacggcaacctgtgcagcatgtgccaggcctacttccaggccgagaatgaggagaagaagaaggccgaggcccgggccaggaacaagcgggagagcggcaaggccaccagctatgcagagctgtgcagcgagtacaggaagctggtgagaaatggcaagctggcctgcacccgggagaatgaccccatccagggcccagatggcaaggtgcacggcaacacctgcagcatgtgtgaggtgttcttccaggccgaggaggaggagaagaagaagaaggagggcaagagcaggaacaagaggcagagcaagagcacagccagctttgaggagctgtgcagcgagtacaggaagagcaggaagaatggccgcctcttctgcacccgggagaatgaccccatccagggcccagatggcaagatgcacggcaacacctgcagcatgtgtgaggccttcttccagcaggaggagcgggcccgggccaaggccaagcgggaggccgccaaggagatctgcagcgagttccgggaccaggtgagaaatggcaccctcatctgcacccgggagcacaaccctgtgcggggcccagatggcaagatgcacggcaacaagtgtgccatgtgtgccagcgtcttcaagctggaggaggaggagaagaagaatgacaaggaggagaagggcaaggtggaggccgagaaggtgaagcgggaggccgtgcaggagctgtgcagcgagtaccgccactacgtgagaaatggccgcctgccctgcacccgggagaatgaccccatcgagggcctggatggcaagatccacggcaacacctgcagcatgtgtgaggccttcttccagcaggaggccaaggagaaggagagagctgagccccgggccaaggtgaagcgggaggccgagaaggagacctgtgatgagttccggcggctgctgcagaatggcaagctgttctgcaccagagaaaatgaccctgtgcggggcccagatggcaagacccacggcaacaagtgtgccatgtgcaaggctgtgttccagaaggaaaatgaggagaggaagaggaaggaggaggaggaccagagaaatgctgctggccacggcagcagcggcggcggcggcggcaacacccaggatgaatgtgccgagtaccgggagcagatgaagaatggccgcctgagctgcacccgggagagtgaccctgtgagagatgctgatggcaagagctacaacaaccagtgcaccatgtgcaaggccaagctggagcgggaggccgagaggaagaatgagtacagccgcagccgcagcaatggaactggaagtgaaagtggcaaggacacctgtgatgagttccgcagccagatgaagaatggcaagctgatctgcacccgggagagtgaccctgtgcggggcccagatggcaagacccacggcaacaagtgcaccatgtgcaaggagaagctggagcgggaggccgctgagaagaagaagaaggaggatgaagatagaagcaacacaggagagaggagcaacacaggagagaggagcaatgacaaggaggacctgtgccgggagttccgctccatgcagagaaatggcaagctgatctgcacccgggagaacaaccctgtgcggggcccctacggcaagatgcacatcaacaagtgtgccatgtgccagagcatctttgaccgggaggccaatgaaaggaagaagaaggatgaggagaagagcagcagcaagcccagcaacaatgccaaggaccagtgccggcaggtgcagaatgaagcagaagatgccaagttccggcagcccggccgcagcctggcctctgtggccaggatgagcacagatgaatgttctgagttcaggaactacatccggaacaatgagctgatctgccccagagaaaatgaccctgtgcacggggctgatggcaagttctacaccaacaagtgctacatgtgcagagctgtgttcctgacagaggccctggagcgggccaagctgcaggagaagcccagccacgtgcgggccagccaggaggaggacagcccagacagcttcagcagcctggacagcgagatgtgcaaggactacagagtgctgccccgcatcggctacctgtgccccaaggacctgaagcctgtgtgtggagatgatggccagacctacaacaacccctgcatgctgtgccacgagaacctgatccggcagaccaacacccacatccgcagcactggaaaatgtgaggagagcagcaccccaggcaccacagctgcctccatgccacccagtgatgaatag

SEQ ID NO: 45328 - DNA, 2751 bp, Artificial Sequence
  derived and/or modified sequence
atgaagatcgccaccgtgtctgtgctgctgcccctggccctgtgcctgatccaggatgctgccagcaagaatgaagaccaggagatgtgccacgagttccaggccttcatgaagaatggcaagctgttctgcccccaggacaagaagttcttccagagcctggatggcatcatgttcatcaacaagtgtgccacctgcaagatgatcctggagaaggaggccaagagccagaagagggcccggcacctggcccgggcccccaaggccacagcccccacagagctgaactgtgatgacttcaagaagggggagagagatggagacttcatctgcccagactactatgaagctgtgtgtggcacagatggcaagacctatgacaacagatgtgccctgtgtgctgaaaatgccaagacaggcagccagattggagtgaagtctgagggggagtgcaagagcagcaaccctgagcaggatgtgtgcagcgccttccggccctttgtgagagatggccgcctgggctgcacccgggagaatgaccctgtgctgggcccagatggcaagacccacggcaacaagtgtgccatgtgtgccgagctgttcctgaaggaggccgagaatgccaagcgggagggggagacccgcatcagaagaaatgctgagaaggacttctgcaaggagtatgagaagcaggtgagaaatggccgcctcttctgcacccgggagagtgaccctgtgcggggcccagatggccgcatgcacggcaacaagtgtgccctgtgtgccgagatcttcaagcagcgcttcagcgaggagaacagcaagacagaccagaacctgggcaaggccgaggagaagaccaaggtgaagcgggagatcgtgaagctgtgcagccagtaccagaaccaggccaagaatggcatcctcttctgcacccgggagaatgaccccatccggggcccagatggcaagatgcacggcaacctgtgcagcatgtgccaggcctacttccaggccgagaatgaggagaagaagaaggccgaggcccgggccaggaacaagcgggagagcggcaaggccaccagctatgcagagctgtgcagcgagtacaggaagctggtgagaaatggcaagctggcctgcacccgggagaatgaccccatccagggcccagatggcaaggtgcacggcaacacctgcagcatgtgtgaggtgttcttccaggccgaggaggaggagaagaagaagaaggagggcaagagcaggaacaagaggcagagcaagagcacagccagctttgaggagctgtgcagcgagtacaggaagagcaggaagaatggccgcctcttctgcacccgggagaatgaccccatccagggcccagatggcaagatgcacggcaacacctgcagcatgtgtgaggccttcttccagcaggaggagcgggcccgggccaaggccaagcgggaggccgccaaggagatctgcagcgagttccgggaccaggtgagaaatggcaccctcatctgcacccgggagcacaaccctgtgcggggcccagatggcaagatgcacggcaacaagtgtgccatgtgtgccagcgtcttcaagctggaggaggaggagaagaagaatgacaaggaggagaagggcaaggtggaggccgagaaggtgaagcgggaggccgtgcaggagctgtgcagcgagtaccgccactacgtgagaaatggccgcctgccctgcacccgggagaatgaccccatcgagggcctggatggcaagatccacggcaacacctgcagcatgtgtgaggccttcttccagcaggaggccaaggagaaggagagagctgagccccgggccaaggtgaagcgggaggccgagaaggagacctgtgatgagttccggcggctgctgcagaatggcaagctgttctgcaccagagaaaatgaccctgtgcggggcccagatggcaagacccacggcaacaagtgtgccatgtgcaaggctgtgttccagaaggaaaatgaggagaggaagaggaaggaggaggaggaccagagaaatgctgctggccacggcagcagcggcggcggcggcggcaacacccaggatgaatgtgccgagtaccgggagcagatgaagaatggccgcctgagctgcacccgggagagtgaccctgtgagagatgctgatggcaagagctacaacaaccagtgcaccatgtgcaaggccaagctggagcgggaggccgagaggaagaatgagtacagccgcagccgcagcaatggaactggaagtgaaagtggcaaggacacctgtgatgagttccgcagccagatgaagaatggcaagctgatctgcacccgggagagtgaccctgtgcggggcccagatggcaagacccacggcaacaagtgcaccatgtgcaaggagaagctggagcgggaggccgctgagaagaagaagaaggaggatgaagatagaagcaacacaggagagaggagcaacacaggagagaggagcaatgacaaggaggacctgtgccgggagttccgctccatgcagagaaatggcaagctgatctgcacccgggagaacaaccctgtgcggggcccctacggcaagatgcacatcaacaagtgtgccatgtgccagagcatctttgaccgggaggccaatgaaaggaagaagaaggatgaggagaagagcagcagcaagcccagcaacaatgccaaggtgatctactag

SEQ ID NO: 45329 - DNA, 3285 bp, Artificial Sequence
  derived and/or modified sequence
atgaagatcgccaccgtgagcgtgctgctgcccctggccctgtgcctaattcaggacgccgcttcaaagaacgaagaccaggaaatgtgtcacgagtttcaagcattcatgaaaaatggaaagctgttctgtccccaggacaaaaaattctttcaatccctggacgggattatgttcatcaacaagtgtgcaacatgcaaaatgatactggagaaagaagctaagtcgcaaaagcgagccagacacttagcacgagccccgaaagcaacagcaccaacggaactgaattgtgatgatttcaaaaagggggagcgcgatggggatttcatttgtcctgactactatgaggcagtgtgcggaaccgacggcaagacttacgataatagatgcgcgctctgcgccgagaacgcaaagactgggagccagattggcgtaaagtcagaaggggagtgcaaaagttccaatccagaacaagacgtttgcagtgccttccgaccattcgtgcgcgatggtcgactgggttgcaccagggagaatgacccagtcctgggcccggacgggaaaacgcatgggaataagtgtgccatgtgtgccgagttgttcctgaaggaagcggagaatgccaagcgcgagggtgaaacacgtatccggcgcaatgccgaaaaggatttttgcaaagaatacgagaaacaggtccgtaatggccgactgttttgtacaagagagtctgatcccgttagggggcctgacggccgcatgcacgggaacaagtgcgcactgtgcgctgaaatctttaaacaaagattttcagaggagaattcgaagacagatcagaacctgggtaaagctgaggaaaagacgaaggtgaagcgcgaaatcgtcaaactttgtagccaataccagaaccaggccaagaatgggatcttattttgtacgagagaaaacgacccaataaggggccccgatggtaagatgcacgggaatctctgctccatgtgtcaggcttatttccaggcggaaaatgaggaaaaaaagaaggcagaggcccgcgcacgtaacaagcgcgaatcagggaaagccacgagttatgccgagctgtgctcagagtatcggaaactggtgagaaacggcaagttggcctgcacaagggagaacgaccccatccagggacctgatggcaaggtccatggaaatacatgtagtatgtgcgaggtgttcttccaggccgaagaggaagagaagaaaaagaaagaaggaaagagcaggaataaaagacaaagtaagagtacagctagcttcgaggaactttgctctgaatatcgtaaatcacgcaagaacggacgactgttttgcacccgggagaatgaccccattcagggccccgacgggaaaatgcatggcaacacctgttctatgtgcgaggcctttttccagcaagaggaacgggcccgcgctaaggcaaaacgggaagccgcaaaagaaatatgtagcgaattccgggaccaggttcggaacggtaccctgatctgcactagagagcataatcctgtcagggggcccgatggcaagatgcatggaaataaatgcgccatgtgcgcctctgtgtttaaactggaggaggaggagaaaaaaaatgacaaagaagaaaaggggaaggttgaagccgaaaaggttaaaagagaggccgtccaggagctgtgcagcgagtacagacattatgtgagaaacgggcggctcccttgcacgcgagagaacgatccaatcgaaggcctcgatggaaagatccatggcaatacctgttcgatgtgcgaggccttcttccaacaggaggccaaggagaaggaaagagccgagccgagagctaaggttaaaagggaggcagaaaaagagacttgcgacgaattcagacgccttctacagaacggtaagctgttttgcacacgagagaacgacccagtgcgaggaccagatggtaagacccacggaaataagtgcgctatgtgtaaagcggtgttccaaaaggaaaacgaagagcggaagaggaaggaagaagaggatcagcgaaacgcagcgggccacggtagtagcgggggaggggggggaaacacacaagatgaatgtgcggagtaccgcgaacagatgaagaacgggcggctctcatgtacgcgagaatctgacccagttcgagacgccgacgggaagagctacaacaatcaatgtactatgtgtaaggccaaacttgagagagaagccgaacgcaagaacgagtactctaggtccaggagcaatgggactgggtctgaaagcggtaaggacacttgtgacgagtttagatctcagatgaagaacggcaaactgatttgtactcgagagtccgacccagtacgcggccctgatggtaagacacacggtaataaatgcaccatgtgtaaagagaaattggaacgagaagccgcagaaaaaaagaagaaagaagacgaagacagaagtaacactggtgagcggtccaacaccggcgagaggagcaatgacaaggaagacctgtgtcgcgagtttcgcagtatgcaaaggaacggcaagctcatctgtacacgcgagaacaatcctgtgagggggccatacggtaaaatgcatattaacaaatgcgctatgtgccaatcaatttttgaccgagaggccaacgagcgtaaaaaaaaggatgaagagaagtcgagctctaagcccagtaacaatgccaaggatcagtgccgacaggtgcagaatgaggcggaagacgcaaagttcaggcaacctggaaggtctcttgcctctgttgctaggatgagcacagatgaatgttccgaatttcggaactacatccgcaataatgagctgatctgtccccgagaaaatgaccctgtacacggtgcagatgggaagttctacactaataagtgttatatgtgccgggcagtctttcttacagaagccttagaacgggctaaactacaggaaaagccatcccatgtgcgggcttcacaggaagaagatagtcccgattcattctctagcctggactcagagatgtgcaaagactacagagtgttgccaaggatcggctacttgtgcccgaaggaccttaaacccgtgtgcggagacgacggccaaacatataataacccgtgcatgctctgccacgagaacctcattcgtcagactaatactcatattcgatcaacggggaagtgtgaggagtcgtccacccctggcactacagctgcatccatgccaccttccgacgagtag

SEQ ID NO: 45330 - DNA, 2751 bp, Artificial Sequence
  derived and/or modified sequence
atgaagatcgccaccgtgagcgtgctgctgcccctggccctgtgcctgatccaggatgcggctagcaaaaacgaagaccaggagatgtgccacgaattccaagcctttatgaagaacgggaaattgttttgtccacaggataaaaaattctttcaatccctcgacggcattatgtttatcaataagtgtgccacttgcaagatgattctggaaaaagaggcgaaaagccagaagagagctcgccatctggccagagcaccaaaagccaccgcccctactgaactgaactgtgatgattttaaaaagggagagcgcgatggtgatttcatctgtccggactactacgaggccgtctgtggcaccgatggcaaaacttatgacaaccggtgcgccctctgtgctgagaacgccaagactggaagccagattggggtcaagtcagagggagaatgcaagtccagtaatccggaacaggatgtgtgtagtgcattccggccctttgtccgcgacggccgactgggatgtacccgggagaacgacccagtgttggggcccgacggtaagacccacggcaacaagtgcgctatgtgtgctgagctatttcttaaagaggcagagaatgcaaagagagaaggcgagacccggatcaggagaaatgccgagaaggatttctgcaaagagtacgaaaaacaggttcgcaatggacggcttttctgtaccagagagtctgaccccgtgcgggggccggatggtcgcatgcatggcaataaatgcgctctgtgtgccgaaattttcaaacagcgcttcagtgaagagaacagcaaaaccgatcagaacctgggcaaagcagaagaaaagacgaaagtaaagcgggagattgttaagctgtgctctcaatatcaaaatcaggccaaaaatggaatcctcttctgcacaagggagaacgaccctatacgaggccctgatggaaagatgcacggcaacctctgctcgatgtgtcaagcatacttccaggccgagaacgaggagaaaaagaaagccgaggccagggccaggaataagcgggaaagtgggaaggcgacatcctatgctgaactttgctcagagtataggaaattggtgaggaacggcaaactggcctgcacacgcgaaaacgatccaatacagggcccagatggcaaagtccacggtaacacttgcagcatgtgcgaagtgttctttcaggccgaagaggaggagaagaagaagaaggagggaaagagccgcaataagcggcagagcaagagcaccgcctctttcgaggaactttgttccgagtatagaaagagccggaagaatggcagactcttctgtacccgagagaacgacccaatccaaggcccagatggcaagatgcatggtaacacctgtagcatgtgcgaggccttcttccagcaggaggagcgcgctcgcgctaaagccaagagggaggccgcgaaggagatatgcagtgagttcagagaccaggtcaggaatggcactttaatttgcacaagagagcacaaccccgtaagagggcctgacggtaagatgcatggcaacaaatgcgccatgtgcgcatcggtgttcaagctggaggaagaagaaaagaagaatgataaagaggagaaagggaaagttgaggccgagaaggtgaaacgagaggccgtccaggaattgtgctccgagtaccgacattatgtgagaaacggaaggttgccctgtacccgcgagaacgacccaatcgagggcttggatggcaagattcatgggaatacgtgttcaatgtgcgaggcgttcttccagcaggaggctaaagaaaaggagagagccgagccacgtgcgaaagtcaagcgcgaagctgagaaggagacatgtgacgagttccgccgtctattgcagaatgggaagctgttttgtacacgggaaaatgatcccgtcagggggcctgatggaaagacgcacgggaacaaatgtgcaatgtgtaaagcagtcttccagaaggagaatgaggagagaaagcgaaaagaggaagaagatcaacgaaacgctgcaggtcacggctcttccggagggggaggcggaaacacgcaggacgaatgcgctgaataccgcgagcagatgaagaacgggcgcctgtcttgcactcgggaatcagatcccgtgcgcgatgccgatggcaagagctataacaatcaatgcactatgtgcaaggctaaactggagcgggaagctgaaaggaagaacgagtacagcaggagccgctctaacggcacaggatcagagtcaggaaaggatacatgcgacgaatttcgttctcagatgaaaaatggaaaacttatctgcacccgggagtcagatccagtaagaggcccggatgggaaaacccacggaaataaatgtacgatgtgcaaagagaagctggaaagggaggctgccgagaagaaaaagaaagaagacgaggaccggtctaatacaggagagcggtcaaatactggagagcgatctaacgataaagaggatttgtgtagagaatttcgctcaatgcagaggaacggcaaactgatctgcactagagaaaacaatccagtgcgcggaccctacggcaagatgcatatcaacaagtgcgccatgtgtcagagcattttcgatagggaagctaatgagcggaagaagaaggatgaggaaaaatcaagctcaaagcctagcaataacgctaaagtaatttactag

SEQ ID NO: 45331 - DNA, 3285 bp, Artificial Sequence
  derived and/or modified sequence
atgaaaatcgcaactgtgtccgtcctgctgcccctggctctttgtctgattcaggatgccgcttcaaagaacgaggatcaggagatgtgccacgagttccaggccttcatgaagaatggcaaattgttctgcccgcaggacaagaaattctttcaatccctggatggcatcatgttcatcaataaatgcgcaacttgcaagatgatcctggaaaaggaagccaagagtcagaagagggcacgacaccttgctcgggctcctaaggcaactgccccaacagagcttaattgcgatgatttcaaaaagggggaacgggacggggattttatatgccctgactattacgaggcagtctgcggcactgacggaaaaacatacgataaccgctgtgccttgtgtgcagagaacgcgaaaaccggcagccaaataggagtgaaatcggaaggcgagtgcaagagcagcaaccccgaacaggatgtgtgttctgcttttaggccatttgttcgcgatgggagacttggttgcacaagagagaatgatcccgtcttaggtccagatggcaagacacacggaaacaaatgcgctatgtgcgcagagttattcttgaaagaagcggagaacgcaaagcgcgagggcgagactcggatccgcaggaacgccgaaaaagacttttgtaaagagtatgagaaacaggtgcggaacggacgtttattttgcactagggaaagcgatccagtgagaggcccagacggccgaatgcacggaaacaaatgcgcgctgtgtgccgagattttcaagcagcgattcagcgaggagaacagtaaaactgatcaaaacctgggcaaggcggaggagaagactaaagtgaaacgggaaattgtgaaactgtgctctcagtaccagaatcaggcaaaaaacggcatcctgttttgtacccgggagaacgacccaatccggggacctgacggaaaaatgcacggtaacctctgcagcatgtgtcaggcctatttccaggctgagaatgaggaaaagaagaaagcagaggctagagccagaaataagagagagagcggtaaggcgaccagctacgccgaactttgcagcgagtacagaaagttagtgcgcaacggcaagctggcctgcaccagggaaaacgacccaatccagggccctgatgggaaagttcatgggaacacttgcagcatgtgcgaggttttcttccaggcagaggaggaggaaaaaaaaaagaaagaaggaaagtccaggaataagcgccagtccaaatccactgcgtccttcgaggagctgtgcagcgagtacagaaaatcacggaagaatggtcggcttttctgtacaagggagaacgatccaattcagggaccagacgggaagatgcacggaaacacatgtagcatgtgtgaagccttttttcagcaggaagagagggctcgggctaaggcaaagcgcgaggctgcgaaagagatttgtagtgagtttcgggatcaggtccgaaatggtacactgatctgcacaagagagcataatcccgtgcggggacccgacgggaagatgcacggtaacaagtgtgcgatgtgtgcgagcgtattcaagctcgaggaggaggaaaaaaagaatgacaaagaagaaaagggaaaagtggaagctgaaaaagtgaaacgcgaggccgtacaggaattgtgtagcgaatatcggcattacgtaagaaatggtagactgccttgcactcgggaaaacgaccccatcgaagggctggatgggaagatccatggcaacacctgctcaatgtgtgaagccttcttccagcaggaggcaaaagagaaggagcgcgcagagcctagagccaaggttaagcgggaagccgagaaggaaacctgtgacgagttccggaggctgctgcaaaatggaaagctgttctgcacccgggagaacgatccagtgcgaggaccggatgggaaaactcacggcaacaaatgcgcaatgtgtaaggccgtgttccagaaggagaacgaggagcgcaagcggaaggaagaggaagaccagagaaacgctgccggacacgggagtagcggcggaggagggggtaacactcaggatgagtgcgcagaataccgagagcagatgaaaaatggaagattatcgtgcaccagagagagcgaccccgtcagagacgccgatggaaagtcttataataatcaatgtactatgtgcaaggccaaacttgaacgagaagcagagcgaaaaaacgagtatagccgcagcaggagcaatggcaccggctctgagtccgggaaggacacttgcgacgagtttaggtctcagatgaagaatggtaaattgatttgtaccagggaatccgatccagtccgaggccctgatggtaaaacacacggcaataagtgtaccatgtgtaaggaaaagctcgaaagggaagccgcagagaaaaagaagaaggaagatgaagaccggagcaacaccggcgaacgcagcaacacgggcgaacgatcgaatgacaaggaggatctgtgtagggaatttcggtctatgcagaggaacggaaagctgatttgtacccgagagaacaaccctgtacggggtccatatggaaagatgcatataaacaagtgcgccatgtgtcaatctatctttgatagggaggcaaacgagcggaaaaaaaaggacgaggagaagagctctagcaagcctagcaataatgccaaagatcaatgtcggcaggtgcagaacgaggcggaagatgcgaagttcaggcaacccggacgcagcctggcctccgtcgcgcgtatgagcacagacgagtgtagcgaattccgcaattatattcgaaataacgagctcatttgtccacgcgagaatgatcctgtgcacggcgcagacggcaaattctacacaaacaaatgttacatgtgccgagctgtttttttgaccgaggcccttgagcgagccaaacttcaggaaaaaccttcacatgtgcgggcttctcaggaggaagactcccctgattctttttctagtctggactcagagatgtgtaaagattacagagtgttgccgaggatcggttacctttgccccaaggacttaaaaccagtgtgtggtgatgacgggcagacgtacaacaatccatgtatgctgtgccacgagaatctgattaggcagactaatacccatatccggtcaactgggaagtgtgaggaatcctccacgccaggcacgacagcagcgagcatgcctcctagtgacgaatag

SEQ ID NO: 45332 - DNA, 2751 bp, Artificial Sequence
  derived and/or modified sequence
atgaagattgcgaccgtttcggtgctgctgccgttagctctatgtttgattcaggacgccgcttcaaagaacgaggatcaagagatgtgccatgagttccaagcgtttatgaaaaacggaaagttgttttgcccccaagacaagaaattcttccagtcgctcgatggcataatgttcatcaacaagtgcgccacgtgcaagatgattctggaaaaagaggctaaatcccagaagagagctagacatcttgctagagccccaaaggccacagcccctaccgagcttaactgtgatgacttcaagaaaggtgaacgggatggggattttatctgtccggactattatgaggccgtctgcggaacagacggcaagacctatgacaacaggtgcgccctatgcgctgagaacgccaagaccggcagccagataggagtgaagtctgaaggtgaatgcaagtctagcaaccccgagcaggacgtctgcagcgcctttcggccattcgtcagagatgggagattggggtgtaccagagaaaacgatccagttttgggcccagacggcaaaacccacggaaacaaatgtgcaatgtgcgctgaacttttcctgaaggaggccgagaatgctaagagagagggggaaactcggatcagaagaaatgctgagaaggatttttgcaaggagtatgaaaagcaggtacggaatggacgcctgttttgcacccgcgagtcagaccccgtccggggacctgatggcagaatgcacggcaacaaatgcgctttgtgtgcggaaattttcaaacagaggtttagtgaggagaattctaagactgatcaaaatttagggaaggccgaagaaaaaacaaaggttaagcgcgagatcgtcaagctgtgtagtcagtaccagaaccaggcaaagaatggaatccttttctgtacaagggagaacgatcctatacgcggacccgacggtaaaatgcatggcaacctttgcagcatgtgtcaggcctacttccaagcggagaacgaggagaagaaaaaagcagaggcgcgagcccgaaataaacgcgagagcggaaaggcaacctcttacgctgagctctgctccgagtatagaaaacttgtcaggaacgggaagctggcgtgtactagagaaaacgatcctatccagggaccagatggaaaggtgcacggaaacacatgcagtatgtgcgaagtcttttttcaggctgaagaagaagagaaaaaaaaaaaggaggggaaatccaggaataagcgccagtcaaagtcaacagcatcgtttgaggagttgtgctccgagtaccgcaaatcacgcaagaacggacggctgttttgcaccagggaaaatgatcccattcagggtcctgatggaaagatgcatggcaatacctgctctatgtgcgaagcgttcttccagcaagaagagcgagcgagggccaaagctaaacgcgaagcagctaaagaaatatgtagcgagttcagggaccaggtacgaaatggcaccctaatttgtacccgtgagcacaatcccgtgaggggccctgacggcaagatgcacggcaacaagtgtgcaatgtgtgcatccgtgttcaagttagaggaagaggagaagaagaatgataaagaggagaaaggcaaggtcgaagcggaaaaagtcaaaagggaggccgtgcaagaattatgctcagaatatcgacattacgtgcggaatggcagattgccctgcacccgagagaacgacccgatcgaagggctggatggtaagattcatggcaatacgtgctcgatgtgtgaggccttctttcaacaggaagccaaagagaaagagagggctgaaccacgggctaaggtgaagagggaggctgaaaaggagacctgcgacgagtttcgtcggctcttgcagaatggcaaactgttttgtactcgcgagaatgacccagtgcgcggtcccgacggtaagactcatgggaataagtgcgccatgtgcaaggcagtgtttcaaaaagagaacgaggagagaaaacggaaggaagaggaggatcagcggaacgccgctggtcacggaagctcaggcggaggcggagggaatacccaagatgaatgcgctgaatatcgagagcagatgaaaaacggcaggcttagttgtacgcgcgaatctgaccccgttcgagacgccgacggtaaatcctataacaatcagtgtacaatgtgcaaggccaaacttgaaagagaagctgagcgaaaaaatgagtacagccgttcacgctcgaatggtaccggctccgagtccggtaaggacacttgcgatgagtttcgatctcaaatgaagaatggaaagctgatctgtacaagggaatctgatcctgtccgtggcccagatggtaaaacccatgggaataagtgcaccatgtgtaaggaaaagctcgagcgtgaggcagccgagaagaagaagaaggaggacgaagatcgatcaaatacaggcgaacgctcaaataccggcgagagaagcaacgataaagaggacctgtgccgcgagtttcggagcatgcagaggaatggcaagttaatttgcacaagggagaataatccagttcgaggaccatatggcaagatgcatatcaacaagtgcgccatgtgccagtctatttttgacagagaggccaacgaaagaaaaaagaaggacgaggagaaaagctcatcaaagccgagtaacaatgctaaggttatctattag

SEQ ID NO: 45333 - DNA, 3656 bp, Artificial Sequence
  derived and/or modified sequence
ccgagttcagtcatactgcaccagctgagcaatgcatggagtggacctgtaggcgacttgcatcgtcttcaacatgaagatagccacagtgtcagtgcttctgcccttggctctttgcctcatacaagatgctgccagtaagaatgaagatcaggaaatgtgccatgaatttcaggcatttatgaaaaatggaaaactgttctgtccccaggataagaaattttttcaaagtcttgatggaataatgttcatcaataaatgtgccacgtgcaaaatgatactggaaaaagaagcaaaatcacagaagagggccaggcatttagcaagagctcccaaggctactgccccaacagagctgaattgtgatgattttaaaaaaggagaaagagatggggattttatctgtcctgattattatgaagctgtttgtggcacagatgggaaaacatatgacaacagatgtgcactgtgtgctgagaatgcgaaaaccgggtcccaaattggtgtaaaaagtgaaggggaatgtaagagcagtaatccagagcaggatgtatgcagtgcttttcggccctttgttagagatggaagacttggatgcacaagggaaaatgatcctgttcttggtcctgatgggaagacgcatggcaataagtgtgcaatgtgtgctgagctgtttttaaaagaagctgaaaatgccaagcgagagggtgaaactagaattcgacgaaatgctgaaaaggatttttgcaaggaatatgaaaaacaagtgagaaatggaaggcttttttgtacacgggagagtgatccagtccgtggccctgacggcaggatgcatggcaacaaatgtgccctgtgtgctgaaattttcaagcagcgtttttcagaggaaaacagtaaaacagatcaaaatttgggaaaagctgaagaaaaaactaaagttaaaagagaaattgtgaaactctgcagtcaatatcaaaatcaggcaaagaatggaatacttttctgtaccagagaaaatgaccctattcgtggtccagatgggaaaatgcatggcaacttgtgttccatgtgtcaagcctacttccaagcagaaaatgaagaaaagaaaaaggctgaagcacgagctagaaacaaaagagaatctggaaaagcaacctcatatgcagagctttgcagtgaatatcgaaagcttgtgaggaacggaaaacttgcttgcaccagagagaacgatcctatccagggcccagatgggaaagtgcatggcaacacctgctccatgtgtgaggtcttcttccaagcagaagaagaagaaaagaaaaagaaggaaggtaaatcaagaaacaaaagacaatctaagagtacagcttcctttgaggagttgtgtagtgaataccgcaaatccaggaaaaacggacggcttttttgcaccagagagaatgaccccatccagggcccagatggaaaaatgcatggcaacacctgctccatgtgtgaggccttctttcaacaagaagaaagagcaagagcaaaggctaaaagagaagctgcaaaggaaatctgcagtgaatttcgggaccaagtgaggaatggaacacttatatgcaccagggagcataatcctgtccgtggcccagatggcaaaatgcatggaaacaagtgtgccatgtgtgccagtgtgttcaaacttgaagaagaagagaagaaaaatgataaagaagaaaaagggaaagtcgaggctgaaaaagttaagagagaagcagttcaggagctgtgcagtgaatatcgtcattatgtgaggaatggacgactcccctgtaccagagagaatgatcctattgagggtctagatgggaaaatccacggcaacacctgctccatgtgtgaagccttcttccagcaagaagcaaaagaaaaagaaagagctgaacccagagcaaaagtcaaaagagaagctgaaaaggagacatgcgatgaatttcggagacttttgcaaaatggaaaacttttctgcacaagagaaaatgatcctgtgcgtggcccagatggcaagacccatggcaacaagtgtgccatgtgtaaggcagtcttccagaaagaaaatgaggaaagaaagaggaaagaagaggaagatcagagaaatgctgcaggacatggttccagtggtggtggaggaggaaacactcaggacgaatgtgctgagtatcgggaacaaatgaaaaatggaagactcagctgtactcgggagagtgatcctgtacgtgatgctgatggcaaatcgtacaacaatcagtgtaccatgtgtaaagcaaaattggaaagagaagcagagagaaaaaatgagtattctcgctccagatcaaatgggactggatcagaatcagggaaggatacatgtgatgagtttagaagccaaatgaaaaatggaaaactcatctgcactcgagaaagtgaccctgtccggggtccagatggcaagacacatggcaataagtgtactatgtgtaaggaaaaactggaaagggaagcagctgaaaaaaaaaagaaagaggatgaagacaggagcaatacaggagaaaggagcaatacaggagaaaggagcaatgacaaagaggatctgtgtcgtgaatttcgaagcatgcagagaaatggaaagcttatctgcaccagagaaaataaccctgttcgaggcccatatggcaagatgcacatcaataaatgtgctatgtgtcagagcatctttgatcgagaagctaatgaaagaaaaaagaaagatgaagagaaatcaagtagcaagccctcaaataatgcaaaggaccagtgcagacaggttcagaatgaagcggaggatgcaaaatttagacaacctgggcgttccttggcctctgttgccaggatgagtacagatgagtgcagtgaatttcgaaactatataaggaacaatgaactcatctgccctagagagaatgacccagtgcacggtgctgatggaaagttctatacaaacaagtgctacatgtgcagagctgtctttctaacagaagctttggaaagggcaaagcttcaagaaaagccatcccatgttagagcttctcaagaggaagacagcccagactctttcagttctctggattctgagatgtgcaaagactaccgagtattgcccaggataggttatctttgtccaaaggatttaaagcctgtctgtggtgacgatggccaaacctacaacaatccttgcatgctctgtcatgaaaacctgatacgccaaacaaatacacacatccgcagtacagggaagtgtgaggagagcagcaccccaggaaccaccgcagccagcatgcccccgtctgacgaatgacaggaagattgttgaaagccatgagggaaaaaataaaccccagttctgaatcacctaccttcaccatctgtatatacaaagaattcttcggagcttgtcttatttgctatagaaaacaatacagagcttttgggaatggactcactgattttcagtcttttccatctctttcctcctagactctgtgatctgagggtataaagacatctccaccaagtctgagccctcaaaatgtcctgattacaatgctgtctgtccaactgcctgttcaataaaagtaaactcagcagaacaccct

SEQ ID NO: 45334 - DNA, 2915 bp, Artificial Sequence
  derived and/or modified sequence
ccgagttcagtcatactgcaccagctgagcaatgcatggagtggacctgtaggcgacttgcatcgtcttcaacatgaagatagccacagtgtcagtgcttctgcccttggctctttgcctcatacaagatgctgccagtaagaatgaagatcaggaaatgtgccatgaatttcaggcatttatgaaaaatggaaaactgttctgtccccaggataagaaattttttcaaagtcttgatggaataatgttcatcaataaatgtgccacgtgcaaaatgatactggaaaaagaagcaaaatcacagaagagggccaggcatttagcaagagctcccaaggctactgccccaacagagctgaattgtgatgattttaaaaaaggagaaagagatggggattttatctgtcctgattattatgaagctgtttgtggcacagatgggaaaacatatgacaacagatgtgcactgtgtgctgagaatgcgaaaaccgggtcccaaattggtgtaaaaagtgaaggggaatgtaagagcagtaatccagagcaggatgtatgcagtgcttttcggccctttgttagagatggaagacttggatgcacaagggaaaatgatcctgttcttggtcctgatgggaagacgcatggcaataagtgtgcaatgtgtgctgagctgtttttaaaagaagctgaaaatgccaagcgagagggtgaaactagaattcgacgaaatgctgaaaaggatttttgcaaggaatatgaaaaacaagtgagaaatggaaggcttttttgtacacgggagagtgatccagtccgtggccctgacggcaggatgcatggcaacaaatgtgccctgtgtgctgaaattttcaagcagcgtttttcagaggaaaacagtaaaacagatcaaaatttgggaaaagctgaagaaaaaactaaagttaaaagagaaattgtgaaactctgcagtcaatatcaaaatcaggcaaagaatggaatacttttctgtaccagagaaaatgaccctattcgtggtccagatgggaaaatgcatggcaacttgtgttccatgtgtcaagcctacttccaagcagaaaatgaagaaaagaaaaaggctgaagcacgagctagaaacaaaagagaatctggaaaagcaacctcatatgcagagctttgcagtgaatatcgaaagcttgtgaggaacggaaaacttgcttgcaccagagagaacgatcctatccagggcccagatgggaaagtgcatggcaacacctgctccatgtgtgaggtcttcttccaagcagaagaagaagaaaagaaaaagaaggaaggtaaatcaagaaacaaaagacaatctaagagtacagcttcctttgaggagttgtgtagtgaataccgcaaatccaggaaaaacggacggcttttttgcaccagagagaatgaccccatccagggcccagatggaaaaatgcatggcaacacctgctccatgtgtgaggccttctttcaacaagaagaaagagcaagagcaaaggctaaaagagaagctgcaaaggaaatctgcagtgaatttcgggaccaagtgaggaatggaacacttatatgcaccagggagcataatcctgtccgtggcccagatggcaaaatgcatggaaacaagtgtgccatgtgtgccagtgtgttcaaacttgaagaagaagagaagaaaaatgataaagaagaaaaagggaaagtcgaggctgaaaaagttaagagagaagcagttcaggagctgtgcagtgaatatcgtcattatgtgaggaatggacgactcccctgtaccagagagaatgatcctattgagggtctagatgggaaaatccacggcaacacctgctccatgtgtgaagccttcttccagcaagaagcaaaagaaaaagaaagagctgaacccagagcaaaagtcaaaagagaagctgaaaaggagacatgcgatgaatttcggagacttttgcaaaatggaaaacttttctgcacaagagaaaatgatcctgtgcgtggcccagatggcaagacccatggcaacaagtgtgccatgtgtaaggcagtcttccagaaagaaaatgaggaaagaaagaggaaagaagaggaagatcagagaaatgctgcaggacatggttccagtggtggtggaggaggaaacactcaggacgaatgtgctgagtatcgggaacaaatgaaaaatggaagactcagctgtactcgggagagtgatcctgtacgtgatgctgatggcaaatcgtacaacaatcagtgtaccatgtgtaaagcaaaattggaaagagaagcagagagaaaaaatgagtattctcgctccagatcaaatgggactggatcagaatcagggaaggatacatgtgatgagtttagaagccaaatgaaaaatggaaaactcatctgcactcgagaaagtgaccctgtccggggtccagatggcaagacacatggcaataagtgtactatgtgtaaggaaaaactggaaagggaagcagctgaaaaaaaaaagaaagaggatgaagacaggagcaatacaggagaaaggagcaatacaggagaaaggagcaatgacaaagaggatctgtgtcgtgaatttcgaagcatgcagagaaatggaaagcttatctgcaccagagaaaataaccctgttcgaggcccatatggcaagatgcacatcaataaatgtgctatgtgtcagagcatctttgatcgagaagctaatgaaagaaaaaagaaagatgaagagaaatcaagtagcaagccctcaaataatgcaaaggttatttattaaaggataccaaaataaccattttacttttcaccttcagaattttgcattcttctccagctttgggaataataaatatattaatatcttaact

SEQ ID NO: 45335 - DNA, 3285 bp, Artificial Sequence
  derived and/or modified sequence
atgaagatcgccaccgtgagcgtgctgctgcccctggccctgtgcctgatccaggacgccgccagcaagaacgaggaccaggagatgtgccacgagttccaggccttcatgaagaacggcaagctgttctgcccccaggacaagaagttcttccagagcctggacggcatcatgttcatcaacaagtgcgccacctgcaagatgatcctggagaaggaggccaagagccagaagagagccagacacctggccagagcccccaaggccaccgcccccaccgagctgaactgcgacgacttcaagaagggcgagagagacggcgacttcatctgccccgactactacgaggccgtgtgcggcaccgacggcaagacctacgacaacagatgcgccctgtgcgccgagaacgccaagaccggcagccagatcggcgtgaagagcgagggcgagtgcaagagcagcaaccccgagcaggacgtgtgcagcgccttcagacccttcgtgagagacggcagactgggctgcaccagagagaacgaccccgtgctgggccccgacggcaagacccacggcaacaagtgcgccatgtgcgccgagctgttcctgaaggaggccgagaacgccaagagagagggcgagaccagaatcagaagaaacgccgagaaggacttctgcaaggagtacgagaagcaggtgagaaacggcagactgttctgcaccagagagagcgaccccgtgagaggccccgacggcagaatgcacggcaacaagtgcgccctgtgcgccgagatcttcaagcagagattcagcgaggagaacagcaagaccgaccagaacctgggcaaggccgaggagaagaccaaggtgaagagagagatcgtgaagctgtgcagccagtaccagaaccaggccaagaacggcatcctgttctgcaccagagagaacgaccccatcagaggccccgacggcaagatgcacggcaacctgtgcagcatgtgccaggcctacttccaggccgagaacgaggagaagaagaaggccgaggccagagccagaaacaagagagagagcggcaaggccaccagctacgccgagctgtgcagcgagtacagaaagctggtgagaaacggcaagctggcctgcaccagagagaacgaccccatccagggccccgacggcaaggtgcacggcaacacctgcagcatgtgcgaggtgttcttccaggccgaggaggaggagaagaagaagaaggagggcaagagcagaaacaagagacagagcaagagcaccgccagcttcgaggagctgtgcagcgagtacagaaagagcagaaagaacggcagactgttctgcaccagagagaacgaccccatccagggccccgacggcaagatgcacggcaacacctgcagcatgtgcgaggccttcttccagcaggaggagagagccagagccaaggccaagagagaggccgccaaggagatctgcagcgagttcagagaccaggtgagaaacggcaccctgatctgcaccagagagcacaaccccgtgagaggccccgacggcaagatgcacggcaacaagtgcgccatgtgcgccagcgtgttcaagctggaggaggaggagaagaagaacgacaaggaggagaagggcaaggtggaggccgagaaggtgaagagagaggccgtgcaggagctgtgcagcgagtacagacactacgtgagaaacggcagactgccctgcaccagagagaacgaccccatcgagggcctggacggcaagatccacggcaacacctgcagcatgtgcgaggccttcttccagcaggaggccaaggagaaggagagagccgagcccagagccaaggtgaagagagaggccgagaaggagacctgcgacgagttcagaagactgctgcagaacggcaagctgttctgcaccagagagaacgaccccgtgagaggccccgacggcaagacccacggcaacaagtgcgccatgtgcaaggccgtgttccagaaggagaacgaggagagaaagagaaaggaggaggaggaccagagaaacgccgccggccacggcagcagcggcggcggcggcggcaacacccaggacgagtgcgccgagtacagagagcagatgaagaacggcagactgagctgcaccagagagagcgaccccgtgagagacgccgacggcaagagctacaacaaccagtgcaccatgtgcaaggccaagctggagagagaggccgagagaaagaacgagtacagcagaagcagaagcaacggcaccggcagcgagagcggcaaggacacctgcgacgagttcagaagccagatgaagaacggcaagctgatctgcaccagagagagcgaccccgtgagaggccccgacggcaagacccacggcaacaagtgcaccatgtgcaaggagaagctggagagagaggccgccgagaagaagaagaaggaggacgaggacagaagcaacaccggcgagagaagcaacaccggcgagagaagcaacgacaaggaggacctgtgcagagagttcagaagcatgcagagaaacggcaagctgatctgcaccagagagaacaaccccgtgagaggcccctacggcaagatgcacatcaacaagtgcgccatgtgccagagcatcttcgacagagaggccaacgagagaaagaagaaggacgaggagaagagcagcagcaagcccagcaacaacgccaaggaccagtgcagacaggtgcagaacgaggccgaggacgccaagttcagacagcccggcagaagcctggccagcgtggccagaatgagcaccgacgagtgcagcgagttcagaaactacatcagaaacaacgagctgatctgccccagagagaacgaccccgtgcacggcgccgacggcaagttctacaccaacaagtgctacatgtgcagagccgtgttcctgaccgaggccctggagagagccaagctgcaggagaagcccagccacgtgagagccagccaggaggaggacagccccgacagcttcagcagcctggacagcgagatgtgcaaggactacagagtgctgcccagaatcggctacctgtgccccaaggacctgaagcccgtgtgcggcgacgacggccagacctacaacaacccctgcatgctgtgccacgagaacctgatcagacagaccaacacccacatcagaagcaccggcaagtgcgaggagagcagcacccccggcaccaccgccgccagcatgccccccagcgacgagtag

SEQ ID NO: 45336 - DNA, 2751 bp, Artificial Sequence
  derived and/or modified sequence
atgaagatcgccaccgtgagcgtgctgctgcccctggccctgtgcctgatccaggacgccgccagcaagaacgaggaccaggagatgtgccacgagttccaggccttcatgaagaacggcaagctgttctgcccccaggacaagaagttcttccagagcctggacggcatcatgttcatcaacaagtgcgccacctgcaagatgatcctggagaaggaggccaagagccagaagagagccagacacctggccagagcccccaaggccaccgcccccaccgagctgaactgcgacgacttcaagaagggcgagagagacggcgacttcatctgccccgactactacgaggccgtgtgcggcaccgacggcaagacctacgacaacagatgcgccctgtgcgccgagaacgccaagaccggcagccagatcggcgtgaagagcgagggcgagtgcaagagcagcaaccccgagcaggacgtgtgcagcgccttcagacccttcgtgagagacggcagactgggctgcaccagagagaacgaccccgtgctgggccccgacggcaagacccacggcaacaagtgcgccatgtgcgccgagctgttcctgaaggaggccgagaacgccaagagagagggcgagaccagaatcagaagaaacgccgagaaggacttctgcaaggagtacgagaagcaggtgagaaacggcagactgttctgcaccagagagagcgaccccgtgagaggccccgacggcagaatgcacggcaacaagtgcgccctgtgcgccgagatcttcaagcagagattcagcgaggagaacagcaagaccgaccagaacctgggcaaggccgaggagaagaccaaggtgaagagagagatcgtgaagctgtgcagccagtaccagaaccaggccaagaacggcatcctgttctgcaccagagagaacgaccccatcagaggccccgacggcaagatgcacggcaacctgtgcagcatgtgccaggcctacttccaggccgagaacgaggagaagaagaaggccgaggccagagccagaaacaagagagagagcggcaaggccaccagctacgccgagctgtgcagcgagtacagaaagctggtgagaaacggcaagctggcctgcaccagagagaacgaccccatccagggccccgacggcaaggtgcacggcaacacctgcagcatgtgcgaggtgttcttccaggccgaggaggaggagaagaagaagaaggagggcaagagcagaaacaagagacagagcaagagcaccgccagcttcgaggagctgtgcagcgagtacagaaagagcagaaagaacggcagactgttctgcaccagagagaacgaccccatccagggccccgacggcaagatgcacggcaacacctgcagcatgtgcgaggccttcttccagcaggaggagagagccagagccaaggccaagagagaggccgccaaggagatctgcagcgagttcagagaccaggtgagaaacggcaccctgatctgcaccagagagcacaaccccgtgagaggccccgacggcaagatgcacggcaacaagtgcgccatgtgcgccagcgtgttcaagctggaggaggaggagaagaagaacgacaaggaggagaagggcaaggtggaggccgagaaggtgaagagagaggccgtgcaggagctgtgcagcgagtacagacactacgtgagaaacggcagactgccctgcaccagagagaacgaccccatcgagggcctggacggcaagatccacggcaacacctgcagcatgtgcgaggccttcttccagcaggaggccaaggagaaggagagagccgagcccagagccaaggtgaagagagaggccgagaaggagacctgcgacgagttcagaagactgctgcagaacggcaagctgttctgcaccagagagaacgaccccgtgagaggccccgacggcaagacccacggcaacaagtgcgccatgtgcaaggccgtgttccagaaggagaacgaggagagaaagagaaaggaggaggaggaccagagaaacgccgccggccacggcagcagcggcggcggcggcggcaacacccaggacgagtgcgccgagtacagagagcagatgaagaacggcagactgagctgcaccagagagagcgaccccgtgagagacgccgacggcaagagctacaacaaccagtgcaccatgtgcaaggccaagctggagagagaggccgagagaaagaacgagtacagcagaagcagaagcaacggcaccggcagcgagagcggcaaggacacctgcgacgagttcagaagccagatgaagaacggcaagctgatctgcaccagagagagcgaccccgtgagaggccccgacggcaagacccacggcaacaagtgcaccatgtgcaaggagaagctggagagagaggccgccgagaagaagaagaaggaggacgaggacagaagcaacaccggcgagagaagcaacaccggcgagagaagcaacgacaaggaggacctgtgcagagagttcagaagcatgcagagaaacggcaagctgatctgcaccagagagaacaaccccgtgagaggcccctacggcaagatgcacatcaacaagtgcgccatgtgccagagcatcttcgacagagaggccaacgagagaaagaagaaggacgaggagaagagcagcagcaagcccagcaacaacgccaaggtgatctactag

SEQ ID NO: 45337 - protein, 916 aa, Artificial Sequence
  derived and/or modified sequence
MKIATVSVLLPLALCLIQDAASKNEDQEMCHEFQAFMKNGKLFCPQDKKFFQSLDGIMFINKCATCKMILEKEAKSQKRARHLARAPKATAPTELNCDDFKKGERDGDFICPDYYEAVCGTDGKTYDNRCALCAENAKTGSQIGVKSEGECKSSNPEQDVCSAFRPFVRDGRLGCTRENDPVLGPDGKTHGNKCAMCAELFLKEAENAKREGETRIRRNAEKDFCKEYEKQVRNGRLFCTRESDPVRGPDGRMHGNKCALCAEIFKQRFSEENSKTDQNLGKAEEKTKVKREIVKLCSQYQNQAKNGILFCTRENDPIRGPDGKMHGNLCSMCQAYFQAENEEKKKAEARARNKRESGKATSYAELCSEYRKLVRNGKLACTRENDPIQGPDGKVHGNTCSMCEVFFQAEEEEKKKKEGKSRNKRQSKSTASFEELCSEYRKSRKNGRLFCTRENDPIQGPDGKMHGNTCSMCEAFFQQEERARAKAKREAAKEICSEFRDQVRNGTLICTREHNPVRGPDGKMHGNKCAMCASVFKLEEEEKKNDKEEKGKVEAEKVKREAVQELCSEYRHYVRNGRLPCTRENDPIEGLDGKIHGNTCSMCEAFFQQEAKEKERAEPRAKVKREAEKETCDEFRRLLQNGKLFCTRENDPVRGPDGKTHGNKCAMCKAVFQKENEERKRKEEEDQRNAAGHGSSGGGGGNTQDECAEYREQMKNGRLSCTRESDPVRDADGKSYNNQCTMCKAKLEREAERKNEYSRSRSNGTGSESGKDTCDEFRSQMKNGKLICTRESDPVRGPDGKTHGNKCTMCKEKLEREAAEKKKKEDEDRSNTGERSNTGERSNDKEDLCREFRSMQRNGKLICTRENNPVRGPYGKMHINKCAMCQSIFDREANERKKKDEEKSSSKPSNNAKVIY

SEQ ID NO: 45338 - protein, 25 aa, Artificial Sequence
  derived and/or modified sequence
MMPSSVSWGILLLAGLCCLVPVSLA

SEQ ID NO: 45339 - protein, 24 aa, Artificial Sequence
  derived and/or modified sequence
MMPSSVSWGILLAGLCCLVPVSLA

SEQ ID NO: 45340 - protein, 418 aa, Artificial Sequence
  derived and/or modified sequence
MPSSVSWGILLLAGLCCLVPVSLAEDPQGDAAQKTDTSHHDQDHPTFNKITPNLAEFAFSLYRQLAHQSNSTNIFFSPVSIATAFAMLSLGTKADTHDEILEGLNFNLTEIPEAQIHEGFQELLRTLNQPDSQLQLTTGNGLFLSEGLKLVDKFLEDVKKLYHSEAFTVNFGDTEEAKKQINDYVEKGTQGKIVDLVKELDRDTVFALVNYIFFKGKWERPFEVKDTEEEDFHVDQVTTVKVPMMKRLGMFNIQHCKKLSSWVLLMKYLGNATAIFFLPDEGKLQHLENELTHDIITKFLENEDRRSASLHLPKLSITGTYDLKSVLGQLGITKVFSNGADLSGVTEEAPLKLSKAVHKAVLTIDEKGTEAAGAMFLEAIPMSIPPEVKFNKPFVFLMIEQNTKSPLFMGKVVNPTQK

SEQ ID NO: 45341 - protein, 359 aa, Artificial Sequence
  derived and/or modified sequence
MPSSVSWGILLLAGLCCLVPVSLAEDPQGDAAQKTDTSHHDQDHPTFNKITPNLAEFAFSLYRQLAHQSNSTNIFFSPVSIATAFAMLSLGTKADTHDEILEGLNFNLTEIPEAQIHEGFQELLRTLNQPDSQLQLTTGNGLFLSEGLKLVDKFLEDVKKLYHSEAFTVNFGDTEEAKKQINDYVEKGTQGKIVDLVKELDRDTVFALVNYIFFKGKWERPFEVKDTEEEDFHVDQVTTVKVPMMKRLGMFNIQHCKKLSSWVLLMKYLGNATAIFFLPDEGKLQHLENELTHDIITKFLENEDRRSASLHLPKLSITGTYDLKSVLGQLGITKVFSNGADLSGVTEEAPLKLSKVRSP

SEQ ID NO: 45342 - protein, 92 aa, Artificial Sequence
  derived and/or modified sequence
MPSSVSWGILLLAGLCCLVPVSLAEDPQGDAAQKTDTSHHDQDHPTFNKITPNLAEFAFSLYRQLAHQSNSTNIFFSPVSIATAFAMLSLGT

SEQ ID NO: 45343 - protein, 156 aa, Artificial Sequence
  derived and/or modified sequence
MPSSVSWGILLLAGLCCLVPVSLAEDPQGDAAQKTDTSHHDQDHPTFNKITPNLAEFAFSLYRQLAHQSNSTNIFFSPVSIATAFAMLSLGTKADTHDEILEGLNFNLTEIPEAQIHEGFQELLRTLNQPDSQLQLTTGNGLFLSEGLKLVDKFLE

SEQ ID NO: 45344 - protein, 117 aa, Artificial Sequence
  derived and/or modified sequence
MPSSVSWGILLLAGLCCLVPVSLAEDPQGDAAQKTDTSHHDQDHPTFNKITPNLAEFAFSLYRQLAHQSNSTNIFFSPVSIATAFAMLSLGTKADTHDEILEGLNFNLTEIPEAQIH

SEQ ID NO: 45345 - protein, 22 aa, Artificial Sequence
  derived and/or modified sequence
MPSSVSWGILLLAGLCCLVPVS

SEQ ID NO: 45346 - protein, 144 aa, Artificial Sequence
  derived and/or modified sequence
MPSSVSWGILLLAGLCCLVPVSLAEDPQGDAAQKTDTSHHDQDHPTFNKITPNLAEFAFSLYRQLAHQSNSTNIFFSPVSIATAFAMLSLGTKADTHDEILEGLNFNLTEIPEAQIHEGFQELLRTLNQPDSQLQLTTGNGLFL

SEQ ID NO: 45347 - protein, 14 aa, Artificial Sequence
  derived and/or modified sequence
ITPNLAEFAFSLYR

SEQ ID NO: 45348 - protein, 63 aa, Artificial Sequence
  derived and/or modified sequence
MPSSVSWGILLLAGLCCLVPVSLAHGEGTFTSDLSKQMEEEAVRLFIEWLKNGGPSSGAPPPS

SEQ ID NO: 45349 - DNA, 3199 bp, Artificial Sequence
  derived and/or modified sequence
tgggcaggaactgggcactgtgcccagggcatgcactgcctccacgcagcaaccctcagagtcctgagctgaaccaagaaggaggagggggtcgggcctccgaggaaggcctagccgctgctgctgccaggaattccaggttggaggggcggcaacctcctgccagccttcaggccactctcctgtgcctgccagaagagacagagcttgaggagagcttgaggagagcaggaaaggacaatgccgtcttctgtctcgtggggcatcctcctgctggcaggcctgtgctgcctggtccctgtctccctggctgaggatccccagggagatgctgcccagaagacagatacatcccaccatgatcaggatcacccaaccttcaacaagatcacccccaacctggctgagttcgccttcagcctataccgccagctggcacaccagtccaacagcaccaatatcttcttctccccagtgagcatcgctacagcctttgcaatgctctccctggggaccaaggctgacactcacgatgaaatcctggagggcctgaatttcaacctcacggagattccggaggctcagatccatgaaggcttccaggaactcctccgtaccctcaaccagccagacagccagctccagctgaccaccggcaatggcctgttcctcagcgagggcctgaagctagtggataagtttttggaggatgttaaaaagttgtaccactcagaagccttcactgtcaacttcggggacaccgaagaggccaagaaacagatcaacgattacgtggagaagggtactcaagggaaaattgtggatttggtcaaggagcttgacagagacacagtttttgctctggtgaattacatcttctttaaaggcaaatgggagagaccctttgaagtcaaggacaccgaggaagaggacttccacgtggaccaggtgaccaccgtgaaggtgcctatgatgaagcgtttaggcatgtttaacatccagcactgtaagaagctgtccagctgggtgctgctgatgaaatacctgggcaatgccaccgccatcttcttcctgcctgatgaggggaaactacagcacctggaaaatgaactcacccacgatatcatcaccaagttcctggaaaatgaagacagaaggtctgccagcttacatttacccaaactgtccattactggaacctatgatctgaagagcgtcctgggtcaactgggcatcactaaggtcttcagcaatggggctgacctctccggggtcacagaggaggcacccctgaagctctccaaggccgtgcataaggctgtgctgaccatcgacgagaaagggactgaagctgctggggccatgtttttagaggccatacccatgtctatcccccccgaggtcaagttcaacaaaccctttgtcttcttaatgattgaacaaaataccaagtctcccctcttcatgggaaaagtggtgaatcccacccaaaaataactgcctctcgctcctcaacccctcccctccatccctggccccctccctggatgacattaaagaagggttgagctggtccctgcctgcatgtgactgtaaatccctcccatgttttctctgagtctccctttgcctgctgaggctgtatgtgggctccaggtaacagtgctgtcttcgggccccctgaactgtgttcatggagcatctggctgggtaggcacatgctgggcttgaatccaggggggactgaatcctcagcttacggacctgggcccatctgtttctggagggctccagtcttccttgtcctgtcttggagtccccaagaaggaatcacaggggaggaaccagataccagccatgaccccaggctccaccaagcatcttcatgtccccctgctcatcccccactcccccccacccagagttgctcatcctgccagggctggctgtgcccaccccaaggctgccctcctgggggccccagaactgcctgatcgtgccgtggcccagttttgtggcatctgcagcaacacaagagagaggacaatgtcctcctcttgacccgctgtcacctaaccagactcgggccctgcacctctcaggcacttctggaaaatgactgaggcagattcttcctgaagcccattctccatggggcaacaaggacacctattctgtccttgtccttccatcgctgccccagaaagcctcacatatctccgtttagaatcaggtcccttctccccagatgaagaggagggtctctgctttgttttctctatctcctcctcagacttgaccaggcccagcaggccccagaagaccattaccctatatcccttctcctccctagtcacatggccataggcctgctgatggctcaggaaggccattgcaaggactcctcagctatgggagaggaagcacatcacccattgacccccgcaacccctccctttcctcctctgagtcccgactggggccacatgcagcctgacttctttgtgcctgttgctgtccctgcagtcttcagagggccaccgcagctccagtgccacggcaggaggctgttcctgaatagcccctgtggtaagggccaggagagtccttccatcctccaaggccctgctaaaggacacagcagccaggaagtcccctgggcccctagctgaaggacagcctgctccctccgtctctaccaggaatggccttgtcctatggaaggcactgccccatcccaaactaatctaggaatcactgtctaaccactcactgtcatgaatgtgtacttaaaggatgaggttgagtcataccaaatagtgatttcgatagttcaaaatggtgaaattagcaattctacatgattcagtctaatcaatggataccgactgtttcccacacaagtctcctgttctcttaagcttactcactgacagcctttcactctccacaaatacattaaagatatggccatcaccaagccccctaggatgacaccagacctgagagtctgaagacctggatccaagttctgacttttccccctgacagctgtgtgaccttcgtgaagtcgccaaacctctctgagccccagtcattgctagtaagacctgcctttgagttggtatgatgttcaagttagataacaaaatgtttatacccattagaacagagaataaatagaactacatttcttgca

SEQ ID NO: 45350 - DNA, 3220 bp, Artificial Sequence
  derived and/or modified sequence
acaatgactcctttcggtaagtgcagtggaagctgtacactgcccaggcaaagcgtccgggcagcgtaggcgggcgactcagatcccagccagtggacttagcccctgtttgctcctccgataactggggtgaccttggttaatattcaccagcagcctcccccgttgcccctctggatccactgcttaaatacggacgaggacagggccctgtctcctcagcttcaggcaccaccactgacctgggacagtgaatcgacaatgccgtcttctgtctcgtggggcatcctcctgctggcaggcctgtgctgcctggtccctgtctccctggctgaggatccccagggagatgctgcccagaagacagatacatcccaccatgatcaggatcacccaaccttcaacaagatcacccccaacctggctgagttcgccttcagcctataccgccagctggcacaccagtccaacagcaccaatatcttcttctccccagtgagcatcgctacagcctttgcaatgctctccctggggaccaaggctgacactcacgatgaaatcctggagggcctgaatttcaacctcacggagattccggaggctcagatccatgaaggcttccaggaactcctccgtaccctcaaccagccagacagccagctccagctgaccaccggcaatggcctgttcctcagcgagggcctgaagctagtggataagtttttggaggatgttaaaaagttgtaccactcagaagccttcactgtcaacttcggggacaccgaagaggccaagaaacagatcaacgattacgtggagaagggtactcaagggaaaattgtggatttggtcaaggagcttgacagagacacagtttttgctctggtgaattacatcttctttaaaggcaaatgggagagaccctttgaagtcaaggacaccgaggaagaggacttccacgtggaccaggtgaccaccgtgaaggtgcctatgatgaagcgtttaggcatgtttaacatccagcactgtaagaagctgtccagctgggtgctgctgatgaaatacctgggcaatgccaccgccatcttcttcctgcctgatgaggggaaactacagcacctggaaaatgaactcacccacgatatcatcaccaagttcctggaaaatgaagacagaaggtctgccagcttacatttacccaaactgtccattactggaacctatgatctgaagagcgtcctgggtcaactgggcatcactaaggtcttcagcaatggggctgacctctccggggtcacagaggaggcacccctgaagctctccaaggccgtgcataaggctgtgctgaccatcgacgagaaagggactgaagctgctggggccatgtttttagaggccatacccatgtctatcccccccgaggtcaagttcaacaaaccctttgtcttcttaatgattgaacaaaataccaagtctcccctcttcatgggaaaagtggtgaatcccacccaaaaataactgcctctcgctcctcaacccctcccctccatccctggccccctccctggatgacattaaagaagggttgagctggtccctgcctgcatgtgactgtaaatccctcccatgttttctctgagtctccctttgcctgctgaggctgtatgtgggctccaggtaacagtgctgtcttcgggccccctgaactgtgttcatggagcatctggctgggtaggcacatgctgggcttgaatccaggggggactgaatcctcagcttacggacctgggcccatctgtttctggagggctccagtcttccttgtcctgtcttggagtccccaagaaggaatcacaggggaggaaccagataccagccatgaccccaggctccaccaagcatcttcatgtccccctgctcatcccccactcccccccacccagagttgctcatcctgccagggctggctgtgcccaccccaaggctgccctcctgggggccccagaactgcctgatcgtgccgtggcccagttttgtggcatctgcagcaacacaagagagaggacaatgtcctcctcttgacccgctgtcacctaaccagactcgggccctgcacctctcaggcacttctggaaaatgactgaggcagattcttcctgaagcccattctccatggggcaacaaggacacctattctgtccttgtccttccatcgctgccccagaaagcctcacatatctccgtttagaatcaggtcccttctccccagatgaagaggagggtctctgctttgttttctctatctcctcctcagacttgaccaggcccagcaggccccagaagaccattaccctatatcccttctcctccctagtcacatggccataggcctgctgatggctcaggaaggccattgcaaggactcctcagctatgggagaggaagcacatcacccattgacccccgcaacccctccctttcctcctctgagtcccgactggggccacatgcagcctgacttctttgtgcctgttgctgtccctgcagtcttcagagggccaccgcagctccagtgccacggcaggaggctgttcctgaatagcccctgtggtaagggccaggagagtccttccatcctccaaggccctgctaaaggacacagcagccaggaagtcccctgggcccctagctgaaggacagcctgctccctccgtctctaccaggaatggccttgtcctatggaaggcactgccccatcccaaactaatctaggaatcactgtctaaccactcactgtcatgaatgtgtacttaaaggatgaggttgagtcataccaaatagtgatttcgatagttcaaaatggtgaaattagcaattctacatgattcagtctaatcaatggataccgactgtttcccacacaagtctcctgttctcttaagcttactcactgacagcctttcactctccacaaatacattaaagatatggccatcaccaagccccctaggatgacaccagacctgagagtctgaagacctggatccaagttctgacttttccccctgacagctgtgtgaccttcgtgaagtcgccaaacctctctgagccccagtcattgctagtaagacctgcctttgagttggtatgatgttcaagttagataacaaaatgtttatacccattagaacagagaataaatagaactacatttcttgca

SEQ ID NO: 45351 - DNA, 3513 bp, Artificial Sequence
  derived and/or modified sequence
tgggcaggaactgggcactgtgcccagggcatgcactgcctccacgcagcaaccctcagagtcctgagctgaaccaagaaggaggagggggtcgggcctccgaggaaggcctagccgctgctgctgccaggaattccaggttggaggggcggcaacctcctgccagccttcaggccactctcctgtgcctgccagaagagacagagcttgaggagagcttgaggagagcaggaaagggcggcagtaagtcttcagcatcaggcattttggggtgactcagtaaatggtagatcttgctaccagtggaacagccactaaggattctgcagtgagagcagagggccagctaagtggtactctcccagagactgtctgactcacgccaccccctccaccttggacacaggacgctgtggtttctgagccaggtacaatgactcctttcgcagcctcccccgttgcccctctggatccactgcttaaatacggacgaggacagggccctgtctcctcagcttcaggcaccaccactgacctgggacagtgaatcgacaatgccgtcttctgtctcgtggggcatcctcctgctggcaggcctgtgctgcctggtccctgtctccctggctgaggatccccagggagatgctgcccagaagacagatacatcccaccatgatcaggatcacccaaccttcaacaagatcacccccaacctggctgagttcgccttcagcctataccgccagctggcacaccagtccaacagcaccaatatcttcttctccccagtgagcatcgctacagcctttgcaatgctctccctggggaccaaggctgacactcacgatgaaatcctggagggcctgaatttcaacctcacggagattccggaggctcagatccatgaaggcttccaggaactcctccgtaccctcaaccagccagacagccagctccagctgaccaccggcaatggcctgttcctcagcgagggcctgaagctagtggataagtttttggaggatgttaaaaagttgtaccactcagaagccttcactgtcaacttcggggacaccgaagaggccaagaaacagatcaacgattacgtggagaagggtactcaagggaaaattgtggatttggtcaaggagcttgacagagacacagtttttgctctggtgaattacatcttctttaaaggcaaatgggagagaccctttgaagtcaaggacaccgaggaagaggacttccacgtggaccaggtgaccaccgtgaaggtgcctatgatgaagcgtttaggcatgtttaacatccagcactgtaagaagctgtccagctgggtgctgctgatgaaatacctgggcaatgccaccgccatcttcttcctgcctgatgaggggaaactacagcacctggaaaatgaactcacccacgatatcatcaccaagttcctggaaaatgaagacagaaggtctgccagcttacatttacccaaactgtccattactggaacctatgatctgaagagcgtcctgggtcaactgggcatcactaaggtcttcagcaatggggctgacctctccggggtcacagaggaggcacccctgaagctctccaaggccgtgcataaggctgtgctgaccatcgacgagaaagggactgaagctgctggggccatgtttttagaggccatacccatgtctatcccccccgaggtcaagttcaacaaaccctttgtcttcttaatgattgaacaaaataccaagtctcccctcttcatgggaaaagtggtgaatcccacccaaaaataactgcctctcgctcctcaacccctcccctccatccctggccccctccctggatgacattaaagaagggttgagctggtccctgcctgcatgtgactgtaaatccctcccatgttttctctgagtctccctttgcctgctgaggctgtatgtgggctccaggtaacagtgctgtcttcgggccccctgaactgtgttcatggagcatctggctgggtaggcacatgctgggcttgaatccaggggggactgaatcctcagcttacggacctgggcccatctgtttctggagggctccagtcttccttgtcctgtcttggagtccccaagaaggaatcacaggggaggaaccagataccagccatgaccccaggctccaccaagcatcttcatgtccccctgctcatcccccactcccccccacccagagttgctcatcctgccagggctggctgtgcccaccccaaggctgccctcctgggggccccagaactgcctgatcgtgccgtggcccagttttgtggcatctgcagcaacacaagagagaggacaatgtcctcctcttgacccgctgtcacctaaccagactcgggccctgcacctctcaggcacttctggaaaatgactgaggcagattcttcctgaagcccattctccatggggcaacaaggacacctattctgtccttgtccttccatcgctgccccagaaagcctcacatatctccgtttagaatcaggtcccttctccccagatgaagaggagggtctctgctttgttttctctatctcctcctcagacttgaccaggcccagcaggccccagaagaccattaccctatatcccttctcctccctagtcacatggccataggcctgctgatggctcaggaaggccattgcaaggactcctcagctatgggagaggaagcacatcacccattgacccccgcaacccctccctttcctcctctgagtcccgactggggccacatgcagcctgacttctttgtgcctgttgctgtccctgcagtcttcagagggccaccgcagctccagtgccacggcaggaggctgttcctgaatagcccctgtggtaagggccaggagagtccttccatcctccaaggccctgctaaaggacacagcagccaggaagtcccctgggcccctagctgaaggacagcctgctccctccgtctctaccaggaatggccttgtcctatggaaggcactgccccatcccaaactaatctaggaatcactgtctaaccactcactgtcatgaatgtgtacttaaaggatgaggttgagtcataccaaatagtgatttcgatagttcaaaatggtgaaattagcaattctacatgattcagtctaatcaatggataccgactgtttcccacacaagtctcctgttctcttaagcttactcactgacagcctttcactctccacaaatacattaaagatatggccatcaccaagccccctaggatgacaccagacctgagagtctgaagacctggatccaagttctgacttttccccctgacagctgtgtgaccttcgtgaagtcgccaaacctctctgagccccagtcattgctagtaagacctgcctttgagttggtatgatgttcaagttagataacaaaatgtttatacccattagaacagagaataaatagaactacatttcttgca

SEQ ID NO: 45352 - DNA, 3236 bp, Artificial Sequence
  derived and/or modified sequence
tgggcaggaactgggcactgtgcccagggcatgcactgcctccacgcagcaaccctcagagtcctgagctgaaccaagaaggaggagggggtcgggcctccgaggaaggcctagccgctgctgctgccaggaattccaggttggaggggcggcaacctcctgccagccttcaggccactctcctgtgcctgccagaagagacagagcttgaggagagcttgaggagagcaggaaaggtgggacattgctgctgctgctcactcagttccacaggacaatgccgtcttctgtctcgtggggcatcctcctgctggcaggcctgtgctgcctggtccctgtctccctggctgaggatccccagggagatgctgcccagaagacagatacatcccaccatgatcaggatcacccaaccttcaacaagatcacccccaacctggctgagttcgccttcagcctataccgccagctggcacaccagtccaacagcaccaatatcttcttctccccagtgagcatcgctacagcctttgcaatgctctccctggggaccaaggctgacactcacgatgaaatcctggagggcctgaatttcaacctcacggagattccggaggctcagatccatgaaggcttccaggaactcctccgtaccctcaaccagccagacagccagctccagctgaccaccggcaatggcctgttcctcagcgagggcctgaagctagtggataagtttttggaggatgttaaaaagttgtaccactcagaagccttcactgtcaacttcggggacaccgaagaggccaagaaacagatcaacgattacgtggagaagggtactcaagggaaaattgtggatttggtcaaggagcttgacagagacacagtttttgctctggtgaattacatcttctttaaaggcaaatgggagagaccctttgaagtcaaggacaccgaggaagaggacttccacgtggaccaggtgaccaccgtgaaggtgcctatgatgaagcgtttaggcatgtttaacatccagcactgtaagaagctgtccagctgggtgctgctgatgaaatacctgggcaatgccaccgccatcttcttcctgcctgatgaggggaaactacagcacctggaaaatgaactcacccacgatatcatcaccaagttcctggaaaatgaagacagaaggtctgccagcttacatttacccaaactgtccattactggaacctatgatctgaagagcgtcctgggtcaactgggcatcactaaggtcttcagcaatggggctgacctctccggggtcacagaggaggcacccctgaagctctccaaggccgtgcataaggctgtgctgaccatcgacgagaaagggactgaagctgctggggccatgtttttagaggccatacccatgtctatcccccccgaggtcaagttcaacaaaccctttgtcttcttaatgattgaacaaaataccaagtctcccctcttcatgggaaaagtggtgaatcccacccaaaaataactgcctctcgctcctcaacccctcccctccatccctggccccctccctggatgacattaaagaagggttgagctggtccctgcctgcatgtgactgtaaatccctcccatgttttctctgagtctccctttgcctgctgaggctgtatgtgggctccaggtaacagtgctgtcttcgggccccctgaactgtgttcatggagcatctggctgggtaggcacatgctgggcttgaatccaggggggactgaatcctcagcttacggacctgggcccatctgtttctggagggctccagtcttccttgtcctgtcttggagtccccaagaaggaatcacaggggaggaaccagataccagccatgaccccaggctccaccaagcatcttcatgtccccctgctcatcccccactcccccccacccagagttgctcatcctgccagggctggctgtgcccaccccaaggctgccctcctgggggccccagaactgcctgatcgtgccgtggcccagttttgtggcatctgcagcaacacaagagagaggacaatgtcctcctcttgacccgctgtcacctaaccagactcgggccctgcacctctcaggcacttctggaaaatgactgaggcagattcttcctgaagcccattctccatggggcaacaaggacacctattctgtccttgtccttccatcgctgccccagaaagcctcacatatctccgtttagaatcaggtcccttctccccagatgaagaggagggtctctgctttgttttctctatctcctcctcagacttgaccaggcccagcaggccccagaagaccattaccctatatcccttctcctccctagtcacatggccataggcctgctgatggctcaggaaggccattgcaaggactcctcagctatgggagaggaagcacatcacccattgacccccgcaacccctccctttcctcctctgagtcccgactggggccacatgcagcctgacttctttgtgcctgttgctgtccctgcagtcttcagagggccaccgcagctccagtgccacggcaggaggctgttcctgaatagcccctgtggtaagggccaggagagtccttccatcctccaaggccctgctaaaggacacagcagccaggaagtcccctgggcccctagctgaaggacagcctgctccctccgtctctaccaggaatggccttgtcctatggaaggcactgccccatcccaaactaatctaggaatcactgtctaaccactcactgtcatgaatgtgtacttaaaggatgaggttgagtcataccaaatagtgatttcgatagttcaaaatggtgaaattagcaattctacatgattcagtctaatcaatggataccgactgtttcccacacaagtctcctgttctcttaagcttactcactgacagcctttcactctccacaaatacattaaagatatggccatcaccaagccccctaggatgacaccagacctgagagtctgaagacctggatccaagttctgacttttccccctgacagctgtgtgaccttcgtgaagtcgccaaacctctctgagccccagtcattgctagtaagacctgcctttgagttggtatgatgttcaagttagataacaaaatgtttatacccattagaacagagaataaatagaactacatttcttgca

SEQ ID NO: 45353 - DNA, 3532 bp, Artificial Sequence
  derived and/or modified sequence
tgggcaggaactgggcactgtgcccagggcatgcactgcctccacgcagcaaccctcagagtcctgagctgaaccaagaaggaggagggggtcgggcctccgaggaaggcctagccgctgctgctgccaggaattccaggttggaggggcggcaacctcctgccagccttcaggccactctcctgtgcctgccagaagagacagagcttgaggagagcttgaggagagcaggaaaggtgggacattgctgctgctgctcactcagttccacagggcggcagtaagtcttcagcatcaggcattttggggtgactcagtaaatggtagatcttgctaccagtggaacagccactaaggattctgcagtgagagcagagggccagctaagtggtactctcccagagactgtctgactcacgccaccccctccaccttggacacaggacgctgtggtttctgagccagcagcctcccccgttgcccctctggatccactgcttaaatacggacgaggacagggccctgtctcctcagcttcaggcaccaccactgacctgggacagtgaatcgacaatgccgtcttctgtctcgtggggcatcctcctgctggcaggcctgtgctgcctggtccctgtctccctggctgaggatccccagggagatgctgcccagaagacagatacatcccaccatgatcaggatcacccaaccttcaacaagatcacccccaacctggctgagttcgccttcagcctataccgccagctggcacaccagtccaacagcaccaatatcttcttctccccagtgagcatcgctacagcctttgcaatgctctccctggggaccaaggctgacactcacgatgaaatcctggagggcctgaatttcaacctcacggagattccggaggctcagatccatgaaggcttccaggaactcctccgtaccctcaaccagccagacagccagctccagctgaccaccggcaatggcctgttcctcagcgagggcctgaagctagtggataagtttttggaggatgttaaaaagttgtaccactcagaagccttcactgtcaacttcggggacaccgaagaggccaagaaacagatcaacgattacgtggagaagggtactcaagggaaaattgtggatttggtcaaggagcttgacagagacacagtttttgctctggtgaattacatcttctttaaaggcaaatgggagagaccctttgaagtcaaggacaccgaggaagaggacttccacgtggaccaggtgaccaccgtgaaggtgcctatgatgaagcgtttaggcatgtttaacatccagcactgtaagaagctgtccagctgggtgctgctgatgaaatacctgggcaatgccaccgccatcttcttcctgcctgatgaggggaaactacagcacctggaaaatgaactcacccacgatatcatcaccaagttcctggaaaatgaagacagaaggtctgccagcttacatttacccaaactgtccattactggaacctatgatctgaagagcgtcctgggtcaactgggcatcactaaggtcttcagcaatggggctgacctctccggggtcacagaggaggcacccctgaagctctccaaggccgtgcataaggctgtgctgaccatcgacgagaaagggactgaagctgctggggccatgtttttagaggccatacccatgtctatcccccccgaggtcaagttcaacaaaccctttgtcttcttaatgattgaacaaaataccaagtctcccctcttcatgggaaaagtggtgaatcccacccaaaaataactgcctctcgctcctcaacccctcccctccatccctggccccctccctggatgacattaaagaagggttgagctggtccctgcctgcatgtgactgtaaatccctcccatgttttctctgagtctccctttgcctgctgaggctgtatgtgggctccaggtaacagtgctgtcttcgggccccctgaactgtgttcatggagcatctggctgggtaggcacatgctgggcttgaatccaggggggactgaatcctcagcttacggacctgggcccatctgtttctggagggctccagtcttccttgtcctgtcttggagtccccaagaaggaatcacaggggaggaaccagataccagccatgaccccaggctccaccaagcatcttcatgtccccctgctcatcccccactcccccccacccagagttgctcatcctgccagggctggctgtgcccaccccaaggctgccctcctgggggccccagaactgcctgatcgtgccgtggcccagttttgtggcatctgcagcaacacaagagagaggacaatgtcctcctcttgacccgctgtcacctaaccagactcgggccctgcacctctcaggcacttctggaaaatgactgaggcagattcttcctgaagcccattctccatggggcaacaaggacacctattctgtccttgtccttccatcgctgccccagaaagcctcacatatctccgtttagaatcaggtcccttctccccagatgaagaggagggtctctgctttgttttctctatctcctcctcagacttgaccaggcccagcaggccccagaagaccattaccctatatcccttctcctccctagtcacatggccataggcctgctgatggctcaggaaggccattgcaaggactcctcagctatgggagaggaagcacatcacccattgacccccgcaacccctccctttcctcctctgagtcccgactggggccacatgcagcctgacttctttgtgcctgttgctgtccctgcagtcttcagagggccaccgcagctccagtgccacggcaggaggctgttcctgaatagcccctgtggtaagggccaggagagtccttccatcctccaaggccctgctaaaggacacagcagccaggaagtcccctgggcccctagctgaaggacagcctgctccctccgtctctaccaggaatggccttgtcctatggaaggcactgccccatcccaaactaatctaggaatcactgtctaaccactcactgtcatgaatgtgtacttaaaggatgaggttgagtcataccaaatagtgatttcgatagttcaaaatggtgaaattagcaattctacatgattcagtctaatcaatggataccgactgtttcccacacaagtctcctgttctcttaagcttactcactgacagcctttcactctccacaaatacattaaagatatggccatcaccaagccccctaggatgacaccagacctgagagtctgaagacctggatccaagttctgacttttccccctgacagctgtgtgaccttcgtgaagtcgccaaacctctctgagccccagtcattgctagtaagacctgcctttgagttggtatgatgttcaagttagataacaaaatgtttatacccattagaacagagaataaatagaactacatttcttgca

SEQ ID NO: 45354 - DNA, 3340 bp, Artificial Sequence
  derived and/or modified sequence
tgggcaggaactgggcactgtgcccagggcatgcactgcctccacgcagcaaccctcagagtcctgagctgaaccaagaaggaggagggggtcgggcctccgaggaaggcctagccgctgctgctgccaggaattccaggttggaggggcggcaacctcctgccagccttcaggccactctcctgtgcctgccagaagagacagagcttgaggagagcttgaggagagcaggaaaggtgggacattgctgctgctgctcactcagttccacagcagcctcccccgttgcccctctggatccactgcttaaatacggacgaggacagggccctgtctcctcagcttcaggcaccaccactgacctgggacagtgaatcgacaatgccgtcttctgtctcgtggggcatcctcctgctggcaggcctgtgctgcctggtccctgtctccctggctgaggatccccagggagatgctgcccagaagacagatacatcccaccatgatcaggatcacccaaccttcaacaagatcacccccaacctggctgagttcgccttcagcctataccgccagctggcacaccagtccaacagcaccaatatcttcttctccccagtgagcatcgctacagcctttgcaatgctctccctggggaccaaggctgacactcacgatgaaatcctggagggcctgaatttcaacctcacggagattccggaggctcagatccatgaaggcttccaggaactcctccgtaccctcaaccagccagacagccagctccagctgaccaccggcaatggcctgttcctcagcgagggcctgaagctagtggataagtttttggaggatgttaaaaagttgtaccactcagaagccttcactgtcaacttcggggacaccgaagaggccaagaaacagatcaacgattacgtggagaagggtactcaagggaaaattgtggatttggtcaaggagcttgacagagacacagtttttgctctggtgaattacatcttctttaaaggcaaatgggagagaccctttgaagtcaaggacaccgaggaagaggacttccacgtggaccaggtgaccaccgtgaaggtgcctatgatgaagcgtttaggcatgtttaacatccagcactgtaagaagctgtccagctgggtgctgctgatgaaatacctgggcaatgccaccgccatcttcttcctgcctgatgaggggaaactacagcacctggaaaatgaactcacccacgatatcatcaccaagttcctggaaaatgaagacagaaggtctgccagcttacatttacccaaactgtccattactggaacctatgatctgaagagcgtcctgggtcaactgggcatcactaaggtcttcagcaatggggctgacctctccggggtcacagaggaggcacccctgaagctctccaaggccgtgcataaggctgtgctgaccatcgacgagaaagggactgaagctgctggggccatgtttttagaggccatacccatgtctatcccccccgaggtcaagttcaacaaaccctttgtcttcttaatgattgaacaaaataccaagtctcccctcttcatgggaaaagtggtgaatcccacccaaaaataactgcctctcgctcctcaacccctcccctccatccctggccccctccctggatgacattaaagaagggttgagctggtccctgcctgcatgtgactgtaaatccctcccatgttttctctgagtctccctttgcctgctgaggctgtatgtgggctccaggtaacagtgctgtcttcgggccccctgaactgtgttcatggagcatctggctgggtaggcacatgctgggcttgaatccaggggggactgaatcctcagcttacggacctgggcccatctgtttctggagggctccagtcttccttgtcctgtcttggagtccccaagaaggaatcacaggggaggaaccagataccagccatgaccccaggctccaccaagcatcttcatgtccccctgctcatcccccactcccccccacccagagttgctcatcctgccagggctggctgtgcccaccccaaggctgccctcctgggggccccagaactgcctgatcgtgccgtggcccagttttgtggcatctgcagcaacacaagagagaggacaatgtcctcctcttgacccgctgtcacctaaccagactcgggccctgcacctctcaggcacttctggaaaatgactgaggcagattcttcctgaagcccattctccatggggcaacaaggacacctattctgtccttgtccttccatcgctgccccagaaagcctcacatatctccgtttagaatcaggtcccttctccccagatgaagaggagggtctctgctttgttttctctatctcctcctcagacttgaccaggcccagcaggccccagaagaccattaccctatatcccttctcctccctagtcacatggccataggcctgctgatggctcaggaaggccattgcaaggactcctcagctatgggagaggaagcacatcacccattgacccccgcaacccctccctttcctcctctgagtcccgactggggccacatgcagcctgacttctttgtgcctgttgctgtccctgcagtcttcagagggccaccgcagctccagtgccacggcaggaggctgttcctgaatagcccctgtggtaagggccaggagagtccttccatcctccaaggccctgctaaaggacacagcagccaggaagtcccctgggcccctagctgaaggacagcctgctccctccgtctctaccaggaatggccttgtcctatggaaggcactgccccatcccaaactaatctaggaatcactgtctaaccactcactgtcatgaatgtgtacttaaaggatgaggttgagtcataccaaatagtgatttcgatagttcaaaatggtgaaattagcaattctacatgattcagtctaatcaatggataccgactgtttcccacacaagtctcctgttctcttaagcttactcactgacagcctttcactctccacaaatacattaaagatatggccatcaccaagccccctaggatgacaccagacctgagagtctgaagacctggatccaagttctgacttttccccctgacagctgtgtgaccttcgtgaagtcgccaaacctctctgagccccagtcattgctagtaagacctgcctttgagttggtatgatgttcaagttagataacaaaatgtttatacccattagaacagagaataaatagaactacatttcttgca

SEQ ID NO: 45355 - DNA, 3495 bp, Artificial Sequence
  derived and/or modified sequence
tgggcaggaactgggcactgtgcccagggcatgcactgcctccacgcagcaaccctcagagtcctgagctgaaccaagaaggaggagggggtcgggcctccgaggaaggcctagccgctgctgctgccaggaattccaggttggaggggcggcaacctcctgccagccttcaggccactctcctgtgcctgccagaagagacagagcttgaggagagcttgaggagagcaggaaagggcggcagtaagtcttcagcatcaggcattttggggtgactcagtaaatggtagatcttgctaccagtggaacagccactaaggattctgcagtgagagcagagggccagctaagtggtactctcccagagactgtctgactcacgccaccccctccaccttggacacaggacgctgtggtttctgagccagcagcctcccccgttgcccctctggatccactgcttaaatacggacgaggacagggccctgtctcctcagcttcaggcaccaccactgacctgggacagtgaatcgacaatgccgtcttctgtctcgtggggcatcctcctgctggcaggcctgtgctgcctggtccctgtctccctggctgaggatccccagggagatgctgcccagaagacagatacatcccaccatgatcaggatcacccaaccttcaacaagatcacccccaacctggctgagttcgccttcagcctataccgccagctggcacaccagtccaacagcaccaatatcttcttctccccagtgagcatcgctacagcctttgcaatgctctccctggggaccaaggctgacactcacgatgaaatcctggagggcctgaatttcaacctcacggagattccggaggctcagatccatgaaggcttccaggaactcctccgtaccctcaaccagccagacagccagctccagctgaccaccggcaatggcctgttcctcagcgagggcctgaagctagtggataagtttttggaggatgttaaaaagttgtaccactcagaagccttcactgtcaacttcggggacaccgaagaggccaagaaacagatcaacgattacgtggagaagggtactcaagggaaaattgtggatttggtcaaggagcttgacagagacacagtttttgctctggtgaattacatcttctttaaaggcaaatgggagagaccctttgaagtcaaggacaccgaggaagaggacttccacgtggaccaggtgaccaccgtgaaggtgcctatgatgaagcgtttaggcatgtttaacatccagcactgtaagaagctgtccagctgggtgctgctgatgaaatacctgggcaatgccaccgccatcttcttcctgcctgatgaggggaaactacagcacctggaaaatgaactcacccacgatatcatcaccaagttcctggaaaatgaagacagaaggtctgccagcttacatttacccaaactgtccattactggaacctatgatctgaagagcgtcctgggtcaactgggcatcactaaggtcttcagcaatggggctgacctctccggggtcacagaggaggcacccctgaagctctccaaggccgtgcataaggctgtgctgaccatcgacgagaaagggactgaagctgctggggccatgtttttagaggccatacccatgtctatcccccccgaggtcaagttcaacaaaccctttgtcttcttaatgattgaacaaaataccaagtctcccctcttcatgggaaaagtggtgaatcccacccaaaaataactgcctctcgctcctcaacccctcccctccatccctggccccctccctggatgacattaaagaagggttgagctggtccctgcctgcatgtgactgtaaatccctcccatgttttctctgagtctccctttgcctgctgaggctgtatgtgggctccaggtaacagtgctgtcttcgggccccctgaactgtgttcatggagcatctggctgggtaggcacatgctgggcttgaatccaggggggactgaatcctcagcttacggacctgggcccatctgtttctggagggctccagtcttccttgtcctgtcttggagtccccaagaaggaatcacaggggaggaaccagataccagccatgaccccaggctccaccaagcatcttcatgtccccctgctcatcccccactcccccccacccagagttgctcatcctgccagggctggctgtgcccaccccaaggctgccctcctgggggccccagaactgcctgatcgtgccgtggcccagttttgtggcatctgcagcaacacaagagagaggacaatgtcctcctcttgacccgctgtcacctaaccagactcgggccctgcacctctcaggcacttctggaaaatgactgaggcagattcttcctgaagcccattctccatggggcaacaaggacacctattctgtccttgtccttccatcgctgccccagaaagcctcacatatctccgtttagaatcaggtcccttctccccagatgaagaggagggtctctgctttgttttctctatctcctcctcagacttgaccaggcccagcaggccccagaagaccattaccctatatcccttctcctccctagtcacatggccataggcctgctgatggctcaggaaggccattgcaaggactcctcagctatgggagaggaagcacatcacccattgacccccgcaacccctccctttcctcctctgagtcccgactggggccacatgcagcctgacttctttgtgcctgttgctgtccctgcagtcttcagagggccaccgcagctccagtgccacggcaggaggctgttcctgaatagcccctgtggtaagggccaggagagtccttccatcctccaaggccctgctaaaggacacagcagccaggaagtcccctgggcccctagctgaaggacagcctgctccctccgtctctaccaggaatggccttgtcctatggaaggcactgccccatcccaaactaatctaggaatcactgtctaaccactcactgtcatgaatgtgtacttaaaggatgaggttgagtcataccaaatagtgatttcgatagttcaaaatggtgaaattagcaattctacatgattcagtctaatcaatggataccgactgtttcccacacaagtctcctgttctcttaagcttactcactgacagcctttcactctccacaaatacattaaagatatggccatcaccaagccccctaggatgacaccagacctgagagtctgaagacctggatccaagttctgacttttccccctgacagctgtgtgaccttcgtgaagtcgccaaacctctctgagccccagtcattgctagtaagacctgcctttgagttggtatgatgttcaagttagataacaaaatgtttatacccattagaacagagaataaatagaactacatttcttgca

SEQ ID NO: 45356 - DNA, 3492 bp, Artificial Sequence
  derived and/or modified sequence
tgggcaggaactgggcactgtgcccagggcatgcactgcctccacgcagcaaccctcagagtcctgagctgaaccaagaaggaggagggggtcgggcctccgaggaaggcctagccgctgctgctgccaggaattccaggttggaggggcggcaacctcctgccagccttcaggccactctcctgtgcctgccagaagagacagagcttgaggagagcttgaggagagcaggaaagggcggcagtaagtcttcagcatcaggcattttggggtgactcagtaaatggtagatcttgctaccagtggaacagccactaaggattctgcagtgagagcagagggccagctaagtggtactctcccagagactgtctgactcacgccaccccctccaccttggacacaggacgctgtggtttctgagccagcctcccccgttgcccctctggatccactgcttaaatacggacgaggacagggccctgtctcctcagcttcaggcaccaccactgacctgggacagtgaatcgacaatgccgtcttctgtctcgtggggcatcctcctgctggcaggcctgtgctgcctggtccctgtctccctggctgaggatccccagggagatgctgcccagaagacagatacatcccaccatgatcaggatcacccaaccttcaacaagatcacccccaacctggctgagttcgccttcagcctataccgccagctggcacaccagtccaacagcaccaatatcttcttctccccagtgagcatcgctacagcctttgcaatgctctccctggggaccaaggctgacactcacgatgaaatcctggagggcctgaatttcaacctcacggagattccggaggctcagatccatgaaggcttccaggaactcctccgtaccctcaaccagccagacagccagctccagctgaccaccggcaatggcctgttcctcagcgagggcctgaagctagtggataagtttttggaggatgttaaaaagttgtaccactcagaagccttcactgtcaacttcggggacaccgaagaggccaagaaacagatcaacgattacgtggagaagggtactcaagggaaaattgtggatttggtcaaggagcttgacagagacacagtttttgctctggtgaattacatcttctttaaaggcaaatgggagagaccctttgaagtcaaggacaccgaggaagaggacttccacgtggaccaggtgaccaccgtgaaggtgcctatgatgaagcgtttaggcatgtttaacatccagcactgtaagaagctgtccagctgggtgctgctgatgaaatacctgggcaatgccaccgccatcttcttcctgcctgatgaggggaaactacagcacctggaaaatgaactcacccacgatatcatcaccaagttcctggaaaatgaagacagaaggtctgccagcttacatttacccaaactgtccattactggaacctatgatctgaagagcgtcctgggtcaactgggcatcactaaggtcttcagcaatggggctgacctctccggggtcacagaggaggcacccctgaagctctccaaggccgtgcataaggctgtgctgaccatcgacgagaaagggactgaagctgctggggccatgtttttagaggccatacccatgtctatcccccccgaggtcaagttcaacaaaccctttgtcttcttaatgattgaacaaaataccaagtctcccctcttcatgggaaaagtggtgaatcccacccaaaaataactgcctctcgctcctcaacccctcccctccatccctggccccctccctggatgacattaaagaagggttgagctggtccctgcctgcatgtgactgtaaatccctcccatgttttctctgagtctccctttgcctgctgaggctgtatgtgggctccaggtaacagtgctgtcttcgggccccctgaactgtgttcatggagcatctggctgggtaggcacatgctgggcttgaatccaggggggactgaatcctcagcttacggacctgggcccatctgtttctggagggctccagtcttccttgtcctgtcttggagtccccaagaaggaatcacaggggaggaaccagataccagccatgaccccaggctccaccaagcatcttcatgtccccctgctcatcccccactcccccccacccagagttgctcatcctgccagggctggctgtgcccaccccaaggctgccctcctgggggccccagaactgcctgatcgtgccgtggcccagttttgtggcatctgcagcaacacaagagagaggacaatgtcctcctcttgacccgctgtcacctaaccagactcgggccctgcacctctcaggcacttctggaaaatgactgaggcagattcttcctgaagcccattctccatggggcaacaaggacacctattctgtccttgtccttccatcgctgccccagaaagcctcacatatctccgtttagaatcaggtcccttctccccagatgaagaggagggtctctgctttgttttctctatctcctcctcagacttgaccaggcccagcaggccccagaagaccattaccctatatcccttctcctccctagtcacatggccataggcctgctgatggctcaggaaggccattgcaaggactcctcagctatgggagaggaagcacatcacccattgacccccgcaacccctccctttcctcctctgagtcccgactggggccacatgcagcctgacttctttgtgcctgttgctgtccctgcagtcttcagagggccaccgcagctccagtgccacggcaggaggctgttcctgaatagcccctgtggtaagggccaggagagtccttccatcctccaaggccctgctaaaggacacagcagccaggaagtcccctgggcccctagctgaaggacagcctgctccctccgtctctaccaggaatggccttgtcctatggaaggcactgccccatcccaaactaatctaggaatcactgtctaaccactcactgtcatgaatgtgtacttaaaggatgaggttgagtcataccaaatagtgatttcgatagttcaaaatggtgaaattagcaattctacatgattcagtctaatcaatggataccgactgtttcccacacaagtctcctgttctcttaagcttactcactgacagcctttcactctccacaaatacattaaagatatggccatcaccaagccccctaggatgacaccagacctgagagtctgaagacctggatccaagttctgacttttccccctgacagctgtgtgaccttcgtgaagtcgccaaacctctctgagccccagtcattgctagtaagacctgcctttgagttggtatgatgttcaagttagataacaaaatgtttatacccattagaacagagaataaatagaactacatttcttgca

SEQ ID NO: 45357 - DNA, 3510 bp, Artificial Sequence
  derived and/or modified sequence
tgggcaggaactgggcactgtgcccagggcatgcactgcctccacgcagcaaccctcagagtcctgagctgaaccaagaaggaggagggggtcgggcctccgaggaaggcctagccgctgctgctgccaggaattccaggttggaggggcggcaacctcctgccagccttcaggccactctcctgtgcctgccagaagagacagagcttgaggagagcttgaggagagcaggaaagggcggcagtaagtcttcagcatcaggcattttggggtgactcagtaaatggtagatcttgctaccagtggaacagccactaaggattctgcagtgagagcagagggccagctaagtggtactctcccagagactgtctgactcacgccaccccctccaccttggacacaggacgctgtggtttctgagccaggtacaatgactcctttcgcctcccccgttgcccctctggatccactgcttaaatacggacgaggacagggccctgtctcctcagcttcaggcaccaccactgacctgggacagtgaatcgacaatgccgtcttctgtctcgtggggcatcctcctgctggcaggcctgtgctgcctggtccctgtctccctggctgaggatccccagggagatgctgcccagaagacagatacatcccaccatgatcaggatcacccaaccttcaacaagatcacccccaacctggctgagttcgccttcagcctataccgccagctggcacaccagtccaacagcaccaatatcttcttctccccagtgagcatcgctacagcctttgcaatgctctccctggggaccaaggctgacactcacgatgaaatcctggagggcctgaatttcaacctcacggagattccggaggctcagatccatgaaggcttccaggaactcctccgtaccctcaaccagccagacagccagctccagctgaccaccggcaatggcctgttcctcagcgagggcctgaagctagtggataagtttttggaggatgttaaaaagttgtaccactcagaagccttcactgtcaacttcggggacaccgaagaggccaagaaacagatcaacgattacgtggagaagggtactcaagggaaaattgtggatttggtcaaggagcttgacagagacacagtttttgctctggtgaattacatcttctttaaaggcaaatgggagagaccctttgaagtcaaggacaccgaggaagaggacttccacgtggaccaggtgaccaccgtgaaggtgcctatgatgaagcgtttaggcatgtttaacatccagcactgtaagaagctgtccagctgggtgctgctgatgaaatacctgggcaatgccaccgccatcttcttcctgcctgatgaggggaaactacagcacctggaaaatgaactcacccacgatatcatcaccaagttcctggaaaatgaagacagaaggtctgccagcttacatttacccaaactgtccattactggaacctatgatctgaagagcgtcctgggtcaactgggcatcactaaggtcttcagcaatggggctgacctctccggggtcacagaggaggcacccctgaagctctccaaggccgtgcataaggctgtgctgaccatcgacgagaaagggactgaagctgctggggccatgtttttagaggccatacccatgtctatcccccccgaggtcaagttcaacaaaccctttgtcttcttaatgattgaacaaaataccaagtctcccctcttcatgggaaaagtggtgaatcccacccaaaaataactgcctctcgctcctcaacccctcccctccatccctggccccctccctggatgacattaaagaagggttgagctggtccctgcctgcatgtgactgtaaatccctcccatgttttctctgagtctccctttgcctgctgaggctgtatgtgggctccaggtaacagtgctgtcttcgggccccctgaactgtgttcatggagcatctggctgggtaggcacatgctgggcttgaatccaggggggactgaatcctcagcttacggacctgggcccatctgtttctggagggctccagtcttccttgtcctgtcttggagtccccaagaaggaatcacaggggaggaaccagataccagccatgaccccaggctccaccaagcatcttcatgtccccctgctcatcccccactcccccccacccagagttgctcatcctgccagggctggctgtgcccaccccaaggctgccctcctgggggccccagaactgcctgatcgtgccgtggcccagttttgtggcatctgcagcaacacaagagagaggacaatgtcctcctcttgacccgctgtcacctaaccagactcgggccctgcacctctcaggcacttctggaaaatgactgaggcagattcttcctgaagcccattctccatggggcaacaaggacacctattctgtccttgtccttccatcgctgccccagaaagcctcacatatctccgtttagaatcaggtcccttctccccagatgaagaggagggtctctgctttgttttctctatctcctcctcagacttgaccaggcccagcaggccccagaagaccattaccctatatcccttctcctccctagtcacatggccataggcctgctgatggctcaggaaggccattgcaaggactcctcagctatgggagaggaagcacatcacccattgacccccgcaacccctccctttcctcctctgagtcccgactggggccacatgcagcctgacttctttgtgcctgttgctgtccctgcagtcttcagagggccaccgcagctccagtgccacggcaggaggctgttcctgaatagcccctgtggtaagggccaggagagtccttccatcctccaaggccctgctaaaggacacagcagccaggaagtcccctgggcccctagctgaaggacagcctgctccctccgtctctaccaggaatggccttgtcctatggaaggcactgccccatcccaaactaatctaggaatcactgtctaaccactcactgtcatgaatgtgtacttaaaggatgaggttgagtcataccaaatagtgatttcgatagttcaaaatggtgaaattagcaattctacatgattcagtctaatcaatggataccgactgtttcccacacaagtctcctgttctcttaagcttactcactgacagcctttcactctccacaaatacattaaagatatggccatcaccaagccccctaggatgacaccagacctgagagtctgaagacctggatccaagttctgacttttccccctgacagctgtgtgaccttcgtgaagtcgccaaacctctctgagccccagtcattgctagtaagacctgcctttgagttggtatgatgttcaagttagataacaaaatgtttatacccattagaacagagaataaatagaactacatttcttgca

SEQ ID NO: 45358 - DNA, 3303 bp, Artificial Sequence
  derived and/or modified sequence
tgggcaggaactgggcactgtgcccagggcatgcactgcctccacgcagcaaccctcagagtcctgagctgaaccaagaaggaggagggggtcgggcctccgaggaaggcctagccgctgctgctgccaggaattccaggttggaggggcggcaacctcctgccagccttcaggccactctcctgtgcctgccagaagagacagagcttgaggagagcttgaggagagcaggaaagcagcctcccccgttgcccctctggatccactgcttaaatacggacgaggacagggccctgtctcctcagcttcaggcaccaccactgacctgggacagtgaatcgacaatgccgtcttctgtctcgtggggcatcctcctgctggcaggcctgtgctgcctggtccctgtctccctggctgaggatccccagggagatgctgcccagaagacagatacatcccaccatgatcaggatcacccaaccttcaacaagatcacccccaacctggctgagttcgccttcagcctataccgccagctggcacaccagtccaacagcaccaatatcttcttctccccagtgagcatcgctacagcctttgcaatgctctccctggggaccaaggctgacactcacgatgaaatcctggagggcctgaatttcaacctcacggagattccggaggctcagatccatgaaggcttccaggaactcctccgtaccctcaaccagccagacagccagctccagctgaccaccggcaatggcctgttcctcagcgagggcctgaagctagtggataagtttttggaggatgttaaaaagttgtaccactcagaagccttcactgtcaacttcggggacaccgaagaggccaagaaacagatcaacgattacgtggagaagggtactcaagggaaaattgtggatttggtcaaggagcttgacagagacacagtttttgctctggtgaattacatcttctttaaaggcaaatgggagagaccctttgaagtcaaggacaccgaggaagaggacttccacgtggaccaggtgaccaccgtgaaggtgcctatgatgaagcgtttaggcatgtttaacatccagcactgtaagaagctgtccagctgggtgctgctgatgaaatacctgggcaatgccaccgccatcttcttcctgcctgatgaggggaaactacagcacctggaaaatgaactcacccacgatatcatcaccaagttcctggaaaatgaagacagaaggtctgccagcttacatttacccaaactgtccattactggaacctatgatctgaagagcgtcctgggtcaactgggcatcactaaggtcttcagcaatggggctgacctctccggggtcacagaggaggcacccctgaagctctccaaggccgtgcataaggctgtgctgaccatcgacgagaaagggactgaagctgctggggccatgtttttagaggccatacccatgtctatcccccccgaggtcaagttcaacaaaccctttgtcttcttaatgattgaacaaaataccaagtctcccctcttcatgggaaaagtggtgaatcccacccaaaaataactgcctctcgctcctcaacccctcccctccatccctggccccctccctggatgacattaaagaagggttgagctggtccctgcctgcatgtgactgtaaatccctcccatgttttctctgagtctccctttgcctgctgaggctgtatgtgggctccaggtaacagtgctgtcttcgggccccctgaactgtgttcatggagcatctggctgggtaggcacatgctgggcttgaatccaggggggactgaatcctcagcttacggacctgggcccatctgtttctggagggctccagtcttccttgtcctgtcttggagtccccaagaaggaatcacaggggaggaaccagataccagccatgaccccaggctccaccaagcatcttcatgtccccctgctcatcccccactcccccccacccagagttgctcatcctgccagggctggctgtgcccaccccaaggctgccctcctgggggccccagaactgcctgatcgtgccgtggcccagttttgtggcatctgcagcaacacaagagagaggacaatgtcctcctcttgacccgctgtcacctaaccagactcgggccctgcacctctcaggcacttctggaaaatgactgaggcagattcttcctgaagcccattctccatggggcaacaaggacacctattctgtccttgtccttccatcgctgccccagaaagcctcacatatctccgtttagaatcaggtcccttctccccagatgaagaggagggtctctgctttgttttctctatctcctcctcagacttgaccaggcccagcaggccccagaagaccattaccctatatcccttctcctccctagtcacatggccataggcctgctgatggctcaggaaggccattgcaaggactcctcagctatgggagaggaagcacatcacccattgacccccgcaacccctccctttcctcctctgagtcccgactggggccacatgcagcctgacttctttgtgcctgttgctgtccctgcagtcttcagagggccaccgcagctccagtgccacggcaggaggctgttcctgaatagcccctgtggtaagggccaggagagtccttccatcctccaaggccctgctaaaggacacagcagccaggaagtcccctgggcccctagctgaaggacagcctgctccctccgtctctaccaggaatggccttgtcctatggaaggcactgccccatcccaaactaatctaggaatcactgtctaaccactcactgtcatgaatgtgtacttaaaggatgaggttgagtcataccaaatagtgatttcgatagttcaaaatggtgaaattagcaattctacatgattcagtctaatcaatggataccgactgtttcccacacaagtctcctgttctcttaagcttactcactgacagcctttcactctccacaaatacattaaagatatggccatcaccaagccccctaggatgacaccagacctgagagtctgaagacctggatccaagttctgacttttccccctgacagctgtgtgaccttcgtgaagtcgccaaacctctctgagccccagtcattgctagtaagacctgcctttgagttggtatgatgttcaagttagataacaaaatgtttatacccattagaacagagaataaatagaactacatttcttgca

SEQ ID NO: 45359 - DNA, 3300 bp, Artificial Sequence
  derived and/or modified sequence
tgggcaggaactgggcactgtgcccagggcatgcactgcctccacgcagcaaccctcagagtcctgagctgaaccaagaaggaggagggggtcgggcctccgaggaaggcctagccgctgctgctgccaggaattccaggttggaggggcggcaacctcctgccagccttcaggccactctcctgtgcctgccagaagagacagagcttgaggagagcttgaggagagcaggaaagcctcccccgttgcccctctggatccactgcttaaatacggacgaggacagggccctgtctcctcagcttcaggcaccaccactgacctgggacagtgaatcgacaatgccgtcttctgtctcgtggggcatcctcctgctggcaggcctgtgctgcctggtccctgtctccctggctgaggatccccagggagatgctgcccagaagacagatacatcccaccatgatcaggatcacccaaccttcaacaagatcacccccaacctggctgagttcgccttcagcctataccgccagctggcacaccagtccaacagcaccaatatcttcttctccccagtgagcatcgctacagcctttgcaatgctctccctggggaccaaggctgacactcacgatgaaatcctggagggcctgaatttcaacctcacggagattccggaggctcagatccatgaaggcttccaggaactcctccgtaccctcaaccagccagacagccagctccagctgaccaccggcaatggcctgttcctcagcgagggcctgaagctagtggataagtttttggaggatgttaaaaagttgtaccactcagaagccttcactgtcaacttcggggacaccgaagaggccaagaaacagatcaacgattacgtggagaagggtactcaagggaaaattgtggatttggtcaaggagcttgacagagacacagtttttgctctggtgaattacatcttctttaaaggcaaatgggagagaccctttgaagtcaaggacaccgaggaagaggacttccacgtggaccaggtgaccaccgtgaaggtgcctatgatgaagcgtttaggcatgtttaacatccagcactgtaagaagctgtccagctgggtgctgctgatgaaatacctgggcaatgccaccgccatcttcttcctgcctgatgaggggaaactacagcacctggaaaatgaactcacccacgatatcatcaccaagttcctggaaaatgaagacagaaggtctgccagcttacatttacccaaactgtccattactggaacctatgatctgaagagcgtcctgggtcaactgggcatcactaaggtcttcagcaatggggctgacctctccggggtcacagaggaggcacccctgaagctctccaaggccgtgcataaggctgtgctgaccatcgacgagaaagggactgaagctgctggggccatgtttttagaggccatacccatgtctatcccccccgaggtcaagttcaacaaaccctttgtcttcttaatgattgaacaaaataccaagtctcccctcttcatgggaaaagtggtgaatcccacccaaaaataactgcctctcgctcctcaacccctcccctccatccctggccccctccctggatgacattaaagaagggttgagctggtccctgcctgcatgtgactgtaaatccctcccatgttttctctgagtctccctttgcctgctgaggctgtatgtgggctccaggtaacagtgctgtcttcgggccccctgaactgtgttcatggagcatctggctgggtaggcacatgctgggcttgaatccaggggggactgaatcctcagcttacggacctgggcccatctgtttctggagggctccagtcttccttgtcctgtcttggagtccccaagaaggaatcacaggggaggaaccagataccagccatgaccccaggctccaccaagcatcttcatgtccccctgctcatcccccactcccccccacccagagttgctcatcctgccagggctggctgtgcccaccccaaggctgccctcctgggggccccagaactgcctgatcgtgccgtggcccagttttgtggcatctgcagcaacacaagagagaggacaatgtcctcctcttgacccgctgtcacctaaccagactcgggccctgcacctctcaggcacttctggaaaatgactgaggcagattcttcctgaagcccattctccatggggcaacaaggacacctattctgtccttgtccttccatcgctgccccagaaagcctcacatatctccgtttagaatcaggtcccttctccccagatgaagaggagggtctctgctttgttttctctatctcctcctcagacttgaccaggcccagcaggccccagaagaccattaccctatatcccttctcctccctagtcacatggccataggcctgctgatggctcaggaaggccattgcaaggactcctcagctatgggagaggaagcacatcacccattgacccccgcaacccctccctttcctcctctgagtcccgactggggccacatgcagcctgacttctttgtgcctgttgctgtccctgcagtcttcagagggccaccgcagctccagtgccacggcaggaggctgttcctgaatagcccctgtggtaagggccaggagagtccttccatcctccaaggccctgctaaaggacacagcagccaggaagtcccctgggcccctagctgaaggacagcctgctccctccgtctctaccaggaatggccttgtcctatggaaggcactgccccatcccaaactaatctaggaatcactgtctaaccactcactgtcatgaatgtgtacttaaaggatgaggttgagtcataccaaatagtgatttcgatagttcaaaatggtgaaattagcaattctacatgattcagtctaatcaatggataccgactgtttcccacacaagtctcctgttctcttaagcttactcactgacagcctttcactctccacaaatacattaaagatatggccatcaccaagccccctaggatgacaccagacctgagagtctgaagacctggatccaagttctgacttttccccctgacagctgtgtgaccttcgtgaagtcgccaaacctctctgagccccagtcattgctagtaagacctgcctttgagttggtatgatgttcaagttagataacaaaatgtttatacccattagaacagagaataaatagaactacatttcttgca

SEQ ID NO: 45360 - DNA, 75 bp, Artificial Sequence
  derived and/or modified sequence
atgatgccatcctcagtctcatggggtattttgctcttggcgggtctgtgctgtctcgtgccggtgtcgctcgca

SEQ ID NO: 45361 - DNA, 1400 bp, Artificial Sequence
  derived and/or modified sequence
gggaaataagagagaaaagaagagtaagaagaaatataagagccaccatgccgtcatcagtgtcgtggggaatccttcttttggcgggactttgctgccttgtgcccgtatcattggccgaagatccccaaggtgacgcggctcaaaagaccgatacatcccaccacgaccaggaccatccgacgttcaataagattacgcccaatttggcggaatttgccttctccctttatagacagcttgcacatcagagcaattcaactaacatcttcttctcgccggtgtcaatcgcaactgcctttgcgatgttgtccctcgggactaaggccgacactcacgatgagatcctcgaagggctcaatttcaaccttactgaaattcccgaggcccagattcacgaggggttccaagagcttctccgcacactcaaccagccggacagccagttgcagctgaccacagggaacggtttgtttttgagcgaaggactgaaacttgtagacaaattcctcgaagatgtgaagaaactttatcactccgaggcgttcacagtgaacttcggagacaccgaggaagcgaaaaagcaaatcaatgactatgtcgagaaagggacacagggcaaaatcgtagacctcgtgaaagagctggacagggatacggtatttgcgttggtgaactacatctttttcaagggaaaatgggagcgaccctttgaggtgaaagatactgaggaagaagattttcacgtagatcaagtgacgacggtcaaagtacctatgatgaagagattggggatgttcaatatccagcattgtaagaaactgtcgtcgtgggtcctgctcatgaaatacctcggaaatgcgactgctatctttttccttcccgacgaaggaaagttgcagcacctcgaaaacgagctgacacatgacattatcacgaagttccttgagaacgaggaccggcgctcggcatccttgcatctgccgaaattgtcgatcaccggtacgtacgatctcaagagcgtccttgggcagcttggaatcaccaaggtattttcgaacggagccgatctttccggtgtgacggaagaggcgccattgaagttgtccaaggctgtgcataaggccgtcctcacaattgatgagaagggaacggaagcggcaggggcaatgtttctcgaggcgatcccaatgtcgattccgcctgaggtcaagttcaacaagccttttgtctttcttatgattgagcagaataccaagtcgcccttgtttatgggcaaagtcgtgaatcctacccagaagtgataagctgccttctgcggggcttgccttctggccatgcccttcttctctcccttgcacctgtacctcttggtctttgaataaagcctgagtaggaag

SEQ ID NO: 45362 - DNA, 1254 bp, Artificial Sequence
  derived and/or modified sequence
atgcctagttcagtatcctggggaatcctgctcctggccgggctgtgttgtctggtgcctgttagtctggctgaagacccccagggggatgctgctcagaagacggacacatcccaccacgaccaagatcatcccacgttcaataagataactcccaacctggcggaattcgcatttagtctctataggcagctggcgcaccagagcaatagtacaaatatttttttctcaccggtgagtatcgccaccgccttcgcgatgttaagcctgggaaccaaggccgacacccatgatgaaattttagaaggattgaattttaacctcaccgaaattcctgaggctcaaattcacgaaggattccaggagttgcttcggaccctgaatcagccggattcgcaactgcaacttaccacaggtaatggtcttttcttaagtgagggcctgaaactagtggataaatttctggaagacgtgaagaagctgtaccactcagaggcttttacagtgaatttcggcgacacggaggaggccaaaaaacagattaacgactatgtggagaaggggacccagggaaagattgtggacttggtgaaggagctcgaccgggacacagtcttcgcattggttaattatattttctttaagggtaagtgggagaggccctttgaggtgaaagataccgaagaagaggacttccacgtagaccaggtgaccacggtgaaggtgcctatgatgaaaaggttagggatgtttaacatccagcattgcaagaagttgtcaagctgggtcttgctgatgaagtatctcggaaatgctactgccatattcttcttacctgacgaaggcaaactgcaacacctcgagaatgaactgactcacgatatcattacaaaatttcttgaaaacgaggatcggaggtcagccagcctgcatctaccgaagttatctatcaccggtacgtatgacctcaagtctgtgttgggccagctcggaattactaaggttttttccaacggcgctgacctctccggcgtgacagaggaggcaccactaaagttgtccaaagcggtgcataaggctgtcctcactatcgacgaaaaaggcacggaagcagctggagctatgtttctcgaagctattcctatgagtattccacccgaggtgaagtttaacaaaccttttgtgttcttaatgattgagcagaataccaagtcccccttgttcatgggcaaggtggtaaacccgacacagaaa

SEQ ID NO: 45363 - DNA, 1254 bp, Artificial Sequence
  derived and/or modified sequence
atgccctcgtcggtgtcctggggtatattgcttctcgctggtctttgttgtctggtgccagtgtcgcttgccgaggacccacaaggagatgcagcacaaaagaccgatactagccatcatgatcaagaccatcctactttcaataagattactcctaatcttgcagaatttgcctttagcctgtacagacaacttgcgcatcagtccaactcgaccaacattttcttctctcccgtgtcgattgcaactgcgttcgcaatgctgtcgctcggtaccaaggctgatacgcatgacgaaatcctcgaaggccttaacttcaacctcaccgaaatcccagaagcgcagattcacgaaggatttcaggagctccttcgcacgcttaatcaacctgattcacagctccagctcacgaccggaaatggtctgtttctgtcagaaggactcaaactggtcgacaagtttcttgaggacgtcaaaaagctctaccacagcgaagcgttcaccgtcaacttcggagacaccgaagaggcaaagaagcagattaacgattacgtggaaaagggaactcaagggaaaattgtggaccttgtcaaggagctggaccgtgatactgtgtttgcgctggtgaattacatattctttaagggtaagtgggagcgaccgtttgaggtgaaagataccgaagaagaggactttcatgtggatcaagttaccacggttaaggttccaatgatgaagcgcttgggtatgttcaatattcagcactgcaagaaactgtcgagctgggtgctgcttatgaagtacctggggaacgcaaccgccattttctttctgcctgacgaggggaaacttcaacacctggagaacgaacttacccatgatatcataaccaaatttctggaaaacgaagataggcgctcggcatccctgcatcttcctaaactctcgatcaccggaacttatgatctgaagtccgtcctggggcagcttggcattaccaaggtgtttagcaacggagccgatctttcgggcgtcactgaagaagccccgctcaagttgtccaaggcagtacacaaggccgtgttgactattgacgaaaaagggaccgaagccgcaggcgcgatgttcctcgaggcaatccccatgtccattcctcctgaagtaaagttcaataagcctttcgtctttcttatgatcgaacagaacaccaaatcaccactgttcatgggaaaggtcgtcaacccaactcagaag

SEQ ID NO: 45364 - DNA, 1254 bp, Artificial Sequence
  derived and/or modified sequence
atgcccagctccgtgagttgggggatcctgctgctggcagggctgtgctgtctggtgcccgtttctctggcggaagatccgcagggtgacgccgctcagaagacggacacaagtcaccatgatcaggatcaccctaccttcaacaaaatcacacctaacctcgcagagtttgcctttagcctctatcggcagttggcgcatcagagcaatagtactaacatctttttttccccggtttctattgcgacagcgttcgccatgctgtccctcggtaccaaggctgatacgcacgatgaaatcttggaaggtctgaattttaacttgactgagatcccagaggctcaaattcatgagggttttcaggagttgctccgcactttgaaccagcccgacagccaattgcaattgaccactggcaatggtttgtttctgtctgagggtttgaagcttgtggataagttcctggaagacgtgaaaaagttgtaccattctgaggctttcacagtgaattttggggacactgaggaagcaaagaagcagatcaacgattatgtcgagaaaggaactcaggggaagattgttgatttggtgaaagagctggatcgggacactgtcttcgctctggtaaactatatcttcttcaaaggcaagtgggagagaccgtttgaagtgaaggatactgaggaggaggactttcacgtggaccaggtgacaaccgtgaaagtgcccatgatgaaaaggctgggcatgttcaacattcagcactgtaagaaactgagctcatgggtcctgcttatgaagtacttgggtaacgcaactgcgatattcttccttcccgatgagggaaaactgcagcacctcgagaacgaactgactcacgacattattaccaaattcctggaaaacgaggacagacggtccgctagcctccatttgcccaaactctctataacaggtacctacgaccttaaatctgttctcggacagctggggattacaaaggtgttttctaatggcgctgatttgtctggggtgacagaagaggcgcccttgaaactgtccaaagcagtgcacaaggctgtgctgacaattgacgaaaaaggcaccgaggccgccggagctatgttcctggaggccatccccatgtccatccctccagaagtgaaatttaataaaccctttgtcttccttatgatcgaacagaacactaaatcccctttgttcatgggcaaggtcgtgaatccgactcagaag

SEQ ID NO: 45365 - DNA, 1254 bp, Artificial Sequence
  derived and/or modified sequence
atgccgagctctgtgagctggggaattcttctgctggcaggactgtgttgcctggtgccggtgagcctggccgaagatccgcagggggatgccgctcagaaaactgatacttcgcatcacgaccaggaccatcccaccttcaacaagatcacccctaacctggccgagtttgccttctccctgtaccggcaactcgcccaccagagcaactccaccaacatctttttctctcctgtctccattgcgactgcttttgccatgctgtccctggggactaaggccgatacccatgacgagatccttgagggactgaacttcaacctcaccgaaatcccagaagcacagatccacgagggctttcaggagttgttgcgcactctgaatcaaccagacagtcaactgcagcttactaccggaaacgggctgttcttgtccgagggcttgaaactggtcgacaaatttctggaagatgtgaaaaagctgtaccactccgaagcgttcaccgtcaacttcggcgacaccgaggaggcgaagaagcaaatcaacgattacgtggagaaaggaacccaaggtaagattgtcgacttggtgaaagaactcgatcgggacaccgtgttcgcgctggtgaactacatctttttcaaaggaaagtgggaacgcccattcgaagtgaaggacactgaagaggaggactttcatgttgaccaggtcaccactgtgaaggtgcctatgatgaagcgcctggggatgttcaatattcagcactgcaaaaagctgtcgagctgggtcctgctcatgaagtacttgggaaatgctaccgccatctttttcctgccggatgaaggaaagctccaacatctggagaacgaattgactcacgacatcattaccaagttcctcgagaacgaggacaggagaagcgcgagcctgcacctcccgaagctcagcatcacgggcacttacgatctcaagagcgtgctcggtcaacttggaatcactaaggttttctcgaatggcgcagacctgtcaggcgtcacggaagaagcgccgctcaagctctccaaggccgtgcataaggctgtgctcaccattgatgagaaaggaacggaagccgcgggagctatgttcctggaagcaatcccaatgtcaatcccaccagaggtcaagttcaataaacctttcgtgttccttatgatcgaacaaaataccaaatcgcctctgttcatgggaaaggtggtgaaccccacccaaaag

SEQ ID NO: 45366 - DNA, 1254 bp, Artificial Sequence
  derived and/or modified sequence
atgccttcatcagtgtcctggggcattctcctcctcgcggggttgtgttgtctggtgccagtctccctcgcagaggatccacaaggtgacgctgcacaaaagaccgatacctcccatcatgatcaagatcatccaacgttcaataagattacccctaacttggccgaatttgcctttagcctgtacagacaacttgcacaccagagcaactcgactaacattttcttttcccccgtcagcatagctactgccttcgcaatgctttcactgggcaccaaggcagatactcatgacgaaattcttgaggggctcaacttcaatctcacggagatccctgaagcacagatccatgaaggtttccaagagctgttgagaaccctgaaccagcccgatagccaattgcaacttacgactggcaacggactgttcctttcggaggggttgaaacttgtcgacaaatttctggaggacgtcaaaaaactctatcattccgaagcctttaccgtcaattttggcgataccgaggaagcaaagaaacaaatcaacgattacgtggaaaaggggacccagggaaagattgtcgacctggtgaaggagctggatagggacactgtctttgcactggtgaactacattttcttcaaggggaagtgggagcgtccgttcgaagtcaaagatactgaagaagaggactttcacgtcgatcaagtcactacggtgaaggtgccaatgatgaagcgacttggtatgttcaatattcagcattgcaaaaaactcagtagctgggtgctcctcatgaagtacctgggtaatgcaaccgcaatcttctttctgccagacgaaggaaagctccagcacctggagaacgaacttactcatgacattatcaccaagtttcttgaaaatgaggaccggcggagcgcctcgctccacctgcctaagttgagcatcaccggaacctacgacctgaaaagcgtccttggacagctcggaattactaaagtcttttccaacggtgcagacctttcgggtgtcaccgaagaagcaccactgaagctctcaaaggccgtccataaggccgtgctgaccatcgatgaaaagggaactgaagcagcaggtgcaatgtttcttgaggctatccctatgtcaattccccccgaagtgaagtttaacaagccttttgtgttcctgatgattgagcaaaatactaagtcgcccctctttatgggtaaggtcgtgaacccaacccaaaag

SEQ ID NO: 45367 - DNA, 1254 bp, Artificial Sequence
  derived and/or modified sequence
atgccctccagcgtgagctggggcatcttgcttcttgcgggactttgctgtctggtgcccgtgtccttggctgaggacccgcaaggagacgccgcccaaaaaaccgacacctcgcaccacgaccaggatcacccaacttttaacaagattacccctaatcttgcagaattcgcgtttagcctgtaccgccaactcgcccaccaatctaactcgactaatatcttcttctcacccgtttctatcgccacggctttcgcaatgctgtctctgggaactaaggctgatactcatgacgagatcttggagggactcaacttcaacctcaccgagatcccagaagcccaaatacatgaaggattccaggagctgctgcgcactctgaaccagccggacagccagctgcaactgactacgggcaatggtctgtttctcagcgaaggactcaagctcgtggataagttcttggaagatgtcaagaaactgtaccactccgaggcattcactgtgaattttggggacactgaagaggcgaagaaacagataaatgattacgttgagaagggaacccagggtaaaatcgttgatctggtcaaggaactggaccgcgatacggtctttgcgctcgtcaactatatctttttcaaagggaagtgggagaggcctttcgaggtgaaggacaccgaagaagaggacttccacgtcgaccaggtgactactgtgaaggtgccgatgatgaagcgcctgggcatgttcaatatccaacattgcaaaaaactctcctcctgggtgttgttgatgaagtacctgggcaacgccaccgctatcttcttcctcccggatgagggaaagctgcagcatctggaaaatgagcttacgcatgatatcatcaccaagttccttgagaacgaggacagacgcagcgcctcgctccacctgccaaagctctcaatcaccggcacctacgatctgaaaagcgtgcttggacagctgggcattactaaggtgttttccaacggagctgatttgtcgggtgtcactgaagaagctcctctgaagctctcaaaggcagtgcacaaggccgtcctcaccatcgacgagaaggggaccgaagccgccggtgcaatgtttctggaggccatcccaatgtcgattcctccggaagtgaagttcaataagccgttcgtgttcctgatgatcgaacaaaacacgaaatcaccgctctttatgggaaaagtcgtcaacccgacccagaag

SEQ ID NO: 45368 - DNA, 1254 bp, Artificial Sequence
  derived and/or modified sequence
atgcctagtagcgtctcctggggaattctcctcctggcaggcctgtgctgcttggtccccgtgagtctagctgaggatccccagggagatgcggctcagaagaccgacacaagccaccacgaccaggatcaccccacttttaacaagatcacacctaatcttgctgaatttgcgttctccctctatcgtcagctcgcccaccagagtaattcaaccaatatttttttcagccccgtatcaattgctacggccttcgcaatgctgtccctgggcacaaaggcagacactcacgatgaaatcctcgagggactgaacttcaatttgaccgagatccctgaggctcagattcatgagggctttcaggaacttctgcgcactctcaaccaacccgactcccagctccaactcacaaccggaaatggcctgtttctgtccgaagggctcaaactcgtggacaaattcttagaggatgtgaaaaagttgtatcactccgaagcttttacagtgaattttggtgacaccgaagaagccaagaaacagataaatgattatgttgagaagggcacgcaggggaaaattgtcgacttggtgaaggagctggacagagacacagttttcgcacttgtgaattacattttctttaagggaaagtgggagagacctttcgaggtgaaagatacagaggaggaggactttcacgtggatcaagtgacaaccgttaaagtgcccatgatgaagagactggggatgttcaatattcagcattgcaagaaactgtcttcatgggtgttactcatgaagtatctgggaaatgccactgccattttctttctcccagacgagggaaagttacagcacctggagaatgaattgacacatgatatcatcacaaaatttctggagaacgaggacagacgaagtgctagtctgcacttgccaaagctttccattactggcacctacgacctgaaatccgtactggggcagctgggcatcactaaggtgtttagcaacggagccgacctgtctggtgtgaccgaggaggcccccttgaagttgtcaaaggccgtccataaagccgtgttgaccatagatgaaaaaggtacagaggcggcgggcgcgatgttcctggaggctatacccatgtccatcccaccggaggtcaaattcaataagcctttcgtgttcctgatgatagaacagaatactaagagtccgctgtttatgggtaaggtggtgaatccaacccagaaa

SEQ ID NO: 45369 - DNA, 1254 bp, Artificial Sequence
  derived and/or modified sequence
atgccgagctcggtgtcctgggggatcctcctcctggctggactttgttgcttggttcctgtgtccctcgccgaagatccacagggcgacgctgcccaaaagacggacacgtcgcatcatgaccaggaccaccccaccttcaacaagattacccctaatttggcggaattcgccttctctctttaccgacagctggcccaccagagcaactcgactaacattttcttcagccccgtctcgatcgccactgcattcgcaatgctgtcactggggactaaggctgatacccatgacgagatactcgagggcctcaacttcaatctgaccgagatccctgaggcccagatccacgaagggtttcaagaactgctcaggactctcaatcagcccgactcgcaactgcaattgactacgggaaacggactttttctgtccgaaggactgaagctggtcgataagtttttggaggacgtgaaaaaactgtaccatagtgaagccttcacggtgaacttcggagataccgaggaagccaagaaacagatcaatgactacgtagagaagggaactcagggcaaaatcgtggacctggtaaaggaactggacagagatactgttttcgccctggtcaactacatcttcttcaaaggtaaatgggaaagaccatttgaagtgaaggacactgaagaggaagattttcacgtcgatcaggtgaccaccgtaaaggtgcccatgatgaagcgcctcggtatgttcaatatccaacactgcaagaagctctcctcctgggtgttgctgatgaagtatctcggcaatgcgactgccattttctttctcccggatgaaggaaaactccaacacctggaaaacgaacttacccacgatatcatcaccaaatttctggagaatgaggacagacggtcggccagcctgcatcttccaaaactgtcgattaccggaacctacgatcttaagtcagttctgggtcagctgggcatcactaaggtgttctcaaacggcgcggacctgagcggggtcaccgaggaggccccgctgaagctgtcaaaggccgtgcataaggcggtgttgacgatcgacgaaaagggaaccgaagcggcgggcgcaatgtttctggaggctatcccaatgtcgattccgccggaagtgaagttcaacaagccgttcgtgtttctcatgatcgagcaaaacactaaaagtccgctgttcatgggaaaggtcgtgaacccgactcagaaa

SEQ ID NO: 45370 - DNA, 1254 bp, Artificial Sequence
  derived and/or modified sequence
atgccttcgtccgtgtcatgggggatactgctgctggcggggctgtgctgcctggtgccggtgtctctggctgaggatccacagggagacgcagcccaaaagactgacacttctcaccatgaccaggaccatccaactttcaacaaaatcactcctaaccttgcagaatttgcattctccctgtacaggcagctcgcgcatcaatcgaattcaaccaacatcttcttcagccccgtttccatcgcaaccgccttcgccatgctgtcgctggggaccaaagccgacacccacgacgagatcctcgaaggactgaatttcaatcttacggaaatccctgaagcccagatccatgaggggtttcaagagttgttgcggacgcttaaccagccggatagccagttgcagcttacgaccggcaatggactgttcctttccgaagggctcaagctggtggacaaattcttggaggatgtgaaaaaactgtaccactcagaggcgttcacggtgaactttggagataccgaagaggctaaaaagcagatcaatgattatgtcgaaaagggcacccaaggaaagatcgtggatcttgtgaaggagttggacagagacactgtctttgctctggtcaactacatctttttcaagggaaagtgggaacgccctttcgaggttaaggatactgaagaagaggacttccacgtagaccaagtgaccactgtgaaggtgccaatgatgaagcggctcggaatgttcaacatccaacattgtaagaaactgtccagctgggtgctgctcatgaagtacctgggcaacgccaccgcaatcttcttcctgccagacgaaggaaagctgcagcacctggagaatgagctcacccatgacatcattactaaattcttggaaaacgaggacagacgcagcgcgagtttgcacctgccaaagctctcgatcactggcacgtacgacctcaagtccgtgctggggcagctgggtattactaaggtcttttcgaacggagccgatctctcaggggtcactgaagaggcccctcttaaactgagtaaggcggttcacaaggccgtgctcaccattgatgaaaagggtaccgaggcggctggcgcgatgtttctggaagctatcccgatgtccattccgccagaagtcaaattcaacaagcccttcgtgttcctcatgattgaacagaacaccaagtccccgctgtttatgggaaaagtagtgaaccccacccaaaag

SEQ ID NO: 45371 - DNA, 1254 bp, Artificial Sequence
  derived and/or modified sequence
atgccgtcgagcgttagttggggcattttactgctcgctggcttatgttgccttgtgccggtctctctggcggaggatcctcagggcgatgccgcgcagaaaaccgatacttcacaccacgaccaagatcacccaacgttcaacaaaatcactcccaatcttgcggagtttgccttctctctgtacaggcagctggctcatcagagtaatagtacaaatatctttttttcaccagtaagtatagcgacagccttcgcaatgctaagcctcgggaccaaagctgacacgcacgacgagatactagaaggcttaaactttaacttaacagagattcccgaagcccagattcacgaaggcttccaagaactgctgaggaccctgaaccagccggattcccagttacagctgactacaggtaatggcctttttctttcggaggggctgaaactcgttgataagttcttggaagacgtcaaaaaactctaccattcggaagccttcactgttaactttggcgatactgaagaggccaagaagcagattaatgactatgtggagaaggggacccaggggaagatcgtggacctggtgaaagagctggatcgggatacagtgtttgccctggttaactacatctttttcaagggaaagtgggaaagaccctttgaggtaaaagataccgaagaggaggattttcatgtggatcaggttaccactgtaaaggtccccatgatgaaacgcctgggcatgtttaacatccagcactgcaaaaaactgtcatcttgggtgctccttatgaagtatctgggcaacgcgactgcgattttcttcctgcctgatgaagggaagctgcagcatctggagaacgaattaacccacgatatcataactaaatttctggagaacgaagaccgcagatctgcgtccctgcatctgcctaagctctcaatcactgggacctatgaccttaagagcgtgttggggcaactaggcattaccaaagttttctctaacggcgcagatctctccggcgtgaccgaagaggcgcctctgaagctgtctaaggccgtacataaagctgtgctgactattgacgaaaagggcacggaggcggctggggccatgttcctggaagccattccaatgagcattccgccggaggtgaagttcaacaagccgttcgtgttcctgatgattgagcagaacaccaagagccctctgttcatgggcaaagtcgtgaatcctacccagaaa

SEQ ID NO: 45372 - DNA, 1254 bp, Artificial Sequence
  derived and/or modified sequence
atgccatcatccgtatcttggggaatcctgcttctggcagggctgtgctgtctggttccagtgtccctggctgaagatccccaaggggatgcggcccagaagactgatacctcccatcatgatcaggaccacccaacttttaataagattactcctaatttagctgagttcgcctttagcctctacagacaattagcccatcagtccaacagcacaaacatcttcttctctccagtcagcatcgccaccgccttcgctatgctctctttgggtacaaaagcagacacccacgacgaaatcctcgaaggcctgaactttaaccttaccgaaatacctgaggcccagattcacgaaggtttccaggagttactcagaaccctgaatcagcccgactcccagctgcagctgaccacggggaatggtctgtttttgtcagaaggcctgaaactcgtggacaagttcctagaggatgtgaaaaagctgtatcactccgaggcttttacggtgaattttggggatacagaagaagccaagaagcagatcaacgactatgtggagaaggggacacaaggaaagatcgtcgacctggtgaaagagttggacagagataccgtgttcgcacttgttaactatattttttttaaaggcaagtgggagcgtccctttgaggtgaaagacaccgaggaggaggacttccacgtggatcaagtcacaaccgtcaaagtgcccatgatgaagagacttggcatgtttaacattcagcattgcaagaaattgtcctcctgggttttactgatgaaatacctgggtaatgctaccgcaattttctttctcccggatgagggaaaattacaacatttggaaaacgagctgacccatgacatcatcaccaagttcctagagaacgaggatcgccgctcggctagtttacacttgccgaaactttccatcacaggcacctacgacctaaagagtgtcctaggacagctagggatcactaaggtgttcagcaatggagccgatctatctggcgtgacagaagaagccccactgaagctgagcaaagcagtgcacaaagcagtgctgactatcgatgagaagggcacagaagccgcaggggccatgttcttggaagctattcctatgtccatccctcctgaagtgaagttcaacaaaccatttgtgttcctaatgatcgagcagaatactaaatcacctctattcatggggaaggtggttaaccctactcagaaa

SEQ ID NO: 45373 - DNA, 1254 bp, Artificial Sequence
  derived and/or modified sequence
atgccgtcgtccgtgtcgtggggcatccttctcctggctggactgtgttgtctggtgccggtgtccttggcagaagatccgcagggagatgcagcccaaaagactgacacttcgcatcacgaccaggatcacccaaccttcaataagatcaccccgaacctggccgagtttgctttctccctctacagacaactggctcatcaatccaactccaccaacattttcttctcccccgtctccattgccaccgctttcgccatgttgtcactgggtactaaggcagacactcatgacgaaatcctggagggactcaacttcaatctgaccgagattccggaggcgcagatccatgaaggattccaggagctgctccgaacgctcaaccaaccagactcgcagcttcagctcactaccggaaatggactgttcctctccgaaggattgaagctggtggacaagtttctggaggacgtgaagaaactgtaccactcggaggcctttaccgttaactttggagatactgaggaagccaagaaacagatcaacgactatgtagagaagggaactcagggaaaaatcgtggatctcgtcaaagagctggaccgcgacaccgtgtttgcgttggtcaattacatattcttcaagggaaagtgggagcgcccttttgaggtaaaagacaccgaagaggaggacttccacgtcgaccaggtgacgaccgtgaaggtcccgatgatgaagcggctgggcatgttcaacatccagcactgcaagaaactgtcatcttgggtcttgttgatgaagtacctcggtaatgcgaccgccattttcttccttccggatgaggggaaactgcaacacctggaaaacgaactcacgcatgatatcatcaccaaattcctcgaaaatgaagatcggcgctcggcgtcccttcacctcccaaaactttcgatcaccggaacgtacgatctgaagtccgtcctgggacaactgggaatcaccaaggttttttccaacggggcagacttgtcgggggtcactgaagaagcgccgctcaaactcagcaaagcagtgcataaggcagtgctgacgatcgacgaaaaagggaccgaggccgccggggcaatgtttctggaggctatcccgatgtcaatcccacccgaagtgaagttcaacaagccttttgtgttcctgatgattgaacagaataccaagtcgcctctcttcatgggtaaggtggtgaacccaacccaaaaa

SEQ ID NO: 45374 - DNA, 1254 bp, Artificial Sequence
  derived and/or modified sequence
atgccgagctcagtctcctggggcatcctgctgctggccgggctctgctgtctggtgcctgtgtccctggcagaggacccgcagggggatgcagcccaaaagaccgatacgtcacaccatgatcaggaccatcctaccttcaacaaaatcaccccgaatctggccgaattcgcattcagcctgtaccggcagctcgcccaccaatccaactcgaccaacatcttcttcagcccagtttcgatcgctaccgcgttcgccatgttgtctctgggcaccaaggcagatacccatgacgagatactcgagggcctgaatttcaatttgaccgaaatacccgaagcacagattcacgaggggttccaagagctccttcgcaccctgaaccagcctgacagccaactccagctcacgaccgggaacggtctgttcctgtcagaaggactgaaattggtggataagttcctggaggacgtgaagaagctgtaccatagcgaagcattcactgtcaacttcggagacaccgaagaagccaaaaagcaaatcaacgattacgtggaaaagggcactcagggcaagatcgtggatctcgtgaaagaactggatagagacaccgtctttgctctggtgaactacatcttctttaaaggtaaatgggagcggccttttgaggtcaaggataccgaggaagaagatttccatgtcgatcaggtgacgactgtgaaggtcccaatgatgaagcgcctgggaatgttcaatatccaacactgcaagaagctgtcgtcgtgggtgctgctgatgaagtacctgggtaacgccactgccatctttttcctgccggacgagggcaagctgcagcatcttgaaaacgagttgacccacgacattatcacgaagttcttggagaacgaggaccgcagatcagccagcctgcacctgccgaagctgagcatcaccggaacctacgatctcaagtcggtgctgggacagttgggaattaccaaggtgttctcaaatggagcggacctctcgggtgtgactgaggaggctcccctcaagctcagcaaggccgtgcacaaagccgtgcttactatcgacgaaaaaggaacggaagcggcaggagccatgttcctggaagccatcccaatgagcatcccgcctgaagtgaagttcaacaaacctttcgtgtttctgatgatcgagcaaaataccaagtcacccctgttcatgggcaaggtggtgaatccaacccagaaa

SEQ ID NO: 45375 - DNA, 1254 bp, Artificial Sequence
  derived and/or modified sequence
atgccttcctctgtaagttggggcattttactgttggccggcctgtgttgcctcgtccctgtttccttggccgaagatccacaaggtgatgcggcgcagaaaacagatacgtcccaccatgaccaagatcaccccaccttcaacaagattacccccaatctggccgagttcgcattttccttgtaccgtcagttggcccaccagtcaaattcaaccaatattttcttctcaccggtgtcaatagctacggcattcgcgatgctttctctaggcaccaaggcagatacacacgacgagatacttgaggggttaaacttcaacctgaccgagatccctgaagcacaaatccacgagggttttcaagaactgctcagaacactgaaccaacccgactcacaattgcagctgaccacaggcaatggtctgttcctgtctgagggacttaaactcgttgacaagtttcttgaagacgtaaagaagctctaccactccgaagccttcacagtgaactttggtgatacggaggaagctaagaaacagatcaatgattacgttgagaagggtacccagggcaagattgtggatctggtgaaggaactcgatagggacactgtctttgcactggtcaactatatcttttttaaagggaaatgggaacgtccctttgaggtgaaagacacagaggaagaagactttcatgtggatcaggtgaccacggttaaggtccctatgatgaagaggttgggcatgttcaacattcagcattgcaagaagctgtcatcctgggtgctactgatgaagtacctcggtaatgccacagccatattttttttgccagacgaaggcaaacttcaacatctggagaacgaactgacccatgatatcattaccaaatttctcgaaaacgaggatcgcaggtctgcctctctgcatctgccaaagctctctattacaggcacatatgacttgaagagcgtgctggggcagctcggcatcacaaaagtgttcagcaacggggcagacctgtccggggtgaccgaggaagcccccttaaaactcagtaaggccgtacacaaggcagtcttaacaatcgatgagaaaggaactgaggccgcgggagccatgtttctggaggccatcccaatgtccattcctcccgaggtaaagttcaataagcctttcgtgtttctgatgatcgaacagaataccaagtcccctttgtttatgggcaaggttgtgaatccaacccagaaa

SEQ ID NO: 45376 - DNA, 1254 bp, Artificial Sequence
  derived and/or modified sequence
atgcccagttctgtcagctggggtattctgcttctcgcaggtctttgctgtctcgtgcctgtgagcctggcagaggatccccagggcgatgcagcacaaaaaaccgataccagccatcatgatcaggaccatcccacttttaacaagattacccctaacctcgctgaattcgctttttccttgtaccgacaactggcccaccaatcgaactcgacgaacattttcttttcccccgtgagcatcgcgacggcgtttgcaatgctttcgcttggcactaaggcggatacccacgatgagatcctggaggggcttaactttaacctcaccgaaataccagaggcacagatccatgaaggatttcaagaactgctccgaactcttaaccagccggattcgcaacttcaactgactaccggcaacgggttgtttttgagcgaggggctgaagctggtcgataagttccttgaagatgtcaaaaaactttaccattcggaagccttcaccgtgaactttggagatactgaggaagcaaagaagcagattaatgactacgtggaaaagggtacccagggaaagattgtggacctggtcaaggaactggatcgcgacaccgttttcgcacttgtgaattacattttctttaaagggaagtgggagaggccattcgaggtcaaggacaccgaggaggaggacttccatgtggatcaggtcaccactgtcaaagtgccgatgatgaagagactcggaatgtttaacatccaacattgtaagaaactgtcgtcttgggtgcttcttatgaagtaccttggaaacgcaacggctatctttttcctgcctgatgaagggaaacttcaacatctggagaacgagcttactcacgacattatcactaaattcctggaaaacgaggatagacgttccgcatcgctccatctgcctaaactttcaattaccggaacttacgatctgaaatcggtcctcggacaacttggaattactaaagtgttttccaacggagcagatctttccggcgtgactgaagaagcgccactgaagctgagcaaggccgtgcacaaagctgtcctgactatcgatgaaaagggcaccgaggcggcaggtgcaatgttccttgaggctattccaatgtccattcctccagaggtcaagttcaataagccctttgtgttcctgatgatagaacaaaacacgaaatcgcccctgtttatggggaaggtggtgaaccccacccaaaag

SEQ ID NO: 45377 - DNA, 1254 bp, Artificial Sequence
  derived and/or modified sequence
atgccatctagcgtgagctggggaatcttactcctcgcaggactgtgttgtctggtgcccgtgtcactggcagaagatccgcagggtgacgccgcacagaagaccgatacctctcatcacgatcaggaccaccccaccttcaataaaattacccccaatctcgccgagttcgccttcagtttatacagacagctagcccatcagtcgaattcaaccaacatttttttttcgcccgtcagtatcgccactgcctttgccatgttgagtctggggaccaaggccgacacccacgacgaaattctcgaaggccttaactttaacctaacagaaatccccgaagcccagatacatgaggggttccaagagctgttaaggactttaaaccagcccgattcccagttgcagttgacaactggcaatgggctgttcctgtccgagggactaaagcttgttgacaagttcctggaggatgtcaagaagctgtatcactccgaagccttcaccgttaattttggtgatacagaagaggctaaaaaacagatcaatgactatgttgagaagggaacacaaggtaaaatagtagacctggtcaaagagctcgatcgcgacacagtgtttgcactggtgaattacatcttcttcaagggtaaatgggagcgtcctttcgaagtgaaagatactgaggaggaggacttccacgtggaccaggttactactgttaaggttccaatgatgaagaggctgggaatgttcaacattcaacactgtaagaagctctcttcttgggtgttgttgatgaagtacttgggcaacgccactgccattttctttctgccagatgagggtaagctccaacacctggagaacgagttaacccatgacattataacaaaattcttggaaaacgaggatcggaggagcgcttccctgcacctgccgaagctgagcattaccggcacttacgatctgaagtctgtgctgggccagttgggcataactaaagttttcagcaatggagccgacctcagcggcgtcaccgaggaggctccgcttaagctttcgaaggctgttcacaaggcagttctgaccattgacgaaaaggggaccgaggcagccggcgccatgttcttagaggcaattcccatgagcatccctcccgaagtgaaattcaataaacccttcgtgttcctgatgatagagcagaatactaaatccccactctttatgggaaaagtggttaatcccacccagaaa

SEQ ID NO: 45378 - DNA, 1254 bp, Artificial Sequence
  derived and/or modified sequence
atgcctagctccgtctcctggggaattcttctgcttgccggcttgtgttgtctggttccggtgagcctggccgaagatccgcaaggcgatgcagcgcaaaagaccgacaccagccatcacgatcaagaccatcctactttcaacaagataacccctaacctggcggaatttgccttctccctctaccggcaacttgcacatcaatcgaacagcaccaacatctttttctcccctgtgtccatcgccaccgcgtttgccatgctgtcgcttggtactaaggccgatacccatgatgaaatcctcgaaggacttaactttaatctgactgagattccagaagcacagatccatgaaggttttcaagagctcctgcgaacgttgaaccagcctgattcccaacttcaacttaccaccggtaacggcctctttcttagcgaaggccttaagttggtggataagttccttgaggacgtcaaaaaactttatcacagcgaagcctttactgtgaattttggtgacaccgaggaagcaaagaagcaaatcaatgattacgtggaaaaaggtacccaaggaaaaatcgtcgatcttgtgaaagagctggacagagatactgtgtttgcactggtcaactacatcttctttaaaggtaaatgggagaggccttttgaagtgaaggacactgaagaggaggattttcacgtggatcaagtgaccactgtgaaggtgcctatgatgaagagactcgggatgttcaatattcaacactgcaagaagctctcatcgtgggtgctgctgatgaagtaccttgggaatgccactgccatcttttttctgccagatgaaggcaaacttcagcatcttgagaacgaacttacccatgacattatcaccaagttccttgaaaatgaagataggcgttcggcatcactccatcttccaaagctctcaatcactggaacctacgatctgaagagcgtcctgggacaacttggaattaccaaagtgttctcgaacggcgcagatctctccggggtcaccgaagaagcgcctctgaaacttagcaaggcagtgcataaagcagtgctgactattgacgagaaaggcaccgaggcagcaggggcaatgtttctggaggctatcccgatgtccataccaccagaagtgaagttcaataaaccgttcgtctttctgatgattgaacaaaataccaagtcgcctctcttcatgggaaaggtggtgaatcccactcaaaag

SEQ ID NO: 45379 - DNA, 1254 bp, Artificial Sequence
  derived and/or modified sequence
atgcccagcagcgtgagttggggcatcctcctgctagccggcctttgctgtcttgttcctgtgagcctggcggaggaccctcagggggacgctgcccagaagacggacaccagccaccacgatcaggatcatcctacattcaataaaatcaccccaaacctggctgaatttgcgttttccctttatagacagctcgcacatcaatctaacagcaccaacatctttttctcccctgtgagcatcgctacagcgttcgccatgctgagtttaggcaccaaggccgacacccatgacgagatcctagagggcctaaatttcaacctgacagagatccccgaagcacagatacatgagggtttccaggagctccttagaacgctcaaccagcccgattcccaactgcaattgacgacgggcaatggcctgtttctcagcgaggggctaaagctggttgacaaatttctggaagatgtgaaaaagctttatcatagcgaggccttcaccgtgaattttggtgacacagaggaggctaagaaacaaataaacgattacgtagaaaagggaactcagggcaaaatcgtggatctggtaaaagagctcgacagggataccgtgttcgcgctagtgaattatatcttcttcaaaggtaagtgggaaagaccatttgaagttaaggatacagaggaggaagatttccatgtcgatcaggtgactaccgtgaaggtgcccatgatgaagaggcttgggatgtttaacatacagcattgtaaaaagttaagtagctgggtcctgctgatgaaatatctcggaaatgccacagctatcttctttctacctgacgaagggaaattgcagcatctcgagaacgagttaacgcacgacattataactaaattccttgaaaatgaagataggcggagtgcttctctccatttgcccaagctctccatcacaggtacttacgacttgaagtcagtgctcggacagctgggtatcaccaaggttttttcgaatggcgccgatctaagcggcgtgacggaggaggcgcccttaaaactcagcaaggccgtgcataaagccgtactgaccatcgatgagaaaggaactgaggccgcgggtgctatgttcttggaagccatccctatgtccataccaccagaagtgaagttcaataaaccttttgtgttcctgatgattgaacagaacacgaagtctcccttattcatggggaaggttgttaatccaacacagaaa

SEQ ID NO: 45380 - DNA, 1254 bp, Artificial Sequence
  derived and/or modified sequence
atgccctcgagcgtgtcatggggaatcctgctgcttgcaggactttgttgtctggtgccagtgtcgctggcggaggacccacaaggggacgcagcacagaaaaccgatacttcccatcatgatcaggatcatcctactttcaacaagattaccccgaacctggcagaatttgcattcagcctgtaccgtcagttggcacatcagtcaaacagcactaatatcttcttttccccagtgtccattgcaaccgcatttgcgatgctgagcctgggcactaaagctgacactcatgacgagattcttgaaggccttaactttaacctgacggaaattccagaagcgcaaatccatgaaggttttcaagagctgctgaggaccctgaaccaacccgattcccagcttcaactgaccaccgggaacggactctttctgagcgaggggttgaaactggtggacaagtttcttgaggatgtgaagaaactctaccacagcgaagcatttacggtcaacttcggagatactgaggaagcgaagaagcagattaacgactacgtcgaaaaaggaactcagggcaagattgtggatctcgttaaggagttggatagagacaccgtctttgcactggtgaactacatcttctttaagggtaagtgggaacggccttttgaggtcaaagacaccgaagaagaggacttccacgtcgatcaagtcactactgttaaggtgcccatgatgaagaggcttggcatgtttaacattcaacactgtaagaagctctcctcgtgggtcctcctcatgaagtacctcggaaacgcaaccgcaatctttttcctgcctgatgaagggaaacttcagcatctggagaacgaacttacccatgacatcattaccaagtttctggaaaacgaggatagacggtccgcctctctgcacctgcctaaactttcgatcaccggaacctacgatttgaaatctgtcttgggccaacttggaatcactaaagtgttctccaatggtgctgacctctcgggagtgaccgaggaagcccctctcaaacttagcaaagcagtccacaaggctgtgctgactattgatgagaaggggacggaggccgcaggggccatgttcctcgaagcaatcccaatgtccatcccaccagaagtcaagtttaacaagccattcgtgtttctgatgattgagcagaacactaagtcccctctgtttatgggaaaagtcgtcaacccaacccaaaag

SEQ ID NO: 45381 - DNA, 1254 bp, Artificial Sequence
  derived and/or modified sequence
atgccatctagtgtttcttggggaattttattgttagcaggactttgttgtttggttccagttagtttagcagaagacccacaaggagatgcagcacaaaaaacggacacttcacatcatgatcaagatcatccaacttttaacaaaattacgccaaatttagcagaatttgcattcagtttatatagacaacttgcacatcaaagtaattcaacaaatattttctttagtccagtatcaatagcaactgcatttgcaatgttatcattgggaacgaaagctgatacacatgatgaaattcttgaaggattaaattttaatttaacagaaattccagaagcacaaattcatgaaggttttcaagagcttttaagaacacttaatcaaccagattcacaattacaacttacaactggaaatggattattcttatctgaaggacttaagttagtcgataaattcttagaagatgttaaaaagttatatcatagtgaggctttcactgtaaattttggtgatactgaagaagctaaaaaacaaattaacgattatgttgaaaaaggaacacaaggaaaaattgttgatcttgtaaaagaactagatagagatactgtttttgcattagttaactatattttcttcaagggaaaatgggaaagaccttttgaagttaaagacacagaagaagaagactttcatgttgatcaagtaactacagtaaaagttccaatgatgaaacgacttgggatgtttaatatacaacattgcaagaaattatcaagttgggttttacttatgaaatatttaggaaatgcaacagctattttcttccttccagatgaaggtaaattacaacatttggagaatgagcttactcatgatattatcactaaattccttgaaaatgaagatagaagatcagcatcattacatcttccaaaactttctatcacaggaacatatgatcttaagtctgtcttaggacaacttggaataactaaggttttctcaaatggagctgatttaagcggagttacagaagaagctccattaaagctatctaaagcagttcataaagctgttctaactattgacgaaaagggaactgaggctgctggagctatgtttttagaagcaattccaatgtcaattcctccagaagttaagtttaataaaccattcgtttttctaatgattgaacaaaatactaaatcacctttatttatgggaaaagttgttaatccaacacaaaaa

SEQ ID NO: 45382 - DNA, 1254 bp, Artificial Sequence
  derived and/or modified sequence
atgcccagtagcgtatcatggggaattttgcttttagcaggcctgtgctgtctggttcccgtcagcctggccgaagatccgcagggcgatgccgcacagaagacagatacatctcaccatgaccaagatcaccccacctttaataagattaccccaaatctggccgaatttgctttttcattgtataggcagttggcacatcagtctaattccacaaacatctttttttctcctgtgagcatcgccaccgcgtttgcaatgctaagcctcgggaccaaagccgacacccatgatgagatcttggagggcctgaatttcaatctaactgaaatcccagaggcccagatccacgagggcttccaagaactactccggacactaaaccagcccgacagccagctgcagctgactacagggaacggcctgttcttatccgaaggactgaagctggtcgacaaattcttggaggatgtaaaaaagctgtaccatagcgaagcattcaccgttaatttcggagataccgaggaagccaagaagcagatcaacgattatgtggaaaaaggcacacaggggaaaattgtggacttggtgaaagagctggacagggacacggtattcgcactcgtaaattacatcttctttaaaggaaagtgggaaaggcccttcgaagtgaaagacaccgaggaggaggatttccatgtggatcaggtcacgacagtcaaggttcccatgatgaagcgcctcggcatgttcaatattcagcactgcaagaaattaagctcctgggtgctcctgatgaagtatctggggaacgccacagccatattcttcctgccagacgaggggaagctgcagcacctagagaatgagttgacccacgacatcatcaccaaatttcttgagaacgaagaccgcagatcagcatctctgcatctccctaagctgtccattaccggtacttacgacttgaagagtgtactgggacagctgggtattacgaaggtctttagcaacggggccgatctctcaggagtgaccgaggaagctcccctgaagctctcaaaggccgtgcataaagcggtgttgacaatcgacgagaaggggaccgaagcagccggcgccatgtttctcgaggcaattcctatgagcatcccacccgaggtaaaatttaacaaaccatttgtcttcttgatgattgagcagaacaccaaaagcccgttgtttatgggaaaggttgtcaatccgactcagaaa

SEQ ID NO: 45383 - DNA, 1254 bp, Artificial Sequence
  derived and/or modified sequence
atgccgagcagcgtgtcctggggcatccttttgcttgcaggattatgttgtttggtgcccgtgagcctggctgaagacccacaaggggacgcggctcaaaagaccgatacaagccatcacgaccaggaccacccaacctttaataagattactccaaacctggcagagtttgccttctcactgtaccgccaactcgcacaccagtccaatagtacgaacattttcttttctcccgtgtccattgctaccgcattcgctatgctcagtctcgggaccaaggcggacacacatgacgaaatcctggaaggcctgaactttaacttgaccgaaatcccggaggcccaaatccacgagggattccaagaactgctgcgaaccttgaaccagcccgactcgcagctgcagcttaccaccggaaatggcctattcctgtccgagggactcaaactagttgacaagttcctggaggatgtgaagaagctgtatcatagtgaggcatttaccgttaactttggcgataccgaggaagccaagaagcagattaacgactatgtggaaaagggtactcagggaaagatcgtggacctggtgaaagagctggatcgggacactgtgtttgcgctagtgaattatatatttttcaaaggcaaatgggaacgccccttcgaagtaaaggacaccgaggaggaggatttccacgtagaccaggtaaccacagtgaaggtaccaatgatgaagaggctaggcatgttcaacatacagcactgtaagaagttgtcatcctgggtactgcttatgaagtacttggggaacgctaccgccatatttttcctgccagacgagggcaaattgcagcacctggagaacgagttaacccacgatattattacaaagttcctggaaaacgaagatcggcggtcggcctctcttcatcttcccaagctgagcatcacggggacttacgacctcaagtcagtcttgggtcagctgggcattaccaaggttttctccaatggagccgacttgagcggggtgaccgaggaggctccactgaagctctcgaaagccgtgcacaaggcagttttaacgattgatgagaaggggacagaagccgcaggcgccatgtttttggaggctatcccaatgtctattccccccgaggtgaagttcaataaaccattcgtgttcctgatgatcgaacagaacaccaaaagccccttgtttatgggtaaggtcgtaaaccccacacaaaaa

SEQ ID NO: 45384 - DNA, 1254 bp, Artificial Sequence
  derived and/or modified sequence
atgccgtcatcagttagttggggaattcttttgctcgcaggtttgtgctgcctcgtaccagtctcgttggcggaggatcctcaaggagatgcagcacagaaaactgatacctcccaccacgatcaagatcatccaacattcaataaaattaccccgaaccttgcagaattcgcattctctctctaccgacaattagcccatcaatcaaattctactaatatttttttctcaccagtgtccatcgctactgcgttcgcaatgctgtcccttggcacgaaagctgatacgcatgacgagatactcgagggactcaatttcaatctaacagaaatcccagaagctcaaatacatgagggttttcaagagttattaagaactttgaatcagccggatagtcaacttcaactgacgaccggcaatggactttttctgtcagaaggcttgaagttggtggataagttcttggaggatgtgaaaaaactgtatcatagcgaggcttttacggttaattttggagatacagaagaggcaaaaaaacaaattaacgattatgttgaaaaggggacacagggtaagattgtagatcttgtgaaggagctagatcgagacactgtgtttgccctagtaaattacattttttttaaaggaaaatgggaacgtccatttgaggtcaaggacactgaagaagaagacttccacgtcgatcaagtaaccacggtaaaggttccaatgatgaagaggctgggaatgtttaatattcaacactgcaaaaagctttcttcttgggttttgctcatgaaatatctcggaaatgcaacagccatctttttccttccggacgaaggaaaacttcaacacttggaaaatgaactaacacacgatatcattacaaaattcctcgaaaatgaggatcgtcgatctgcttctcttcacctaccaaaactttctattaccggtacttatgatcttaagtcagtattgggtcaactcgggattacaaaagtctttagtaacggagctgacttgtctggcgtgactgaagaggctccgctcaaacttagtaaggccgtccataaagcagttttgaccatagatgaaaaaggaactgaagctgcgggcgcaatgtttcttgaggcgattccaatgagcattcccccagaagtcaagtttaataaaccgtttgttttcctcatgatcgaacaaaatacaaaatcaccattgtttatgggtaaagttgttaatccgacacaaaaa

SEQ ID NO: 45385 - DNA, 1254 bp, Artificial Sequence
  derived and/or modified sequence
atgccctcatcagtcagctggggtattctcctgctggccggactgtgctgcctggtgcccgtgtccctcgcggaggacccgcaaggagacgcggctcaaaagaccgacacttcacaccacgaccaagatcacccaaccttcaacaagattaccccgaatctcgccgaattcgcattttccctgtacagacaacttgcccatcagagcaactcgactaacatcttcttctcgccggtgtccatcgccactgcgttcgccatgctctccctgggaactaaggctgacactcacgacgaaatcctggagggactgaacttcaatctgaccgagatcccagaagcccaaatccatgagggttttcaggagttgttgcgcaccctgaaccagccagacagccagctgcagttgacgaccggcaatggcctgtttctgagcgaaggactgaagctcgtcgataagttcctggaggacgtgaagaagctgtaccacagcgaagccttcacggtgaacttcggcgacacggaagaagcgaaaaagcagatcaacgactacgtggaaaaaggaactcaaggtaaaatcgtcgacctggtgaaggagctggacagagataccgtgtttgcgctggtgaactatatcttcttcaaaggaaaatgggaaaggccattcgaagtcaaggatactgaagaagaggatttccacgtggaccaggtgactaccgtcaaggtgccgatgatgaagcgcctggggatgttcaatatccagcactgtaagaagttgagctcgtgggtgcttctcatgaaatacctcgggaatgctacggcaatcttctttctgccggatgaagggaaactgcagcacctggaaaacgagctcacccatgacatcatcaccaaatttcttgaaaatgaggaccgccgctccgccagtctgcacctgccgaagctgtcgatcaccggcacttatgacctgaaatccgtgttgggacagcttggaatcaccaaagtctttagcaatggtgctgacctgtccggagtgactgaggaggcgccactcaagttgtcaaaggcagtgcataaggccgtgctgacgatcgatgaaaagggcacggaagctgcgggagcaatgttcctggaagcaattcctatgtctatcccgccagaggtcaagtttaacaaacccttcgtgttcctgatgatagaacaaaacacgaaatccccccttttcatggggaaagtggtgaacccgactcaaaaa

SEQ ID NO: 45386 - DNA, 1254 bp, Artificial Sequence
  derived and/or modified sequence
atgccatcgagcgtctcatgggggatcctgctcctcgcgggtctttgctgccttgtgcctgtctcgttggcagaggatccgcaaggagatgcagcccaaaagacggatacctcgcaccacgaccaagaccatccgacgttcaacaagattaccccaaacttggccgagttcgccttctcattgtaccggcagctcgctcaccagtcgaactccaccaacatcttcttctcgccagtcagcatcgccaccgcattcgccatgctcagcttgggtacgaaggcggacactcatgatgagattctggaaggcctgaatttcaacctcaccgaaatcccggaggcccagatccatgaaggcttccaagagctgctgcgtaccctcaatcagcccgactcccaacttcagctcactaccggaaatggactctttctgagcgaaggactgaaactggtggacaagttcttggaggacgtgaagaagttgtaccactcggaggccttcaccgtgaatttcggcgacaccgaggaagcgaaaaaacaaatcaatgactacgtggagaagggaacccagggcaagatcgtcgaccttgtcaaggaactggaccgcgatactgttttcgcacttgtcaactacatcttctttaaagggaagtgggaaaggccatttgaagtgaaggatactgaagaagaagatttccatgtggaccaggtgaccactgtgaaggtgcccatgatgaagcgcctcggcatgttcaacattcagcattgtaaaaagctgagctcgtgggttcttttgatgaagtacctgggtaatgcgaccgccatctttttcctgccagacgagggcaagctgcagcacctcgaaaatgagctcacgcatgacatcatcaccaagtttctggagaacgaggatagacggtcagcaagcctgcacctgccaaagttgtccataacgggaacctacgacctgaaatcggtcctgggtcagctcggaatcaccaaagtcttttctaacggggccgatctgtcgggcgttactgaagaagccccgctgaagctgagcaaggcggtgcacaaagccgtgcttactattgatgagaagggaactgaagctgctggagccatgttcctcgaagcaattcctatgtcgatccctccggaagttaagtttaacaagccgttcgtgttcctgatgatcgaacaaaacactaaatcacctctgtttatgggaaaagtcgtgaatccgacgcagaag

SEQ ID NO: 45387 - DNA, 1254 bp, Artificial Sequence
  derived and/or modified sequence
atgccaagttccgtgtcgtgggggatactgcttctcgccgggctctgctgtctcgttcccgtgtcattggcagaggatcctcagggggatgctgcacagaaaacagatacatcgcatcatgatcaggatcatccaacttttaacaaaattactccaaatctcgcagaatttgcattctctctttatagacagctggcccaccagtccaattctacaaatatattcttctctccagtttccatagcgacagcctttgccatgctctctctaggaactaaagccgatacacatgatgagattctcgagggactgaattttaatctcactgaaattcctgaagcccagatacatgaggggtttcaggagctgctccgtactctgaaccagcccgattctcagctccagctgacaacgggaaatggactcttcctgtcagagggacttaaactggtcgataaattcctggaagatgtgaagaaactataccattccgaggctttcacagtgaattttggagatactgaagaggccaaaaaacagataaacgattacgtggaaaaaggaactcagggaaagatcgtcgatcttgttaaagaactcgacagggatactgtgtttgcccttgtaaactatatattctttaaaggaaaatgggagagaccttttgaagtaaaggatactgaagaagaggacttccatgtcgatcaggtcacaactgtgaaagtgccaatgatgaaaagactcggaatgtttaatattcagcattgtaagaaactctcctcttgggtcctactgatgaaatatttgggaaatgccacagctattttctttcttcctgatgaagggaaactccagcaccttgagaacgaactaacacatgacattataactaaattcctggagaatgaagatcggcggtccgcttccctgcaccttcctaaattgtcgattacaggaacttatgaccttaagtccgtgctcggacagcttgggataactaaagtgttctctaatggagcagacctgtccggggttactgaggaagcccccctaaaactcagtaaagctgtccataaagccgtgctaactatcgacgagaaaggaactgaggccgctggggccatgtttcttgaggccattcctatgagtataccccctgaggttaaattcaacaaaccttttgtgttccttatgatagaacagaacactaaatccccattgtttatggggaaagtagtgaaccccacacagaaa

SEQ ID NO: 45388 - DNA, 1254 bp, Artificial Sequence
  derived and/or modified sequence
atgccttcttctgtctcttggggaatcctcctgcttgctggcctgtgctgtctggttccggtttctcttgctgaagaccctcagggcgacgcagcccagaaaacggatacatcccatcacgatcaggatcaccccacctttaacaaaatcacacccaatctcgcagaattcgcgtttagcctgtatagacagcttgctcaccagtccaattctactaatatcttcttttcccccgtgtccatcgcgacagcgtttgctatgttgtccctgggaacaaaagccgatacacacgatgaaatcctagaaggcctaaatttcaatctcaccgaaattcccgaggcacagatccacgagggttttcaagagctgttgaggacattaaaccagcccgatagtcagctgcagctgaccactgggaacggtctgtttcttagtgaagggctaaagcttgttgataaattcctggaggatgtgaagaagctgtaccacagcgaggccttcaccgtgaactttggcgataccgaggaagccaagaagcagataaacgactacgtggagaaaggtacgcagggaaaaatcgtggacctggttaaggagctggatcgcgataccgtctttgcgcttgtgaactacatctttttcaaagggaaatgggagcggccttttgaagtgaaagacactgaggaggaggactttcatgtggatcaggtgacaacagtcaaagttccaatgatgaagcgcctcggaatgttcaacattcagcactgcaagaagttgtcctcatgggttctgctgatgaaataccttgggaacgccaccgcaattttcttcttgccagatgaggggaagctccagcatctagagaatgagctcacacatgatattatcactaaatttttagagaacgaggaccgaaggtcagcctctcttcatctgcccaagctttcaatcacggggacatacgatctgaagagcgtgctcggacaactgggaatcactaaggtctttagcaacggggcagacctgtccggtgtgacagaagaggcgccattgaaactgtcgaaggcagtgcacaaagcggtgctgaccatcgacgaaaaaggtacagaagccgctggtgccatgtttctcgaggcaatccccatgtcgatacccccagaggtcaagttcaataaaccattcgtgttcctcatgatcgagcagaatacaaagtccccactatttatgggcaaggttgtgaaccctacccagaag

SEQ ID NO: 45389 - DNA, 1254 bp, Artificial Sequence
  derived and/or modified sequence
atgcctagtagcgtctcgtggggcatcctgctgctcgccggactttgttgcctggtgccagtctcgctcgcggaggacccacaaggagatgcagcacaaaaaactgacacgagccaccatgaccaggaccaccctaccttcaacaagatcacgccaaatctggccgagttcgcgttctcactctacaggcagctcgcgcaccagagcaactcaactaacatctttttctctccagtgtccattgccaccgccttcgcgatgttgtccttggggaccaaggcagacacccatgacgaaatcctggaaggccttaatttcaacctcaccgaaatccccgaggctcagatccacgaaggattccaggaactgctgcggaccctgaaccaaccggacagccaactgcagctgactaccggtaacggtctgttcctgtccgagggactgaagctcgtggataaatttttggaggacgtgaagaaactgtaccactccgaggcttttaccgtgaattttggagacacggaagaagccaagaagcaaatcaatgattatgtcgaaaaaggaactcagggaaagattgtggaccttgtcaaggagctggatcgggataccgtgttcgcgctggtgaactacattttctttaagggcaaatgggaaagaccgttcgaagtgaaggataccgaggaagaagatttccatgtggaccaggtgactactgtgaaggtgcccatgatgaagagactggggatgttcaacatccagcactgcaagaagctgtcgtcctgggtgctcctcatgaagtacctgggaaatgcgactgctatcttcttcttgccggacgaaggaaaactgcagcatcttgagaacgaactcacccatgatataatcactaagttcctcgagaatgaggaccgccgctccgcttccctgcacctgccaaagctgagcatcaccggcacctacgatttgaagtcagtcctcgggcaactcggcatcactaaagtgttttcgaacggagcagatctctcgggtgtcaccgaagaagccccgctgaaactctcaaaggcagttcacaaggccgtccttactatcgacgaaaaagggacggaggccgctggagccatgttcctggaggccattccgatgtcgatcccgccggaggtgaagttcaacaaaccgtttgttttcctgatgatcgaacagaacactaagtcgcctttgtttatgggcaaagtcgtgaatcctactcaaaag

SEQ ID NO: 45390 - DNA, 1254 bp, Artificial Sequence
  derived and/or modified sequence
atgccctcctccgtgtcctggggaatccttctgctggccggcctctgttgtcttgtccccgtgtcactggcagaggatccacaaggggatgcggcccagaaaaccgatacttcacatcatgatcaagatcacccaactttcaacaagattaccccaaacctggcagaatttgcattctcgttgtacaggcagcttgcccatcaatcaaattctactaacatcttctttagccccgtgtcgattgccaccgcgttcgccatgctttcgttggggaccaaggccgatacgcatgatgagattttggaagggctcaacttcaatctgactgagattccagaagctcagatccatgaaggttttcaagaactccttcgcacgctcaaccaacctgactcccaacttcagctcacgaccggaaacggccttttcctgtctgagggactcaaacttgtggataagtttctcgaagatgtcaaaaaactgtaccattcggaggcatttactgtgaactttggcgatactgaagaggcgaaaaagcagattaacgattacgtcgaaaagggaactcaaggcaagatagtggatcttgttaaggaactcgacagagacaccgtgtttgccctcgtgaactacatctttttcaagggaaaatgggaaagaccttttgaggtgaaagataccgaagaggaagattttcacgtggatcaagtgacgactgtgaaggtgccaatgatgaagagactcggaatgtttaacattcagcactgcaaaaaactttcatcgtgggtccttcttatgaagtacctcggtaatgccaccgccatcttctttcttccagatgagggaaagctgcaacatctggagaacgaactcacccatgatatcatcactaagttcctcgaaaatgaagatcggcggtcggcctccctccatctgccgaaactttccataactggaacttacgacctgaagtcggttcttggccagctgggcataaccaaggtgttttcgaatggagcagatctctcgggtgtgactgaggaagcaccgcttaagctgagcaaggcagtgcataaggcagtcttgaccatagatgaaaaaggtactgaagcggccggagcaatgttcctggaggcaatccctatgtccatacctcccgaggtgaagttcaacaagccatttgtctttttgatgatcgaacagaatacgaaatcccccctgttcatggggaaagtagtgaatcctacccagaaa

SEQ ID NO: 45391 - DNA, 1254 bp, Artificial Sequence
  derived and/or modified sequence
atgccctcttccgtgagctggggaatcctgctcctagccggcctctgttgtcttgtgcctgtgtctttggctgaagacccgcagggggacgcagcgcaaaagacagacactagccaccacgatcaggaccatcccacctttaacaagataactcccaacttggccgaatttgcattttctctatataggcagctcgctcatcagagcaactccaccaatattttcttttctccggtgtctattgccacggcgttcgcgatgctgagtctcggcaccaaagccgacacccacgacgaaatcctggaaggactgaattttaatctgaccgaaatacccgaggctcagatccacgaaggcttccaagagttgctgagaaccctcaatcagcccgactctcagctgcagttgacaactggcaacggacttttccttagtgaagggctcaaactagtcgacaagtttctggaggacgttaagaagctttatcattccgaggcctttactgtgaatttcggcgatacggaagaggcaaaaaagcagatcaacgattacgtggagaaggggacacaaggcaaaatcgtagacctggtgaaggagcttgatcgcgataccgtgttcgctctggttaattacatattttttaagggtaaatgggaacggccattcgaggtgaaagacacagaggaggaagattttcacgtcgatcaggtcacgaccgtcaaggtaccaatgatgaaaagattgggaatgtttaatatacagcactgcaagaaactgagttcatgggtgctcctgatgaaatacctgggcaatgcaaccgcgatctttttcctgcccgacgagggaaagttgcagcacttggagaacgagctcactcacgacattatcactaaattccttgagaatgaggatcgtcggagcgcatctctgcacctgcccaaactgtccatcactggaacatatgatttgaaaagtgtgttggggcagcttggcatcactaaagtgttctcaaacggcgcagacttgagcggggtgacagaagaagctcccctgaaactatctaaagcagtccataaggccgtgctgactatcgacgaaaaaggaactgaggccgccggcgctatgtttctcgaagctatcccaatgagcattccaccagaagtgaaattcaacaagccattcgtctttctgatgatcgagcagaacacgaaaagcccccttttcatgggtaaggtggtcaatcctacgcagaag

SEQ ID NO: 45392 - DNA, 1254 bp, Artificial Sequence
  derived and/or modified sequence
atgccctcgtcggtgagctggggtatcctccttctggccgggctgtgttgcctggtgccagtcagccttgcagaagatcctcaaggtgatgcagctcaaaaaactgatacgagccatcatgatcaggaccatcctacttttaacaagatcactccaaatctggcagaattcgctttttccctgtacagacaacttgctcatcagtcgaactcgaccaacattttcttttcgcctgtgtcgatagccaccgcctttgcaatgctttcgctgggaaccaaagcagatactcacgacgagatccttgaaggactgaactttaacctgaccgagattccagaagcacagatccatgaaggatttcaagaactcctgagaaccctgaaccaaccagattcacagctccagctcactaccggaaatggattgttccttagcgaaggcctgaagctggtggataagttccttgaagatgtgaagaagttgtaccactcggaggcatttacggtgaattttggtgatacggaggaagcgaaaaagcaaatcaacgactacgtggaaaagggaacccaaggtaaaatcgttgatttggtgaaagaattggacagagacactgtgttcgcacttgtgaactacatctttttcaagggcaaatgggagcgaccgtttgaagtgaaggacaccgaggaggaggattttcatgtggatcaggtcacgactgtgaaggtgcctatgatgaaacggcttggtatgtttaacatccaacattgtaaaaagctgagctcgtgggtgctgctgatgaagtacttgggcaatgccaccgcaatattcttcctgcctgacgagggaaagctgcagcatctcgaaaatgaattgactcatgacatcattactaaattcctggaaaacgaggatcgtaggtccgccagcctccatcttccaaagctctcaatcacgggaacttacgatcttaagagcgtcctcggccagctgggtataactaaggtgttcagcaatggagcagatctctcgggggtgaccgaagaggcaccgctgaaactgtctaaggcagtgcataaggccgtgcttaccattgatgagaagggaaccgaagccgccggagcgatgttcctcgaagccattcctatgagcatccctcctgaagtcaaattcaataagccatttgtgtttctcatgattgaacaaaacaccaagtcgcccctgttcatgggcaaggtggttaaccctacccaaaaa

SEQ ID NO: 45393 - DNA, 1254 bp, Artificial Sequence
  derived and/or modified sequence
atgccctcatctgtgagctggggcatcctgctactggctggcctctgctgtctggttcccgtgtctctcgctgaggacccacagggggacgcagcacagaagacagatacgtcgcaccatgatcaggatcaccctacatttaacaaaatcactcccaacctcgccgagtttgcattttcactttaccggcaactggcccaccagagcaactctaccaacatttttttttctccagtctctatcgctactgctttcgcaatgttgagcctcggtaccaaggccgacacacatgacgagattttggagggcctcaactttaacctaactgagatccccgaggcacagattcacgagggattccaggagctattacggacccttaaccagcctgactcacagctgcaattgacaacgggaaatggactgtttttgtctgagggactgaaattggtcgataaattcctggaggacgtgaagaagctgtatcactctgaggcgtttaccgtgaatttcggcgacacagaagaagcaaagaaacagattaatgattacgtggagaaaggcacgcaaggaaaaattgttgatctcgtaaaagaattggacagagataccgtctttgccctcgtgaattatatcttcttcaaagggaagtgggagcgcccattcgaggttaaggacacggaagaagaggactttcacgtcgaccaggtgaccactgtcaaggtgccgatgatgaaaagactcggaatgtttaacatccagcattgcaaaaagctcagctcatgggtgctgctgatgaaatacctcggaaacgctaccgcgattttcttcctgcctgacgaaggcaaactgcagcaccttgagaatgagctgacccatgacatcataaccaaatttctggagaacgaagatagacgcagtgccagtctgcacctgccgaagctaagtattacggggacttatgacttgaaatccgtgttggggcagctggggattactaaggtgtttagtaatggggccgatctgtcgggagttaccgaggaggcgccgctgaagttgtcaaaagccgttcataaagcagtattgactattgatgaaaagggcacagaagccgccggtgctatgttcctcgaagccatcccaatgtccatccctccagaagttaagtttaacaagccattcgtgtttctgatgatagagcagaataccaaatcccctctcttcatgggtaaggtggtgaacccaacccagaag

SEQ ID NO: 45394 - DNA, 1254 bp, Artificial Sequence
  derived and/or modified sequence
atgccgagtagtgtcagttggggaatcctgctcctcgccggcctgtgctgtctcgtgcctgtgtctctcgcagaagacccacagggcgatgctgcacagaaaaccgacaccagtcatcacgaccaggaccacccgaccttcaacaaaatcacacccaacctggctgaattcgctttctctctgtataggcaactggcgcaccagtcaaattccacgaacatcttcttttcgcccgtgagcatcgccacggctttcgcgatgctttcgctgggtaccaaggccgatacgcatgacgagatcctggaggggctaaacttcaatttaacggaaatcccagaggcccagatacacgaggggtttcaggaactgctcaggaccctcaatcagccagactcacaactgcagttgactacaggaaacgggttgttcctgtcggagggtttgaagctggtcgataagttcctggaggacgttaaaaaactttaccattcagaggctttcacagtgaattttggcgacacggaggaggctaaaaaacagattaacgattacgtggaaaaggggacccaaggcaagattgttgatctcgtgaaggaactggatcgcgacactgttttcgcccttgtcaattacatcttctttaaggggaaatgggaacggccatttgaggtgaaagatactgaggaagaagattttcacgtcgatcaagttaccactgttaaggtacccatgatgaagcggctgggtatgtttaatattcagcattgcaaaaaactctcctcttgggtcctgctgatgaaatatctgggcaatgccaccgctatcttcttcctgcccgacgaagggaaactgcagcaccttgagaatgagctgacccacgacataattaccaaattcctcgagaacgaggaccgcagaagcgctagcctccacttgccgaagctatccatcactggcacatacgacctgaaatccgtattgggacagctgggcatcaccaaggttttctctaacggagctgaccttagcggagtcacagaggaggcacccctcaaactgtcaaaggcagtccacaaagctgtgctaaccatcgacgaaaagggtacagaagcagccggagctatgtttctggaagcaatccccatgagcattccacccgaggtgaagttcaataaaccattcgtctttttgatgattgagcagaacaccaaatctccactatttatgggcaaagttgtaaatcccactcagaag

SEQ ID NO: 45395 - DNA, 1254 bp, Artificial Sequence
  derived and/or modified sequence
atgcctagctctgtgagctggggtattttgctgctggccggcctgtgctgcttggtgccggtgagcttggcggaagatccacagggcgacgctgcacaaaagactgacacttcccatcatgatcaggaccacccgaccttcaacaagatcacgccaaacctcgccgagtttgcgttcagcctctacagacaactggcccaccagtcaaatagcactaacatcttcttctccccggtgtcaatcgcgacggcattcgcgatgctgtccctgggcactaaagctgatacccatgacgaaatcctggaaggcttgaacttcaatctgactgaaatcccagaggcccaaatccacgagggtttccaagaactcctgagaacgctgaaccagccagacagccaactccaactgaccaccggaaacggacttttcctgtcggaaggcctcaaactggtggataagtttctggaggatgtgaagaagctgtaccactcggaagccttcaccgtcaacttcggagacactgaagaggccaagaagcagatcaatgactatgtggagaaggggactcaagggaaaatcgtggacctcgtcaaggaacttgatagagataccgtgttcgccctggtgaactacattttcttcaaaggaaagtgggagcgcccgttcgaggtgaaggataccgaggaggaagatttccatgtggaccaggtcacgacggtgaaggtgccgatgatgaaacgcttgggaatgttcaacattcaacattgcaagaagctctcgagctgggtattgctgatgaaatacctcgggaacgctaccgcaatattcttcctcccggacgagggaaaactgcaacacctcgaaaacgaattgactcatgatatcatcactaagttcctggaaaatgaggacagaaggtccgcgtcccttcatctgccaaagttgtcgatcactggcacttacgacctgaaatccgtcctcggacagctgggaatcactaaggtgttctccaacggggcggacctttcaggtgtcaccgaagaagcccctctcaaacttagcaaagccgtgcacaaggccgtgctgaccattgacgagaaaggaactgaagccgcgggagcgatgttcctggaggccatccctatgtccatccccccggaagtgaagtttaacaaaccctttgtgttcctgatgatcgaacagaacaccaaatcaccactgttcatgggaaaagtggtcaaccccacccagaag

SEQ ID NO: 45396 - DNA, 1254 bp, Artificial Sequence
  derived and/or modified sequence
atgccatcctcagtctcttggggtattcttctcctggcaggactctgttgcctggtaccagtgtcgctagccgaggacccacagggggacgccgcacagaaaaccgatacatcacaccatgatcaagatcatccgacttttaataaaataacccctaacctcgctgaatttgcctttagcctgtaccggcagctggcgcaccaatctaactcgactaacatttttttttcgcctgtgagtatcgctacagcctttgctatgctgtccctgggaactaaagcggacacacacgacgagatactagaggggctgaactttaatttaacagaaattccagaagcccaaattcacgagggcttccaggagcttttgcgcaccctgaaccaaccggattctcaacttcaactgactacaggaaacgggctgtttctgtcggagggactgaagctggtagacaaatttcttgaagacgttaagaaactctaccacagtgaggcgttcactgtcaatttcggcgatacagaggaagcaaagaagcagattaatgactacgttgaaaagggcactcaagggaagattgtggatctggtgaaagagctggacagagatacggtgttcgcgctcgtcaactatatctttttcaagggaaaatgggagcgccccttcgaggtgaaagataccgaggaggaggactttcatgtggaccaggtgactacagtgaaagtgcccatgatgaaacgattgggaatgttcaacatccagcattgcaaaaagcttagttcatgggtcctacttatgaagtacttaggcaatgcaacagcaattttcttcctgcctgacgagggaaaactgcaacacctggagaatgaacttactcacgatatcatcacaaagtttttagagaatgaggacagacgtagcgcgtctctccatctgcccaaattgtcaatcactgggacatatgacttgaaatccgtgctcggccagctgggcattacaaaagtgttctcaaatggcgcagatctgtcaggtgtgaccgaggaggccccactcaaactttcaaaagcggtgcataaagcagtgcttacaattgacgaaaaggggacagaagcagccggagccatgttcctggaggcgatccctatgagtattcctcccgaggttaagttcaataagccattcgtattcctgatgatcgagcagaatactaagtcgcccctgttcatggggaaggtggtgaacccaactcagaag

SEQ ID NO: 45397 - DNA, 1254 bp, Artificial Sequence
  derived and/or modified sequence
atgcccagctcggtgagctggggaatactgctgctggccggattatgctgtctggtgcccgtttccctggccgaggatccgcagggcgacgctgcgcagaaaacagacacttcgcaccacgaccaggaccatcctactttcaataagatcactccgaatctagcggagtttgccttctcactgtaccgtcagctggcccaccagagcaactcaaccaatattttcttttcgccggtgtcgattgctaccgctttcgcgatgctttcactcggcacgaaggccgacacacatgacgaaatcttggagggtctgaacttcaacctcaccgagattccggaagcccaaattcatgagggattccaggaactgctccgtacgctgaatcagccggatagccaactacaactcaccacgggtaatggtctgtttctgtcggaaggactgaagctggtggacaagttcctcgaagatgtgaagaaactctaccacagtgaggcctttacggtgaacttcggcgacacggaggaggccaagaagcagataaacgactacgttgaaaagggcactcagggcaagatcgttgatctcgtcaaggaactcgatcgagataccgttttcgctctggtgaattacatattcttcaagggcaagtgggagagaccgtttgaggtcaaagatacggaagaggaggacttccatgtagaccaggtcaccacagttaaggtacctatgatgaaacggcttggaatgttcaacattcagcattgcaaaaagttgagttcctgggtcctgcttatgaagtacctgggtaatgcaaccgctattttcttcctgccggatgagggaaaactgcagcatcttgaaaatgagctgacacacgacatcattaccaagtttctggagaacgaggacaggagaagcgcctccctgcacttaccgaagcttagtatcaccggcacctacgatctgaaatccgtcctcggccagctgggaatcaccaaggtgttttcgaatggcgctgacctgtcaggagtcacggaggaagccccgttgaaactgtcgaaggccgtgcataaggcggttctcacgatcgacgagaagggcacggaggcagccggggccatgttcctcgaggctatcccaatgagcataccacctgaggtaaagttcaataaacccttcgtgttcctgatgatcgagcagaataccaagtctccactgttcatgggtaaagtagttaacccaacgcaaaaa

SEQ ID NO: 45398 - DNA, 1254 bp, Artificial Sequence
  derived and/or modified sequence
atgcctagcagcgtgtcatggggtatactgcttctggcaggattgtgttgcctcgtgccagtgagccttgcggaagatccgcagggcgatgcagcacaaaaaactgatacctcgcatcatgaccaggaccatcctactttcaacaagattactccgaacctggcagagtttgccttttctctttatagacaacttgcccaccaatccaactcgaccaacattttcttttcccctgtgtcgattgcaaccgcatttgccatgctttccctgggcactaaggccgatactcatgatgagatccttgagggcctgaactttaacctcactgaaatcccagaggcccagattcatgaaggctttcaagaacttctgcggaccctgaatcaacctgactctcagcttcaacttacgaccggtaatgggctctttttgtccgaagggctgaaacttgtcgataagttccttgaagatgtcaagaagctctaccactcagaagcatttaccgtcaattttggagataccgaggaggcgaagaaacagattaacgattacgtggagaagggtactcaaggtaagatcgtcgaccttgtgaaagaacttgatagagacaccgtattcgccctcgtgaattacatattctttaagggtaaatgggaacgcccttttgaagtcaaggataccgaagaggaggactttcatgtggaccaagtcactaccgtgaaagtgccgatgatgaagaggctgggtatgttcaacattcagcactgtaagaaactttcaagctgggtgctgctcatgaaatacctggggaacgcgactgccatctttttccttcctgatgaaggaaaacttcagcatctggagaatgagctgacgcacgatatcattacgaagttcctggaaaacgaagatcgtcgttcggcgagcttgcatttgcccaaactgtcaattaccgggacctacgatctcaagtcagtgctcggtcagctcggtatcactaaggtgttctcaaatggtgcagatctgagcggtgtgactgaagaagcgccgctgaagctgtcgaaagccgtgcataaagcggtgttgaccatcgacgaaaagggcaccgaggccgctggagcaatgttccttgaggccatacctatgtccattcctcccgaagtgaagttcaataagcctttcgtgttcctgatgatcgagcaaaacactaagtcgcccctgtttatgggaaaggtcgtgaaccctacccaaaaa

SEQ ID NO: 45399 - DNA, 1254 bp, Artificial Sequence
  derived and/or modified sequence
atgccttcctcggtgtcctggggtatcctgttgctggccggtttgtgttgtctggtccccgtctcactcgcagaggacccccaaggagacgccgcccaaaagaccgacacttcccaccatgatcaagatcatcctaccttcaacaagataacccccaacttggctgaatttgcattttcactgtacagacagcttgcacatcagtcgaacagcaccaatatcttcttctcgccggtcagcatcgcaaccgcttttgcgatgctttccctcgggacgaaggccgacacccacgatgagattcttgagggactgaactttaaccttaccgaaatccctgaagcccaaattcatgaaggatttcaggaactgctgcgaacccttaaccagccagacagccaacttcagctgactaccggaaacggtctgtttctctcggagggcctgaagctcgtggacaagtttcttgaggatgtgaagaagctctaccactccgaggcattcaccgtcaatttcggtgatactgaggaagccaagaaacaaatcaacgactacgttgagaagggaacccaaggcaaaattgtggatctggtgaaggagcttgatagagatacggtgttcgctctggtgaattacatctttttcaagggtaaatgggaaagaccatttgaggtgaaagacaccgaagaggaagatttccatgtggaccaagtgactactgtgaaggtccctatgatgaaaaggcttgggatgtttaacattcagcattgcaaaaagctgagctcatgggtgctgcttatgaagtacctgggcaacgcgaccgctatcttttttctgcctgatgaaggaaaattgcagcatctggaaaacgagcttacgcatgatatcattaccaaatttcttgaaaatgaggaccgccgctcagcatctcttcaccttccaaagctctcgataaccggtacctacgatctcaagtcggtgctcggacaactgggtattaccaaagtgttttctaacggagccgatctttccggtgtcaccgaagaagcaccattgaagctgtcaaaggcggtgcataaggcagtcttgaccattgacgaaaaaggcactgaagcagccggcgcaatgtttttggaggcaattcctatgtccatccctcctgaagtgaaattcaataagcccttcgtgttcctcatgatagagcaaaatactaaatcccctctctttatgggcaaagtggtcaatcctacccaaaaa

SEQ ID NO: 45400 - DNA, 1254 bp, Artificial Sequence
  derived and/or modified sequence
atgccctcctccgtgagctggggaatcctcctcttagctgggctttgctgcctggtgcccgtctccctggccgaagatccccaaggggacgcggcacaaaagaccgatacatctcaccacgatcaggatcatcccaccttcaataagattactcccaatttggcggagtttgctttctctctgtacagacagttggcccatcaaagtaactcaactaacatcttcttcagcccagtgtccatcgccactgccttcgctatgctcagtttaggcaccaaagccgacactcatgacgagatcctggaggggctcaactttaacctcacagagatacctgaagcgcagattcacgaggggtttcaggaactcctaagaacccttaaccagccagattcccaattgcaactgaccacgggcaatggccttttcctctcggaaggactaaaactggtcgacaagttcctggaagatgtcaagaagttataccatagcgaagccttcacagtgaatttcggtgatactgaagaagctaaaaagcagattaatgactacgtggagaagggcacacagggcaagatcgtggatctggtcaaggagctggatcgggacactgtgttcgctcttgtcaactatatcttcttcaagggaaagtgggagagaccatttgaagttaaagatacagaagaggaggacttccacgtcgatcaggtgacgaccgtgaaagtgccaatgatgaaaaggctcggtatgttcaacatccagcattgcaagaaactgtcctcttgggttcttctgatgaagtatctagggaacgcgaccgccatatttttcctaccagacgagggtaagttgcagcacctggagaatgagttgacccatgatattatcaccaaatttctggagaacgaggataggcgatctgcctccctgcacctgcctaagttatcgataaccgggacgtacgatctcaagtccgtactcggtcagttaggaatcacaaaagtgttctccaacggcgccgatctgagcggtgtgactgaagaagcgcctctcaagctgagcaaggccgttcataaggctgtgctgaccatagacgaaaagggcacagaagccgcaggagccatgtttttagaagctatcccaatgagtatacctccagaagtaaagtttaacaaacctttcgttttcttgatgattgagcaaaacactaaatcacctttattcatggggaaggtagtcaatcccacccaaaaa

SEQ ID NO: 45401 - DNA, 1254 bp, Artificial Sequence
  derived and/or modified sequence
atgccgtcgtccgtctcgtggggtatcctgctcttggcgggactgtgctgtcttgtgcctgtgagcctggccgaagatccgcaaggcgacgccgcacagaaaacggatacctctcatcacgaccaagatcatccgacgtttaacaaaatcacgcccaatttggcggagttcgcgttcagcctgtacagacagttggcgcaccagtctaactcaactaacatcttcttctctccagtttcgatcgccactgcgttcgcaatgctgagcctgggtacgaaggccgatactcatgacgagatcctcgagggcctcaacttcaacctgactgaaatcccggaagcacagatccacgagggatttcaagagctgctccgcaccctcaatcagccggattcccagcttcaactcaccaccggtaatggattgtttctgtctgaaggtctgaagttggtggacaagttcctggaagatgtgaagaagctctatcactcggaagccttcactgtgaactttggagatactgaagaagctaaaaagcaaatcaacgactatgtcgagaaaggaactcagggcaagatcgtggaccttgtgaaggagctggaccgggataccgtgtttgcgctggtgaattacatattctttaaaggaaagtgggaaagaccgttcgaagtcaaggacaccgaagaggaagatttccacgtggatcaagtgaccactgtcaaggtgcctatgatgaagcggctgggaatgttcaacatccaacactgcaagaagctgtcatcctgggtgctgctgatgaagtacctcgggaatgccaccgccatctttttcctcccagacgaagggaagctccaacacctcgaaaacgaactcacccacgatatcatcactaagttccttgagaacgaggacagaagaagtgccagcctgcacctgcctaagctgtcaattaccggaacgtacgacctgaagagcgtgcttggacaactcggcatcactaaagtgttcagcaatggcgcagacctgtcgggcgtgactgaggaggcacctctcaagttgtcaaaagctgtccataaagccgtgctgaccattgacgaaaagggcaccgaagccgctggagctatgttcttggaggccatcccaatgtcaatccccccggaagtgaaattcaataagcctttcgtctttttgatgatcgaacagaataccaagtcgccactgttcatgggaaaagtcgtgaacccgacgcagaag

SEQ ID NO: 45402 - DNA, 1254 bp, Artificial Sequence
  derived and/or modified sequence
atgccgtcgtcggtatcgtggggtatactactactagcgggtttatgttgtttagtaccggtatcgctagcggaagatccgcaaggtgatgcggcgcaaaaaacggatacgtcgcatcatgatcaagatcatccgacgtttaataaaataacgccgaatttagcggaatttgcgttttcgctatatcgacaactagcgcatcaatcgaattcgacgaatatatttttttcgccggtatcgatagcgacggcgtttgcgatgctatcgttaggtacgaaagcggatacgcatgatgaaatattagaaggtttaaattttaatttaacggaaataccggaagcgcaaatacatgaaggttttcaagaattactacgtacgttaaatcaaccggattcgcaactacaattaacgacgggtaatggtctatttttatcggaaggtctaaaattagttgataaatttctagaagatgtaaaaaaattatatcattcggaagcgtttacggttaattttggtgatacggaagaagcgaaaaaacaaataaatgattatgttgaaaaaggtacgcaaggtaaaatagtagatttagttaaagaattagatcgtgatacggtatttgcgttagtaaattatatattttttaaaggtaaatgggaacgtccgtttgaagtaaaagatacggaagaagaagattttcatgtagatcaagttacgacggttaaagttccgatgatgaaacgtttaggtatgtttaatatacaacattgtaaaaaactatcgtcgtgggttctattaatgaaatatctaggtaatgcgacggcgatattttttttaccggatgaaggtaaattacaacatctagaaaatgaattaacgcatgatataataacgaaatttctagaaaatgaagatcgacgttcggcgtcgctacatctaccgaaattatcgataacgggtacgtatgatttaaaatcggtattaggtcaactaggtataacgaaagtattttcgaatggtgcggatttatcgggtgttacggaagaagcgccgttaaaattatcgaaagcggttcataaagcggttttaacgatagatgaaaaaggtacggaagcggcgggtgcgatgtttttagaagcgataccgatgtcgataccgccggaagtaaaatttaataaaccgtttgtttttttaatgatagaacaaaatacgaaatcgccgttatttatgggtaaagtagtaaatccgacgcaaaaa

SEQ ID NO: 45403 - DNA, 1254 bp, Artificial Sequence
  derived and/or modified sequence
atgccgtcatccgtgagctgggggattctgctgctggcaggactttgttgtttggtgcccgtatccttggccgaggatccccaaggcgatgccgcgcagaagactgacacaagccatcacgaccaggaccaccccacgtttaataaaatcaccccaaatctggccgaattcgctttttcactgtaccgacagctggctcaccaatcaaattcaactaatatcttcttttcccctgtttcgattgcaacggcattcgctatgctgagccttggaactaaggccgacactcacgacgagatattggagggattaaacttcaatctgaccgagatccctgaagctcagatccacgaagggttccaggaactcctgcggacactgaatcagcccgattctcagctgcagctgaccaccgggaacggactttttttaagtgaaggtctgaaactagtggacaaattcctcgaggacgtcaagaaactttaccactccgaagcctttaccgtgaacttcggtgacactgaagaagccaagaagcagataaatgactatgtcgagaaggggacccaggggaagatagtggatctggtaaaggagttggacagggacaccgtgttcgccctcgttaactatatatttttcaaaggcaagtgggaacggcccttcgaggtgaaggacacagaagaggaggattttcatgtggatcaggtcactaccgtaaaagtgcccatgatgaaaagattggggatgttcaatatacagcattgtaaaaaactttcctcgtgggtgctgttgatgaagtatctgggcaacgcaaccgcgatcttcttcctgcctgatgaaggaaagcttcaacacttagagaacgagctgacacacgatatcattacaaagtttttggagaatgaggacaggcgaagtgccagtttgcatctgcccaagctcagcatcacgggtacctacgatctgaaaagtgtcttggggcaactgggaattactaaggtgttttctaatggggccgacctgtccggggtcaccgaggaggcccccctgaagttgtctaaagcggtgcacaaggctgtgttaacaattgacgagaagggtaccgaagcagcgggagcaatgtttctcgaggccatccccatgtcgataccgcctgaggtcaaattcaacaagccgttcgtctttcttatgattgagcagaacactaaatccccattgttcatgggtaaagtggtaaaccccacgcaaaag

SEQ ID NO: 45404 - DNA, 1254 bp, Artificial Sequence
  derived and/or modified sequence
atgccatcgtccgtcagctggggaattctgcttctggccggtctttgctgtcttgtccctgtctctcttgctgaggatccacaaggagacgcagcgcagaaaaccgatacctcacaccacgatcaagaccacccaaccttcaacaagattacgcctaacctcgcagaattcgctttctcactgtaccgtcagctggcccatcagtcgaactccaccaacattttcttttccccagtgtccatcgcaactgcatttgccatgctgtccctgggaactaaggcagacacccacgatgaaatacttgaggggctcaacttcaatcttactgagattcccgaagcccaaattcatgagggcttccaagaacttcttagaaccctgaatcaacctgattcccaactgcaacttaccacgggaaatggtctttttctctccgaaggacttaagctggtggacaagtttctcgaggacgtgaagaaactgtaccattccgaggccttcactgtgaattttggagatactgaggaagcaaagaagcaaatcaatgattacgtggagaagggaacccagggaaagattgtggatcttgtgaaggagcttgatagagatactgtctttgcgctggtgaactacattttctttaagggaaagtgggaacggccttttgaggtgaaggataccgaggaggaagattttcatgtggatcaggtcaccaccgtcaaagttccaatgatgaagagactcggaatgtttaacatacaacactgtaagaaactttcgtcgtgggtgctgctgatgaagtaccttggaaatgcaacggccatctttttcctcccggacgaaggaaaattgcaacacctcgaaaatgagcttacccacgacatcattactaagttcctcgaaaacgaggacaggcgctcggcatctctccatctccctaaactctcgatcaccggaacgtacgacctgaaatccgtcctcggccagcttggcatcactaaggtcttttcaaatggcgctgacctctcgggagtgaccgaagaggcgccccttaaactttcaaaggcagtgcacaaggcagtgcttaccattgatgaaaaaggtactgaagcagcaggtgcaatgtttctggaggccatcccgatgtcgattccacccgaagtgaagttcaataagccctttgtctttctcatgatcgagcaaaacaccaaatcgcctctgttcatggggaaagtggtgaaccctacccaaaaa

SEQ ID NO: 45405 - DNA, 1254 bp, Artificial Sequence
  derived and/or modified sequence
atgccatcctcagtgagctggggtatcctgttacttgcgggtctgtgttgtctggtgccagtgagcctggccgaggatccgcaaggtgatgctgcacagaagaccgacacttctcaccacgatcaggatcatccaacattcaacaagattacgccaaaccttgccgagttcgccttttccttataccgccaattggcccaccagagcaacagcacgaacatttttttttctccagttagcattgccacggcgtttgccatgctgtccttaggcaccaaggcggacactcacgatgaaatcctggaggggctgaactttaatctgactgaaatcccagaggctcaaatccatgaggggttccaggagctgctgaggaccttgaaccagcctgattcccaattgcagctgacgaccggcaatggtctgttcctcagcgagggtctgaaactggtggataaattcctggaggacgtcaaaaagctgtatcatagcgaagccttcaccgtgaatttcggtgatacggaggaggcgaaaaagcaaatcaatgactacgttgaaaagggtacccaaggaaagatcgtggacctggttaaggaactagacagggatacagtcttcgcactggtcaattatatttttttcaaaggtaagtgggagcgtccttttgaggtcaaggacacggaagaagaagattttcatgtggaccaagtgaccacggtgaaggtgcctatgatgaagcgcttgggtatgtttaacattcaacactgtaaaaaactctcatcgtgggttctgctgatgaaatatctgggaaatgctacggctattttttttctccctgacgagggcaagctgcaacacttggagaatgagctgacgcacgacattatcaccaagttcctggagaacgaagacagacgcagcgccagcctccacctaccgaaactgagcattactggtacgtacgatctgaaatccgtcctgggccagttaggtatcaccaaggtatttagcaatggtgccgacctcagcggggtcaccgaggaggcgccactcaagctgtccaaggccgtgcataaggcggtgctgaccatcgatgaaaaggggaccgaagccgccggcgcgatgttcttggaggcaatccctatgtcaatcccgccagaggtcaagttcaataaacctttcgtgtttctaatgatcgagcagaacactaaaagccctctgttcatgggtaaggtcgttaacccaacgcagaag

SEQ ID NO: 45406 - DNA, 1254 bp, Artificial Sequence
  derived and/or modified sequence
atgccgtctagcgtctcgtggggtatcctgctgctcgcaggattgtgctgcttggtccctgtgagcctcgccgaggacccgcagggagacgccgcccaaaagaccgatacgtcccaccacgaccaggaccatccgaccttcaacaaaatcacgccaaacctggcagaattcgctttctcgttgtatcgccagctggcacaccagtccaactctaccaacatctttttctcgccggtgtcgatcgcgaccgctttcgctatgttgtctctcggtactaaggcagatactcatgatgagattctggagggacttaactttaatcttactgagatcccagaagcgcaaatccatgaaggcttccaagagctgctccggaccctgaatcagccagactcgcagctgcaactgaccaccggaaatggcttgtttctgtccgaaggcctgaaactggtcgacaaattcctggaggatgtgaagaagctgtaccactccgaagccttcactgtcaacttcggcgataccgaggaagcgaaaaaacagattaatgactacgtggaaaagggaacccaggggaagatcgtggacctcgtgaaggaattggaccgggatacggtgttcgcgctggtgaattacatcttctttaaaggaaagtgggagcgcccattcgaagtgaaagacaccgaggaagaggactttcacgtcgatcaggtgactacggtcaaggtgccgatgatgaagcgtttgggaatgttcaacatccaacactgtaagaagctgtcatcttgggtgttgctcatgaaataccttggaaatgcgaccgccatcttcttcctgccagacgagggcaaactgcagcatctggaaaacgaattgacccatgacatcatcactaagttcctggaaaacgaggaccgcaggtcagcatccctccacctgccaaaactgtcgatcactgggacgtacgatctcaaaagcgtgctggggcagctgggaatcacgaaggtgtttagcaacggagcggatctgagcggcgtgaccgaagaggcacctctgaaactgagcaaggccgtccacaaagcggtcctgactatcgacgagaagggaactgaggccgctggagcaatgtttctcgaggcaattcctatgtctattccgcccgaggtgaagtttaacaagccgtttgtgttcctcatgatagagcaaaatactaagtccccgctcttcatggggaaggtggtcaatcccacccaaaag

SEQ ID NO: 45407 - DNA, 1254 bp, Artificial Sequence
  derived and/or modified sequence
atgccctcttcggtgtcatggggaattttgctcctggctgggctttgctgcttagtgcccgtgtctctcgccgaagacccacagggagatgcagcacaaaaaactgatacatcacatcacgatcaggatcaccctacatttaacaaaatcacacctaatttagcggaatttgccttttctctatatcggcagttagcacatcagagtaattctacaaatatcttcttttctcccgtgtccattgcgactgctttcgccatgctctctctcgggactaaagcagatactcacgatgaaatacttgaaggactgaattttaatctcactgaaattcctgaagcacagatccatgaagggttccaggaactactgaggactctcaatcagcctgattcacagttgcaactgacaactgggaacggactgttcttatctgaggggctcaaactcgtggataaatttctggaggatgtcaaaaaactctatcactcagaggccttcacagttaatttcggggatacagaagaagcaaaaaagcagataaatgattatgttgagaaaggaacgcagggaaaaatcgtggatctcgtcaaggaactggatcgagatactgtgttcgcactcgtgaattatatcttttttaaagggaaatgggaaagacccttcgaagtgaaagatactgaggaagaagatttccatgttgatcaggtgactactgtgaaagtgcctatgatgaaaagattgggaatgttcaatatacagcattgcaagaaactcagttcttgggtgcttcttatgaaatatctgggaaatgccacagccatcttcttcctccccgacgaagggaagttacagcacttagaaaatgaactgactcatgatataataactaaattcctggaaaacgaagatcgacggtccgcttctctgcaccttcccaagctctctatcacaggaacatatgatctcaaatcagtgctgggacagctaggaattacaaaagttttcagtaacggggctgatttatctggagtaacagaagaagctccactcaaactttctaaagcagtccacaaagctgtacttacgattgacgagaaagggactgaagcggccggagctatgtttttagaagccatacccatgtcaatcccaccagaagtgaagttcaacaaacccttcgtcttcctaatgatcgaacagaatacaaaatcgcctctatttatgggaaaagtagtgaacccaactcagaaa

SEQ ID NO: 45408 - DNA, 1254 bp, Artificial Sequence
  derived and/or modified sequence
atgccatcatcagtgtcctggggaattctcctcctcgctgggctctgctgcctggtgcccgtgtcactggccgaggacccgcagggggatgcagcccagaaaactgatacttcccaccacgaccaagaccatccaacctttaacaagatcactccgaatctggccgaattcgccttctccctctaccgccaattggctcaccagagcaattcaaccaacatcttcttctcacccgtgagtatcgcgaccgcattcgctatgctgtccctgggtacgaaggcggatacccacgacgaaatccttgaaggactgaacttcaacctgaccgagatcccggaggcccagattcatgaaggattccaggagctccttcgcaccctcaatcagccagatagccaactgcagcttaccaccggcaatggcctgttcctttccgaaggactgaaattggtcgacaagttcctcgaggatgtgaaaaaactgtaccattccgaggcgttcaccgtaaacttcggagatacggaggaggcgaagaaacagatcaacgactacgtggagaaggggactcagggaaaaatcgtggatctggtgaaggagctggatagagatactgtgttcgccctggtcaactacatctttttcaaggggaagtgggagcgccctttcgaggtgaaggacaccgaagaggaggacttccacgtcgaccaggtgactactgtgaaggtcccaatgatgaaacgccttggcatgttcaatatccagcactgtaaaaagctcagttcctgggtgctgctcatgaagtacttgggaaacgccaccgctatcttctttttgccggacgagggtaaactccaacacctggagaatgaactgactcacgacatcatcactaagtttctcgaaaatgaagatagaagatcggcatccctgcatctgcccaaactgtccattaccggtacctatgatcttaaaagcgtcctcggacagctgggtattactaaggtcttttcaaacggagcggacctctcgggagttactgaagaggccccgctgaaactgtccaaggcagtgcataaggccgtgttgactatcgacgagaagggcactgaagccgcgggagcaatgttcctggaagcgatcccgatgagcatccctcctgaagtgaagttcaacaagccgtttgtgtttctgatgatcgaacagaatactaaatcgcctcttttcatgggaaaagtggtgaatcccactcagaag

SEQ ID NO: 45409 - DNA, 1254 bp, Artificial Sequence
  derived and/or modified sequence
atgccttcgtcggtgagctggggtattctccttcttgcaggtctgtgctgtttggtccctgtgtcgctcgcagaggaccctcaaggggatgctgcgcagaaaacggacacctcacatcatgatcaggatcatcctacctttaacaagattactccgaacctggcagagtttgcattttcactgtatcggcaacttgctcatcaatcgaactcgaccaacatctttttctctccagtcagcatcgcaactgcattcgcaatgctttccttgggtactaaagccgacacccacgacgaaatcctggaaggtctgaactttaacttgactgagattcctgaagcgcagatacacgaaggattccaagaactccttcgtactttgaaccagcctgattcgcagcttcagcttactactggcaacggtttgtttctgagcgaaggcctgaagctggtcgataagtttttggaggacgtgaaaaaactgtaccatagtgaagccttcactgtgaattttggagatactgaagaggcaaagaaacaaatcaacgattacgtggagaaaggaacccaaggtaagatagtggacctggtgaaggaactggaccgagataccgtgttcgcactggtcaattacatctttttcaagggtaagtgggaaaggccatttgaagtgaaagatacggaggaggaagatttccatgtcgaccaggtgactactgtgaaggtgcccatgatgaagcggcttggcatgttcaatatacaacactgcaagaagctctcgagttgggtgcttctgatgaagtatttgggtaatgcgactgcgattttctttctcccggatgaagggaaacttcagcacctggaaaatgagcttacccatgacattatcaccaaatttctggagaatgaggatagacgctcagcgtcacttcatctccctaagctgtccatcactggaacctacgatcttaagtccgtgcttggccagttggggatcaccaaggtgttctccaacggtgccgatctctcgggagtgaccgaagaggccccactgaaactttccaaagcagtgcacaaggcagtgcttactattgacgaaaagggaaccgaagcagcaggcgcgatgtttcttgaagcgataccaatgtcgattccacccgaagtcaagttcaataagcctttcgtgttcctcatgattgaacagaacaccaagtcccctctgtttatgggaaaggtagtcaatcccactcaaaag

SEQ ID NO: 45410 - DNA, 1254 bp, Artificial Sequence
  derived and/or modified sequence
atgcccagcagcgtgtcctggggcattctgctactagcaggtctctgctgtttagtgcccgtcagccttgccgaggacccgcagggagatgccgcacagaagaccgacactagccatcacgaccaggatcatccaacgtttaataagattacaccaaatctggccgaattcgcattctccctctaccgccagttagctcaccagagcaattctacaaatattttcttttcccccgtctcaattgccaccgcatttgccatgctgtccctgggaaccaaggcagatacccatgatgagatactggagggactgaacttcaaccttacagaaattccagaagcccagatccacgaaggcttccaggagctgttaagaaccttgaaccaaccagattctcaactgcagctcacgaccggcaacgggctatttctgtccgaaggccttaaactggttgacaagtttctcgaagatgtcaagaagctgtatcattcggaagctttcaccgtgaacttcggagacaccgaagaagccaagaagcagatcaacgactatgtcgagaagggtacgcagggaaaaatcgtggatttggtgaaagaactggaccgggacacggtgtttgcgctggtgaattacatcttcttcaaagggaaatgggaaaggccctttgaagtgaaagataccgaggaggaggacttccacgtggaccaggttaccactgtgaaagtcccaatgatgaagaggcttggtatgttcaatatccagcattgtaaaaagcttagttcctgggtcttgttaatgaaatatttgggaaatgcgactgcgatcttttttctcccggacgaggggaaactccagcatttggagaatgagctcacccacgacataattacaaaatttctggagaatgaagacagaaggtcagccagcttacatctacctaaactatccattaccgggacctacgacctcaaaagcgtcctgggacaactaggcattacgaaagttttttctaacggtgcggacttgtctggggtgacagaggaggccccgctgaaactctcaaaggcagtgcataaagccgtgttaactatagatgagaaaggaaccgaggccgcaggcgctatgtttctggaagctattccgatgagcatccccccggaagtcaagtttaataaaccgttcgtgttcctgatgatcgaacagaacacaaaatctcccctcttcatgggaaaggtggtgaaccctacacagaag

SEQ ID NO: 45411 - DNA, 1254 bp, Artificial Sequence
  derived and/or modified sequence
atgcctagtagcgtttcctggggcatcctgttactggcaggcctctgctgcctggtgccagttagtttagccgaggatcctcaaggggatgccgcccagaaaaccgataccagccaccacgaccaggaccatcctacgtttaataaaattactcctaatttagccgagttcgcgtttagcctgtatcggcagttggcacaccaatctaactcaaccaacatcttcttctctcccgtcagcatcgctactgcatttgccatgctcagtctgggtactaaagcagacacccacgacgaaattctcgagggcctgaactttaacctcacagagatacccgaagcccagatccacgagggcttccaggaactattgaggacactcaatcaacccgactcacagctccagttgaccacaggcaacggactgttcctgagtgaaggattgaagctggtagacaagttcctcgaggacgtgaaaaagctctaccactcagaagcctttacggtgaacttcggcgacacggaagaagctaaaaaacagattaatgattacgtggaaaaggggactcaaggcaaaatcgttgacctggttaaagagctggatcgtgacacagtgtttgctcttgtgaattacatctttttcaagggcaagtgggaaaggccctttgaggttaaggacacagaagaggaggactttcacgtcgaccaagtgacaaccgtcaaagtgcctatgatgaagcgcttgggaatgttcaatatccagcactgcaagaagctgtcctcatgggtgctgctgatgaaatatctcggaaacgccacagcaatcttttttctgcccgacgagggcaaactccaacacctagagaatgaactcacccatgatataattactaagttcctcgagaacgaggaccgcaggtcagccagcctacaccttccaaaactctcaattaccggaacttatgacctcaaaagtgtgttgggccagctcggaataactaaggtcttctctaatggagcagatttatccggcgtgactgaggaggcccccctgaagctttccaaagccgtacacaaggcagtactcaccatcgacgagaaagggacagaggctgctggcgctatgtttttggaggctatccctatgagtatcccccccgaagttaaattcaacaagccctttgtttttttgatgatcgaacagaacactaagtcaccgctttttatgggaaaggtggtgaacccaacgcaaaag

SEQ ID NO: 45412 - DNA, 1254 bp, Artificial Sequence
  derived and/or modified sequence
atgcctagttctgtttcatggggtatcctcctcctcgcaggtctatgctgtctcgtcccagtctcacttgcagaagatccacaaggggatgctgcgcaaaagacggatactagtcaccatgatcaagaccaccctacgtttaacaagatcacccccaatctagcagagtttgctttctccctgtatcgtcagttagcgcatcagtccaattccacaaacatttttttttcgccagttagtatcgccacggcatttgctatgctcagcttggggacaaaggccgatacacacgacgaaatactggaaggtttgaacttcaaccttacggaaataccagaagcccaaatccacgagggctttcaggagctgttgcgaacgcttaaccaaccagattctcaacttcagcttacaacaggaaacggcctcttccttagcgaaggcttgaagctcgtcgacaagttccttgaagacgttaaaaagctgtaccatagtgaggcgttcaccgtcaacttcggagacacagaagaggcaaagaaacagatcaatgactatgtcgagaagggtacacagggaaagatcgtggatttggttaaagaactcgatcgggacacggtattcgctcttgttaactatatctttttcaagggcaaatgggagcgtccgttcgaggtaaaagacaccgaggaggaagacttccatgtcgaccaggtcaccactgttaaggtgccgatgatgaagcggctcggaatgttcaacattcagcattgtaaaaaactgtctagttgggtactcctgatgaaatacctaggcaacgcgacagctatcttttttctccccgacgaaggtaagctgcaacatttagaaaacgaattgacgcacgacataatcacgaagttccttgaaaacgaagatcgccgaagtgcgtccctgcaccttccgaagctatccatcaccggtacttacgatttgaagtcagtgctcggccagctcggaatcaccaaggtgttctcaaatggcgccgatctgtccggtgtgacggaagaggcccctttgaagctctctaaagcggttcacaaagctgtcttgaccattgacgagaaaggtacagaggccgcaggtgcaatgttcctggaggctatcccaatgagcatcccacctgaagttaaattcaataaaccgtttgttttccttatgattgaacagaatactaaatcccctttgttcatgggcaaggttgtcaatcctacccagaag

SEQ ID NO: 45413 - DNA, 1254 bp, Artificial Sequence
  derived and/or modified sequence
atgccttcgtcagttagctgggggattcttctcctggccggcctttgttgtctcgtgcccgtgagccttgccgaagatccacagggagatgcagcccaaaagaccgatacttcacatcatgaccaagatcacccgacgtttaacaaaatcactcctaaccttgccgaattcgctttcagcctttaccgccaacttgcacaccagtcaaactcgaccaatatcttctttagcccagtctcaattgccacggcgttcgccatgctttcactgggcaccaaggctgatactcatgatgagattctcgaggggcttaacttcaatctgacggaaatccccgaggctcagatccatgaaggttttcaagaattgctgcggaccctgaaccaacccgattcgcaacttcagctgaccaccggtaacggtttgtttcttagcgaagggttgaaactggtcgacaagtttcttgaagatgtgaagaagctctaccactcggaagcattcactgttaactttggtgacacggaagaggcaaaaaagcagataaacgactacgtggaaaaaggtactcaaggtaagattgtcgatctggtcaaagaactggaccgggataccgtgtttgcactggtcaactacattttctttaagggcaagtgggaacgcccattcgaagtgaaggataccgaggaggaagattttcacgtggaccaagtgacgaccgtgaaggtgcccatgatgaagcggctgggaatgtttaacatccaacactgcaaaaaactttcaagctgggtacttcttatgaaatacctcggcaatgctaccgccattttctttcttccagacgagggaaagctgcaacacctcgaaaacgagctcacccacgatatcattactaagtttctcgaaaatgaggatcggagatccgcatcccttcatctgccaaagctctcaattaccggtacgtatgatctgaaaagtgtgcttggacagctcggaattaccaaggtgttttccaacggagcagacctttccggagtgaccgaagaggctcctctcaaactgtctaaggctgtccataaggccgtgcttacgattgatgagaaaggcactgaagcagcaggtgcaatgttccttgaggcaattcctatgtctattccgccagaggtgaaattcaacaagccttttgtgtttctgatgatagaacaaaataccaaatcccctttgtttatggggaaggtggtcaaccctactcagaag

SEQ ID NO: 45414 - DNA, 1254 bp, Artificial Sequence
  derived and/or modified sequence
atgccatcctctgtgtcatggggcattctgctgctcgctgggttatgttgcttagtccctgtatctctggccgaggatcctcagggcgacgcagcacaaaagacagacacatcccatcacgatcaggaccatcccactttcaataagatcacacctaacctagccgagtttgccttttccctttacagacaactggctcaccagagtaactccactaatatattcttcagccccgtgagcatcgctaccgctttcgccatgttgagcttggggaccaaggccgatacccacgacgaaatcctggaaggcctgaacttcaacctaaccgaaattccagaggcccagattcacgagggcttccaggagctactgaggacactaaatcagcccgactcccaattgcagctgacaaccggcaacggcctgtttctgtcagagggcctgaaactggtcgataaattcctggaggacgtgaagaaattgtaccatagcgaagccttcacagtcaactttggggacactgaggaggccaagaagcagattaatgactacgtagagaaaggcacccaaggaaagattgtcgatctggttaaggaattagaccgggataccgttttcgctttagtgaactatatcttcttcaaaggaaagtgggaacgaccatttgaagtcaaggacaccgaggaggaagactttcatgtggatcaggtgaccaccgtgaaggtgcctatgatgaagagactcggcatgtttaatatccagcactgcaaaaaactctcaagttgggtactgctgatgaaatatctgggcaatgctaccgcaattttctttctccccgacgagggtaagttacagcatctggagaacgagctaacccatgacattataacaaagtttctggagaacgaagatcgccgatccgcttcattacacctccctaaactgagcattaccggcacctacgatttgaagagcgtgctgggccagctgggcatcactaaagtcttctcaaatggagccgacctgtccggggtgaccgaagaggcaccactaaagttatccaaagctgtacataaagcagttctgacaattgacgaaaaaggcaccgaggccgctggtgcaatgttcctggaggccatacctatgtcaatacctccagaagtgaaattcaataagccttttgtatttcttatgatcgagcagaacaccaaatctcctttattcatgggcaaggtggtcaatcccacccaaaag

SEQ ID NO: 45415 - DNA, 1254 bp, Artificial Sequence
  derived and/or modified sequence
atgccatcatcagtttcatggggaatcctactcctcgctggactttgctgcctcgtcccagtaagtttggctgaagatccacaaggagatgccgctcaaaagacagatacatctcatcacgatcaagaccatccaacatttaataaaatcactcctaatctcgccgaatttgcttttagtttgtatagacagttggcgcatcaatcaaactcaactaacatatttttttcaccagtctctatcgcaaccgccttcgctatgttaagcttgggtaccaaggcagatacgcatgatgaaatcctcgagggactgaacttcaaccttacggagatcccagaagcgcaaatacatgaggggttccaagagcttctgcgtactttgaatcagccagattcacagcttcagctcaccacaggaaacggacttttcttgtcggaaggattaaagcttgttgataaatttcttgaagatgtaaaaaaattgtatcactctgaagcgtttaccgttaatttcggagataccgaggaagctaaaaaacagatcaatgattatgtggaaaagggtacgcaggggaaaatcgtcgatctggtaaaggagctcgatcgtgataccgtgttcgcgcttgttaactacattttctttaagggtaagtgggagagaccttttgaagtgaaggataccgaagaggaagattttcatgttgatcaggtgactaccgtcaaggtcccaatgatgaagagactgggtatgttcaatatccaacattgcaaaaaactttcttcttgggtactccttatgaagtacctgggtaacgccactgccattttcttccttcctgacgaagggaaacttcagcatctggaaaatgaactcacacatgatatcataacaaagttcctagagaatgaggatcggcggtcagcgtccttgcatcttcctaagctctctattacgggtacctatgatcttaaatccgtcctcggtcaactgggaataacaaaggttttttcaaacggtgctgatctgagtggtgttacagaggaagcacccctgaaactatcgaaggctgtgcataaggccgttttgaccatagatgaaaagggaacagaggccgccggagctatgtttttggaggctattcctatgagcattcctccagaagttaaatttaacaaaccatttgtttttttgatgatcgaacaaaataccaagtcccctttgtttatgggcaaggtcgttaatccgacacaaaag

SEQ ID NO: 45416 - DNA, 1254 bp, Artificial Sequence
  derived and/or modified sequence
atgccctcctcagttagttgggggattttgctcctggcagggttgtgctgcctagtgccagtgtccttagccgaggatcctcagggggacgcagctcagaagacagatactagccaccatgatcaggatcaccccactttcaataagatcaccccgaatctggcagagttcgctttttccctctatcgccagctggcccaccagagcaatagtacgaacatatttttctctcccgtgtcgattgctaccgccttcgctatgctgagcctggggacaaaagctgacacccatgatgagattctcgaaggtctgaattttaatctcactgagataccagaggcccaaatccacgaaggcttccaggaattgctgcggactctgaaccagccggatagccaactacaattgacaaccggaaacgggcttttcctgagcgaggggctgaagttggtggataaattcctcgaagacgtgaagaaactttaccattccgaggcttttactgtaaattttggggataccgaagaagccaaaaagcagataaacgattatgtggaaaagggtactcagggcaagatcgtagacttggtgaaagagttggatcgagacacagtgtttgccctggtgaactacatattctttaagggtaagtgggagagaccatttgaagtgaaagataccgaggaagaagattttcacgtggaccaggtgactacggtaaaggttcccatgatgaaaaggttgggcatgtttaatatccagcactgtaaaaaattgtcttcttgggtactactgatgaaatatctggggaacgctacagctattttttttttgcctgatgagggaaagctccagcatctggagaacgaactaacccacgacatcatcacgaagttcctggaaaacgaggaccgtcgatcagcatcgttacacttgcctaagctctcaattactggaacatatgatcttaagtctgttcttggacaactcggcatcactaaggttttcagcaatggggctgacctgtccggcgtgaccgaggaggcccccctaaaacttagcaaggcggtgcataaagccgtcctgaccatagacgaaaagggcacagaagccgccggggcaatgtttctcgaagctatccccatgtccattccgcccgaagtcaagttcaacaaaccattcgtttttctgatgattgaacagaataccaaaagcccacttttcatgggaaaggtggtgaatcccacccagaaa

SEQ ID NO: 45417 - DNA, 1254 bp, Artificial Sequence
  derived and/or modified sequence
atgccctcatcggtgtcgtggggcatccttctgctggcaggcttgtgctgtctggtcccggtgagcctcgccgaagatccacagggagacgcggcgcaaaagaccgacacgagccaccatgaccaggaccatccgaccttcaataagattactccgaacctcgccgagttcgctttcagcctgtaccgccaactcgcccatcagtcaaactcaacgaatatcttcttcagcccggtaagcatcgccactgccttcgcaatgctgtcgcttggcacgaaggctgatacccacgacgagatcctggagggactcaactttaacctcaccgaaattccagaggcccaaattcatgaagggttccaggagcttttgcggaccctgaaccagccagattcgcaattgcagttgaccaccgggaacggcctcttcctgtccgaaggactcaaactggtggacaaattcctggaagatgtcaagaagctgtatcactccgaagcgttcactgtgaactttggagacaccgaggaggcaaagaagcagatcaatgactacgtcgaaaagggaacccaaggcaagatagtagacctcgtcaaagaactggacagggatactgtattcgccctggtcaactacatctttttcaagggtaagtgggaaagaccgtttgaagtgaaggataccgaggaggaagatttccacgtcgaccaggtgacgaccgtcaaagtgccaatgatgaaacgcctgggaatgttcaatattcagcattgcaaaaagctgtcctcatgggtgctgctcatgaaatacctcggaaacgcgactgctatattcttccttccggacgaaggcaagctgcagcacctggaaaacgagctcactcacgatatcatcacgaagtttctggagaacgaagataggagatcggcttcactgcatctgcctaagttgtccatcaccggcacttacgacctgaagtccgtgttgggacagctcggaatcactaaagtgttctccaatggggcggacctttctggcgtgactgaggaagcaccccttaagctgagcaaagccgttcacaaggccgttctgactatcgatgaaaagggaactgaagccgcgggggcaatgttccttgaggcgatcccgatgtcgatcccgcccgaggtgaagttcaacaaacctttcgtgtttcttatgattgagcagaatactaagtcccctctctttatgggaaaagtggtgaatccaacccaaaag

SEQ ID NO: 45418 - DNA, 1254 bp, Artificial Sequence
  derived and/or modified sequence
atgccaagcagcgtctcatggggaatactcctgctggctggcctttgttgcctggtgccagtgtctctggctgaggacccccagggagatgctgctcaaaagactgacacctcccaccacgaccaagaccatcccacctttaacaagatcaccccgaatctggcggagttcgccttttccctttacagacagttggcgcaccagtccaactcaactaatatcttcttttcgccggtgtccatcgccacggcctttgcaatgctgagcctgggaaccaaggcagacactcatgatgagatccttgaagggctcaacttcaaccttacggaaatcccggaggctcagatccacgaagggttccaggaactgctgcggacccttaaccagcctgactcacagctgcagctcaccactggaaacggactctttctctccgagggactgaagctggtcgataagttcctggaagatgtcaaaaaactctaccacagcgaggcctttaccgttaacttcggcgatactgaagaggcaaaaaagcaaatcaatgactacgtggagaagggtactcagggaaagatcgtggatctggtgaaagaactggatcgggacacggtgtttgccctcgtgaactacatcttctttaagggaaagtgggaacggccctttgaggtgaaggatactgaggaagaggatttccatgtcgatcaagtgaccactgtcaaagtcccgatgatgaagcgactgggaatgttcaatattcaacattgcaaaaagttgtcatcgtgggtgctcctgatgaagtacctggggaacgccactgcgatcttctttctgccagacgaaggcaagctccagcacctggaaaatgagcttacccatgacatcatcaccaagttccttgagaacgaggaccgccggtcggcctcgctccacctgccgaagctgtcgattaccggcacctacgatctgaagtccgttctgggacagctgggaatcactaaagttttctccaacggagccgatctgagcggagtgactgaggaagctcccctgaagctgagcaaagcagtgcataaggcagtgctcaccatagatgaaaaaggcacggaggccgccggtgcgatgttcctggaagcgatcccaatgtccatcccgccagaggtgaagttcaataagccgttcgtgttcctgatgatcgagcaaaatactaagtccccactgtttatgggcaaagtcgttaacccgacccagaag

SEQ ID NO: 45419 - DNA, 1254 bp, Artificial Sequence
  derived and/or modified sequence
atgccatcgtcagtgtcgtggggaatacttctcctggcaggactgtgctgtcttgtgcctgtgtcgcttgcagaagatccccaaggggacgcagcacaaaaaactgacacctcacatcacgatcaggaccaccctacttttaacaagatcacccctaatctcgccgagtttgccttctcattgtaccgccagctcgcgcaccagtcgaactccactaatatctttttcagcccagtctcaatagcaactgcgtttgcaatgctttccctgggaactaaagccgatacccatgacgagattcttgaaggccttaactttaacctgacggaaatcccagaggctcaaatccatgaggggtttcaggagctgcttcggacccttaaccaacctgactcccaacttcaactgaccactggaaacggtctgttcctgtctgagggactgaaactggtggacaagtttctggaagatgtcaagaagctgtaccactcggaggcatttactgtgaactttggcgataccgaagaggcaaagaagcagataaatgattacgtggaaaagggaacccaggggaagattgtcgatcttgtgaaggaactcgaccgcgatactgtgttcgcactcgtcaattacatctttttcaagggaaaatgggaacgcccttttgaagtaaaggatacggaagaagaggatttccacgtcgatcaggtgactaccgtcaaagtgcctatgatgaagaggcttggtatgttcaacattcaacactgtaaaaagctgtcatcctgggtcctgctcatgaagtacctgggtaacgcgactgcaattttcttccttcccgatgagggaaaactgcagcacctcgaaaacgaacttactcatgatatcataactaaattccttgaaaatgaagatcgccgctccgcctcgcttcatctgccgaagttgtcaattaccggaacttatgacttgaagagcgtcttgggtcagctgggtatcactaaggtgttttcaaacggtgcagacctgagcggtgtcaccgaagaagcgcctctcaagctgtcgaaggccgttcacaaggcagtccttacgatcgatgaaaagggcactgaagcagctggggcaatgtttcttgaagcaatcccaatgtctattccccccgaagtcaaattcaataagccatttgtctttctcatgattgagcagaacacgaagagccctcttttcatgggaaaggtggttaatcctacccaaaag

SEQ ID NO: 45420 - DNA, 1254 bp, Artificial Sequence
  derived and/or modified sequence
atgccttccagcgtctcttggggtatcctgcttctggctggtctgtgttgcctggttcctgtgtcactggctgaagatcctcagggagacgccgctcaaaagacagatacatcccaccatgatcaggatcaccctaccttcaacaagatcacacctaaccttgctgaattcgccttctccctctacagacagctggcccaccaatcaaactccaccaatattttcttctctcccgtgtccatcgcaactgctttcgctatgctctctctgggtactaaggccgatacacacgacgagatccttgaaggccttaatttcaatcttacagagattcccgaggcccagatccacgagggattccaagagctgctgaggaccctgaatcagcctgattcacaactgcagctgacaaccggaaacggtctcttcctctcagagggtttgaaactggtcgataaattccttgaggacgtcaagaagctgtatcacagtgaggcctttactgtgaacttcggtgataccgaggaggctaagaaacaaatcaacgactacgtggaaaagggaactcagggtaagatcgttgacctggtcaaagaattggatcgtgacaccgtattcgctctggtgaattacattttcttcaagggcaagtgggagagaccctttgaggttaaagataccgaggaagaggattttcacgttgaccaggtaactaccgtgaaggttcctatgatgaaaaggctgggcatgttcaatatccaacactgcaagaagctgagctcttgggttctgctcatgaaatacctcggcaatgctaccgctattttcttcttgcccgatgagggtaagcttcagcatttggagaatgagcttactcatgacatcatcacaaagtttcttgagaacgaggacagaagatctgcaagtctgcatctgcccaagctctcaattactggtacctacgatctgaagtcagtgctgggccagctcggcatcaccaaagtgttttccaatggcgctgacctgagtggcgtgactgaagaggcccctctgaagcttagcaaggccgttcacaaagcagtactcacaattgacgaaaagggtaccgaggccgccggtgccatgttcctggaagccattcctatgagtattcccccagaggtcaagtttaacaaacccttcgttttccttatgatcgagcaaaacaccaagtccccactgttcatgggaaaggttgtgaatcccactcagaaa

SEQ ID NO: 45421 - DNA, 1254 bp, Artificial Sequence
  derived and/or modified sequence
atgcctagcagcgttagttggggtatcttgcttttggcaggcctatgctgtctggtgcctgtcagtctggctgaagatccacagggggatgctgcccaaaaaaccgatactagccaccacgatcaggaccatcccacttttaataagataacccccaatcttgccgaattcgctttctccctgtaccgccaacttgcccatcagagcaactcgaccaatatttttttcagtccggtgtctatcgctacagcctttgctatgctatccttaggaactaaagccgacactcatgacgagatccttgagggattaaattttaatcttaccgagatccccgaagcacagattcatgaaggctttcaggaactcttgagaaccctgaatcagccagattcacagctgcagttgaccacaggtaatggtctgtttctttcggagggcttaaagttggtggacaagtttctggaggacgtaaagaaactttatcactcagaagctttcacagtgaattttggagacaccgaggaagcgaagaagcagattaatgactatgtagagaagggcacccaaggtaagattgttgacctagtcaaggaattggaccgggatacagtgttcgctctggtaaattacatattttttaaaggcaagtgggagcggcctttcgaggtcaaggataccgaggaggaggacttccacgtggatcaagtgaccactgttaaggtacccatgatgaaacgcctagggatgttcaacatccagcactgtaagaagctgagctcatgggtgctgctcatgaagtatctaggaaacgcgacagctatctttttcctgcccgacgaggggaaattgcagcatctggaaaatgaattaacacatgacataataacgaagttccttgagaatgaggaccgcagaagtgcctcattgcacctgcccaaactgtctattacgggcacttacgatttaaagtccgtattaggacagctgggcataacaaaggtcttctctaacggcgcggatcttagtggtgtcaccgaggaggccccgctaaagctcagcaaggccgttcataaagctgttctgaccatcgatgaaaaagggacggaagctgcaggcgctatgttccttgaggccatcccaatgagcattccccccgaggttaaattcaataagcctttcgtcttcctaatgatagagcagaacaccaagagtccgctgtttatgggaaaggttgtgaatccaacccagaag

SEQ ID NO: 45422 - DNA, 1254 bp, Artificial Sequence
  derived and/or modified sequence
atgccatcaagcgtctcttggggaattctcctgctcgccggactgtgctgcttagtgccggtttcactggctgaagacccccagggagatgctgcccagaagacagatacctcacaccacgatcaagaccatcctacttttaacaagattacccccaaccttgcagagttcgcatttagcctctacaggcagctggcacaccaaagcaattctaccaatatcttcttcagcccagtctccatcgcgacagcatttgctatgttgagcctgggaacaaaagcagatacacacgatgaaattctagagggtctcaacttcaacctgacagaaatcccagaagcacagatccacgaaggttttcaagaattgttgagaactctgaatcaacccgattcacaactgcagctgaccacagggaacggactctttcttagcgaaggactgaagctggtggataaatttctggaagacgtgaaaaaactttaccactccgaagcttttacagtcaacttcggggatacagaagaagctaaaaagcaaattaatgactatgttgaaaagggaacccagggaaaaatcgtcgatttggttaaagaactggatcgggatacagtgttcgcattagttaattacattttctttaaaggcaaatgggagaggccttttgaggtcaaggacacggaagaggaggactttcacgtagatcaagtgacaaccgtcaaggtcccaatgatgaagaggttaggaatgtttaacatccagcattgcaaaaaacttagttcctgggtccttctgatgaagtaccttgggaatgcaaccgctatcttctttctgcctgacgaggggaagttgcagcacttggagaacgagttgacccatgatatcattacaaagtttcttgagaacgaggaccgtcggtcagctagtctgcatctccccaagctgagcattacaggcacttacgatctgaaaagtgtgctgggacagctgggtatcacaaaagtcttctctaatggagcagacttatccggagtcacagaagaagctccactcaagctgtctaaagcagttcataaagctgtccttaccattgatgagaagggtactgaagccgcaggcgccatgttcctagaagctatccccatgagtattcctcccgaggtaaagtttaacaagccgttcgtgttcctcatgatcgaacagaacaccaagagccctctgttcatgggcaaggttgtgaatccaacacaaaaa

SEQ ID NO: 45423 - DNA, 1254 bp, Artificial Sequence
  derived and/or modified sequence
atgcctagcagcgtgtcgtggggcattctgcttctggcgggactgtgctgtcttgtgccggtgtcgctcgccgaggacccgcagggggacgccgctcaaaaaaccgacacgtcccaccacgaccaagatcaccctaccttcaacaagatcaccccgaacctcgccgagttcgccttttcactgtaccggcagttggcgcaccagtctaattcgactaatatctttttcagccctgtgtcgatcgcgacggccttcgcaatgctctcgctgggtactaaagccgatacccatgacgaaatcttggagggactcaacttcaatctcaccgaaatcccagaggcgcagatccacgaaggattccaagagctcctgcgcacccttaaccaaccggacagccaactccagctgactaccggaaacgggctctttctgtcggaaggactgaagctcgtggataagttcctggaggacgtaaagaaactgtaccatagcgaagccttcaccgtcaattttggagacacggaggaagccaagaaacagatcaacgactacgtggagaagggcacgcagggcaagattgtggacttggtgaaggaactcgatagggataccgttttcgccttggtgaactacattttcttcaaagggaaatgggaaagaccatttgaagtcaaggacaccgaagaagaggacttccatgtggaccaggtcaccactgtgaaagtcccgatgatgaagcgcctgggcatgtttaacatccaacattgcaagaagctgtcatcctgggtgctgctcatgaaataccttgggaatgcgactgcgatcttttttctcccggatgaaggcaagttgcagcacctcgaaaatgaactcactcatgacataatcacgaagttcctggaaaacgaggaccgcagatccgcgtcactgcatctcccaaagttgtcaatcactggtacttacgatttgaaaagcgtcctcggacagctcggaatcactaaggtctttagcaatggagcagacctctccggcgtgactgaagaagctccactgaaactgtccaaggccgtgcacaaggccgtgctcaccattgatgaaaagggaactgaagctgcaggcgctatgttcctggaggctatccccatgagcatcccgccggaagtgaagttcaataagcctttcgtctttcttatgatcgagcaaaacactaagtctcctcttttcatgggcaaagtggttaaccccactcaaaag

SEQ ID NO: 45424 - DNA, 1254 bp, Artificial Sequence
  derived and/or modified sequence
atgccttcctccgtcagttggggcattctgctgttggcagggctgtgttgtctggtgcctgtatcccttgctgaggaccctcaaggtgatgccgcacagaaaacagatacgtctcaccacgaccaggatcatccaacctttaataagattactcccaacttagcggaatttgccttctcactgtaccggcagcttgcacatcagtctaatagcacaaacattttttttagtccggtatccattgcgactgcatttgctatgttgagcttgggaacaaaagcggatactcatgacgagatcctggaaggcctgaacttcaaccttactgagattccagaagcacagatacacgagggcttccaggaacttctgcgtactctaaatcagccagactctcagttgcaactgaccacaggaaacggactcttcctgtccgaaggtcttaaactggtcgacaaatttttggaggatgtcaagaaactatatcactccgaagcatttaccgttaatttcggggacacagaagaggctaagaagcagataaacgactacgtggagaaaggaacgcagggtaaaatcgttgatctcgtcaaagagcttgatcgcgataccgtgttcgcactggtcaattacattttcttcaaaggcaaatgggaacgaccctttgaggtaaaggacaccgaggaggaggatttccacgtcgaccaagttacgaccgtgaaagtcccaatgatgaagagactgggtatgttcaacatccaacattgcaaaaaactctccagttgggtgctgctaatgaaatatctcgggaatgccaccgctatcttttttctgccagatgagggaaagctccaacacctggaaaatgagttgacccatgatataatcacgaaatttctggaaaatgaggaccgcaggagcgccagcctgcatttacctaagctgagtataaccggcacctacgatctcaagtcggtcctgggccagctcggaatcacgaaggtttttagcaacggcgctgacttgagcggcgtgacggaggaagccccattgaagctgtctaaggccgttcacaaagcagttctcactatagatgaaaaaggaaccgaagccgcaggcgcaatgttcctggaagctatccccatgtcaatacccccagaggtgaagtttaacaaacccttcgtattccttatgatcgagcagaatacaaagtctcctctcttcatggggaaggtcgtgaacccaactcagaag

SEQ ID NO: 45425 - DNA, 1254 bp, Artificial Sequence
  derived and/or modified sequence
atgcccagctcagtgtcatggggcatcctgctccttgccggactgtgctgcttggtgcccgtgtccctcgcggaagatcctcaaggtgacgcggcccaaaagaccgatacctcgcaccacgaccaagatcaccccactttcaacaaaatcacgccaaaccttgctgaattcgctttctccctgtatcgccagctggctcaccagtccaactccaccaatatcttcttcagcccagtgagcatcgcgaccgcgttcgcgatgctgtccctcggaaccaaggcggacactcatgacgagatcctggaaggactgaacttcaatctgaccgaaatcccggaagcacagatccacgagggatttcaagagctgctccgcactctcaaccaacctgatagccagctccagttgaccactggaaatgggcttttcttgagcgagggcttgaagctcgtggacaagtttctggaggacgtgaagaagctctaccattccgaggccttcaccgtgaactttggcgacaccgaggaagcaaagaagcaaatcaacgactacgtggagaaaggaactcaaggaaaaatcgtggacctggtgaaggagctcgaccgggacactgtgttcgcgctggtgaattacatcttcttcaagggaaagtgggagcgcccattcgaagtgaaggataccgaggaggaagatttccacgttgatcaggtgactactgtcaaggtgcctatgatgaaaaggctcggtatgttcaacatccagcactgcaagaaactgtcctcatgggtcttgctcatgaaatacctgggtaatgccactgctatcttcttccttcctgacgaaggaaagctccaacacttggaaaatgagctgactcacgacatcatcaccaaattcctcgaaaatgaggatagacgctcagcgtcgctgcacctcccaaagctctcaattactggaacctacgacctgaagtcggtgctgggacaactgggaatcactaaggtcttttcaaatggcgcagacctgtcgggggtgaccgaagaagccccactcaaactctccaaagccgtgcacaaggcggtccttaccatcgacgagaaaggaaccgaggccgcaggcgccatgttcctggaagcgatccccatgtctatcccaccggaggtgaagtttaacaagccgttcgtgttcctgatgatcgagcagaacaccaagtccccactgttcatgggaaaagtagtgaacccgacgcagaag

SEQ ID NO: 45426 - DNA, 1254 bp, Artificial Sequence
  derived and/or modified sequence
atgccaagcagcgtctcctggggtattttgctgcttgcgggattgtgctgtctcgtgccagttagccttgccgaagacccgcagggcgatgcagcccagaaaacggatacgtcccaccatgaccaagatcacccaacattcaacaagatcacccctaatctggccgagtttgcattttcgctatacagacagctcgcccatcagtcaaattccactaacatctttttctctccagtctctattgccacagccttcgcaatgctcagtcttggtaccaaagcagacacccatgacgaaattctggagggtctcaactttaatctgacggaaatccccgaagcccagatccacgaagggttccaggagttattaagaaccctgaaccagcccgactcccagcttcagctgaccacagggaacggcctgttcctgtctgaaggactgaagcttgtggacaaatttctggaagacgtgaaaaagctttatcattcggaagcatttacggtgaatttcggcgacaccgaggaggccaaaaagcaaataaacgactacgtcgaaaaggggactcaagggaaaatcgtggatttggtgaaggaattagatcgcgacactgtgtttgctttggtcaactacatattttttaaaggcaagtgggaaagacctttcgaagtcaaggatacagaggaggaagatttccacgttgaccaagtgacgacagtcaaagtgcctatgatgaagcgactggggatgtttaacatacagcattgtaaaaaactgtcttcatgggtgcttctgatgaagtatctgggaaacgcaactgcgatttttttcttacctgacgaaggcaagctccagcacctggaaaatgagctaactcatgatattattacgaaattcctggagaacgaggatcgaaggtcagcctctcttcaccttccgaaactgagcatcacagggacctatgatttgaaatccgtgcttggacagctgggaatcacaaaggtcttttctaacggcgctgatctttctggggtcacggaggaggcaccactaaaattatctaaggctgttcataaagctgtcctgaccatcgatgaaaaagggactgaggcggccggtgccatgttcctcgaggccatcccaatgagtatacctcccgaggtcaagttcaacaaaccttttgtcttcctcatgatcgaacagaacaccaaatcccccctgttcatggggaaggttgtgaatcctacccagaag

SEQ ID NO: 45427 - DNA, 1254 bp, Artificial Sequence
  derived and/or modified sequence
atgccgagtagcgtcagctggggcatcctgctcctcgccggtctgtgctgcctcgtccctgtgtcgctggccgaggacccccagggagacgcggcacaaaagaccgacacttcgcatcacgaccaagaccaccctaccttcaacaagatcacccccaacctggcagagttcgccttcagcctgtaccgccagttggcccaccagtccaattctaccaacatcttcttctcgccggttagcatcgctaccgcattcgcaatgctgtccctcggaactaaggcagacactcacgatgaaatcctggaaggacttaacttcaacttgactgagattccggaagcacagatccatgagggcttccaagaattgctgcgcactctgaatcagccggacagccagctccagctgactaccggcaacggactttttctgtcggaggggcttaagctggtggataagttcctggaggacgtgaaaaaactctaccacagcgaagcatttactgtgaacttcggtgataccgaagaagctaagaagcagattaacgattacgtcgagaagggaacgcaaggaaaaatcgtcgatcttgtcaaggaacttgatcgggatactgtgttcgcgctcgtgaactacatcttcttcaaggggaagtgggagcgacctttcgaggtgaaggatactgaagaggaggactttcacgtcgatcaagtcaccaccgtgaaggtcccgatgatgaaaaggctggggatgttcaacatccaacattgtaagaagctctcatcgtgggtgctgctcatgaaatatctcggaaacgccactgcaatcttcttcctcccagatgagggaaagttgcagcatctcgaaaacgaactcactcatgatatcattaccaaattcctggagaacgaggaccgccgctcagcctccctgcatctgcctaaactctccatcaccggaacttacgacctgaaatcagttctcggacaactgggaatcacgaaggtattctccaacggagcagacctgtcgggagtgaccgaggaagcacctctgaagttgtctaaggcggtccacaaggcagtgctcaccattgacgaaaaggggactgaagcggctggagctatgttcttggaagcgatcccgatgtcaatcccgccggaggtcaaattcaataaacctttcgttttcctgatgatcgagcagaacaccaagagcccactgtttatgggcaaggtcgtgaacccaacccaaaaa

SEQ ID NO: 45428 - DNA, 1254 bp, Artificial Sequence
  derived and/or modified sequence
atgccctctagtgtttcatggggaatcttacttttggctgggctctgctgtctggtgccagtgtctctcgccgaagatccacagggggatgccgcacaaaaaacggacacaagccatcacgatcaggaccatcccacttttaacaagataacccccaacctcgctgagtttgccttcagcctctatcggcagctggcccatcaatccaacagcaccaacattttctttagccctgtcagcatcgctaccgcttttgcaatgctctctttaggaactaaggccgacacccacgatgaaattctggaggggcttaacttcaaccttacagaaatcccagaggctcagatacatgaggggttccaggagctgctgagaacattgaaccaacctgattctcagctgcagctcaccactggcaacggcctgtttctgtccgaagggctgaaactggtggataaatttctggaagatgtcaagaagctctaccacagcgaggcctttacagtgaactttggggacaccgaggaggctaagaaacagatcaacgactacgtcgaaaaaggaactcaggggaagatcgtcgatctggtcaaagaactcgaccgagatacagttttcgccttggttaactacatatttttcaagggcaaatgggagagacctttcgaggtgaaggacaccgaggaagaagattttcatgtggatcaggtaactaccgtgaaagtgcctatgatgaagcgcctgggcatgttcaatattcaacattgtaaaaaactctcttcgtgggttttactgatgaagtatcttggcaacgccaccgctatcttcttcctgcctgatgaaggcaaactgcagcacttagagaacgagctcacccatgacattatcactaaatttttggaaaatgaggatcgtcgcagcgcatccctgcacctgcccaagctgtccatcaccggaacatacgatttgaagagcgtcctgggacagttgggcattacaaaggtgtttagtaacggagccgatctcagcggagtgaccgaggaggcccctctgaagctctctaaggcagtccacaaagcagttctgacgattgacgaaaagggcaccgaagcagctggagccatgtttcttgaggccataccgatgtcaattccaccagaggtcaaatttaacaaacctttcgtctttttgatgattgagcaaaacaccaaatcaccgctgttcatgggtaaggtggtgaacccgacccagaag

SEQ ID NO: 45429 - DNA, 1254 bp, Artificial Sequence
  derived and/or modified sequence
atgccgtcttctgtttcttggggcattctgctcctggcagggctgtgttgtctagtgccagtgtccctggccgaggaccctcagggcgacgcggctcaaaaaacagatacctctcaccacgatcaagatcatccgactttcaataagattacccccaatctagctgaatttgcattcagtttgtatagacagctcgcccaccagtcaaattccacgaatatattctttagtccggtcagcatagctacggccttcgctatgctgtctctgggaaccaaggcagacacacatgacgagatccttgaagggctaaactttaacttaacagagatccccgaggcacaaatccacgagggctttcaggaactcctgcgcactctgaaccagccagacagccagttgcagctcaccaccggaaatgggctctttttgagtgaggggctcaagttggttgataagtttctagaggacgtgaaaaagctctaccactcagaggctttcaccgttaatttcggagacacggaggaggctaaaaaacagataaatgactatgtggagaaaggtacccaaggcaagattgtggatctcgtaaaagagcttgatcgcgatacggtttttgctctggttaactacatcttctttaagggaaagtgggaacgtcctttcgaggtgaaagataccgaggaggaggatttccacgtggaccaggtgacaactgtgaaggtgcctatgatgaaaaggctggggatgtttaacattcagcactgtaagaagttgtcttcttgggtgctgcttatgaagtacttggggaatgcgactgctattttcttcttgcccgatgagggtaagctgcaacacctggagaatgagcttactcatgacatcattacaaaatttctcgaaaacgaggaccgcaggagtgcgtccctacacctgccaaagctgtccattacggggacatacgacctgaagagcgtgttagggcagttgggcatcactaaagtattttcaaatggtgcagacttatccggagtgaccgaggaggccccgttgaaactgtctaaagctgttcacaaagcagtgctgacgatcgacgaaaaggggactgaagcagcaggtgccatgtttctggaggctatcccaatgagcatcccccccgaggtgaagttcaacaaaccattcgtcttcctgatgatcgagcagaacaccaagagtccactctttatgggtaaagtggtcaatccaacccagaag

SEQ ID NO: 45430 - DNA, 1254 bp, Artificial Sequence
  derived and/or modified sequence
atgccttcgtccgtgtcctggggaatccttctgttggcagggctttgctgtcttgtgcctgtgtccctggcagaggatccccagggggatgcggcgcagaaaactgatacttcccatcatgaccaagaccatcccacgttcaacaaaatcaccccgaacctggcagaattcgcattttcgctttacagacaacttgcccaccaaagcaatagcacgaacatattctttagcccagtgagcatcgcgactgcattcgcaatgctttccctcggtaccaaggcagacacccatgatgaaatactggaaggacttaactttaacctgactgagattccagaagcgcaaattcacgaaggattccaagaactgctgagaactctgaaccaacctgattcccaactgcagctgactactggaaacggactgttcctgagcgagggtcttaaacttgtcgataagttcctcgaggatgtgaagaaattgtaccacagcgaggcgttcaccgtgaatttcggcgatactgaggaagcaaaaaagcagataaatgactacgtcgagaagggaacgcaaggtaagatcgtggatctcgtcaaggaactggatcgagatactgtgtttgcgcttgtgaattacatcttctttaaaggaaaatgggaaagaccttttgaagtgaaagacaccgaggaagaggactttcacgtggatcaggtgacgactgtcaaggtgccaatgatgaaacggcttgggatgtttaacattcagcactgtaagaagctgtcatcctgggtgctgctgatgaagtacctggggaacgcaaccgccattttctttctccccgatgaaggcaagctgcaacatcttgagaatgagctgactcatgacataatcaccaagttcctggaaaatgaagataggagatccgcatccctccatctcccaaagctgtccataaccggaacttacgatcttaagagcgttctgggacagttgggaattacgaaagtcttttcgaacggcgcagatctgtcaggagtgaccgaagaagcgcctcttaagctctcaaaggccgtgcataaagcagtgctcactattgatgaaaagggaaccgaggcagcaggcgcaatgtttctcgaagcaatccccatgtccatccctcccgaagtgaagtttaacaagccttttgtgttcctgatgatcgaacaaaacaccaagtctccgctcttcatggggaaggtagtcaatccaactcagaag

SEQ ID NO: 45431 - DNA, 1254 bp, Artificial Sequence
  derived and/or modified sequence
atgccctctagtgtgtcctgggggatcttgctgctggccggcctctgctgcttggtgcccgtgtccctcgctgaagatccacagggggatgctgctcagaagaccgatacctcccaccatgatcaagaccaccctacgttcaacaagattacacctaacctggcagagttcgccttttccctttatcgacaactggcccaccagtccaattccactaatatctttttttcccctgtaagcattgcaaccgccttcgcaatgctgagcctgggtacgaaagcggacacccacgacgagatactggagggcctgaacttcaatcttacggagattcctgaggcccagattcacgaggggtttcaggaactgctgagaactcttaatcagccagactctcagctccaactaaccacaggtaacggtctctttctcagcgaggggctcaagctggtggacaagttccttgaggacgtaaagaagctgtatcacagcgaagctttcactgttaacttcggagacacagaggaggcgaaaaaacagattaacgattacgtggagaaaggaacccaagggaagattgtcgatctagttaaagagctggatcgggataccgtcttcgccttagtgaattatatcttcttcaagggtaagtgggagcgaccgtttgaagtgaaagacaccgaggaagaggattttcatgtggaccaggttaccacagttaaagttcctatgatgaaacgcctgggcatgtttaacattcagcattgcaaaaagctgagctcctgggtcctcttgatgaaatatctgggcaacgctaccgccatcttcttcctgcctgacgaaggtaaattgcagcatctcgagaacgagttaacacatgacataattacaaaatttctggagaatgaggatagaaggtccgcttctctgcacctcccgaagctcagtataacagggacttacgatcttaaaagcgtgcttgggcagttgggcataacaaaggttttctccaatggagccgacctttccggggtgacagaggaagcccctctcaaactctccaaggcagtgcacaaggcagtgctaaccattgatgagaagggaactgaagctgcaggtgcaatgttcctggaagcgataccaatgtctattcccccagaggtcaaatttaataaaccattcgtgtttctgatgattgagcagaataccaagtcccctctttttatggggaaggtcgtcaatccgacgcaaaag

SEQ ID NO: 45432 - DNA, 1254 bp, Artificial Sequence
  derived and/or modified sequence
atgccttcaagcgtgagctggggtattctgttgctagcaggcttgtgttgtctggtgcctgtgtccctcgctgaagatccacagggagacgccgcccagaaaacggatacatcacatcacgaccaggaccaccccactttcaataaaattactccaaacttggcagaattcgccttcagtctctatcggcaacttgcccaccagagcaatagtacgaatatattcttctccccagttagcatcgcaacggcttttgcaatgctgtctctgggcaccaaggccgacacccatgatgaaattctcgaaggcttgaatttcaatctaaccgagattcctgaggctcagatccacgaggggtttcaagaactattgcgcaccctgaaccagcctgacagtcaactccagctaaccactggtaatggactcttcctatcagaaggccttaagcttgtcgataagttcttggaagatgtcaaaaagctttatcacagcgaagccttcacagtcaacttcggcgatacggaggaggcaaagaagcaaattaacgattacgtagaaaaagggactcaagggaaaatcgttgacctggtgaaagaattggatcgagatacagtgtttgcccttgttaactatattttttttaagggtaaatgggaaagacctttcgaggtaaaggatactgaagaggaagatttccatgtggatcaggtcaccacggtgaaggtccccatgatgaaacgcctggggatgttcaacatccagcattgcaagaagctgagctcatgggtgctcctgatgaagtacttaggaaatgccacagcaatattctttctgcccgatgagggcaagctacagcatctagaaaacgaattgactcatgacatcatcactaagtttctcgagaacgaggacagaagaagcgcctctctgcacctgccaaaattgtccatcacggggacttacgaccttaagtcggtcctcgggcagttaggcatcaccaaggttttcagcaatggagccgatctgagcggcgtgactgaagaggcaccgctcaagctgagcaaagccgtgcacaaggccgtgttaactatcgatgagaaaggtactgaagccgcaggcgcaatgtttctggaagcgatccctatgagtattcccccggaagtgaagtttaacaagcccttcgtctttttaatgatagagcagaacactaaatctccactgttcatggggaaggttgttaacccgacacagaaa

SEQ ID NO: 45433 - DNA, 1254 bp, Artificial Sequence
  derived and/or modified sequence
atgccttcctctgttagctggggtatactactgctggcgggactttgttgtctagtgccagtgagtttggcagaggatccgcaaggggacgctgcccagaagaccgacacatcccatcacgaccaggaccatcctacattcaataagataacaccaaacctggcagagtttgccttctctctgtacaggcaactggcgcatcagagtaattccaccaacatcttcttttctccagtgtcgattgctacagcattcgccatgctttcattggggacaaaagccgacacacacgacgagattctagagggcctaaactttaatctcactgaaatacctgaagctcagattcacgaagggtttcaggagttacttagaacactgaatcagccagactcacagctacagcttacaacaggaaatgggttattcctctccgaaggactgaaactggtggacaagttcttggaagatgtcaaaaaactgtatcattctgaggcttttacggtcaatttcggggacacggaagaggctaagaagcaaattaacgattatgttgagaagggaacacagggaaaaattgtggatctcgtcaaggagctggatcgagatacagtgttcgccctagttaactacatcttcttcaaggggaaatgggaacgccctttcgaggtaaaagacactgaagaggaagatttccatgtcgaccaggtgactacagtgaaagtcccaatgatgaagcgtctgggtatgttcaatattcagcattgcaagaagctgtcctcctgggtcttactgatgaagtacctcgggaatgcaaccgctatattctttttacctgatgaaggcaaactgcagcacctggagaatgaactgacccacgatatcataaccaagttcttggaaaatgaggaccgcagaagcgcctccctgcatctgccaaagctgtcaatcactggaacttatgacctcaagagcgtgctgggacagttgggcataacaaaagtgttctctaatggtgccgatctgtccggcgtcaccgaggaagcaccactgaagctgagtaaggctgttcataaagccgtgctcacaatcgatgagaaagggactgaagccgccggggctatgttcctagaagccatcccgatgtctatcccccccgaggttaaatttaacaagccctttgtgtttttaatgatcgaacagaacacgaaatctcccctcttcatgggaaaggtcgtgaaccccacccagaaa

SEQ ID NO: 45434 - DNA, 1254 bp, Artificial Sequence
  derived and/or modified sequence
atgccttcatccgtctcatgggggattctcctgctggcgggcctctgctgtttagtgccagtgtcactagcggaggatccacagggggatgcggcccagaaaacagacacaagccatcacgaccaagatcatccgaccttcaataaaattacccctaatcttgccgaatttgctttttctttatataggcaactcgctcatcaaagcaactctacaaacatctttttttctccagtgagcatagctacggctttcgccatgttgtctttgggcactaaagccgatacgcatgacgagatactcgagggtcttaattttaatctgaccgaaattcctgaggcgcagatccatgaaggctttcaggaattgctgcgcactctgaaccagccagactctcagttacagcttactacgggaaatgggttatttctgtccgaaggattaaaattagtggacaaatttcttgaagacgttaaaaaattatatcatagcgaagcatttaccgtgaattttggcgacacagaagaagcgaaaaagcagataaatgactatgtggaaaaagggacacaggggaagattgtcgatttagtcaaggaattagaccgggataccgtttttgccctggtgaactacatcttttttaaaggaaaatgggaacgcccgtttgaagtaaaggatacggaggaagaagactttcatgtagatcaagttacaacggtcaaagttccaatgatgaaacgcctgggaatgttcaacattcaacattgtaagaaacttagctcctgggtactgctgatgaaatacttaggaaatgcgacagccattttctttctgccagacgaaggcaaacttcaacatctagaaaatgaacttacgcacgatattatcacaaaattcttggaaaacgaagatcgccgaagcgcatctcttcacctgccgaaactttctatcacaggtacgtatgatttaaagtctgttctgggtcaactcgggattacaaaggtcttttcgaatggcgctgacctgtctggggtgactgaagaagcgccgttgaaactttctaaagccgtccacaaagcagttctgacaattgacgaaaagggcacagaggccgctggcgcgatgtttctggaagctattcccatgagcattccaccagaagtaaagttcaataaaccgtttgtatttcttatgattgaacagaacacgaagtcaccactttttatgggcaaagtcgttaacccaacacaaaaa

SEQ ID NO: 45435 - DNA, 1254 bp, Artificial Sequence
  derived and/or modified sequence
atgccaagtagcgtgagttggggaatcctcttacttgccggtctatgttgtctggttccagtatcactggccgaagacccgcaaggcgatgcagcacaaaagaccgatacatcccaccatgatcaggaccatcctacattcaacaagataacccccaacctcgccgagttcgccttttcactataccgccagctcgcacaccagagcaattccactaacatattcttttcgcctgtaagcattgctaccgcttttgcaatgttaagcctcggaaccaaggctgacacccacgatgagattttagagggactgaatttcaacctcaccgaaatccctgaggcacagatacatgagggcttccaggaactgctgagaaccctcaatcagcctgatagccaactccaattgactactggcaacgggctctttctttccgagggattaaaactggttgataagtttttagaggacgtgaaaaaattatatcactccgaggccttcactgttaattttggtgacaccgaagaggccaaaaagcaaatcaacgattacgtggaaaagggaacccagggcaaaattgttgacttagtcaaggaacttgatagggacacagtgttcgccttggtgaattacatattctttaagggcaagtgggaaagaccatttgaggtgaaggacactgaagaagaagatttccacgtggatcaggtgacgacagtaaaggtcccgatgatgaaaagactgggcatgtttaacatccaacattgtaagaaactgtcctcatgggttctgctgatgaagtaccttggcaatgccactgccattttctttcttcccgacgaaggaaagctccagcacctggagaacgagctcactcacgacatcatcaccaaattcctggagaacgaggaccgccggagcgcatcacttcacctgcccaagcttagcattactggaacatatgatcttaaaagtgtcctcggacagcttggtatcactaaggtgttcagcaacggcgccgatctgagtggagttacagaagaggcacccctcaaactgagcaaagccgttcataaagctgttctgaccatagacgagaaggggactgaagccgcaggagccatgtttttggaggcaatccccatgagcattccccctgaggtgaagtttaacaagccgttcgtattcttgatgatcgagcagaacaccaagtcgccactcttcatgggtaaggtcgtcaaccccacccagaag

SEQ ID NO: 45436 - DNA, 1254 bp, Artificial Sequence
  derived and/or modified sequence
atgccaagtagtgtgagctgggggattttgctgctggctgggctgtgctgtttagtgcctgtatccttggctgaagaccctcagggtgacgctgctcaaaagacggacacatctcatcacgatcaggaccatccaacatttaacaagattactcccaatcttgctgagttcgcattctcgctctaccggcagctggctcatcaatccaacagcacaaacatttttttctctccggtcagtattgccacggccttcgccatgctttcactgggaactaaggctgacacccacgacgagatccttgagggactgaattttaaccttactgagatcccagaagcccagatccacgaagggttccaggagttgcttaggacactgaaccagcctgattcacagcttcaactgactacgggcaatggcctctttctctctgaaggcctcaaactcgtggacaaatttcttgaagacgtgaagaaactctatcattccgaagcctttaccgttaattttggggatactgaagaggccaagaagcagatcaacgattacgtggagaagggaacccagggcaaaatcgtggatctagtcaaggagctggatcgagacactgtctttgccctagtcaactacatctttttcaaaggcaagtgggaaaggccgtttgaggtgaaagacaccgaagaggaggattttcacgtcgatcaggttacaactgtcaaagtgccaatgatgaagcgtctgggaatgtttaacatacaacattgcaagaagctatcttcgtgggtgctcttaatgaagtatctcggaaacgccaccgccatcttctttctgccagatgaagggaagctacagcacctggagaacgagcttacccacgacatcatcacgaagttcctcgagaacgaggaccgtcgctctgcttcactccatcttcctaagctgagcatcaccggcacttacgatttgaagtccgtactgggccagctgggaattactaaggttttcagtaacggggccgacctcagcggcgtcactgaggaggccccactcaaattgagcaaagctgtccacaaggccgtgttaactatcgacgagaaaggaacggaggctgcaggcgctatgttcctggaggcaatccccatgtcgattcctcctgaagtgaaatttaacaagccctttgttttcctgatgatcgagcagaacaccaagagtcccctcttcatgggtaaggtggtaaatcccacccagaag

SEQ ID NO: 45437 - DNA, 1254 bp, Artificial Sequence
  derived and/or modified sequence
atgcctagctcggtcagctgggggattctgctgctggccggtctttgctgtttggttcctgtgtcgcttgccgaagatcctcaaggagatgcggcacaaaagaccgatacgtctcatcatgaccaggatcatcctacttttaacaagatcactcctaacctggccgagttcgcatttagcctgtaccgtcagctcgcccatcagagcaactcaaccaacattttcttctcgccagtgtcaatcgcaactgcatttgcgatgctgtcacttggtaccaaagcagacactcacgatgaaattctcgaaggactgaatttcaacttgaccgaaattcctgaggctcaaatacatgaaggtttccaggagctgttgagaaccctcaaccaaccagactcgcaactgcaactgaccactggaaacggactgtttctttcggagggtcttaagctggtggataagttcttggaggacgtgaagaaactttaccactccgaagcatttactgtcaattttggagacactgaagaggcgaagaagcaaatcaatgattacgtggagaaaggcactcaaggcaaaattgtcgaccttgttaaggaacttgatcgtgatactgtctttgcccttgtcaattacatattctttaaaggaaagtgggaacggcctttcgaagttaaggacaccgaagaggaagattttcacgttgatcaggtcactactgtcaaggtccccatgatgaaaaggctcgggatgtttaacattcagcattgtaagaaactcagctcatgggtcctgttgatgaaatatctgggcaatgcaaccgccatattcttccttccggatgaaggaaaacttcaacacctggaaaacgaactgacgcatgatatcatcactaagtttcttgaaaacgaagatcggagatcggcttctctgcatcttcctaagctgtcaattacgggaacttacgacttgaagtccgtccttggtcaacttgggattactaaggtgttctcaaacggagctgacctgtcgggagtcaccgaagaagcaccgctcaagctctccaaggccgtccacaaggcagtgctcaccatagacgaaaaaggtaccgaagcagcaggtgcgatgtttcttgaagcaatcccaatgtcaattcctccagaggtgaagtttaacaagccttttgtctttctgatgatagagcaaaacaccaaaagcccgctcttcatgggcaaggtagtcaatccaacccaaaaa

SEQ ID NO: 45438 - DNA, 1254 bp, Artificial Sequence
  derived and/or modified sequence
atgccttcctcggtgagctggggcatccttttgctggcaggtctgtgttgtcttgtcccggtgtccctcgcagaagatcctcaaggtgacgcagcccaaaaaactgacaccagccatcatgatcaggatcaccctacctttaacaagattacgcccaatctggcggaattcgcattttcgctgtatcgccaactggcccaccagtcgaactcaaccaatatcttcttctcccctgtgtccattgccaccgcatttgcaatgctttctcttggtaccaaagccgacacccatgacgaaatcctcgagggactgaatttcaacctcaccgaaataccagaggcccaaatccacgaagggtttcaagaactgctgcgtaccctgaaccagccggattcacaactgcagcttaccaccggaaatggtctttttctctctgaaggccttaagctcgttgacaagtttcttgaagatgtgaagaaactttaccattcggaggcattcaccgtcaactttggtgatactgaggaggcaaagaaacagataaatgactacgtggaaaagggcacccagggaaagattgtcgatcttgtgaaagaacttgatcgagacaccgtgttcgcactcgtgaattacatattcttcaagggcaagtgggaaagacctttcgaagtcaaggataccgaagaggaggattttcacgtggatcaggtcacgactgtgaaggtcccaatgatgaagcgcctgggtatgttcaacattcagcattgcaagaaattgtcgagctgggtgcttctgatgaagtatctgggaaacgctacggctatcttctttctgccagacgaggggaagctgcaacatctcgaaaacgaactgacgcatgacatcatcactaagttcctcgagaacgaagatagaaggagcgcatcgttgcaccttccgaagctctctattactggcacctacgatctgaagtcagtcctgggacaactcgggatcactaaagtgtttagcaatggtgcagatctgtcgggagtgaccgaggaggcccccctcaagctcagcaaagccgtgcataaagcggtgctgactatagacgaaaagggaactgaggctgcaggagccatgtttcttgaagcaattccaatgagcatacccccggaagtcaagtttaacaaaccgtttgtctttctgatgattgagcaaaatactaaatcgccacttttcatgggcaaggtggtgaacccaactcaaaag

SEQ ID NO: 45439 - DNA, 1254 bp, Artificial Sequence
  derived and/or modified sequence
atgccctcctccgtgtcctggggaatcttattactcgcaggtctctgctgtctggtacccgtttcactggcagaggatccccagggagacgcagcacagaagacggatactagccaccatgaccaggaccaccctaccttcaacaagatcactcccaatctcgcggaatttgcattttcactgtatcgccagctggctcaccagtcaaactccaccaatattttcttcagccccgtaagcattgccaccgcttttgccatgttgagtctgggcactaaagcagacactcacgatgagatcctggagggcctaaactttaacctgacagagatccctgaagcacaaattcacgaaggatttcaggagcttctgaggacacttaatcagccagatagtcaactgcaactcactactggtaacggcctctttctgtccgaagggcttaaactcgtggacaaattcttagaagacgtgaagaaactgtaccacagcgaggcctttaccgtcaattttggggacacagaagaagccaagaaacaaatcaatgattacgtggaaaagggcactcaaggcaaaatagtcgacctggtcaaggaacttgacagagatactgtgttcgcgcttgtcaactacatcttctttaagggaaagtgggagaggcctttcgaggttaaggacaccgaagaggaggattttcatgttgatcaggtgacaaccgtaaaagtaccaatgatgaaaaggttgggaatgttcaacattcagcattgtaaaaaactgtccagctgggtcctgctgatgaagtatctgggtaacgcaaccgccatcttcttccttcctgacgaagggaaactccagcaccttgagaatgagcttacacatgacataattaccaaattcctcgagaatgaggaccgtcggagcgcaagtctacacctgcccaagctttctattaccgggacgtatgaccttaagtctgtcctgggccaacttgggattacaaaggtgttctcgaatggggcagacctgtcgggagttaccgaggaagcaccattgaaactgagtaaggctgtacacaaggcagttttgaccatcgacgagaagggtacagaggccgccggggccatgtttctggaggccatccctatgagcattcctccggaagtaaaatttaataagcctttcgtattcctcatgattgagcagaatacaaagtcaccactcttcatggggaaggtcgtcaaccctactcagaaa

SEQ ID NO: 45440 - DNA, 1254 bp, Artificial Sequence
  derived and/or modified sequence
atgcctagcagcgtgagctggggtattcttcttctcgccggcctttgctgtctagtgcccgtgtcactggctgaggaccctcagggtgacgcagcccagaaaactgatacttcgcaccacgaccaagatcaccctacttttaacaagattacccctaatctggcagagttcgccttctccctgtaccggcaattggcccatcagtccaactcaacaaacatcttcttctccccggtgagtatcgcaacagcattcgcaatgctaagcctcgggacaaaggcagatacacacgatgagatccttgaagggctcaatttcaatctgacagagataccggaggcccagatccacgaggggttccaggagctgctgagaacactcaaccagcctgattcgcagctgcaactgacgaccggaaatggccttttcctgtctgagggtttaaagttagtcgacaaattcttggaggacgtcaaaaaactgtaccactccgaggcgtttacagtgaacttcggcgatacagaagaagccaagaagcagatcaatgactacgtggaaaagggcacccagggcaaaattgtggacttggtcaaggagcttgaccgagacactgtgtttgcgctggtgaactacatcttctttaaggggaagtgggagcggcccttcgaagtgaaagacaccgaggaggaggatttccacgtggaccaggtcaccacagtgaaggtgcctatgatgaagcgactggggatgttcaatatccagcactgtaaaaagctgtcctcatgggtcctgctaatgaagtacttaggaaatgccacggcaattttttttctcccagatgagggaaagcttcagcatctggaaaatgagcttacccatgacatcatcaccaaattcttggagaacgaggatcgccggtctgcgtccctgcatcttcccaagttgtccataaccgggacatacgatctcaagagcgtcctggggcagttgggtatcacgaaagttttctcgaacggtgcagacctttccggggtcacggaggaagcccctctgaaactctcaaaggctgtccacaaagcagttttaactatcgatgaaaaggggaccgaggctgccggagcaatgtttctagaagccatacctatgagtatcccacctgaagttaagttcaacaagccattcgtattcctcatgattgagcagaacaccaagtcccccctgtttatgggtaaagttgtcaatccgacccagaag

SEQ ID NO: 45441 - DNA, 1254 bp, Artificial Sequence
  derived and/or modified sequence
atgccctccagcgtgtcctgggggattttgctcctcgcgggcttatgttgccttgtgcccgttagtttagcggaagaccctcagggggatgccgctcagaagacagacacctcccaccacgatcaggaccaccccacttttaataagatcacccccaatctcgcagagtttgctttttccctataccggcagttggcgcaccagtccaacagtaccaacattttcttctcgccggtcagcattgcaactgcctttgccatgctttcactcggcaccaaagccgatacgcacgacgagatccttgagggactcaacttcaacttgaccgagatcccggaggcccagatccatgaggggtttcaggagctcttgcgtacccttaaccagcctgactcccagttacagctcaccaccggcaatggcttgtttctgtccgagggtctgaagctggtcgacaaattcctggaggacgttaagaagctctaccattctgaggctttcaccgtcaactttggcgataccgaggaggctaagaagcaaataaacgactatgtggagaaggggactcaaggcaagatcgtcgatttagtcaaggaactggaccgcgacaccgtcttcgcacttgtcaattatattttcttcaaaggcaagtgggaacgccctttcgaagtcaaggacacggaggaagaggactttcacgtcgatcaggttaccacggttaaagtacccatgatgaagaggctcggcatgttcaacatacagcactgcaagaagcttagttcctgggtcttgttgatgaagtaccttgggaatgctacagccatcttcttcttgccggatgagggcaagctgcagcaccttgaaaatgaactgacccatgatatcattacgaagttcttggagaatgaggatcgtcgctccgcaagcctgcacttgcccaagctctccataactggtacctacgatcttaagtctgttctgggccagctggggattacaaaggtgttctcaaacggtgcggacctctccggcgttacggaggaagcccccctgaagctgtctaaggccgtgcacaaggcggtgcttactatcgatgagaaaggtacggaggcggctggcgcgatgtttctcgaagcaattccgatgagtatcccccctgaggtcaagtttaacaagccctttgtgttcctcatgattgagcagaacactaaatccccgctgttcatgggcaaggttgtcaaccccacccagaaa

SEQ ID NO: 45442 - DNA, 1254 bp, Artificial Sequence
  derived and/or modified sequence
atgccaagttcagtgtcttggggtatcctgctgctggccgggctttgttgtctggtgccagtgtccctggccgaggatcctcagggcgatgcagcgcagaagactgacaccagtcatcacgatcaggaccacccgacattcaataagatcacccccaacctggccgaattcgcattcagtctgtatcgacagttggcccaccagtctaacagcaccaacatcttttttagtcccgtgagtatcgccactgcttttgcgatgttgagcctcgggacaaaggctgacacccacgacgagattttggaaggacttaactttaaccttaccgaaatcccagaagcacagatccatgagggttttcaggaactgctgcggaccctgaaccagccagactctcagttgcagctgacgactggcaatggattgtttctgtccgaggggctcaaactggtggataagtttctcgaagacgttaaaaaattgtaccacagcgaggcatttacagtgaacttcggcgacaccgaagaggccaaaaaacagatcaacgactatgtggaaaagggcacacaaggcaagattgtggatctggttaaggagttggacagggacaccgtatttgccctggtgaactacatcttcttcaaggggaagtgggaacgcccgttcgaggtgaaagacaccgaggaggaagacttccatgtcgaccaggtcaccaccgtcaaggttcccatgatgaaacgcctgggtatgttcaacatccagcactgcaagaaattgagcagctgggtattgctgatgaagtatctgggcaacgccaccgccattttttttcttcctgatgagggaaagttgcaacacctggagaacgaactgacccacgacataatcactaaattcctcgaaaatgaagatagacggtcagcctccttgcatctcccaaaactcagcattacgggcacttacgacttgaagtccgttttgggtcagttgggcatcactaaggttttctcaaacggcgcagacttgtctggcgtgactgaagaggctccactgaagttgtccaaagccgttcacaaggccgttctgaccatcgatgagaagggaacggaggctgccggtgcgatgttcctggaagccattcctatgtccattccccccgaggtgaaattcaacaaaccttttgtttttctgatgatcgaacagaacacaaaatccccactgttcatggggaaagtggttaacccgacccagaag

SEQ ID NO: 45443 - DNA, 1254 bp, Artificial Sequence
  derived and/or modified sequence
atgccctccagtgtgtcttggggtattctgcttcttgccgggctttgctgtctcgtccccgtgagtttggctgaggacccacagggagatgcagcccagaaaacagatacatctcaccatgatcaggaccacccgacatttaataagattacccctaacctggcagaatttgccttttctctgtacagacaactcgcccaccagagcaactctactaacatcttcttttctccagtctcaatagctactgcttttgccatgctctccctggggactaaggctgatacacacgacgaaatcctggagggactgaactttaacctcactgaaattcccgaggctcaaattcacgaaggcttccaggagctcctccggaccttgaaccagccagactcccaactgcagctgaccaccggcaatggactgttcctctctgaaggtctgaagctcgtggacaaattcttggaggatgttaaaaagttgtatcacagtgaagctttcacagtcaactttggtgacactgaggaagccaaaaagcagatcaatgactacgtggaaaaagggacccaggggaagatcgtggacttggtgaaggagcttgacagggataccgtgttcgccctggttaactacattttcttcaaaggaaagtgggaaaggcctttcgaggtcaaagacactgaagaggaagatttccacgtcgaccaggtgaccacagttaaggtccccatgatgaaacggttgggtatgttcaatatccaacattgtaagaaattgagctcatgggttctgctcatgaaatatctgggaaacgctacagcaattttttttctgcccgacgagggaaaactgcagcatctcgaaaatgaattgacccatgatatcataaccaagtttctggagaacgaagacaggcgcagcgcaagtctgcacttgcccaaactctcaattacaggcacttacgaccttaaaagcgtgctgggacagttgggcatcacgaaggtcttttccaatggcgccgacctgagcggtgtgacggaagaagcccctctcaagttgagcaaggctgtccacaaggcagtacttacaatcgacgaaaaaggaaccgaagctgccggcgccatgtttctggaggccatacctatgagtatcccccccgaagtgaagttcaacaagccctttgtcttcttgatgatagagcagaataccaagtctcccctgttcatggggaaggtagtgaaccccacccagaaa

SEQ ID NO: 45444 - DNA, 1254 bp, Artificial Sequence
  derived and/or modified sequence
atgccttcttcagtctcctggggaatcctccttctggcgggactttgctgtttggtgccagtgtcccttgcggaagatcctcagggcgatgcagcacaaaaaacggatacctcccaccatgatcaagatcatcccacttttaacaagattactcccaacttggccgaatttgcgttcagcctgtaccgccagcttgctcatcaatccaactcgactaacattttcttcagccctgtatcgattgctaccgcgtttgcaatgctttcccttggcaccaaggcagatactcacgacgagattctggaaggactgaatttcaaccttactgaaattccagaagcacagatacatgagggatttcaagagctgctgaggaccctgaatcagcctgactcacagctccaacttactactggaaacgggctttttctctcggaaggccttaagctcgtggataagtttctcgaggatgtcaagaaattgtaccatagcgaggcgtttactgtgaattttggcgataccgaggaagcgaagaagcagataaatgactacgtggaaaaagggactcaaggaaagattgtggatcttgtgaaggaacttgacagagatactgtgttcgcacttgtcaactacatctttttcaaggggaagtgggaacgacccttcgaggttaaagataccgaagaggaggacttccatgtggatcaagtgactaccgtgaaggtgcctatgatgaagaggcttggaatgtttaacatccagcattgcaaaaagctgtcgtcatgggtccttctcatgaagtacctgggaaacgcaactgccattttctttcttcctgatgaaggcaaacttcaacatctcgaaaacgaactgacccacgacattatcacgaaattcctggaaaatgaagatcgaagatccgcaagcctccatctgcccaagttgtcgatcaccggaacctacgacctgaagtctgtgctcggccagctggggattaccaaggtcttttctaacggtgcagatctttcgggtgtgaccgaagaagcacctttgaagttgtcgaaggcagtgcataaggcagtcttgactattgatgaaaagggaaccgaagccgcaggtgctatgtttttggaagccattcctatgtcaattccccctgaagtcaagttcaataaaccttttgtgtttctgatgattgaacagaacaccaaatccccacttttcatgggaaaggtggtgaatccaactcagaag

SEQ ID NO: 45445 - DNA, 1254 bp, Artificial Sequence
  derived and/or modified sequence
atgccctcctccgtctcatggggtatcctcctgctggccggactgtgctgccttgtcccagtctcccttgcggaggacccccagggagacgcagcacagaagaccgatactagccatcacgaccaagaccatcccaccttcaacaagatcactcccaaccttgccgagttcgcttttagtctgtaccggcagctcgctcaccaatcaaactctaccaatatctttttctcacctgtgtcgatagctaccgcattcgctatgcttagcctgggaaccaaagccgatactcacgacgaaattctcgaaggcctaaactttaacctgaccgagataccggaagcccagatccatgaaggatttcaggagctgctgaggactttgaatcagcctgacagccagcttcagctgaccactgggaacggtctgttcctgtccgagggcctgaagctggtggataagtttctcgaggacgtgaagaagctgtaccattctgaggcttttacagtgaacttcggcgacacggaagaggccaaaaagcaaatcaacgactacgtggagaagggaacacagggaaagatcgtggacctagtcaaggaactggatagagatactgtgttcgcactcgtgaactacatcttctttaaggggaagtgggagcgcccttttgaggtaaaggacactgaagaggaggatttccacgtggatcaggtgacgacagtgaaggtacccatgatgaagagactgggcatgtttaatatacagcactgcaagaagctgtcctcctgggtgctgcttatgaagtaccttggcaacgctaccgccatcttctttcttcctgatgaggggaagctacagcacctcgagaatgagctgacgcatgacatcatcaccaaattccttgaaaacgaggaccggaggtccgccagtctccatttacctaagctttcgatcaccggaacctatgaccttaagtccgtgcttggccagttgggcataaccaaggtgttctctaacggtgctgacttaagtggggtcacagaagaggcgcctcttaaactcagcaaagcggtgcataaggctgttcttactatcgacgagaagggcacagaagctgcgggggccatgtttctggaagccatccccatgtctattccgcctgaagtgaagtttaataagccattcgtgttccttatgattgagcagaataccaagtctcccttgttcatggggaaagtggtgaaccctactcagaaa

SEQ ID NO: 45446 - DNA, 1254 bp, Artificial Sequence
  derived and/or modified sequence
atgccctccagcgttagttggggcatccttttgctggcgggcctgtgctgtttggtccccgtaagtctcgccgaggatcctcagggagacgcagcgcagaagacagacacttcccaccatgaccaagaccatccaacattcaataagattactccaaacctggcagagtttgcgttctccctgtaccgccaattggcccaccagtccaatagtaccaatatttttttttccccggttagtatcgcaacagcctttgccatgctctcccttggaaccaaggccgacacacacgacgaaatcctcgagggattgaatttcaacctgactgagattcccgaggctcagatccacgagggttttcaggagttgctgcgcacgctgaatcagcctgattcccagctccagttgacaacgggaaatggtctgttcctgtctgagggtttgaaattggttgacaaatttcttgaggacgtgaagaaactgtaccattccgaggctttcacagttaacttcggcgacacagaggaagctaagaagcaaatcaatgactacgtggaaaaaggtactcagggtaagattgtcgacttggtcaaggagcttgaccgcgacacggtttttgctctcgttaattacatcttcttcaagggtaagtgggagagacctttcgaagtaaaggacactgaggaggaggactttcacgtggatcaggtgactactgtcaaggtgcccatgatgaagaggctgggcatgtttaatatccagcactgtaagaagctgagctcttgggtcttgctgatgaagtacctgggcaatgcgaccgctatcttctttctgcccgacgagggcaaattgcagcacctggagaacgaactgacgcatgacataattaccaagtttctggagaacgaagacaggagatccgcatctcttcatctgcccaagctctctatcacgggaacctacgaccttaaatcagtgcttggccaactgggcattaccaaggtatttagcaacggtgcagacttgagcggagtgacagaggaggcacccctcaaattgagcaaggctgtgcacaaagcagtgcttacaattgatgagaagggcaccgaagccgcaggcgccatgttcctggaagctattccaatgtccatcccaccagaggtgaagtttaacaaaccattcgtgttccttatgatagagcagaacacaaagagccctttgttcatgggaaaagtggtgaatccgacacaaaaa

SEQ ID NO: 45447 - DNA, 1254 bp, Artificial Sequence
  derived and/or modified sequence
atgccgtcatccgtgtcctggggaatcctgctcctggcaggactgtgctgcctcgtgcccgtctcgctggcagaggacccccaaggagatgctgcacaaaagactgacacctcgcaccatgaccaagatcacccgacctttaacaaaatcactccaaacctcgccgaattcgcgttctcactctaccggcagctcgcccaccaatcgaattccactaatatcttcttcagcccagtgtcgatcgcgactgctttcgccatgctgtccctcggaactaaggctgatactcacgatgaaatcctggaaggactgaactttaacctcaccgaaatcccggaagctcaaatccatgagggcttccaggaacttctgcgcacgctgaatcagccggactcccagctccaactcaccacgggaaatggactgttcctctcagaagggctgaaacttgtcgataagttcttggaggacgtcaaaaagctgtaccatagcgaagcgttcaccgtcaacttcggagacactgaggaggcgaagaagcaaatcaacgattacgtcgagaagggcacccaaggaaagatcgtggacctcgtcaaagaactcgatcgggatactgtgttcgcgctcgtgaactacattttcttcaagggaaagtgggaaagaccgttcgaggtgaaggacaccgaagaagaggattttcacgtggatcaggtgaccactgtgaaagtgccaatgatgaaacggttgggtatgtttaacatccagcattgtaaaaagctgtcaagctgggtgctcctgatgaagtacctcgggaacgcaactgccatcttcttcctgcctgacgaaggcaaactgcagcacttggagaacgaactgactcacgacatcatcaccaaattcctggaaaatgaggacaggcgctcggcaagcctccatctgccaaaactgagcatcaccggcacttacgacctcaagtcagtgctgggacaactgggtatcaccaaagttttctcgaacggagccgacctgtcaggcgtgactgaggaagccccattgaaactgtccaaggccgtccacaaggcggtcctgaccatcgacgaaaagggaacggaagcggccggagcgatgtttctcgaggctatcccaatgagcatcccgccggaagtgaagtttaacaaaccgttcgtgtttctgatgatcgaacagaacactaaatcgcccctcttcatgggaaaggtggtcaacccaactcagaag

SEQ ID NO: 45448 - DNA, 189 bp, Artificial Sequence
  derived and/or modified sequence
atgccttccagcgtctcttggggaatcctccttttagcaggtttgtgctgtctcgtgcccgtctccctcgcccacggcgagggcacatttacatctgatcttagtaagcagatggaagaggaggccgtgagactcttcatcgaatggttgaagaacgggggaccatcctctggggctcctcctccttca

SEQ ID NO: 45449 - DNA, 189 bp, Artificial Sequence
  derived and/or modified sequence
atgccttcatcggtgtcgtggggcatcttgctgttggcaggactgtgctgtcttgtgcccgtaagtctggctcatggcgagggtactttcacctcggatctctccaagcaaatggaagaagaggcagtcagactgtttattgaatggctcaaaaacggtgggccatcctcaggagcccctcccccgtcg

SEQ ID NO: 45450 - DNA, 189 bp, Artificial Sequence
  derived and/or modified sequence
atgcccagttccgtgtcgtgggggattttgctcctggccgggctgtgttgcctggtgcccgtttcattggcacatggagagggaacctttacatctgacctgtcaaagcagatggaggaagaggccgtacggctcttcatcgagtggctgaagaacggaggacctagctctggggccccccccccatcc

SEQ ID NO: 45451 - DNA, 189 bp, Artificial Sequence
  derived and/or modified sequence
atgccgtcgtcggtatcgtggggtatactattattagcgggtttatgttgtttagtaccggtatcgctagcgcatggtgaaggtacgtttacgtcggatttatcgaaacaaatggaagaagaagcggtacgattatttatagaatggttaaaaaatggtggtccgtcgtcgggtgcgccgccgccgtcg

SEQ ID NO: 45452 - DNA, 189 bp, Artificial Sequence
  derived and/or modified sequence
atgcctagctcggtgagctgggggattctgcttcttgcaggcctgtgttgccttgtgcccgtctcacttgcacatggagaaggtacgttcactagcgatttgagcaagcaaatggaagaagaggccgtccgactctttatcgagtggcttaagaatggcggcccttcctccggggcacccccaccatcc

SEQ ID NO: 45453 - DNA, 189 bp, Artificial Sequence
  derived and/or modified sequence
atgccgagctctgtctcgtgggggatcctcctcctggctggtctctgctgtcttgtgcctgtctccctggcccacggcgaggggactttcacctcagatctatcaaaacaaatggaggaagaggccgtcagactgtttattgagtggcttaagaatggaggcccgagctctggggccccccccccgtcg

SEQ ID NO: 45454 - DNA, 189 bp, Artificial Sequence
  derived and/or modified sequence
atgccatcctccgtgagctggggaatcctgttgctggccggtctttgttgtctggtccctgtctccctggcgcatggagagggcacttttacgtctgatctctcgaagcaaatggaagaagaggcagtgcgcctgttcattgaatggctcaaaaacggtggcccctcaagcggtgctcctccgccttcg

SEQ ID NO: 45455 - DNA, 189 bp, Artificial Sequence
  derived and/or modified sequence
atgccaagttcagtctcctggggtatccttctgctcgcgggcctgtgttgcctggttccggttagcctggctcacggcgaaggcacctttacctccgacctgtcaaagcagatggaagaagaagccgtccgcctgttcattgagtggctgaaaaatggcggacctagttctggagctccacctccttcg

SEQ ID NO: 45456 - DNA, 189 bp, Artificial Sequence
  derived and/or modified sequence
atgccgtcgagcgtttcgtggggaatcctgctgcttgccggactgtgctgcctcgtgccggtgtcactcgctcacggcgaaggtacgttcacctcagatctctccaaacagatggaagaagaggcagtcaggctgtttatcgagtggctgaagaatggggggccgtcatcaggtgcaccacccccatcc

SEQ ID NO: 45457 - DNA, 189 bp, Artificial Sequence
  derived and/or modified sequence
atgccttctagcgttagttggggcattctgttactggctgggctatgttgcctggtgcctgtcagcctcgctcacggcgaggggacattcacatcagacttatctaaacagatggaggaagaggccgttcgtctgtttattgaatggctaaagaacggcggcccttctagcggtgccccaccaccatct

SEQ ID NO: 45458 - DNA, 189 bp, Artificial Sequence
  derived and/or modified sequence
atgccaagttccgtttcctgggggatcctgctgctggccggactgtgttgcctagtgccagtatcactcgcccatggagagggaacctttaccagcgacctgagcaagcagatggaggaggaagcagttaggctgtttattgaatggctgaaaaacggaggtccctctagtggcgccccccccccttcc

SEQ ID NO: 45459 - DNA, 189 bp, Artificial Sequence
  derived and/or modified sequence
atgccatctagcgtaagctgggggattcttttattggctgggctttgttgccttgtgccagtctccctggcccacggggagggaaccttcacttccgatttgtccaaacagatggaggaagaagccgtgagactctttattgagtggctgaagaatggtggtccttcttctggcgctcccccaccgtcc

SEQ ID NO: 45460 - DNA, 189 bp, Artificial Sequence
  derived and/or modified sequence
atgccaagctccgtgtcatggggtattttgctgctggccggactctgctgcctcgttccggtttcgctggcacatggcgaaggcactttcacaagcgaccttagcaaacaaatggaggaggaagcagtccgtctcttcattgagtggcttaaaaatggcgggccctcatctggcgcccctcccccttct

SEQ ID NO: 45461 - DNA, 189 bp, Artificial Sequence
  derived and/or modified sequence
atgcccagctctgtgagctgggggatactgctgcttgcgggactctgttgtctagttccggtctctctggcccacggagaaggaacgtttacatcagatctgtcgaagcagatggaggaggaggctgtccgtctgttcatcgagtggctgaagaatggggggccaagcagtggtgcaccacctccgtct

SEQ ID NO: 45462 - DNA, 189 bp, Artificial Sequence
  derived and/or modified sequence
atgccatcttccgtgtcctgggggattttgctgctggctggtctgtgctgtctcgtccccgtgtcgctggctcacggcgaaggaacctttacgtcggatttgtccaaacagatggaggaggaggccgttagactttttattgagtggctcaagaacggaggcccatcttctggggctccaccgccgagt

SEQ ID NO: 45463 - DNA, 189 bp, Artificial Sequence
  derived and/or modified sequence
atgccgtctagcgtaagctggggcatcctactgctcgccggcctgtgctgccttgtgccagtgtcccttgctcacggagagggcacttttactagtgatctttcgaaacagatggaagaggaggctgtgcgattgtttattgagtggttgaagaacggggggccctctagcggcgccccgcccccttcc

SEQ ID NO: 45464 - DNA, 189 bp, Artificial Sequence
  derived and/or modified sequence
atgccatcgtcggtcagctggggaattctgcttctggcgggtctttgctgtttggtcccagtgtcactggcacatggggaaggaacctttaccagcgatctgtccaagcagatggaggaagaagccgtgagattgtttatcgaatggctcaaaaacggcggtccttcatcaggtgcacctccgccgtcg

SEQ ID NO: 45465 - DNA, 189 bp, Artificial Sequence
  derived and/or modified sequence
atgccctcaagcgtatcctgggggattttactattggctggtctgtgctgtctggtgccggtatctttggcgcatggtgaagggacgtttacgtcagatttgagcaaacagatggaggaggaggcggtccgtttatttattgagtggcttaaaaatggcgggcccagttctggagctcctccaccctca

SEQ ID NO: 45466 - DNA, 189 bp, Artificial Sequence
  derived and/or modified sequence
atgccaagtagtgtctcctggggtattttgctgcttgcagggctatgttgtcttgttcccgtaagtctcgcccatggagaaggcacttttacttcagacctgagtaaacaaatggaagaggaagccgttcgcctgttcatcgaatggctgaagaacgggggcccgtctagcggagcgcccccgcccagc

SEQ ID NO: 45467 - DNA, 189 bp, Artificial Sequence
  derived and/or modified sequence
atgccgtcgagcgtgagctggggtatccttcttttggccggattgtgctgccttgtgccagtgtcgctggcacacggtgagggcacttttacctcagatctttccaagcagatggaagaagaagcggtgcgcctgtttattgaatggctgaagaatggcggtccttcgtccggagcacctcccccttcg

SEQ ID NO: 45468 - DNA, 189 bp, Artificial Sequence
  derived and/or modified sequence
atgccctcgtccgtcagctggggaattcttctgctggcaggcctctgttgtctcgtccctgtgagcctggcccacggcgaaggaacgttcacttccgatctttccaaacaaatggaagaagaagcagtgagactgtttatagagtggcttaagaatggagggcctagtagcggagcaccacctccgtcc

SEQ ID NO: 45469 - DNA, 189 bp, Artificial Sequence
  derived and/or modified sequence
atgccaagcagcgtgtcatggggaatccttctgttggcaggactctgttgtcttgtgcctgtctcgcttgcacacggcgaagggacttttacctctgatctttcgaaacaaatggaggaggaggcggtccgactctttatcgagtggctgaagaatgggggaccatcatccggtgctcctccccctagc

SEQ ID NO: 45470 - DNA, 189 bp, Artificial Sequence
  derived and/or modified sequence
atgccaagcagcgtgtcatggggcatcctcctgctggccggactctgttgtctggtacccgtgagcctcgcacatggcgagggaactttcaccagcgatctgtcaaagcaaatggaagaggaagcagtccgcttgttcatcgagtggctgaagaacggaggaccttcatctggtgccccgccacccagc

SEQ ID NO: 45471 - DNA, 192 bp, Artificial Sequence
  derived and/or modified sequence
atgcccagcagcgtgagctggggcatcctgctgctggccggcctgtgctgcctggtgcccgtgagcctggcccacggcgagggcaccttcaccagcgacctgagcaagcagatggaggaggaggccgtgagactgttcatcgagtggctgaagaacggcggccccagcagcggcgcccccccccccagctag

SEQ ID NO: 45472 - DNA, 189 bp, Artificial Sequence
  derived and/or modified sequence
atgccatcttcagtatcatggggtattcttcttttagctggtttatgttgtttagtaccagttagtttagcacatggagaaggtacatttacaagtgatttatcaaaacaaatggaagaagaagccgtaagacttttcattgaatggttaaaaaatggaggtcctagttccggagcaccaccacctagt

SEQ ID NO: 45473 - DNA, 189 bp, Artificial Sequence
  derived and/or modified sequence
atgccttcctccgtgtcgtggggtatactccttcttgctgggctgtgctgtttggtgccagtgtcgctggctcatggagagggcacttttaccagcgatctgtcaaagcaaatggaggaagaagcagttagactgttcatcgaatggcttaagaacggtggcccttccagtggtgcccctcccccttcg

SEQ ID NO: 45474 - DNA, 189 bp, Artificial Sequence
  derived and/or modified sequence
atgccatctagtgtgtcttggggaattctattacttgccggactctgttgccttgtcccagtcagcttggctcatggagagggaacctttacatctgatttgtcgaaacagatggaagaagaagcagtaagattatttatagagtggcttaaaaacggaggaccatcgtccggtgccccgcctccgtcc

SEQ ID NO: 45475 - DNA, 189 bp, Artificial Sequence
  derived and/or modified sequence
atgccttcctcggttagctgggggatcctcttgcttgctgggctttgctgcctggtgcccgtcagtttggcgcacggagagggtacctttacatctgatctgagcaagcagatggaagaggaggccgtacggttgttcatcgaatggctaaagaacggagggccatcttccggagccccaccccctagt

SEQ ID NO: 45476 - DNA, 189 bp, Artificial Sequence
  derived and/or modified sequence
atgccatcgagcgtatcttggggtattctgctgctcgccggtttgtgctgcctcgtccctgtgagtctggcccacggagagggtacgttcacttcggacctatcgaagcagatggaggaggaggcggttcgcctcttcatcgagtggcttaagaacggcggcccgtcgtccggagctcccccgccgtcg

SEQ ID NO: 45477 - DNA, 189 bp, Artificial Sequence
  derived and/or modified sequence
atgccctcatccgtgtcgtggggaatacttctcctggcgggcctttgctgtcttgtccctgtgtcgcttgcacatggggaaggaacgtttacttcggacctttccaagcaaatggaagaagaggcagtgagacttttcattgaatggttgaagaacggaggaccatcaagcggggcacctcctcccagc

SEQ ID NO: 45478 - DNA, 189 bp, Artificial Sequence
  derived and/or modified sequence
atgccctcatccgtatcctggggcatcctcctgcttgccgggttgtgctgtctggtgccagtgagcctcgcacacggtgaaggtaccttcacaagtgacctgagtaaacagatggaagaagaggcagttcgactctttatcgaatggcttaagaatggaggcccctccagcggtgctcctcctccctca

SEQ ID NO: 45479 - DNA, 189 bp, Artificial Sequence
  derived and/or modified sequence
atgccctcttccgtctcctggggtatactgctcctggcaggattgtgttgcttggtgcctgtcagcctggcgcacggtgaaggcacttttacttcggatctttccaagcaaatggaagaggaagcagtgagactcttcattgagtggcttaagaacggagggccatcgtcaggggcgcctccacctagc

SEQ ID NO: 45480 - DNA, 189 bp, Artificial Sequence
  derived and/or modified sequence
atgccatcatccgtttcatggggaatacttcttcttgctgggctatgctgtcttgtccccgtgtcactagctcatggagaagggacgttcacatcagatttgtcaaaacaaatggaggaggaagcagtccgacttttcatcgagtggctgaaaaatggggggcctagttctggtgcgcctccaccaagc

SEQ ID NO: 45481 - DNA, 189 bp, Artificial Sequence
  derived and/or modified sequence
atgccatccagcgtgtcctgggggatccttttgctggctggcctgtgttgtctagttcccgttagcctggcccacggcgaaggcacctttacgagcgatctgtccaaacagatggaagaggaggccgtgcgcctgttcatcgaatggctcaagaatggcggaccttcgtccggcgccccaccgccctcc

SEQ ID NO: 45482 - DNA, 189 bp, Artificial Sequence
  derived and/or modified sequence
atgccttcttccgtctcctgggggatcctcctgctcgccgggctctgttgcctggttcccgtctctctcgctcatggagaggggactttcacaagtgatctctcaaaacagatggaagaagaagcagtaagactatttattgaatggctaaaaaacggagggccatcttctggagcacctcctccatcc

SEQ ID NO: 45483 - DNA, 189 bp, Artificial Sequence
  derived and/or modified sequence
atgccgtcaagcgtgtcctgggggatcctgctgctggcgggcctctgttgcctggtgccagtgtcccttgcacacggcgaaggaactttcacctcagacttgtcgaaacagatggaagaggaagctgtccgcctgtttatcgagtggctcaagaacggtggacctagctcgggagccccgccgccctcg

SEQ ID NO: 45484 - DNA, 189 bp, Artificial Sequence
  derived and/or modified sequence
atgccttcaagcgtgtcatgggggatcctcctgctcgccggcttgtgttgtcttgttccagtgtcgctggcgcatggcgaaggaacctttacatctgacttatctaagcagatggaggaggaagccgtccggctgtttatagagtggttgaaaaatgggggcccttcctccggtgcccctccaccaagt

SEQ ID NO: 45485 - DNA, 189 bp, Artificial Sequence
  derived and/or modified sequence
atgccatctagcgtgtcttggggtattctcttgctggcgggcctgtgttgcctcgtgcccgtatctctggcgcacggcgagggaacattcacctccgacttgtccaaacagatggaagaggaggctgtgcggctgttcatcgaatggctgaagaatggcggtcctagcagcggggctccacctcccagt

SEQ ID NO: 45486 - DNA, 189 bp, Artificial Sequence
  derived and/or modified sequence
atgccctccagcgtctcctggggaatcctgttgctcgcagggctgtgctgcctcgtcccggtgtccctggctcacggcgagggaacttttaccagcgatctctccaaacagatggaggaggaagctgtgcggctctttatcgaatggctgaagaatgggggtccttccagtggagctcctccccccagt

SEQ ID NO: 45487 - DNA, 189 bp, Artificial Sequence
  derived and/or modified sequence
atgcccagttccgtgagttggggaatacttctgctcgctgggttgtgctgtctagtgcctgtgtctcttgcccatggggaagggacatttacttccgatctaagtaaacagatggaggaagaggccgtcagactatttattgaatggctgaagaacggagggcccagttccggggcgcctccaccatcc

SEQ ID NO: 45488 - DNA, 189 bp, Artificial Sequence
  derived and/or modified sequence
atgccaagcagcgtatcatggggtattctacttctagccggtctctgctgtctggtcccagtctcacttgcgcacggggaagggacttttacatcagatctgagtaaacaaatggaagaggaagctgttcgactgtttattgagtggctgaagaacggggggccgagtagcggcgcccccccgccctct

SEQ ID NO: 45489 - DNA, 189 bp, Artificial Sequence
  derived and/or modified sequence
atgccatcgtcagtgtcatggggtatcctgttgcttgccggactttgttgccttgtcccggttagcctggcgcatggggaggggacttttacctccgatctgagcaagcaaatggaggaagaagctgtgaggctcttcattgaatggcttaagaacggtggcccgtcgtctggcgcccctccacccagc

SEQ ID NO: 45490 - DNA, 189 bp, Artificial Sequence
  derived and/or modified sequence
atgccttcaagtgtgtcctggggcattcttcttcttgcaggactgtgttgtctcgtcccagtgtccttggctcacggcgaggggaccttcacgtctgacctgtcgaagcagatggaggaggaagccgtgagactgttcattgagtggctgaaaaatggaggtccaagtagcggagctcctccaccgagt

SEQ ID NO: 45491 - DNA, 189 bp, Artificial Sequence
  derived and/or modified sequence
atgccgtcgtccgtgtcatggggaatcctgctcctggcaggcctgtgctgcctggtccctgtctctctggcgcacggagaaggaactttcacctctgacttgtcgaagcagatggaagaagaagccgttagacttttcattgaatggctgaagaacggagggccatcgagcggggcgccgcccccgtcc

SEQ ID NO: 45492 - DNA, 189 bp, Artificial Sequence
  derived and/or modified sequence
atgccgtcatcggtgtcatgggggatcttgctgttggcagggctttgttgcctcgtgcctgtgtcgcttgcccatggcgaaggaacttttaccagtgatttgtccaagcagatggaggaagaggcagtgcgccttttcattgaatggctgaaaaatgggggacccagctccggtgcgcctcctccttcg

SEQ ID NO: 45493 - DNA, 189 bp, Artificial Sequence
  derived and/or modified sequence
atgccaagctccgtgtcatggggaattctccttctcgccggcctgtgctgcctggtccccgtctccctggcgcacggagaaggaactttcacttctgacctgtcgaaacagatggaggaggaggctgtgcgcctgttcatcgaatggctcaagaatggagggcccagctcgggcgccccaccgccatcg

SEQ ID NO: 45494 - DNA, 189 bp, Artificial Sequence
  derived and/or modified sequence
atgccttcgtctgtctcctggggtatcctcctcttggcggggctgtgctgcctggtgccagtgtcacttgcccacggagagggcaccttcacttccgacctcagcaagcagatggaagaggaggccgtgcgcctgtttatcgaatggttgaaaaacggcggtccgagctcgggggcaccgcctccctcc

SEQ ID NO: 45495 - DNA, 189 bp, Artificial Sequence
  derived and/or modified sequence
atgccgtccagcgtgagttgggggatcttgctcctcgcgggcctgtgctgcctggtccctgtgtcgctggcccacggagaggggaccttcacctccgacttgtcgaagcagatggaggaggaagccgtgagactgtttattgaatggctgaaaaacggtggaccttcatcaggcgcacctcccccatcg

SEQ ID NO: 45496 - DNA, 189 bp, Artificial Sequence
  derived and/or modified sequence
atgccctcttccgtctcgtggggcatcctcctgctggcaggactctgctgccttgtcccggtgagccttgctcacggggagggcactttcacctcggatctttcaaagcagatggaggaagaagcagtgaggctgtttatcgagtggttgaagaacggagggccatcaagcggagccccacccccgagc

SEQ ID NO: 45497 - DNA, 189 bp, Artificial Sequence
  derived and/or modified sequence
atgccatctagtgttagttggggaatccttcttctggccggcctgtgctgccttgtcccggtgagtctggcacatggtgaaggaacctttacttcggacctatccaagcagatggaggaagaagctgtgcgactgtttatagagtggctgaaaaatggcggcccgtcgagtggcgcacctccgccatct

SEQ ID NO: 45498 - DNA, 189 bp, Artificial Sequence
  derived and/or modified sequence
atgcccagcagcgtctcgtggggaatcctgttgctggccggcctgtgttgcctcgtgcctgtgtcccttgcacatggtgagggaacttttaccagcgatcttagtaagcagatggaagaggaagcagtcagacttttcattgaatggctcaaaaacggcggaccatcgtctggggctccgcctccttca

SEQ ID NO: 45499 - DNA, 189 bp, Artificial Sequence
  derived and/or modified sequence
atgccttcctcagtttcttggggcatacttctgctggctggtctgtgctgtctcgtccccgtgtcgcttgctcatggtgagggaacctttaccagcgacctcagcaaacagatggaggaggaagcggtcagactatttattgaatggcttaaaaacggaggacccagctccggtgctccaccccccagc

SEQ ID NO: 45500 - DNA, 189 bp, Artificial Sequence
  derived and/or modified sequence
atgccatcttcggtgtcctggggaattctgttgctggcaggattgtgctgtctggtgccagtctcactggcgcacggggaggggacttttacctcggatctttcgaagcagatggaagaagaggccgtccggctctttatcgaatggctcaagaatggaggaccgtcctcgggagccccacctccttcg

SEQ ID NO: 45501 - DNA, 189 bp, Artificial Sequence
  derived and/or modified sequence
atgccgtctagtgtgagctggggaatactgctgctggctggtctttgctgcctcgtgcccgtgtccttggcccacggggaagggaccttcactagcgacctgtcaaagcaaatggaggaagaggccgtgaggttgtttatagaatggctcaagaacggcggccccagtagcggcgccccacctccaagc

SEQ ID NO: 45502 - DNA, 189 bp, Artificial Sequence
  derived and/or modified sequence
atgcccagctcggtgagttggggtatcttgctgctcgcgggattgtgttgccttgtgcccgtctcactcgcccacggtgaagggactttcacctcggatctgtcaaagcagatggaggaagaggcagtgcggctgttcatcgaatggctgaagaacggaggaccgagtagcggcgcccctcctccgtca

SEQ ID NO: 45503 - DNA, 189 bp, Artificial Sequence
  derived and/or modified sequence
atgcccagtagtgtgtcctggggaatcttgctccttgctggattgtgctgcctggtgcccgtgagcttagctcatggagaaggtaccttcacgagtgatctgagtaagcagatggaagaagaggccgtgcgcttgtttattgagtggctgaagaatggcggcccgtcaagtggggcacccccaccttcc

SEQ ID NO: 45504 - DNA, 189 bp, Artificial Sequence
  derived and/or modified sequence
atgccgtcgtcggtgagctggggcatcctgctcctcgcaggattgtgctgcctcgtgccggtgagcttggcccatggggaaggaacctttacctcggatctctccaagcaaatggaggaagaagccgtgcggctgttcattgaatggctcaagaatggcggaccatcctccggcgccccaccaccgtcc

SEQ ID NO: 45505 - DNA, 189 bp, Artificial Sequence
  derived and/or modified sequence
atgccgtcctcggtgtcgtggggcatccttttgctcgccggactgtgctgtctcgtgccggtgtccctggcccacggagagggaacctttaccagcgacctgtccaaacagatggaagaagaggcagttcgcttgttcatcgagtggctgaaaaatggcgggcccagctcgggagcaccgccaccatca

SEQ ID NO: 45506 - DNA, 189 bp, Artificial Sequence
  derived and/or modified sequence
atgccctcgtctgtttcatgggggatcctcctcctggccggactttgctgtctggtccctgtgtccctggcccacggcgaaggtactttcacgtcggacctcagcaagcagatggaagaagaggcggtgaggctgttcatcgagtggctcaagaacggcggaccgtcatcaggcgcaccgccgccaagc

SEQ ID NO: 45507 - DNA, 189 bp, Artificial Sequence
  derived and/or modified sequence
atgccgtcctccgtgagctggggaatccttcttcttgcaggactgtgctgtctggtccccgtcagccttgcccacggagagggaactttcaccagcgacctgtcaaaacagatggaggaagaagcagtgcgcctcttcatcgaatggctcaagaacggcggcccgtcctcaggcgcccctccgccatcc

SEQ ID NO: 45508 - DNA, 189 bp, Artificial Sequence
  derived and/or modified sequence
atgccgtcaagcgtatcctggggaatccttctgcttgccggactgtgttgcttggtcccggtgtccctcgcgcacggcgaaggaactttcacctcggacctcagcaagcagatggaggaggaagctgtgagactctttatcgaatggctgaaaaacggtggcccctcctcgggtgcaccaccgccaagc

SEQ ID NO: 45509 - DNA, 189 bp, Artificial Sequence
  derived and/or modified sequence
atgccttcttccgtgagctgggggattctgctgcttgccgggttgtgttgtctggtcccagtctccctggcacatggcgaagggacatttacttcagatctcagcaaacagatggaagaagaagctgtgcgcctgtttattgagtggctcaagaatggcggccccagctctggggcacctccaccgtca

SEQ ID NO: 45510 - DNA, 189 bp, Artificial Sequence
  derived and/or modified sequence
atgccatcctcggtgtcatggggcatcctgctgctcgcaggactgtgctgtttggtgcctgtatccctcgcgcacggagaggggactttcacctcggacctgagcaaacagatggaggaagaagccgtccgcctctttatcgaatggcttaagaacggaggtccgagctccggcgcaccccctccgtcc

SEQ ID NO: 45511 - DNA, 189 bp, Artificial Sequence
  derived and/or modified sequence
atgccatccagcgtcagctggggcatcttgttgctcgccggcctttgttgtctagtcccagtctcactagcccacggcgagggcacttttacctctgacctgtctaaacagatggaagaggaagccgtacgcctgttcatcgaatggttaaagaatggcggacccagttcaggtgccccgcctccaagt

SEQ ID NO: 45512 - DNA, 189 bp, Artificial Sequence
  derived and/or modified sequence
atgccatcctccgtgtcatggggtattctgctcttggccggactgtgttgcttggttcctgtgtcccttgcacatggagaaggaaccttcactagcgatctctcgaaacaaatggaggaagaagcagtccgactgtttatcgagtggcttaagaacggtgggccatcgtctggagctccgcccccttca

SEQ ID NO: 45513 - DNA, 189 bp, Artificial Sequence
  derived and/or modified sequence
atgccctcgtcggtgagctggggcatcctgctgcttgcgggtctttgttgtttggtccctgtgtccctggcccacggtgaaggaaccttcaccagtgacctgtcaaagcaaatggaagaggaggcagtccgcctctttattgaatggctgaagaatggtggaccaagcagcggcgcgccacctccttcg

SEQ ID NO: 45514 - DNA, 189 bp, Artificial Sequence
  derived and/or modified sequence
atgccgtccagtgtgagctggggcatattgcttcttgccggtctgtgctgcctcgtacccgtgagtctggcccacggcgagggtacttttactagtgatctgtccaagcagatggaagaagaggccgtgcgtttgtttatcgaatggctgaagaacggcggcccctcctcaggggctcccccccctagt

SEQ ID NO: 45515 - DNA, 189 bp, Artificial Sequence
  derived and/or modified sequence
atgccttcgtccgtgtcgtgggggatcctgctccttgcaggtctttgttgccttgtgcctgtttcacttgcgcacggtgaaggcacttttacctccgacctttcgaagcaaatggaggaggaagcagtgagattgttcatcgaatggctcaaaaacggtgggcccagctcgggagcacctccaccatca

SEQ ID NO: 45516 - DNA, 189 bp, Artificial Sequence
  derived and/or modified sequence
atgccatcctcagtgtcatggggtatcctgttgttggctggactttgttgtctcgtgcccgtgagtctggcccacggcgagggcaccttcaccagtgacctgagtaagcagatggaagaggaagcagttaggctgttcatcgagtggttgaagaacggaggtccatctagtggtgcccctcctccctca

SEQ ID NO: 45517 - DNA, 189 bp, Artificial Sequence
  derived and/or modified sequence
atgccttcaagcgttagctgggggatcttattactggccggcctgtgctgtctggtgcccgtgagtctcgcccacggagagggaacattcactagcgacctcagtaagcagatggaagaggaggcagtgagactctttattgagtggcttaagaatggtggtccttcctccggcgcgcccccaccatca

SEQ ID NO: 45518 - DNA, 189 bp, Artificial Sequence
  derived and/or modified sequence
atgcctagctccgtctcatggggaattctgcttctcgcgggtctttgctgcctggtgcctgtgagcctggcccatggcgaggggactttcacttcggacctctccaagcaaatggaggaagaagccgtgcgcctcttcatcgagtggctgaagaacggtggcccttcgtccggagccccgcctccgtct

SEQ ID NO: 45519 - DNA, 189 bp, Artificial Sequence
  derived and/or modified sequence
atgccgtcctcggtgtcgtggggaatcctgctgctggccggactctgctgcctcgtgccagtgtcattggcacacggggaaggaacctttacctcagatctgtccaagcaaatggaggaagaagctgtccgcctcttcatcgagtggctgaagaatggtggcccatcctctggtgcgccgcccccgtcc

SEQ ID NO: 45520 - DNA, 189 bp, Artificial Sequence
  derived and/or modified sequence
atgccatcttcagtcagctgggggattctcctcctggccggactttgttgccttgtgcctgtgtcccttgcacatggtgaagggacctttacttccgatcttagtaaacaaatggaagaagaggctgtgcggctcttcatcgaatggcttaagaacggaggtcccagcagtggcgcgccgcctccttca

SEQ ID NO: 45521 - DNA, 189 bp, Artificial Sequence
  derived and/or modified sequence
atgcctagctcagtttcatgggggatactgctgctcgccggattgtgctgcctggtcccagtcagtcttgcacacggggaagggacttttacctctgacctttcaaagcaaatggaagaggaagccgtacgactattcatcgagtggttgaaaaatgggggtccctccagcggcgctcctccaccctcc

SEQ ID NO: 45522 - DNA, 189 bp, Artificial Sequence
  derived and/or modified sequence
atgccatcctctgtaagttggggaatcctgctgctggcagggctgtgttgcctggtgccagtctctctcgcgcacggcgagggaactttcacaagtgacctctccaaacagatggaggaggaagccgtgcgtctgttcattgagtggctcaaaaacggaggtccttcctccggtgcccctcctccatcc

SEQ ID NO: 45523 - DNA, 189 bp, Artificial Sequence
  derived and/or modified sequence
atgccatcatccgtgtcatggggaatacttctgttggctggtctgtgctgtctagtccctgtgtcactcgcccatggcgagggcacctttacctctgacctgtcaaaacagatggaagaggaggcagtacgcttgttcattgagtggctgaagaacggtggaccctcaagcggcgcacccccaccatct

SEQ ID NO: 45524 - DNA, 189 bp, Artificial Sequence
  derived and/or modified sequence
atgccatcttcggtgtcgtgggggatactcctcctcgcaggcctctgctgcctagtccctgtgtccctggcccatggtgagggcacattcactagcgatctgagtaagcagatggaagaggaggctgtgcgcctgttcattgagtggctgaagaacggcggtcctagcagcggcgccccgcctccctca

SEQ ID NO: 45525 - DNA, 189 bp, Artificial Sequence
  derived and/or modified sequence
atgccttcttcagtctcttggggaattctcttgttggctggcctgtgctgtctggtacctgtctctttagcccacggggaaggaacttttactagcgatctctccaagcagatggaggaggaggctgtgagactgttcatcgagtggctcaaaaacggtgggccaagcagtggcgccccccctccctct

SEQ ID NO: 45526 - DNA, 189 bp, Artificial Sequence
  derived and/or modified sequence
atgccctcttctgttagctggggaattcttcttctggcaggcctctgttgtctcgttcccgtgtcactggctcatggtgaggggacatttacctcagatctaagcaaacagatggaagaagaggcagtgagactgtttatagaatggctgaaaaacgggggacctagctccggggcccctcccccttct

SEQ ID NO: 45527 - DNA, 189 bp, Artificial Sequence
  derived and/or modified sequence
atgccgagctctgtatcttgggggatattactactggcaggactatgttgcctggttcctgtgtccctcgcccatggtgagggaaccttcactagtgatctgtctaagcaaatggaggaagaggccgtcagattgtttatcgagtggctgaaaaatgggggcccgtcgagcggggcccctcctcccagt

SEQ ID NO: 45528 - DNA, 189 bp, Artificial Sequence
  derived and/or modified sequence
atgccttcgtctgtttcctggggtatattgctgctggctgggctatgctgcttagttcctgtgtcccttgcccacggagaaggaacgtttacatcagacttgtctaaacagatggaggaggaagccgttagactgtttatcgagtggttgaaaaacggcggtccatcatctggggcaccaccccccagc

SEQ ID NO: 45529 - DNA, 189 bp, Artificial Sequence
  derived and/or modified sequence
atgccttccagcgtttcctgggggattctgctgctcgccgggctgtgttgtcttgttcctgtgtccttggctcacggcgaggggaccttcacttctgacctctcgaagcagatggaggaagaggccgtcaggctgttcattgagtggctcaaaaacggtggccccagctcaggggctcctccaccgtct

SEQ ID NO: 45530 - DNA, 189 bp, Artificial Sequence
  derived and/or modified sequence
atgcctagcagcgtgtcctggggaatcttgctactggccggcctgtgttgtctggtccctgtttccctagctcatggggagggcaccttcacctccgacctttctaagcaaatggaggaggaggctgttaggttgtttatcgagtggctaaaaaatgggggcccttcaagtggcgcaccacctccttcc

SEQ ID NO: 45531 - DNA, 189 bp, Artificial Sequence
  derived and/or modified sequence
atgccctccagcgtctcctggggcattctcctcctggctggattgtgctgcctggtcccggtttcacttgcacatggagaaggaaccttcactagcgacctgtcgaagcagatggaggaggaggcagtgagactcttcatcgaatggctgaaaaacggaggtccttcgtcgggagccccaccgccgtcg

SEQ ID NO: 45532 - DNA, 189 bp, Artificial Sequence
  derived and/or modified sequence
atgccatcatcagttagctggggcatcctcctgctggccgggttgtgttgtcttgtgcctgtgtccctcgcgcacggggagggcacatttaccagcgacttaagcaagcaaatggaggaggaggctgtgaggctgtttatcgagtggttgaaaaacggagggccgtcatcaggggcacccccaccctca

SEQ ID NO: 45533 - DNA, 189 bp, Artificial Sequence
  derived and/or modified sequence
atgccatcgtccgtgtcatgggggatcctgctcttggcgggactgtgttgtttggtgccagtcagccttgcacacggagagggcaccttcactagtgatctgtcaaaacaaatggaggaagaggccgtgcggctgtttatcgaatggctcaaaaacggcggaccctcctccggggcacctcctccgagc

SEQ ID NO: 45534 - DNA, 189 bp, Artificial Sequence
  derived and/or modified sequence
atgccctccagtgtgtcatgggggattctgttgctggctgggctttgctgtctggtgcccgtgagcctggcacacggagagggtacctttacgtccgacttgtccaaacagatggaggaggaggcagttagactctttattgagtggttgaagaatggcggcccttccagcggagctcctcccccatcc

SEQ ID NO: 45535 - DNA, 335 bp, Artificial Sequence
  derived and/or modified sequence
gggaaataagagagaaaagaagagtaagaagaaatataagagccaccatgccctcgagcgtgtcgtgggggattctgctccttgcgggactttgctgtctcgtaccggtgtccctcgcccacggagagggaacgtttacatcggacctgtcaaagcagatggaagaggaagcggtccggttgttcatcgagtggttgaaaaacgggggtcccagctccggcgcaccaccgccttcatgataagctgccttctgcggggcttgccttctggccatgcccttcttctctcccttgcacctgtacctcttggtctttgaataaagcctgagtaggaag

SEQ ID NO: 45536 - DNA, 1257 bp, Artificial Sequence
  derived and/or modified sequence
atgcccagcagcgtgagctggggcatcctgctgctggccggcctgtgctgcctggtgcccgtgagcctggccgaggacccccagggcgacgccgcccagaagaccgacaccagccaccacgaccaggaccaccccaccttcaacaagatcacccccaacctggccgagttcgccttcagcctgtacagacagctggcccaccagagcaacagcaccaacatcttcttcagccccgtgagcatcgccaccgccttcgccatgctgagcctgggcaccaaggccgacacccacgacgagatcctggagggcctgaacttcaacctgaccgagatccccgaggcccagatccacgagggcttccaggagctgctgagaaccctgaaccagcccgacagccagctgcagctgaccaccggcaacggcctgttcctgagcgagggcctgaagctggtggacaagttcctggaggacgtgaagaagctgtaccacagcgaggccttcaccgtgaacttcggcgacaccgaggaggccaagaagcagatcaacgactacgtggagaagggcacccagggcaagatcgtggacctggtgaaggagctggacagagacaccgtgttcgccctggtgaactacatcttcttcaagggcaagtgggagagacccttcgaggtgaaggacaccgaggaggaggacttccacgtggaccaggtgaccaccgtgaaggtgcccatgatgaagagactgggcatgttcaacatccagcactgcaagaagctgagcagctgggtgctgctgatgaagtacctgggcaacgccaccgccatcttcttcctgcccgacgagggcaagctgcagcacctggagaacgagctgacccacgacatcatcaccaagttcctggagaacgaggacagaagaagcgccagcctgcacctgcccaagctgagcatcaccggcacctacgacctgaagagcgtgctgggccagctgggcatcaccaaggtgttcagcaacggcgccgacctgagcggcgtgaccgaggaggcccccctgaagctgagcaaggccgtgcacaaggccgtgctgaccatcgacgagaagggcaccgaggccgccggcgccatgttcctggaggccatccccatgagcatcccccccgaggtgaagttcaacaagcccttcgtgttcctgatgatcgagcagaacaccaagagccccctgttcatgggcaaggtggtgaaccccacccagaagtag

SEQ ID NO: 45537 - DNA, 1080 bp, Artificial Sequence
  derived and/or modified sequence
atgcccagcagcgtgagctggggcatcctgctgctggccggcctgtgctgcctggtgcccgtgagcctggccgaggacccccagggcgacgccgcccagaagaccgacaccagccaccacgaccaggaccaccccaccttcaacaagatcacccccaacctggccgagttcgccttcagcctgtacagacagctggcccaccagagcaacagcaccaacatcttcttcagccccgtgagcatcgccaccgccttcgccatgctgagcctgggcaccaaggccgacacccacgacgagatcctggagggcctgaacttcaacctgaccgagatccccgaggcccagatccacgagggcttccaggagctgctgagaaccctgaaccagcccgacagccagctgcagctgaccaccggcaacggcctgttcctgagcgagggcctgaagctggtggacaagttcctggaggacgtgaagaagctgtaccacagcgaggccttcaccgtgaacttcggcgacaccgaggaggccaagaagcagatcaacgactacgtggagaagggcacccagggcaagatcgtggacctggtgaaggagctggacagagacaccgtgttcgccctggtgaactacatcttcttcaagggcaagtgggagagacccttcgaggtgaaggacaccgaggaggaggacttccacgtggaccaggtgaccaccgtgaaggtgcccatgatgaagagactgggcatgttcaacatccagcactgcaagaagctgagcagctgggtgctgctgatgaagtacctgggcaacgccaccgccatcttcttcctgcccgacgagggcaagctgcagcacctggagaacgagctgacccacgacatcatcaccaagttcctggagaacgaggacagaagaagcgccagcctgcacctgcccaagctgagcatcaccggcacctacgacctgaagagcgtgctgggccagctgggcatcaccaaggtgttcagcaacggcgccgacctgagcggcgtgaccgaggaggcccccctgaagctgagcaaggtgagaagcccctag

SEQ ID NO: 45538 - DNA, 279 bp, Artificial Sequence
  derived and/or modified sequence
atgcccagcagcgtgagctggggcatcctgctgctggccggcctgtgctgcctggtgcccgtgagcctggccgaggacccccagggcgacgccgcccagaagaccgacaccagccaccacgaccaggaccaccccaccttcaacaagatcacccccaacctggccgagttcgccttcagcctgtacagacagctggcccaccagagcaacagcaccaacatcttcttcagccccgtgagcatcgccaccgccttcgccatgctgagcctgggcacctag

SEQ ID NO: 45539 - DNA, 471 bp, Artificial Sequence
  derived and/or modified sequence
atgcccagcagcgtgagctggggcatcctgctgctggccggcctgtgctgcctggtgcccgtgagcctggccgaggacccccagggcgacgccgcccagaagaccgacaccagccaccacgaccaggaccaccccaccttcaacaagatcacccccaacctggccgagttcgccttcagcctgtacagacagctggcccaccagagcaacagcaccaacatcttcttcagccccgtgagcatcgccaccgccttcgccatgctgagcctgggcaccaaggccgacacccacgacgagatcctggagggcctgaacttcaacctgaccgagatccccgaggcccagatccacgagggcttccaggagctgctgagaaccctgaaccagcccgacagccagctgcagctgaccaccggcaacggcctgttcctgagcgagggcctgaagctggtggacaagttcctggagtag

SEQ ID NO: 45540 - DNA, 354 bp, Artificial Sequence
  derived and/or modified sequence
atgcccagcagcgtgagctggggcatcctgctgctggccggcctgtgctgcctggtgcccgtgagcctggccgaggacccccagggcgacgccgcccagaagaccgacaccagccaccacgaccaggaccaccccaccttcaacaagatcacccccaacctggccgagttcgccttcagcctgtacagacagctggcccaccagagcaacagcaccaacatcttcttcagccccgtgagcatcgccaccgccttcgccatgctgagcctgggcaccaaggccgacacccacgacgagatcctggagggcctgaacttcaacctgaccgagatccccgaggcccagatccactag

SEQ ID NO: 45541 - DNA, 69 bp, Artificial Sequence
  derived and/or modified sequence
atgcccagcagcgtgagctggggcatcctgctgctggccggcctgtgctgcctggtgcccgtgagctag

SEQ ID NO: 45542 - DNA, 435 bp, Artificial Sequence
  derived and/or modified sequence
atgcccagcagcgtgagctggggcatcctgctgctggccggcctgtgctgcctggtgcccgtgagcctggccgaggacccccagggcgacgccgcccagaagaccgacaccagccaccacgaccaggaccaccccaccttcaacaagatcacccccaacctggccgagttcgccttcagcctgtacagacagctggcccaccagagcaacagcaccaacatcttcttcagccccgtgagcatcgccaccgccttcgccatgctgagcctgggcaccaaggccgacacccacgacgagatcctggagggcctgaacttcaacctgaccgagatccccgaggcccagatccacgagggcttccaggagctgctgagaaccctgaaccagcccgacagccagctgcagctgaccaccggcaacggcctgttcctgtag

SEQ ID NO: 45543 - DNA, 192 bp, Artificial Sequence
  derived and/or modified sequence
atgccatcttcagtgtcctggggcattctgctgcttgctggactgtgctgccttgtacctgtctccctcgcccatggcgaggggactttcacatctgatctgagtaagcagatggaggaagaagcagtcaggctattcatcgagtggttgaaaaacggggggcccagttccggcgctccgcccccttcctag

SEQ ID NO: 45544 - DNA, 1257 bp, Artificial Sequence
  derived and/or modified sequence
atgccaagctctgtgtcttggggaatcctgctgctggctggactgtgctgtcttgtgccagtcagtcttgctgaagatcctcagggagatgctgctcagaagactgataccagtcaccacgatcaggatcatccaacttttaacaagataacccccaatttggccgaatttgctttttctctgtacagacagcttgcgcaccagtcaaatagtacaaacattttctttagcccggtatccatcgctaccgccttcgctatgctttctcttggaacgaaggcagacacgcatgatgagatcctggaggggttaaactttaacctgacggaaattcctgaagcacagatacacgaggggttccaggaactgctgcgtaccctgaatcagcctgacagccagctgcagctcacaacagggaatggcctgttcctttccgaaggactgaagctggttgataagtttctggaagatgtcaaaaaactttaccattcagaggcgtttactgtgaattttggggacactgaggaggcgaaaaagcagatcaatgattacgtcgaaaaaggtacacagggcaagatcgtagacctggtcaaggagttggatcgagacactgtgtttgcccttgttaactacatattttttaaaggcaagtgggaacgcccctttgaagttaaggatacggaggaagaagattttcatgtggatcaggtgactactgtgaaagtcccaatgatgaaacgtctggggatgtttaacattcagcattgtaaaaaactctcaagctgggtgctgctgatgaagtacttggggaatgccacagccatctttttcctgcccgacgagggcaaacttcagcacctcgagaacgaattgactcacgatatcataactaaatttctcgagaatgaagaccgccggagcgctagcctccacctgcccaaattgtccattaccgggacctacgatcttaaaagcgtgttaggccaattaggaattacaaaagtgttctctaatggtgccgacctgagtggcgtgactgaggaagccccgcttaagttgtccaaggcagtgcacaaggccgtgttaaccattgacgaaaagggtactgaagctgcaggtgctatgtttcttgaggccatccctatgagcataccccccgaagtgaaatttaacaaaccgttcgtttttttgatgatcgaacagaacaccaagtctccgttgtttatgggaaaagttgtgaacccaacgcaaaagtag

SEQ ID NO: 45545 - DNA, 1257 bp, Artificial Sequence
  derived and/or modified sequence
atgccttcgtctgtgtcttggggcattctccttctggccggcctctgttgcctcgtgccagtgtcacttgccgaagatccgcagggcgatgcagctcaaaaaacagacacctcccatcatgaccaggatcacccgacgtttaacaaaataaccccgaatctagcagaatttgcattctccctgtataggcagctggcacaccagtctaactctacaaacatctttttttcgcctgtgtcgattgcaactgcctttgcgatgctaagcttgggaaccaaggctgatactcacgatgaaattctggaggggctgaatttcaacttgactgagataccggaggcccagattcatgaagggttccaagaactgcttcggactcttaaccagccagattcacaacttcaactgaccacaggaaacggcctgtttctgtcagaggggctgaagcttgtggacaaatttcttgaagatgtgaaaaagctgtaccattcagaagcattcacagtgaatttcggcgatactgaagaagcaaagaagcaaatcaatgactacgtcgagaaaggcactcagggtaaaatcgtggacctagtgaaggaattggatcgcgatacggtgtttgctctcgtgaattacatttttttcaaaggaaagtgggagcgcccctttgaagtcaaagataccgaggaggaagactttcatgtggatcaggtgacaactgtaaaggtgcccatgatgaaaaggctcggcatgttcaacatacagcactgcaagaaactgtccagctgggtgcttcttatgaagtatctcggcaacgctactgccatttttttcttgcccgatgagggcaaacttcagcatctcgaaaatgagttgactcacgatatcattaccaaatttctcgagaatgaggatcgccgcagtgcaagtctccatctccccaagctgagcattactggaacctatgatttaaagagcgtgttgggccagctggggatcacaaaagttttctcgaatggcgctgaccttagtggcgtgaccgaggaggccccactcaaacttagtaaggcggtccacaaagcagtattaactatcgacgagaaggggacagaagcggcaggcgctatgtttctggaggccataccgatgagcatcccccccgaggtgaaatttaacaaaccatttgtgttcttaatgattgagcaaaataccaagtcccccctttttatgggcaaggtggtgaatcctacccagaagtag

SEQ ID NO: 45546 - DNA, 1257 bp, Artificial Sequence
  derived and/or modified sequence
atgccaagtagtgtgtcttggggtatcctgctcttagccggcctctgctgcctcgtccctgtcagcctcgcagaggacccacaaggtgacgctgcccagaagactgacaccagtcaccacgaccaggaccacccaacattcaataagatcacaccgaatttagccgaatttgctttctccctgtatcgacagttggcccaccagtctaattccaccaacatcttctttagccccgttagtatcgccacagcatttgccatgctctcattggggacaaaagccgatacacacgacgaaatcttagagggcctcaattttaatttgaccgaaattccggaagcccagatccacgaaggcttccaagagctactgcgaacacttaatcaaccagattcccaactgcaactaacaacaggcaatgggcttttcttaagcgaaggccttaagctcgtcgataagtttctggaagacgtcaaaaagctctaccatagcgaagccttcacggttaattttggggatacagaggaagcaaagaagcagatcaatgactacgtagaaaaaggcacccaagggaagatcgtagatttggttaaggaactggaccgcgacacagtcttcgcccttgtcaactacatcttcttcaaggggaagtgggaaaggccattcgaggtgaaagacacagaagaggaggactttcacgtggaccaggtcacaaccgtgaaagtgccgatgatgaaaagattggggatgtttaatattcagcattgcaagaagctaagctcttgggtgctgcttatgaagtacctcggcaacgcaacggccatattcttcttaccagatgagggaaagctccaacatttggaaaacgaacttacccatgatataattactaagttcttggagaatgaggatagaagatctgcgtccctgcacctacctaaactctcaatcactggcacttatgatctgaaatcggtcttgggacagcttggtattacaaaggtcttctctaatggagccgatctcagtggggtaacggaggaggcaccattgaagttgagcaaggcagtgcacaaagcagtgctgactatcgatgaaaaaggcactgaagcagccggtgcaatgttcttagaggctatccccatgtctatccccccggaggtgaagtttaataagccctttgtctttctcatgatcgagcaaaatacaaaatcacccctcttcatgggcaaggtcgtcaacccgacccaaaagtag

SEQ ID NO: 45547 - DNA, 1080 bp, Artificial Sequence
  derived and/or modified sequence
atgccatcgagtgtgtcttgggggatacttctgttagcgggactttgctgcctggtgcctgtctccctggccgaagacccgcagggcgacgccgctcaaaagactgacacatcacatcacgatcaggaccaccccacattcaataaaatcactccaaatttagccgagtttgcattcagcctttataggcagttagcacaccagtcgaattccactaacatctttttcagcccggtctcaatagccacagcttttgccatgctttccctgggcactaaggctgacacccacgatgagatacttgaaggacttaacttcaatctgacagagatccctgaggctcagatccacgagggcttccaggagctgctgagaaccttgaatcagccggattcacaactgcagcttaccacaggaaatggactgtttctgagcgaggggctgaagcttgtggacaagttcctcgaggatgtgaagaagttataccacagtgaagctttcacagtgaacttcggcgacaccgaagaggcaaagaaacagattaacgattacgtagaaaagggaactcagggtaagatcgtggatctcgtgaaggagttagatcgggatacagtctttgcactcgtcaattacatattcttcaaaggcaaatgggagcggcccttcgaggtgaaggacactgaggaagaggactttcacgtcgatcaagtaaccacagtgaaagtaccaatgatgaagaggctggggatgttcaacattcagcattgcaaaaagttgagctcttgggtactcctaatgaagtatcttggaaatgcaactgcgatctttttcctaccagacgaaggcaagttacaacatctggaaaacgagttaacgcatgacatcattacaaaatttctggagaacgaggaccgaaggagcgcctcgctgcatctcccgaaattgagcataaccggaacctacgatctaaaaagcgttctagggcaactgggcattacaaaggtcttttcaaacggcgctgacctgtccggagtgacagaagaggctcctttgaagttgtccaaggtaagatccccttag

SEQ ID NO: 45548 - DNA, 1257 bp, Artificial Sequence
  derived and/or modified sequence
atgccttcatcagtgagctggggcattctgctcctagccggcctctgctgcctggttcctgtgtctctggccgaggatccccagggagatgcagcccagaaaaccgatacatcacaccatgaccaggatcaccccactttcaacaagatcacacccaacctggcagagtttgcattctcgttgtaccggcagttagcgcatcaaagcaattccaccaacatcttcttcagccccgtgtccatagccacggcatttgcaatgttgagcctgggtacgaaagcggacactcatgacgagattctggaagggctgaactttaatctgacggagattcccgaggcacagattcacgagggctttcaagaactgctgcggactctaaatcagcccgatagccagctgcagctgacaaccggtaacgggcttttcctgagcgaaggcctgaagctcgtagacaagttcttggaagatgttaagaagctgtatcatagcgaggccttcactgtcaactttggggacacagaggaggctaagaagcagataaatgattacgttgaaaaaggcacccaggggaagattgttgatttggtcaaagagctagacagggacaccgtcttcgccctagtcaactatatcttctttaagggcaaatgggagcgtccattcgaggtcaaagataccgaggaggaagatttccatgtggatcaagttactaccgtcaaggttccaatgatgaaaagactaggcatgttcaacatccagcattgcaagaaactcagctcctgggtgctcctcatgaagtatctagggaatgctactgcaatattcttcctgccagatgagggaaagctgcagcacttggaaaacgagctcacacacgacattatcactaagttccttgaaaacgaggacaggcggagcgcctccctccatctgcccaagctgagcattacaggaacctatgacctgaagagcgtgttggggcagctaggtatcaccaaagtcttttctaatggcgcggatctatccggcgtcaccgaagaggcccccttgaaactgagcaaggccgtgcacaaagcagtactgacaatcgatgaaaaaggaaccgaagcagccggagctatgttcttagaagccatcccaatgagcatccctcccgaggtcaaattcaacaaaccctttgtcttcctcatgatcgagcagaatacaaaatcgcctctgtttatggggaaggttgtgaatccaactcagaagtag

SEQ ID NO: 45549 - DNA, 1257 bp, Artificial Sequence
  derived and/or modified sequence
atgccaagtagcgtttcttgggggatactccttctcgccgggctgtgctgccttgtgccggtcagcctcgccgaagatcctcaaggcgatgcggcgcagaaaaccgatactagtcatcatgatcaagatcatcctactttcaataaaatcaccccaaatctggccgaattcgccttctccctgtaccggcagctggcacatcagtctaattccactaatatcttcttttccccagtttctatcgccaccgccttcgccatgctatcattgggcaccaaggccgatacgcatgatgaaatactggaaggactgaactttaaccttacggaaattcctgaagctcagatacatgagggctttcaggagctcctcagaactttaaaccagcctgactctcagctgcagctgactactggcaatggactgttcctcagtgaaggcctgaaattagtggataagttcttggaggacgtgaaaaagctttaccacagcgaggccttcacagtgaattttggcgacactgaagaagctaaaaagcagattaatgattacgtcgagaagggaacccaggggaagattgttgaccttgtcaaggagctagacagggataccgtcttcgcattggtgaattatattttctttaaggggaagtgggagcgcccatttgaagtgaaagacactgaggaagaagattttcatgtcgaccaggtgaccaccgtgaaagtccccatgatgaaaagactggggatgttcaacattcagcactgtaaaaagctgtctagttgggttctgctcatgaaatacttaggcaacgccaccgccatttttttcttacctgacgaaggtaagctgcagcacctggaaaatgaactgactcatgatattataacgaagttcttggagaacgaggaccgacggtccgcgtcactgcatctgcccaagttgtccataacaggcacatacgacctgaagagcgtcttaggtcaactgggtattacgaaagtgttttccaacggagctgatctgtcgggtgtgaccgaggaggctccccttaagctgtctaaagcggtgcataaagccgtgctaacgattgacgagaagggaacggaagctgccggggctatgtttcttgaggccattcccatgagcatcccacccgaagttaagttcaacaaaccattcgtttttttaatgattgagcagaacactaaatcacccctctttatgggtaaggtggtcaatcccacccaaaagtag

SEQ ID NO: 45550 - DNA, 1257 bp, Artificial Sequence
  derived and/or modified sequence
atgcctagcagcgtgtcctgggggatccttctactcgccgggctttgttgtctggtcccggtgagtcttgccgaggatccccagggcgatgctgcccaaaaaactgatacctcccaccacgatcaagaccaccccacatttaataagatcacacctaatttggcagagtttgcattctcgctttatcggcagctggcccatcagtctaacagcactaacatattcttctcacctgtctcaatagccacggcctttgctatgctgtcactcggtacaaaggcggacacacacgatgaaatcctcgagggcctcaatttcaatcttaccgaaatcccggaagcccagattcatgaaggtttccaagaactgctcaggaccctcaatcagccagattcacaactgcaattgacaacaggaaatggactattcctgagtgaaggccttaaactggtcgacaagttccttgaagatgtcaaaaaactctaccatagcgaggccttcaccgtgaactttggtgacactgaggaggctaagaagcagatcaacgattatgttgagaagggaacacaggggaagattgtggatctagtgaaggagcttgaccgggacactgtcttcgcgctggtaaactacattttctttaagggcaaatgggagagaccgtttgaggtgaaagatacggaggaggaagacttccacgtggaccaggttaccactgtgaaggtgccgatgatgaagaggctggggatgttcaacatccagcactgcaagaaactatcctcttgggtccttctgatgaagtacctaggaaacgctacagcgatattttttttgcccgacgaaggtaaactgcagcatttggaaaacgagcttactcatgatatcattacaaagttcctcgagaatgaagataggcgatccgctagtctgcaccttccaaaactcagcattaccgggacctatgatctaaagtcagtcctggggcagctagggatcactaaggtcttctccaacggagcagatctgtccggcgtcaccgaggaagcgccccttaagttgagtaaggccgtgcacaaggcagttctcacgatagacgagaaagggacagaggccgcaggcgccatgttcctagaagccattcccatgtctataccccccgaggtcaaatttaacaaacccttcgtttttctgatgatcgaacaaaatacaaaaagtccgttgtttatgggcaaggtcgtgaaccccactcagaagtag

SEQ ID NO: 45551 - DNA, 1257 bp, Artificial Sequence
  derived and/or modified sequence
atgcccagttctgtgtcctggggcatcctgctgctcgctggtctgtgttgtctggtgccagtttctctggccgaagacccccagggcgacgccgcccagaagacagatacgtctcaccacgaccaggatcatcccactttcaacaaaatcactcctaacctggctgaatttgccttcagtctctatcgacaactggcgcatcaatctaactcaaccaatatctttttctcgcctgtatccatagccaccgcttttgccatgttgagtctggggaccaaagccgacactcacgacgagatactggagggcctgaatttcaacctcaccgagattcccgaggctcagatccatgaaggtttccaagagctcttaaggaccctgaatcagccagactcccagctgcagctgacaaccggaaacggattattcctgagcgagggactgaagttagtagataaattccttgaggatgtcaagaaactgtaccactccgaagcgttcaccgtcaattttggagacacagaggaggccaagaagcagatcaacgactacgtggaaaaggggacccagggcaaaatcgtcgatttggtgaaggaactcgacagggacaccgtttttgccctggtgaattatattttctttaagggaaagtgggagcggcctttcgaggtgaaggacacggaggaagaggattttcacgtggatcaggtcacaaccgtgaaggtgccaatgatgaaacgcctcggaatgttcaacatccagcattgtaaaaagctctctagctgggtgctccttatgaaatatctggggaacgctaccgcaatcttctttctgcccgacgaggggaaacttcagcacctcgagaacgagctgacgcacgacatcattactaagtttctggagaacgaagacagaagaagcgcctccctgcatttacccaagctatcgattacagggacctacgacttaaaaagcgtcctgggccagttgggaatcacgaaagttttcagcaacggtgccgacctctcaggggtgactgaagaagccccgctgaagctttccaaggcggtacacaaagcggtgctgaccattgatgaaaaaggcacggaagctgctggcgctatgttccttgaggcgattcccatgagcatcccacctgaagtcaaatttaataagcccttcgtgttcttgatgatcgaacagaacaccaagtcaccactgtttatgggaaaggtggtgaaccccactcagaaatag

SEQ ID NO: 45552 - DNA, 1257 bp, Artificial Sequence
  derived and/or modified sequence
atgccgtccagcgtctcctgggggattttattattggccggcctctgttgtctggtcccagtaagcctggcggaagacccacaaggcgacgctgctcagaagaccgatacatcacatcatgatcaggatcatccaacctttaataagatcaccccaaatctcgccgagtttgcctttagcctgtataggcagttggcacaccagtctaactccactaacatttttttttcgcccgtgtcaatcgcaaccgccttcgcgatgctcagcttaggtacaaaagcggacacgcatgatgagatccttgagggccttaacttcaatctgacggagattcctgaggcccagattcacgaagggttccaggaactacttaggacgctaaaccagcccgattcccagttacaactgacaaccggcaacggtctctttttgagtgaaggcttgaagctcgtcgataaatttttggaggacgtgaaaaagctataccattccgaggcttttactgtcaactttggcgatacagaggaggccaaaaagcagatcaatgattacgtagagaaaggcacacagggcaaaatagttgatctcgttaaagaactggaccgagatacagtgtttgcgctggtcaactacatcttcttcaaagggaagtgggaacgccctttcgaggtcaaggacaccgaagaggaggatttccatgtagatcaggtcactaccgtcaaggtgcccatgatgaagaggctcgggatgtttaacatccagcactgtaagaagctctcttcttgggtgcttctcatgaagtacctgggaaacgcaaccgctatttttttcctgcccgacgagggcaagctgcagcacttggagaatgagctgacacacgatatcattaccaagtttttggaaaatgaagaccggaggtccgcgagcctgcatctgcctaaactgtcaataacaggcacgtacgacctaaagtccgtgttgggacagctagggataacgaaggtattttccaacggggccgaccttagcggagtgaccgaagaggcccccctcaagctgtccaaggcagtgcataaggccgtactgacgatcgacgagaagggcacggaggcggcgggcgcaatgttcttggaggcaatccctatgtcaatacctcccgaggtgaagttcaacaagcccttcgtgttcctgatgatcgagcaaaacaccaaatctccactttttatgggcaaggtggtcaaccccacgcagaagtag

SEQ ID NO: 45553 - DNA, 279 bp, Artificial Sequence
  derived and/or modified sequence
atgccatctagtgtgtcttgggggatcctgctccttgccggactctgctgtctggtcccggtttccctcgccgaagacccacagggagatgcggcccagaaaacggacacgtctcaccatgaccaggatcacccaactttcaataaaataacacccaacttggctgagtttgcattttcgttgtataggcagttggcccatcagtccaacagcactaatatctttttttccccagtttctatagccacagcttttgctatgctgtccctaggtacatag

SEQ ID NO: 45554 - DNA, 471 bp, Artificial Sequence
  derived and/or modified sequence
atgccgtctagcgtctcgtgggggattcttttactggccgggttgtgctgtctggttccagtctccctggccgaagatcctcagggagacgccgcacagaaaacagacacctcccatcatgaccaagatcacccaacatttaacaagattactcccaatctcgcagaatttgcgttttccctgtataggcagctggcccatcagagtaattcaaccaatatctttttcagtccggtgagcattgctaccgccttcgcaatgttgtccctcggcaccaaggccgatacccacgacgagattcttgagggtttgaatttcaatttaaccgagattcccgaagcacagatccacgaaggctttcaagaactgctcagaaccctcaatcagcctgattctcaactccaactgactaccgggaacgggcttttcctttctgagggcctgaaactggtggacaaattcctggagtag

SEQ ID NO: 45555 - DNA, 354 bp, Artificial Sequence
  derived and/or modified sequence
atgcccagctctgtgtcttggggcatcctcttgctggccggcctgtgttgtctcgtaccagtctcgctggctgaggatcctcagggggacgccgctcagaaaacagacacaagtcaccatgatcaggatcatcccacttttaataagatcactcctaacctcgccgagttcgcattctctctctaccgccaactggcacaccagtccaacagtacgaacatctttttcagcccagtgtccatcgccaccgcttttgctatgctgtccttgggcacgaaggcggatacccacgatgagatacttgaaggcctaaacttcaatctgacagaaattcctgaggcccagatccactag

SEQ ID NO: 45556 - DNA, 69 bp, Artificial Sequence
  derived and/or modified sequence
atgccaagtagtgtgtcctggggaatcctgctgcttgctggcttgtgctgcctggtacctgtgtcttag

SEQ ID NO: 45557 - DNA, 435 bp, Artificial Sequence
  derived and/or modified sequence
atgccgagcagcgtgagctgggggatattactgctggcgggactgtgctgcctggtgcctgtatctctcgcagaggacccacagggagacgcggctcaaaagacggacacctctcaccatgaccaggaccaccccacattcaacaagatcacccctaacctggcagaatttgcttttagtttatatcgccagctcgcacatcaatctaactctaccaacatcttcttttccccagtttctattgccaccgcttttgccatgctgagcttgggaactaaagctgatacgcacgatgaaatcttggaagggcttaattttaatctgaccgagatccccgaagcacagattcatgaagggtttcaggaactgctacggacgttgaaccaaccagactcacaactgcagctgaccaccgggaacggtctgtttctctag

SEQ ID NO: 45558 - DNA, 192 bp, Artificial Sequence
  derived and/or modified sequence
atgcccagctctgtgtcctggggcatcctgctgctggccggcctgtgctgcctggtgcctgtgtccctggcccatggagagggcaccttcaccagtgacctgagcaagcagatggaggaggaggccgtgcggctcttcatcgagtggctgaagaatggaggccccagcagcggggcccccccacccagctag

SEQ ID NO: 45559 - DNA, 1257 bp, Artificial Sequence
  derived and/or modified sequence
atgcccagctctgtgtcctggggcatcctgctgctggccggcctgtgctgcctggtgcctgtgtccctggccgaggacccccagggagatgctgcccagaagacagacaccagccaccacgaccaggaccaccccaccttcaacaagatcacccccaacctggccgagtttgccttcagcctgtaccggcagctggcccaccagagcaacagcaccaacatcttcttcagccctgtgtccatcgccacagcctttgccatgctgagcctgggcaccaaggctgacacccatgatgagatcctggagggcctgaacttcaacctgacagagatccctgaggcccagatccacgagggcttccaggagctgctgcggaccctgaaccagcctgacagccagctgcagctgaccactggaaatggcctcttcctgtctgagggcctgaagctggtggacaagttcctggaggatgtgaagaagctgtaccacagcgaggccttcaccgtgaactttggagacacagaggaggccaagaagcagatcaatgactatgtggagaagggcacccagggcaagatcgtggacctggtgaaggagctggaccgggacacagtgtttgccctggtgaactacatcttcttcaagggcaagtgggagcggccctttgaggtgaaggacacagaggaggaggacttccacgtggaccaggtgaccaccgtgaaggtgcccatgatgaagaggctgggcatgttcaacatccagcactgcaagaagctgagctcctgggtgctgctgatgaagtacctgggcaatgccacagccatcttcttcctgcctgatgagggcaagctgcagcacctggagaatgagctgacccatgacatcatcaccaagttcctggagaatgaagatagaagaagtgccagcctgcacctgcccaagctgagcatcaccggcacctatgacctgaagtctgtgctgggccagctgggcatcaccaaggtgttcagcaatggagctgacctgtctggagtgacagaggaggcccccctgaagctgagcaaggctgtgcacaaggctgtgctgaccattgatgagaagggcacagaagctgctggggccatgttcctggaggccatccccatgagcatccccccagaggtgaagttcaacaagccctttgtgttcctgatgattgagcagaacaccaagagccccctcttcatgggcaaggtggtgaaccccacccagaagtag

SEQ ID NO: 45560 - DNA, 1080 bp, Artificial Sequence
  derived and/or modified sequence
atgcccagctctgtgtcctggggcatcctgctgctggccggcctgtgctgcctggtgcctgtgtccctggccgaggacccccagggagatgctgcccagaagacagacaccagccaccacgaccaggaccaccccaccttcaacaagatcacccccaacctggccgagtttgccttcagcctgtaccggcagctggcccaccagagcaacagcaccaacatcttcttcagccctgtgtccatcgccacagcctttgccatgctgagcctgggcaccaaggctgacacccatgatgagatcctggagggcctgaacttcaacctgacagagatccctgaggcccagatccacgagggcttccaggagctgctgcggaccctgaaccagcctgacagccagctgcagctgaccactggaaatggcctcttcctgtctgagggcctgaagctggtggacaagttcctggaggatgtgaagaagctgtaccacagcgaggccttcaccgtgaactttggagacacagaggaggccaagaagcagatcaatgactatgtggagaagggcacccagggcaagatcgtggacctggtgaaggagctggaccgggacacagtgtttgccctggtgaactacatcttcttcaagggcaagtgggagcggccctttgaggtgaaggacacagaggaggaggacttccacgtggaccaggtgaccaccgtgaaggtgcccatgatgaagaggctgggcatgttcaacatccagcactgcaagaagctgagctcctgggtgctgctgatgaagtacctgggcaatgccacagccatcttcttcctgcctgatgagggcaagctgcagcacctggagaatgagctgacccatgacatcatcaccaagttcctggagaatgaagatagaagaagtgccagcctgcacctgcccaagctgagcatcaccggcacctatgacctgaagtctgtgctgggccagctgggcatcaccaaggtgttcagcaatggagctgacctgtctggagtgacagaggaggcccccctgaagctgagcaaggtgcgcagcccctag

SEQ ID NO: 45561 - DNA, 279 bp, Artificial Sequence
  derived and/or modified sequence
atgcccagctctgtgtcctggggcatcctgctgctggccggcctgtgctgcctggtgcctgtgtccctggccgaggacccccagggagatgctgcccagaagacagacaccagccaccacgaccaggaccaccccaccttcaacaagatcacccccaacctggccgagtttgccttcagcctgtaccggcagctggcccaccagagcaacagcaccaacatcttcttcagccctgtgtccatcgccacagcctttgccatgctgagcctgggcacctag

SEQ ID NO: 45562 - DNA, 471 bp, Artificial Sequence
  derived and/or modified sequence
atgcccagctctgtgtcctggggcatcctgctgctggccggcctgtgctgcctggtgcctgtgtccctggccgaggacccccagggagatgctgcccagaagacagacaccagccaccacgaccaggaccaccccaccttcaacaagatcacccccaacctggccgagtttgccttcagcctgtaccggcagctggcccaccagagcaacagcaccaacatcttcttcagccctgtgtccatcgccacagcctttgccatgctgagcctgggcaccaaggctgacacccatgatgagatcctggagggcctgaacttcaacctgacagagatccctgaggcccagatccacgagggcttccaggagctgctgcggaccctgaaccagcctgacagccagctgcagctgaccactggaaatggcctcttcctgtctgagggcctgaagctggtggacaagttcctggagtag

SEQ ID NO: 45563 - DNA, 354 bp, Artificial Sequence
  derived and/or modified sequence
atgcccagctctgtgtcctggggcatcctgctgctggccggcctgtgctgcctggtgcctgtgtccctggccgaggacccccagggagatgctgcccagaagacagacaccagccaccacgaccaggaccaccccaccttcaacaagatcacccccaacctggccgagtttgccttcagcctgtaccggcagctggcccaccagagcaacagcaccaacatcttcttcagccctgtgtccatcgccacagcctttgccatgctgagcctgggcaccaaggctgacacccatgatgagatcctggagggcctgaacttcaacctgacagagatccctgaggcccagatccactag

SEQ ID NO: 45564 - DNA, 69 bp, Artificial Sequence
  derived and/or modified sequence
atgcccagctctgtgtcctggggcatcctgctgctggccggcctgtgctgcctggtgcctgtgtcctag

SEQ ID NO: 45565 - DNA, 435 bp, Artificial Sequence
  derived and/or modified sequence
atgcccagctctgtgtcctggggcatcctgctgctggccggcctgtgctgcctggtgcctgtgtccctggccgaggacccccagggagatgctgcccagaagacagacaccagccaccacgaccaggaccaccccaccttcaacaagatcacccccaacctggccgagtttgccttcagcctgtaccggcagctggcccaccagagcaacagcaccaacatcttcttcagccctgtgtccatcgccacagcctttgccatgctgagcctgggcaccaaggctgacacccatgatgagatcctggagggcctgaacttcaacctgacagagatccctgaggcccagatccacgagggcttccaggagctgctgcggaccctgaaccagcctgacagccagctgcagctgaccactggaaatggcctcttcctgtag

SEQ ID NO: 45566 - DNA, 192 bp, Artificial Sequence
  derived and/or modified sequence
atgcccagcagcgtgagctggggcatcctgctgctggccggcctgtgttgtctggtgccagtgtccctagctcatggggaaggaacttttacgagcgacttatccaagcagatggaagaggaagcagttcgattattcatcgagtggctgaaaaacggagggcctagttccggcgctccccctcccagctag

SEQ ID NO: 45567 - DNA, 1257 bp, Artificial Sequence
  derived and/or modified sequence
atgcccagcagcgtgagctggggcatcctgctgctggccggcctgtgttgcctcgttccagtgagcttggccgaggatccgcagggggacgccgctcagaaaactgacaccagtcaccacgaccaagatcaccccacattcaacaaaatcaccccaaatctggccgagttcgccttcagtctttatcgccagttggcccatcagtcaaattccacaaacatctttttttctccagttagtatcgctaccgccttcgctatgctgtctctgggcacaaaagctgacactcatgacgaaattttggaaggcttgaattttaacctcactgagattcccgaggcgcagattcacgaggggttccaggagcttctgcgcacactgaatcagccagactcacagctacaactgacaaccggaaatgggctgtttctttctgaaggccttaaacttgtggataagtttctggaggacgtgaaaaaactgtaccattctgaggcctttacagtgaatttcggagacactgaggaggctaaaaagcagattaatgactacgtggaaaagggcactcaaggcaaaatagtggacctggttaaggagttggatagagataccgtgtttgctttggtcaactacatcttcttcaagggtaagtgggaacgcccattcgaggttaaggacactgaggaggaagactttcatgtcgaccaggtgacaactgtcaaagttcccatgatgaagagattgggtatgttcaatatccagcattgtaaaaagctctcctcctgggtgctgctgatgaaatatctgggtaatgctaccgcaatattttttctacccgacgaagggaaactgcagcacttagagaatgaactgacacacgatatcatcactaagtttcttgagaacgaagaccgtaggtctgcttcccttcatctgcctaagttgtcaataacggggacgtacgacctaaaatctgtcctgggccagctaggcatcacaaaggtcttcagcaatggagctgacttgagcggagtgaccgaggaagccccactgaaactgagtaaagctgtccataaagccgtgctaaccatcgacgaaaaaggcaccgaggctgcaggggcgatgttcctcgaagccattcctatgagcattccgcctgaggtgaagtttaataagcccttcgtctttctcatgatcgagcagaacactaaatccccattgtttatgggcaaggtcgtaaacccaacccaaaagtag

SEQ ID NO: 45568 - DNA, 1257 bp, Artificial Sequence
  derived and/or modified sequence
atgcccagcagcgtgagctggggcatcctgctgctggccggcctgtgctgtctcgtgccagtgtctctagccgaggacccccagggagatgccgctcagaaaacagatacatcccaccacgaccaggaccaccccacctttaataaaattaccccaaacctagcagagttcgcattcagcctgtacaggcagctcgctcatcagtccaattccaccaatatttttttttctcctgtgagtatcgccaccgccttcgccatgctcagcttaggaacgaaggccgatacccacgacgagatcctggaggggttgaactttaacctcacggagataccagaggcacagattcatgaaggctttcaggagcttctcaggacccttaaccagccagactcccaacttcagttgactaccgggaatggactgtttctcagtgaggggctcaaactcgtggataagttcctggaagatgtgaagaaactgtaccactcagaggcatttactgttaactttggtgacacagaagaggctaaaaagcagatcaatgactatgtggaaaaaggaacacagggaaaaattgtagatcttgttaaggagctggacagggatacagtgtttgcactcgtgaattacattttctttaagggcaaatgggaacggcccttcgaggtgaaggatactgaagaagaggatttccacgttgaccaggtgacaactgtcaaggttcctatgatgaaaaggctaggtatgttcaacatccaacactgcaagaaactcagtagttgggtgttactaatgaagtacctgggtaacgctactgccattttttttctgcctgacgaaggcaaactgcagcatcttgaaaacgagttgacacatgatattattactaagttcctggaaaatgaggatcggaggagcgcgtcattgcatctgccaaaactctcgatcactggcacctatgacctcaagagcgtgctgggtcagctcgggatcactaaggtcttcagcaatggcgcagacctctcaggcgtcacagaagaggcaccacttaaattatctaaagccgtccacaaggccgtcctcacaatcgatgaaaaagggactgaggcagccggggctatgttcctggaagcaatccccatgagcatcccaccagaagttaagtttaataaaccctttgtcttcctgatgattgaacaaaacactaagagtccactgttcatggggaaagtggtgaatcctactcagaagtag

SEQ ID NO: 45569 - DNA, 1257 bp, Artificial Sequence
  derived and/or modified sequence
atgcccagcagcgtgagctggggcatcctgctgctggccggcctgtgctgcctggttcccgtgagcctggccgaagacccacagggcgacgctgctcaaaagacagacacatctcaccacgaccaggaccacccaaccttcaacaaaattactcctaacctagccgagtttgctttctccctgtatagacagcttgcacatcagagcaactcaacaaacatttttttctcaccggtttctatagcgacggccttcgcaatgctgagtctggggacaaaagcggacacacacgatgaaattctggagggtctgaattttaacctcaccgaaattccagaggcccagatccacgaaggttttcaggagctgctgaggactttgaaccaacccgacagccagctacagctgactaccgggaatggcctctttctttccgaggggctgaaattagtggacaagttcctggaagacgttaaaaaactatatcacagcgaggcttttaccgttaacttcggcgacacagaggaggctaagaagcaaatcaacgattacgtcgagaaaggcacacagggcaagatagttgatctcgtaaaggagcttgatagagacactgtatttgccctagtgaattacatatttttcaagggcaagtgggagaggcctttcgaggttaaagatactgaagaggaggactttcatgtggaccaggtgacgacagttaaggtgcctatgatgaagagactgggcatgttcaatatccaacactgtaagaaactcagttcctgggtcctccttatgaagtacctgggcaacgctacagccattttctttctccctgacgagggaaaattacagcacctggagaacgaactgacacacgacatcatcaccaagttcttagagaacgaagacagaaggtcagcctcactgcatctccccaaattgtctataaccggtacctacgatcttaagagcgttcttggtcagctagggatcaccaaagtattcagtaacggagctgaccttagcggtgtcaccgaggaggcgcccttgaaattgtcaaaagccgtgcacaaggccgttcttaccattgatgaaaaggggacggaagccgctggtgccatgtttttggaggcaattcctatgtccatcccacctgaggtgaaattcaataaaccttttgtttttctcatgatcgagcaaaataccaaatcacccctcttcatgggcaaggtcgtcaatcccacgcagaagtag

SEQ ID NO: 45570 - DNA, 1080 bp, Artificial Sequence
  derived and/or modified sequence
atgcccagcagcgtgagctggggcatcctgctgctggccggcctgtgttgcttagtccccgtgagcctggcagaggatccccagggggacgccgcacagaagactgatacgagccatcacgatcaggatcaccccacgttcaacaaaataaccccaaatcttgccgagtttgctttctctctgtatcgccagttagcccatcagagcaattccactaacatctttttctcccctgtgtctattgcaaccgcattcgctatgctctctctgggaaccaaggccgacacacacgatgaaatcctggagggtttgaacttcaatcttacagaaatacctgaggcccaaattcatgaaggttttcaggagcttctcaggaccctgaaccagccagactcacagctgcagctcactactgggaacgggctgtttctgtctgaggggctgaagcttgtggataaattcctggaggatgttaaaaaattatatcactctgaagcctttaccgtgaatttcggggacacagaggaagctaagaaacagataaacgactatgtggagaagggaacccagggaaagatcgttgacttagtaaaagagctagaccgggacaccgtattcgctcttgtgaactacattttttttaaagggaagtgggagcggccttttgaggtgaaggataccgaggaagaggatttccatgtagatcaggtgaccaccgtgaaagtaccgatgatgaaacgcctgggaatgtttaatattcagcattgcaagaaactgtccagctgggtgctgctcatgaagtacctgggaaacgccaccgccatttttttcctaccagatgaaggcaagcttcaacacttggagaacgaactgacgcacgatatcataacaaaattcctggagaacgaggacaggaggtctgccagcttacatctgccaaaactgagcattactggcacatatgatctcaagtccgttctcgggcagctgggaataacaaaggttttcagcaatggcgccgatctctcgggcgtcaccgaggaagcccctctgaagctgtctaaagtgagatctccctag

SEQ ID NO: 45571 - DNA, 1257 bp, Artificial Sequence
  derived and/or modified sequence
atgcccagcagcgtgagctggggcatcctgctgctggccggcctgtgctgcctggtcccggtgtccctggccgaagacccccagggagacgctgcacaaaagaccgacacttctcatcacgatcaggatcatcccaccttcaataagataacacctaacctggccgagttcgccttctcgctgtataggcagttagcccaccagtctaactccaccaacatctttttcagtccagtgagcatcgccactgccttcgccatgctctccttgggaactaaggccgacacccacgacgaaatccttgaggggttaaattttaatctaactgaaatccccgaggctcagatccacgaaggctttcaggaactcttaagaacccttaatcaacctgattcacagctgcagctcacaactggcaacgggctcttcctatctgaaggactgaagttggtggacaaattcctagaagatgttaagaaactctatcactctgaagcatttaccgtcaacttcggtgatacggaggaagcaaagaagcagatcaatgattacgtggagaagggcacccagggtaagattgtggacctcgtaaaagagttagatagagataccgtattcgccttggtcaactatattttcttcaagggcaagtgggaaagaccgttcgaggtgaaggacacagaggaagaggacttccacgttgaccaagttacaactgtgaaagtccctatgatgaagcggctcggtatgtttaacattcagcactgtaaaaagttatctagctgggtcctgctaatgaaatatctcgggaacgccacagcaatcttcttcctgccggacgagggaaaactgcagcaccttgagaatgaactgactcatgacatcattaccaaattcctcgagaatgaggaccggcggtccgctagtctgcatcttccgaagctgtcaattaccggaacctacgacctcaagtctgtactggggcagctaggcattactaaagtattttctaatggagctgacctgtcaggagtgactgaagaagccccactgaagttatctaaggctgtgcacaaggccgtgttaacgatagatgagaagggcaccgaagccgccggtgccatgttcctcgaggctattccaatgagtattcccccagaggtcaagtttaacaaaccattcgtattcctcatgatcgaacagaacacaaagtccccactgttcatgggcaaagtggtcaatccaacccagaaatag

SEQ ID NO: 45572 - DNA, 1257 bp, Artificial Sequence
  derived and/or modified sequence
atgcccagcagcgtgagctggggcatcctgctgctggccggcctgtgctgcttagtgcctgtttctttggccgaggatccgcaaggcgatgccgctcaaaagaccgatacctctcaccacgatcaggaccatcctacgttcaataagataacccctaacctcgcagagttcgccttttccttataccgtcagttggcccatcagagtaattccactaacatcttcttctcacccgtcagcattgctacggcctttgctatgttaagtcttggtaccaaagctgacacacacgacgaaatcctcgaaggtttgaattttaacctgaccgagatcccagaggcccaaatccacgagggattccaagaattacttagaactctgaatcagcctgatagtcagctgcagctgacaacaggaaatgggcttttcctctctgaagggctgaagttagtcgataagttcttggaggatgtgaaaaaactgtaccattccgaagctttcactgtcaatttcggagacaccgaggaggccaagaagcagattaatgactatgtggagaaaggcactcagggaaagatcgtcgatttggtgaaggagcttgacagggacaccgtgttcgcactcgtgaattatatcttctttaagggaaaatgggagcgtccttttgaagtgaaagatactgaagaagaagactttcatgtagaccaggtgactacagttaaagtccccatgatgaaacgcctcgggatgttcaatatccaacattgcaagaaactctcaagctgggtccttctcatgaaatatttgggaaatgccacagcaatattcttcctacctgatgaggggaaactgcagcaccttgagaatgaattgacacatgatattatcactaaattcctggagaacgaggaccgacgatccgcaagcctccacttgcccaaactctcaattaccggtacgtatgacctgaagtcagtgctgggacagctggggatcacaaaagtgtttagtaacggggccgatctgtccggcgttactgaggaggcccccctcaagctgtccaaggccgtccacaaagccgtgttgactatcgacgagaaagggaccgaggcggccggcgcaatgttccttgaggccatccccatgagcatcccgccggaggtgaagtttaataaaccgtttgtgttcctgatgatcgagcagaataccaagagccccctattcatgggaaaggtcgtaaatcccacacaaaaatag

SEQ ID NO: 45573 - DNA, 1257 bp, Artificial Sequence
  derived and/or modified sequence
atgcccagcagcgtgagctggggcatcctgctgctggccggcctgtgctgcctagtgccagtctcgcttgcagaggatccacagggcgatgcggcccaaaagaccgatacgtcacatcatgaccaagaccatcctacatttaacaagattaccccaaacctcgccgagttcgcctttagcctgtaccgccagctggcccatcagtctaatagcaccaacatcttcttctctcctgtgagcatcgcgactgcattcgccatgctctccctgggcacgaaagcggatacacacgatgaaattctggaagggttgaactttaacctaaccgaaatccctgaagcgcagatccacgagggatttcaggagttgctgcgaacactaaatcaaccggattcccaattgcagctgaccacaggcaatggtctattcctgagcgaggggctgaagctcgtggacaaatttctcgaagatgtaaagaagctgtaccactccgaagcttttacagtgaactttggcgacacagaagaggctaagaaacagataaatgattacgtggagaaggggacccaaggcaagattgtggacttggtgaaggaactggacagggacactgtgttcgctttggtgaattacattttttttaaggggaaatgggagcgcccgtttgaggtgaaagacaccgaggaggaagacttccatgtagatcaggtgactaccgtgaaagtacccatgatgaaacgactggggatgtttaacatacaacactgcaaaaaacttagttcatgggtactgctgatgaaatacttggggaacgcaacagctatcttctttcttcctgatgaagggaagcttcagcatcttgagaatgagctaacacacgacatcatcacaaaatttctggagaatgaagaccgccgctcagcttctctccacttgccaaagttatctattactgggacgtacgatctgaaaagtgtactgggccaactcggtatcactaaggtattttctaacggcgccgacctgtccggtgttactgaagaggccccgctcaagttgagtaaggccgtccacaaggccgtgctgaccattgacgagaaaggcacggaggcggcgggggccatgtttttagaggctatccccatgagtatccctccggaagtgaaatttaataaaccatttgtcttcctgatgatcgagcagaacacaaaatcaccgttattcatggggaaggtggtaaacccgactcagaagtag

SEQ ID NO: 45574 - DNA, 1257 bp, Artificial Sequence
  derived and/or modified sequence
atgcccagcagcgtgagctggggcatcctgctgctggccggcctgtgctgtctggtgccagtgtcactggccgaggatccgcagggagatgccgcccagaaaacagacaccagccaccatgaccaggatcacccaactttcaacaaaataaccccaaatctcgctgaattcgccttcagcctctaccgacagctggcgcatcagtctaacagtaccaatatctttttctcccccgtgagcatcgcaacagcgttcgccatgctgtcacttggaactaaggctgacactcacgacgagattctggagggccttaacttcaatttgactgagatccccgaggcccagatccatgaaggcttccaagaactcttaaggacgctgaaccaaccagactcccagctccagctgactacaggcaacggcttattcttatcagagggtctcaagctagttgataaatttctagaagacgtgaaaaaactctaccactccgaagcttttaccgtgaattttggggacactgaggaagctaagaaacagattaacgactacgtggagaagggcacacagggaaagatagtggatttagtcaaggagcttgaccgagatacggtgttcgccctcgtcaactacatcttcttcaagggaaagtgggagagaccattcgaagtcaaggataccgaagaggaagactttcacgtggatcaagtgaccacagtgaaggtgccaatgatgaagcggctcggaatgtttaatatccagcattgcaaaaaattatcatcttgggtgttgctaatgaaatacctgggcaacgccacggctatattcttcctccctgacgaaggaaaactgcagcatttggagaatgagctgacgcatgacattattacaaagttcctggaaaacgaagaccgccgcagtgccagcttgcacctgccaaagctctccatcacgggcacgtatgacctcaaatctgtcctggggcagctaggcattaccaaagtgttcagcaatggcgctgatctcagtggagtaacggaggaggcgccccttaagctgagcaaggccgtacacaaggccgtccttaccattgatgagaaaggtactgaagcagcaggagcgatgtttctggaggccatccccatgtccataccccccgaagtcaaattcaataaacctttcgtttttctgatgattgagcagaacacaaagagtccacttttcatgggaaaggtggtcaaccctacccaaaagtag

SEQ ID NO: 45575 - DNA, 1257 bp, Artificial Sequence
  derived and/or modified sequence
atgcccagcagcgtgagctggggcatcctgctgctggccggcctgtgctgcctcgttccagtaagtttagccgaagatccccagggagacgctgctcagaagactgatacctcccaccacgatcaggaccaccccacatttaacaagattacgcccaatcttgccgagttcgcgttttctctgtatcgacaactagcccaccagagtaactcgaccaacatatttttctcacccgtctccatcgcaacggcttttgcaatgctgtctctcggaactaaagctgacacccatgatgagattctcgaagggctgaatttcaatctcactgaaattcctgaggcacagattcacgagggatttcaagagctgctccgcactctaaatcagcccgacagccagctgcagctcactacaggaaatggactattcctcagcgagggacttaagctggtggacaaattcctggaagatgtgaagaaattgtatcattctgaagcatttacagtcaatttcggcgatactgaggaagctaagaaacagatcaacgactacgtagaaaaaggcactcagggcaagattgtggatctggtgaaggaacttgaccgggatacagtatttgctctcgttaactacatttttttcaaaggcaagtgggagcgaccctttgaagtgaaagataccgaggaggaggacttccatgtggatcaggtcactacggtgaaagtgcctatgatgaagagacttggtatgtttaatattcagcactgtaaaaagctcagctcttgggtgctgttgatgaaatatctcggaaatgctaccgcgattttctttctgcctgatgaaggcaaactgcagcacttggagaatgagctgacacatgacattatcaccaagttccttgaaaatgaggatcgccgcagcgccagcctgcacctcccaaaactgagcataacaggtacttatgatctcaaatccgtgttgggacagctcggcatcactaaggtcttcagcaacggggctgatctcagcggagttaccgaggaggcaccactgaaactcagtaaagcggtgcacaaggccgtgctgaccatcgacgaaaaggggaccgaagcagccggggctatgttcttggaggccatccccatgagtattccgcccgaggtgaagtttaataaacctttcgtgttcctgatgattgagcaaaacaccaaatccccactttttatgggcaaagtggtgaaccctacccaaaaatag

SEQ ID NO: 45576 - DNA, 279 bp, Artificial Sequence
  derived and/or modified sequence
atgcccagcagcgtgagctggggcatcctgctgctggccggcctgtgttgcctcgtgccagtgtctctcgctgaagatccacaaggtgacgccgcccagaagacagacactagccaccacgaccaggatcatccaaccttcaataaaattacccccaatttggctgagtttgccttttccctgtaccgacagctggcacaccagtctaactctacaaacatattctttagtccagtcagtattgccaccgccttcgccatgctgagcttgggaacatag

SEQ ID NO: 45577 - DNA, 471 bp, Artificial Sequence
  derived and/or modified sequence
atgcccagcagcgtgagctggggcatcctgctgctggccggcctgtgttgtcttgttcctgtctcccttgccgaggatccccagggagatgcagcacagaaaacagataccagtcatcacgaccaagaccacccgacctttaacaagattaccccgaaccttgctgagttcgcattttctctttacaggcaattagcacaccaatccaacagcacaaatattttctttagccccgtgtctattgcaactgcattcgcaatgctcagtcttggaaccaaggccgatacccacgatgaaatccttgaaggccttaatttcaacttgacagagattcctgaagcacaaatccacgaggggttccaagagctcctcaggactctcaatcagccagactctcagcttcagttgactaccggtaacgggctatttctgtcagaaggactcaaactggtcgacaaattcctcgagtag

SEQ ID NO: 45578 - DNA, 354 bp, Artificial Sequence
  derived and/or modified sequence
atgcccagcagcgtgagctggggcatcctgctgctggccggcctgtgctgcctggtgcccgtgtctttagccgaagatccccagggcgacgctgctcagaagaccgatacaagccatcatgatcaggaccatcccactttcaataaaatcacacccaacctggccgaatttgccttcagcctatatcggcagctggcgcaccagtccaacagcacgaacatctttttcagtccggtatccatcgccacagctttcgccatgctctctttaggtacaaaagcggacacccatgacgagatcctggaaggtcttaattttaacctgaccgagatccccgaggcccaaattcactag

SEQ ID NO: 45579 - DNA, 69 bp, Artificial Sequence
  derived and/or modified sequence
atgcccagcagcgtgagctggggcatcctgctgctggccggcctgtgctgcctggtacccgtgtcctag

SEQ ID NO: 45580 - DNA, 435 bp, Artificial Sequence
  derived and/or modified sequence
atgcccagcagcgtgagctggggcatcctgctgctggccggcctgtgctgcttggtcccagtcagcctcgcagaagatccacagggcgacgccgctcaaaagacagacacatctcatcatgaccaggatcatcccacttttaataagattacccccaatttggccgaatttgctttctctttgtaccggcagttggcccaccagtccaactcaaccaacatattcttttctcctgttagcattgccaccgcttttgcgatgttgtcccttgggactaaggccgacacccatgacgagatcctcgaaggcctgaatttcaaccttaccgagattcctgaggctcagattcatgaaggatttcaggagctcctccggacccttaatcagccagacagccagctccaactgactactggaaatggcctgttcttgtag

SEQ ID NO: 45581 - DNA, 192 bp, Artificial Sequence
  derived and/or modified sequence
atgccgtcatccgtgtcctgggggatcctgctgctggctgggctctgttgcttggtgcctgtgtctcttgctcatggagagggaacattcacttccgatctgtctaagcagatggaggaagaagctgtgcgtctgtttatcgagtggctcaagaatggcggaccgtcgagcggggcaccccctccctcttag

SEQ ID NO: 45582 - DNA, 1257 bp, Artificial Sequence
  derived and/or modified sequence
atgcctagctcggttagctggggaatcctccttcttgccggtctgtgctgcctggtccctgtcagcctggcagaagatccgcagggagacgccgcacagaagactgacacttctcatcacgatcaagaccacccgacatttaataagattaccccaaacctcgccgagttcgccttctccttgtatcgccagcttgcccaccagtcgaacagtaccaacattttcttcagccctgtgtccatcgcgaccgccttcgcaatgttatccctcggcacaaaggctgatacccacgacgagattctcgagggcctaaactttaatctcactgaaatccctgaagctcagatccacgagggattccaggaactccttcgtacgctgaaccagcccgacagccagctgcagttgaccacgggaaacggcctgtttctgtctgagggtcttaagcttgtggacaagtttctagaagatgtaaaaaaactgtatcactcggaggcattcactgtcaacttcggggatacagaggaggccaagaaacagattaatgactatgtcgagaagggcactcagggcaagatcgtggacttggtcaaagaactcgacagggatacagtgtttgctttagtcaattacatttttttcaaagggaagtgggaaaggccctttgaggtgaaggataccgaggaagaggactttcacgtcgaccaggtgacaacggtgaaagtgcctatgatgaaacggctcggcatgttcaatattcagcactgcaagaagttgtccagctgggtgctgcttatgaaatatctaggcaatgcaaccgccatatttttcctgcccgatgaaggaaagttgcaacatttggaaaacgagctgacacacgatataatcaccaagtttcttgagaacgaggatcgtcgctcggccagcctgcacctgccaaaactgtcaatcaccggcacatacgatctcaagagcgtgctgggccagttagggatcacaaaggtattttctaatggtgcagacctcagcggagtcacggaagaagcgcctctgaaactgagcaaggctgtgcataaggcagtcctgactatcgacgaaaagggtactgaggccgcaggggctatgttcctggaagccattcccatgagcattcccccagaagtgaagttcaacaagcctttcgtattcctgatgatagaacagaacacaaagtccccattgttcatggggaaagtggtgaatcccacgcagaagtag

SEQ ID NO: 45583 - DNA, 1257 bp, Artificial Sequence
  derived and/or modified sequence
atgccctcttctgtgtcctgggggatcctgttgctggcgggtctgtgttgcctggtgcccgtttccttagccgaggacccacagggcgacgccgctcagaagacagatacctcacatcacgaccaggaccaccccacgtttaataaaattacgcctaacctggcagaattcgctttctctctgtatcgtcagcttgcccatcaatcaaactctacgaatatttttttttcccccgtatccatagccaccgcttttgcaatgctgtcccttggcaccaaagccgatacccatgatgaaatcctggagggtctgaattttaacctcaccgaaatcccggaagcgcagatccacgagggcttccaggaattgctgcgcaccctgaaccagcccgatagccagcttcagctgacgaccgggaatgggctgtttctctctgaagggttaaaactggttgataaatttctggaagacgtgaagaaactttaccacagcgaggcgttcaccgttaactttggcgacaccgaggaggcaaaaaaacagattaatgactacgtggaaaaaggaacccaggggaagatcgttgatctagtcaaggaactggacagggatactgtgttcgccctcgtaaactacatattctttaagggcaaatgggaacgcccttttgaggtgaaggatacagaagaggaggactttcacgtggatcaggtgacaactgtgaaggtacctatgatgaagagactcggtatgttcaatattcaacattgcaagaaactgagtagctgggtactccttatgaagtacctcggtaacgccaccgcaatcttttttctacctgacgaggggaagcttcagcacctggaaaatgaactcactcatgatattataaccaaattcttagagaacgaagatagaaggagcgcatccctgcacctgcccaaactgtcaattacagggacatacgatttaaaatcggtgctggggcagttagggataaccaaagtattctccaatggcgcagacctctctggagtcactgaggaggccccacttaagctttctaaggcagttcacaaggccgtcttaactattgacgaaaagggcacagaggccgctggtgccatgttcctggaggccatccctatgtcaatcccacctgaggtgaaatttaataaaccttttgtgtttctgatgatagaacaaaataccaaatcacctctgtttatgggcaaagttgttaacccaacccagaagtag

SEQ ID NO: 45584 - DNA, 1257 bp, Artificial Sequence
  derived and/or modified sequence
atgcctagcagcgtgtcctgggggattctattgcttgcgggtctctgttgtttagtgcctgtatcgctggcggaagatcctcagggcgacgccgctcagaagacagacacttcccatcacgaccaagatcatcccacattcaataagatcaccccgaatcttgccgaatttgcattttccctgtacagacagctggcacatcagtccaatagtacaaacatattttttagccctgtgagcattgccaccgccttcgccatgctgagcttgggcactaaggccgatactcatgacgaaatccttgagggcctgaacttcaatctgacagagattcccgaggcacagattcacgaaggcttccaagaattgctgcgtaccctgaatcagcccgattcccagctccagttgaccacagggaatgggctgttccttagcgaaggcttgaagcttgttgacaagttcctcgaagatgtcaaaaaattataccattctgaggccttcacagtcaacttcggcgataccgaggaagcgaagaagcaaatcaatgattacgtggagaagggcactcagggtaaaattgtggatctggttaaggagctcgatagggataccgtcttcgccctggttaattacatcttctttaaaggtaagtgggaaagacctttcgaagtgaaagacaccgaagaagaagatttccacgttgatcaggttacaactgtgaaggtgcctatgatgaaacgcctgggcatgtttaatatccagcactgtaagaaactgtccagttgggtgttattaatgaagtatttgggaaacgccaccgcaattttcttcctgcctgatgaaggcaagctccaacacctggagaacgagcttacacatgatattataacaaaattcctcgaaaatgaggatcggcgtagtgccagcttgcacctgcctaaattgagtatcactgggacttatgatctcaagagtgtgcttggccagctgggaatcacaaaggtcttctccaatggtgctgacctcagtggagtgacagaagaagcacctctgaagttatcgaaggcagtgcacaaggcggtactcacaattgacgagaagggaacagaagcagccggagcaatgttcctcgaagcaatccctatgtcgattcctcccgaagtcaagttcaataagcctttcgtttttctgatgatcgaacaaaatactaagtccccgttgtttatgggtaaagtggtgaacccaacccagaaatag

SEQ ID NO: 45585 - DNA, 1080 bp, Artificial Sequence
  derived and/or modified sequence
atgccctcaagtgtgtcatggggaatcctcctcttggcaggcctttgctgtttggtccctgtcagtctcgcggaggacccccagggtgacgctgcccaaaagacagatacctctcaccacgatcaggaccatcctacattcaacaagatcacccctaacctggcagagtttgccttctctctgtatcgacaattagcacaccagagcaattcaaccaatatcttcttctcccccgtgagcatcgcgacagccttcgcgatgctgagtcttggtacaaaagcagatactcatgacgagattctggagggattgaatttcaatcttaccgagattcctgaggcacagatccatgagggattccaggaactgctgaggacgctgaaccagcctgacagccagctgcaattgactacaggtaacggcctgttcctatccgaagggttgaagctagtggacaagttcctggaggatgtgaagaagctgtaccactcggaagcatttactgtcaactttggggacactgaggaggccaaaaagcagatcaacgattacgtcgaaaaaggtacccagggcaagattgtcgacctggtgaaagaactcgatcgcgataccgtgttcgctctggtcaattacattttcttcaaaggtaaatgggaaaggccctttgaggtcaaggacaccgaagaagaggattttcatgtcgaccaagtcaccactgtgaaggtacctatgatgaagcgtctcggaatgttcaacattcagcattgtaagaaactatcatcctgggtccttctgatgaaatacttaggaaatgcgacagctatttttttcttacccgacgaaggcaaactgcagcacttagagaatgagctgacacatgatataataaccaagtttcttgagaacgaggatcgtcgctctgcctcgctgcacctgcctaagctttccattaccggcacttacgacctgaagtctgtcttgggtcaactcggaatcaccaaggtgtttagtaatggggctgatctgtctggcgttaccgaagaagcccctctaaagctaagtaaggtgcgcagcccctag

SEQ ID NO: 45586 - DNA, 1257 bp, Artificial Sequence
  derived and/or modified sequence
atgccctccagtgtctcctgggggatcctgctcctcgctggcctgtgctgcctggtgccggtgagtctggccgaggacccacaaggagacgcagcccagaagaccgatacttctcatcatgaccaggatcatcccactttcaataagatcacccctaatctggccgaattcgccttctccttgtaccgtcagctagctcaccaaagcaatagcaccaatatattcttctcccccgtctccatcgccactgccttcgccatgctgtctctcggcacaaaggctgatacacatgacgaaatccttgagggcttgaattttaacctgacagaaattccagaggcccagatccatgaaggattccaggagcttctgaggactctgaaccagcctgactctcagttgcagctgaccaccggtaacggactgtttctgtcagaaggcttgaagctcgttgacaagtttctggaggatgtcaagaaactgtaccacagtgaggcgtttacagtgaatttcggcgataccgaggaggcaaagaagcagataaacgactacgttgaaaagggaacacagggcaagatagtagatctggtgaaagagcttgaccgcgacacggtgtttgctctcgtaaattatatattcttcaaaggaaagtgggagcgaccattcgaagtgaaagatacggaggaagaagatttccacgtggatcaggtgactacggtgaaggtgccaatgatgaaaaggctgggcatgttcaatatccaacactgcaaaaaactgagttcatgggtcctgctcatgaagtacctggggaatgccaccgctatctttttccttccagacgagggaaagctgcaacacctcgagaacgagttgacccatgatataatcaccaagtttctggagaatgaagatcgtcgctcagcttctttacacctccccaagttgtctattaccggaacatatgatctaaaaagcgttttaggccagctcgggataaccaaagtcttctctaacggggcagacctaagcggtgttaccgaggaggctcctctgaagctatccaaggccgtacacaaggccgtcttgacgatcgacgagaagggcaccgaggctgcgggtgctatgtttctggaggctatacccatgtcaattccccctgaggtgaagtttaataaaccattcgtttttttgatgatcgaacagaatacaaaatctcccttgtttatgggcaaggtggtgaacccgacccagaagtag

SEQ ID NO: 45587 - DNA, 1257 bp, Artificial Sequence
  derived and/or modified sequence
atgcctagcagcgtcagctggggcattttattgctcgcaggcctgtgttgtttggtacctgtgtcgctcgccgaggatcctcagggcgacgctgctcagaagaccgatacatcacatcacgatcaagaccacccaaccttcaataagattactcctaatctggccgagttcgccttttcgttgtataggcagcttgctcaccagtccaacagtactaatatcttctttagtccagtgagcatagccactgcttttgcaatgctgagcttaggaaccaaggctgatactcacgacgagattttagaaggcttaaacttcaatcttaccgagataccggaggcccagatacacgagggtttccaagagctgctaaggacccttaaccagcccgatagccaactacagctcactacagggaacggcctgttcttgagtgaaggactgaaactggtggacaaattcctcgaagacgtgaagaaactgtaccactcagaggcctttacggttaacttcggggacacagaagaggctaagaaacaaattaacgactacgtcgagaaaggtacccaaggcaagatcgtcgacttggtaaaggagctcgatagagacactgttttcgctctagtgaactacattttcttcaaaggtaaatgggagcggccatttgaggtcaaggacacagaggaggaggacttccatgtggatcaggttacaaccgttaaggtgccgatgatgaaacggctgggcatgttcaacatacaacactgcaagaagctgtcgagttgggtgctgctcatgaaatatttaggcaatgccaccgcaatcttctttctgcccgacgagggaaagctccagcacctggagaatgaactgactcacgatatcattactaaatttttagaaaatgaggatcgacggagcgcttctttgcacttgcccaaactgagcattaccggaacttatgatctcaagagcgtgcttggccagctgggaattaccaaggtgttctcaaatggggcagatctaagtggtgtgacagaagaagcgccactcaaactgagcaaggccgtacataaagctgtcctgacaatcgacgaaaaggggacagaggctgccggagccatgtttctggaagccattccgatgagcatcccccctgaggtgaagtttaataaacctttcgtatttctcatgattgagcagaacaccaaaagtcctctgtttatggggaaggtcgtgaatcctacccagaagtag

SEQ ID NO: 45588 - DNA, 1257 bp, Artificial Sequence
  derived and/or modified sequence
atgccctccagtgtaagttggggaatcctgcttctggctggtctctgctgtctcgtcccggtgtcgcttgctgaggacccccaaggcgatgccgctcagaaaaccgacacatcacaccacgaccaagaccatcccacctttaataagattacgcctaacttggctgagttcgccttctcattgtaccgccaactcgcgcaccaatctaacagcaccaacattttctttagtcccgtgagtatcgctactgccttcgccatgctgtctctcggaacaaaagcggacacccacgatgaaatccttgagggactgaactttaacctgactgagatcccggaagcgcagatccacgagggatttcaggagctactgcggaccttgaatcaaccagactcacagctgcagctgaccacaggtaatgggctttttctctccgaagggctgaagctggtggacaagtttttggaggacgtgaaaaaactttatcacagtgaggcattcacagtgaacttcggcgacactgaagaggcaaagaagcagatcaatgactacgttgagaagggtactcagggcaagatcgttgatctggtgaaagagttggaccgggacactgtcttcgccctggtgaactatatattctttaaaggcaaatgggaacgccctttcgaagtgaaagacaccgaggaggaggatttccacgtcgatcaggtcactaccgtgaaggtccctatgatgaagcgtcttggtatgtttaatatccagcattgcaaaaaactgtctagctgggtcttattgatgaaatatctcggcaacgccacagccatcttttttctgcccgacgagggcaagttacagcatctcgagaacgagctaacccacgatattattacaaagttcttagagaatgaggacagaaggtcagctagtctgcatttgcctaagctatccattacaggtacatacgatctcaaatctgtcttgggacaactaggcatcaccaaagttttttccaatggcgctgacctctcaggtgtgacggaggaagccccattgaagttgagcaaggctgtccataaagctgtactcactattgatgagaagggaacagaggcggcaggagctatgttcttagaagcaatacctatgagcattcctcccgaagtcaagttcaacaagcccttcgtgttcctgatgatagagcaaaacaccaaatctccactgttcatgggcaaagtcgtgaatcctacccaaaagtag

SEQ ID NO: 45589 - DNA, 1257 bp, Artificial Sequence
  derived and/or modified sequence
atgccctcaagcgtttcatggggcattcttctgctcgccggactctgttgcctcgtcccagtgtctctagccgaggatccacagggcgatgccgctcagaagaccgatacttcccatcatgatcaggaccatccaacctttaataagatcactcccaacctggcagagtttgcgttctccctctatagacagctggcccaccagtcaaactcaacaaacattttcttctcccctgtctcaatcgctaccgcttttgcaatgctgtctcttgggaccaaagccgatactcatgatgagattcttgaaggactgaattttaatttgacagagatacctgaagctcagatccacgagggctttcaggaactgctgaggacattaaaccagcctgactctcagctccagctgacgactggcaatggcctgttcctttctgaaggattaaagttagtcgacaaatttcttgaagacgtcaagaaactatatcatagcgaagccttcacagtgaattttggcgataccgaagaagccaagaagcagattaatgactatgtggagaagggaactcaaggcaaaatcgtagacctcgttaaagagcttgatcgcgatacagtgttcgccctcgtcaattatattttctttaagggaaagtgggagcgaccttttgaggtgaaagacacagaggaggaagatttccacgttgatcaggtcacaactgtgaaggttcctatgatgaaacgtctggggatgtttaacatccagcactgtaaaaaactgtccagctgggtgcttttgatgaagtacctggggaatgccaccgccatcttttttctaccagacgaaggcaaactacaacacctggagaacgaactgacacacgatattattacaaagttccttgaaaacgaagaccgccgatccgcatctttacatctgcctaagttgagcataacaggaacttacgatctcaaatccgttttgggccagctgggtattactaaggtgttttcgaacggggcagacctttcaggcgttaccgaagaggccccactgaagctgtccaaagccgtacataaagctgttctgactatagatgaaaagggtaccgaggctgccggagctatgtttcttgaggcaatccccatgtctatccccccagaagtaaagttcaacaaaccctttgtttttcttatgattgagcagaacaccaagtctccccttttcatgggcaaggtagtcaatcctacgcaaaaatag

SEQ ID NO: 45590 - DNA, 1257 bp, Artificial Sequence
  derived and/or modified sequence
atgccaagcagcgtgagctgggggatccttctactggccggtctctgttgcctcgtgccggtctcactggccgaagaccctcagggggacgccgctcagaaaacggacacctcacatcatgatcaggaccaccccacctttaataagattacacccaacctggccgaatttgcttttagtttgtaccggcagcttgcccatcagtctaatagcactaatattttttttagcccagtctcaatcgcaacggccttcgccatgctgtccttggggacgaaagcagatacccatgacgagatcctcgagggacttaattttaacctgaccgaaatccccgaagcgcagatacacgaagggtttcaggaactgctccggaccctgaatcaaccagatagccagctgcagcttacgacagggaatggactgtttctctccgagggtttaaaacttgtggataagttcctcgaggacgtgaagaagttgtatcacagtgaggcctttaccgttaactttggagataccgaagaagctaaaaagcaaattaacgactatgtggagaaaggcacacagggcaaaatcgtggacctcgtgaaggagctggatagagacaccgttttcgcacttgttaactatatcttttttaaagggaaatgggagcgaccgttcgaagtcaaagatacggaggaggaggattttcacgtggaccaggttaccaccgtgaaagtgccaatgatgaagcgccttggtatgttcaacatacaacactgcaaaaagctttctagttgggtcctgctcatgaaatatctgggtaatgccactgcgatattctttcttcccgacgagggaaagctccagcacctggaaaacgagctgactcacgatatcatcacgaagttcctggagaatgaggatagacgcagcgcctccctgcatctacccaaattatccataactggtacgtatgatttaaaatccgttctgggtcagttggggattactaaagtgttctccaacggggctgatttatccggggtgacggaggaagcccctttaaaactcagcaaggccgtacacaaagcagtcctgacgatcgatgaaaagggaacagaggcagccggagctatgttcttggaggcaattccaatgtcaataccacccgaggtgaagttcaacaaaccattcgtgtttctaatgattgagcaaaacactaaaagcccgctattcatgggcaaggttgtcaatcccacacagaaatag

SEQ ID NO: 45591 - DNA, 279 bp, Artificial Sequence
  derived and/or modified sequence
atgcccagctccgtcagttggggaattctgctgctcgcgggactgtgttgcttagttccagtaagcctggcagaggacccgcaaggggatgcagctcagaaaactgatacctctcatcacgaccaggatcatccaaccttcaacaaaatcacaccaaacctggctgaattcgctttctcgttgtatagacaactggcccatcagtcgaattcaaccaatatcttcttttcaccagtgtcgattgccaccgccttcgctatgctgtccctcggaacttag

SEQ ID NO: 45592 - DNA, 471 bp, Artificial Sequence
  derived and/or modified sequence
atgccaagctctgtgtcttgggggatcctgctgctggcgggactgtgttgcctggtgccagtcagtctcgcagaagacccccaaggcgatgctgcccagaagacagacacatctcaccacgatcaggatcaccctacattcaacaagataactcccaatctggcggaatttgccttttctctttaccgccaacttgcccatcagtccaactcaacaaatattttctttagcccagtgtctatcgccactgccttcgctatgttgagtctgggtaccaaggcagacactcacgatgagatcctggaaggcctgaactttaacctgacggagataccagaggctcagatccatgagggattccaggaactgttgcggacccttaaccagcccgatagccaactgcagctgactaccggcaacgggctgtttctgtctgaaggcctgaaactggtcgataagtttttagaatag

SEQ ID NO: 45593 - DNA, 354 bp, Artificial Sequence
  derived and/or modified sequence
atgccctctagtgtttcttggggcattctgctcttggcgggtctgtgttgtctggttccagtgagcttagctgaggacccgcaaggtgatgcggctcagaagaccgatacttcgcatcatgatcaggaccacccaacctttaacaaaattacaccaaacctggcagagtttgcatttagcctgtatagacagttggcccaccagagtaactcaacaaacatcttctttagccccgtttctatcgcaacagccttcgccatgttgtcgttagggacgaaggccgatactcacgatgagattctggagggtctgaactttaacctaaccgaaataccggaggcccagattcactag

SEQ ID NO: 45594 - DNA, 69 bp, Artificial Sequence
  derived and/or modified sequence
atgccgagtagcgtctcttgggggatccttctgttggcaggtctgtgctgcctagtcccagtgtcttag

SEQ ID NO: 45595 - DNA, 435 bp, Artificial Sequence
  derived and/or modified sequence
atgccatcatctgtctcctggggtattcttcttctcgctggcctgtgttgcttagtgcctgtgtccctggccgaggacccccaaggcgatgcagcccagaaaaccgacaccagccaccatgaccaggatcatcccactttcaacaagatcaccccaaatttggccgaattcgcgttttctttgtaccggcagcttgcccatcagtctaatagcaccaacatattcttttctcccgttagcatcgctactgcgttcgccatgttatctctgggtacaaaggcggacacccacgatgaaatcttggaaggactgaatttcaacctgactgaaattccagaggcccaaatccacgaagggttccaggagctgcttcgaacccttaaccagcccgatagccagctgcaattgaccacgggcaatggcttgttcctatag

SEQ ID NO: 45596 - DNA, 192 bp, Artificial Sequence
  derived and/or modified sequence
atgcccagtagcgtgtcctggggcatattactgcttgccgggttgtgctgtctcgtgcccgtatctttggctcacggagaaggaaccttcacgtcggacctttctaagcaaatggaagaggaggctgtgcggttatttattgaatggcttaaaaacggaggcccatcatccggcgcgccaccacctagttag

SEQ ID NO: 45597 - DNA, 1257 bp, Artificial Sequence
  derived and/or modified sequence
atgccatcttccgtctcgtggggcattcttcttctggccgggctctgttgtctggtcccagtgagtcttgcagaggacccccaaggtgacgccgctcaaaaaactgacacctcgcaccacgaccaagaccatccaacattcaacaagatcacccccaatctcgcagagtttgcattctcactttacagacagctagcccaccaatcaaactctactaacatcttcttctccccagtctcgatagcaaccgccttcgccatgctttctttagggactaaggcagatactcatgacgagatcctggagggactgaactttaatctgaccgaaatccctgaggcccagatccatgaaggcttccaggagctattacggacccttaaccagccagattcacagctccagctgaccacaggtaacggactgttcctatccgaaggtctgaagctagtcgataagttcctcgaagatgtgaagaaactttatcacagtgaagcctttactgtcaactttggcgacactgaagaggctaaaaagcagataaacgactatgtggaaaagggaactcagggcaaaattgtggatctggtcaaggaactcgatagggataccgtgtttgctctagttaactacatttttttcaaaggaaaatgggagcgcccgttcgaggtgaaggatacagaagaagaggattttcacgtggaccaggtcacaaccgtaaaggttccaatgatgaagcgcctggggatgtttaacatacagcattgtaagaaactctcttcctgggtccttctgatgaagtatcttggcaacgcgacagccatcttcttcctacccgacgaaggaaagttgcagcacctcgaaaacgagctgactcacgatatcatcaccaaatttctggagaatgaggaccgccgtagcgcctctctgcacctgcccaaactctctatcacaggcacctatgatcttaaatccgttctgggccagctgggcattaccaaggttttttccaacggggcggatctaagcggagtgactgaggaagctcccctgaaactcagcaaggctgtccacaaagcagttctgaccatagacgaaaaaggcacagaggccgctggtgccatgtttcttgaggctattccaatgtccattccacccgaagtgaagttcaacaaacctttcgtctttctcatgatcgaacagaatacaaagtctcccctcttcatgggcaaagtggtcaatcctacccaaaaatag

SEQ ID NO: 45598 - DNA, 1257 bp, Artificial Sequence
  derived and/or modified sequence
atgccaagctccgtgtcctggggtatcctgctgctggcaggtctttgctgtcttgtcccagtgtccctggctgaagatccccagggcgatgccgcacagaagaccgacacatctcatcacgaccaagatcaccctactttcaataaaatcacccctaatttagcggagtttgcgttctcactctacaggcagcttgcccaccagtcaaactccacaaacatattcttctcacctgtctcaatcgccactgcctttgctatgctgagtctgggtaccaaggctgatactcacgatgaaatcctcgagggtctaaattttaacttaaccgagattccagaggctcaaatacacgagggttttcaagaattgctcaggaccctcaatcagccggatagtcagttacaactcacaaccggtaacggacttttcctgtctgagggtcttaagctggtcgataaattccttgaggatgtaaagaagctgtaccacagtgaggcctttaccgtcaatttcggagacactgaagaagcaaaaaagcaaattaacgactacgtggagaaagggactcaaggaaagatcgtcgatctagtgaaggaattggacagagatactgtttttgcactggtgaattacatcttctttaaaggaaagtgggaacgtccatttgaggttaaagacaccgaggaggaggattttcacgtcgatcaggtgactactgtgaaggttccaatgatgaagagactcggcatgtttaacatacaacactgtaaaaagctttcttcatgggtcctgctcatgaaatacttgggaaatgcaacagccatttttttcctgcctgacgagggcaagctccaacatcttgagaatgagctaacccatgacattataacgaaatttctggagaacgaagatcgcagaagtgcctccctgcacctgccaaaactcagtataaccggtacctacgatctgaagtctgtcctgggccagcttggaattacgaaggtcttcagtaatggcgcggatctgtctggagtgaccgaggaagccccgttgaagctctccaaggccgtgcacaaggcggttcttactattgatgaaaaaggtacggaagccgcaggcgcaatgttcctggaggcaatcccaatgtccatacctccggaagtgaagttcaacaagcctttcgtcttcctgatgatcgaacagaacaccaaatcccctctattcatgggaaaagtcgtgaatcctacacagaaatag

SEQ ID NO: 45599 - DNA, 1257 bp, Artificial Sequence
  derived and/or modified sequence
atgcctagtagtgttagttgggggattctcttattggccggtctctgctgtcttgttccagtgtcattggcagaggaccctcagggcgatgcagcacaaaagactgatacttctcaccacgatcaagaccaccctacgtttaacaagatcacacccaatcttgctgaatttgcattcagcctctacagacagctcgctcatcagagtaactctactaacatcttcttcagccctgtctctatagccaccgccttcgccatgttatcactcgggacaaaagcagacacacatgacgagattctcgaaggcttaaactttaatttaaccgagatccccgaagcccaaattcacgagggttttcaagagctactgcggaccctgaaccagccagacagccagttgcagctcaccaccggcaatggcctttttctgtctgagggtctgaaactggtagacaaattcctcgaggatgtaaagaaattgtatcactcagaagcgtttactgtgaactttggtgatacagaagaggcaaaaaagcagataaatgactatgtcgaaaagggcacccagggaaagattgtggacctggtgaaggaacttgacagagatacagtattcgctcttgtcaactatatcttctttaaaggcaagtgggagaggccattcgaggtgaaggataccgaagaggaagatttccacgtcgatcaagtcaccacagtgaaggtgcctatgatgaagaggcttggaatgttcaatatccagcactgtaagaaactcagcagttgggttctcctgatgaagtacctagggaacgccacagctatatttttcctgccagacgaggggaagctccagcacctcgagaatgagctgactcacgacatcatcacaaagttcctggaaaatgaagataggcgatctgccagtcttcacctcccaaaactgtctattactggcacatacgacctgaagtccgtcttgggtcagctggggataaccaaggtgttcagcaatggcgcagatctgtctggggtcacagaggaagccccccttaaactctccaaagctgtgcataaggcagtcctaacaatcgatgaaaagggcactgaggccgccggagctatgttcctagaggctatacctatgtcgatccctccggaagttaagttcaataaaccgttcgtattcctcatgatagagcagaacaccaaatcacccctgttcatgggaaaagtggtcaaccctacacagaaatag

SEQ ID NO: 45600 - DNA, 1080 bp, Artificial Sequence
  derived and/or modified sequence
atgccctccagcgtttcctgggggatcctgctcctggccggcctgtgctgtctcgtgcccgtgtcgctcgccgaggatccccagggggacgccgcccagaaaacagatacctcccatcacgatcaagatcatcctacctttaataagattactcctaatctagcggagtttgccttttccctatacaggcagcttgcgcaccaatcaaattccacaaatatttttttttctccggtatcgatcgccaccgctttcgccatgctgagccttggcactaaagctgatacacatgacgagattttagaaggtctgaactttaacttgacagagatacctgaggcgcagattcacgaaggtttccaggaattgctgcgcacgctgaaccaacccgattcgcaactccagttaaccactggcaacggccttttcctgtccgagggcctgaaactggttgataaattcttagaagatgtgaagaagctctatcacagcgaggcatttaccgtgaactttggtgacacagaagaagcaaagaagcagattaatgattatgtcgagaaggggacacagggcaagattgtggacctggtgaaagagctggatcgagataccgttttcgccctggtgaactatatattttttaaaggaaagtgggaaagaccattcgaagtgaaggacaccgaagaagaagactttcacgtggaccaggtaactacagttaaagtgcctatgatgaaacggctgggaatgtttaatatccagcactgcaaaaaattaagtagctgggtgttgctgatgaaatatctagggaacgcgacagctatcttcttcctcccggatgaagggaagctccagcacttggagaacgaattgacgcacgatatcattactaaattcctggagaatgaagaccgccgctccgcctcattgcatctgccaaaactctcaatcacgggaacttatgacctgaaaagcgtgctgggtcagttaggcatcacaaaggtgttttcaaacggagccgacttaagcggcgtgaccgaggaggcccccctgaaactgagcaaggttagaagcccatag

SEQ ID NO: 45601 - DNA, 1257 bp, Artificial Sequence
  derived and/or modified sequence
atgccttcttccgtttcatggggaattctgctactggccggattgtgttgtctggtgccagtgagtttagcagaggatccccagggggatgccgcccaaaagacagatactagccaccatgatcaagaccatccaacatttaacaagataaccccgaacctagccgaatttgctttctccctgtacagacagttggcccatcaatccaactctaccaatatattcttctcaccagtttccatcgctacagcctttgcgatgctgtctttggggaccaaagccgacacacacgacgaaattctggaagggctcaatttcaatttaacagaaatcccagaagcccagatccacgagggattccaggaactgctgaggactctcaaccagcctgatagtcagctgcagctcaccaccggcaacggtctttttcttagcgaaggccttaagttggtggacaaattcctggaagatgtcaaaaaactctatcactctgaggcgttcacagttaactttggcgacaccgaagaggccaaaaagcagattaatgactacgtggaaaagggaacccagggaaaaatcgtggacctcgtgaaggagttagacagagacacagtttttgccttggtgaactacatctttttcaagggaaaatgggaacgacccttcgaagtaaaggacacagaggaagaagattttcatgtggaccaggttacaaccgttaaggtgcctatgatgaaaagactgggaatgttcaacatacagcactgcaagaaattgagcagctgggtactgctaatgaagtatttggggaatgcaacagccattttctttctgcccgacgagggtaaactgcagcaccttgagaacgaactgacacatgacattattaccaaatttcttgaaaacgaagacagaagaagtgcgtcactgcatctgccaaagttgtccatcaccggtacatacgatttaaaatccgtgctcggccagttaggcatcaccaaggtgtttagcaatggcgcagatctatccggtgtaactgaagaggccccactgaagctgtcaaaggccgttcacaaagcagtactgaccatcgatgagaagggcacagaggccgccggcgctatgtttctggaggctattcccatgtcaatcccccccgaagtgaagttcaataagccctttgtcttcttaatgattgaacagaatactaagtcacccctgttcatggggaaagtcgtgaatccgacccaaaagtag

SEQ ID NO: 45602 - DNA, 1257 bp, Artificial Sequence
  derived and/or modified sequence
atgcccagctcagtctcatggggaattttgctgctggccggcctgtgctgcttggtgcccgtcagccttgcagaggacccccagggagatgccgcacagaaaaccgatacctctcaccacgatcaggaccatccaaccttcaacaaaattaccccaaacctcgcagaatttgccttttccctctataggcagcttgcccaccagtccaacagtactaacatcttttttagcccggtatccatcgccaccgcctttgccatgctaagcctcgggacaaaagccgacacacacgacgaaatcctggaagggctgaattttaatctgactgagatacctgaggcgcagattcacgagggtttccaagaactattaaggacgctgaaccagccggactctcaactgcagctgactactggcaatggtctttttctcagtgagggtctcaagctggtcgataagttcctagaggatgtgaaaaaactctaccattctgaagcatttaccgtgaactttggtgacacagaagaggccaaaaagcaaattaacgactatgttgaaaagggcactcaggggaagatagtggatttagtgaaagagttagacagggataccgtgtttgctctcgtcaattatatattttttaaaggcaaatgggagcgcccattcgaggtcaaggacaccgaggaagaggacttccacgttgaccaggtaaccactgttaaggtccctatgatgaagcgactggggatgttcaacatacagcactgcaagaagttgagttcttgggttctcttgatgaagtatctggggaatgccaccgcaatcttttttcttcctgacgaaggcaagctgcagcacctggaaaacgagctgacccacgatataattacgaagttcctggagaatgaagacagacgaagtgccagtctgcaccttccaaagctgtcaatcacaggcacgtatgacctcaagtcagtgctcggccagttgggcatcacaaaggttttctccaatggcgctgatcttagtggggtcactgaagaagcacccctcaagctgtcgaaagcagtgcacaaagctgttctgacaatcgatgaaaagggtactgaggccgctggtgccatgtttctggaagcgatccctatgagtattcctcccgaggtgaagttcaacaaacccttcgtgtttttaatgattgaacagaacactaaaagccctttgttcatgggaaaagtggttaatccaacacagaaatag

SEQ ID NO: 45603 - DNA, 1257 bp, Artificial Sequence
  derived and/or modified sequence
atgccatcttcagtatcctggggcatcttgttgttagccggcttgtgttgcctggttcccgtgtccctggcagaggatccccaaggtgacgcagcgcaaaaaacggatacaagtcaccacgatcaggaccatcctacattcaacaagattactcctaacttggcagagttcgccttctctctgtacagacagcttgcacatcagtcgaattctactaacatttttttcagtcccgtgagtatcgccaccgcctttgctatgctttctctgggtactaaagctgacacccacgacgaaattctggaggggctgaactttaacctgaccgaaattcctgaagcacagatccacgaaggctttcaagagctgctgcggactctcaaccagcctgacagccaactgcagttgactaccggaaacggcctgttcctaagcgaaggcctgaagttggtcgataagtttttggaagatgttaagaagttataccattcggaagcatttactgtaaacttcggcgacacagaagaggccaagaaacagatcaatgattacgtcgaaaaagggacgcaaggaaagatcgtcgaccttgttaaagaactggaccgagacacagtcttcgcacttgtgaattacatattctttaaaggcaaatgggagcgacctttcgaggtaaaagacacagaagaggaagactttcacgttgatcaggtgaccacagtgaaggtgcccatgatgaaaaggctaggtatgtttaatattcagcactgtaagaagctcagtagttgggtcctgcttatgaaatacctaggcaacgcgacggccatcttttttcttcctgatgaagggaagttgcagcacctggaaaacgagctgactcatgatatcattactaaatttctcgagaatgaagatcgcaggagcgcatcgttacatctgccaaagctgtctattaccggtacatacgacctcaagtccgtgctcggccaattgggtatcactaaggtgtttagcaatggagcagacctatcaggagttactgaggaagcaccactgaaactctcgaaggctgtgcataaagctgtgctcacaatcgacgaaaaggggactgaggccgccggagcgatgttcctagaagccatcccaatgtctattcctccagaggtgaaatttaacaaacccttcgtgttcttgatgatagagcagaataccaagtccccattgtttatgggcaaggtggtcaaccctacccagaagtag

SEQ ID NO: 45604 - DNA, 1257 bp, Artificial Sequence
  derived and/or modified sequence
atgccatcttccgtgagttggggcatactcctcctagccggtctctgctgtctcgtgccagtgtccctggccgaggacccccagggcgacgctgcacaaaagaccgatacctcacaccacgaccaggatcatcctactttcaataaaatcaccccgaacctagcggagtttgccttttccctctacagacagttagcacatcagtcaaattcaacgaacatcttcttctcaccggtttctattgccaccgcattcgccatgttaagtctcgggaccaaggctgatacccacgacgaaatactggaaggcctcaattttaatctgactgaaattccggaggcgcagattcacgaaggttttcaggagctccttcgaactctaaatcaacctgattctcagctgcagctcactactgggaatgggttattcctgagtgagggtctgaaactggtggacaagttcctggaggacgtgaagaaactttatcacagcgaagctttcaccgtcaactttggcgacactgaagaggctaagaaacagattaacgattatgttgagaagggtactcagggtaaaattgtggacctggttaaagaattagatcgtgacactgtctttgccctggtaaactacatcttttttaaggggaaatgggagagaccctttgaggtgaaggacactgaagaagaggacttccatgtagatcaggtcactaccgtaaaagtgcccatgatgaagcgcttaggaatgttcaacatacagcattgtaaaaaattgtcttcatgggtactcctgatgaaatatttagggaatgctaccgcaatttttttcctccccgatgaaggcaagttgcagcatcttgagaacgaattgacccacgatattattactaaattcctagagaatgaggatagaaggagcgcgtcattacacctgcccaaactcagcatcaccggaacatatgatctgaagtctgttttgggacagctcggtattactaaggtgttctccaacggtgctgacctgtcgggagtaaccgaagaagccccgctaaagttgagcaaggctgtgcacaaagctgtgctaacaatcgacgagaagggtaccgaggcagctggcgcaatgttcctggaggccattcctatgtcaatcccccctgaggtaaagttcaataaacctttcgtatttctgatgattgaacaaaataccaagtcccctttgtttatggggaaggtcgtgaaccctacacagaaatag

SEQ ID NO: 45605 - DNA, 1257 bp, Artificial Sequence
  derived and/or modified sequence
atgccaagtagtgtttcatggggaatactcctgctagccgggttgtgctgtctcgtacccgtgtcactcgccgaggatccgcagggggatgcagcccaaaagactgacaccagtcatcacgatcaagaccacccaaccttcaacaaaattaccccaaacttggccgagttcgcgttttccctgtatcgccagctcgcccaccaaagtaactcaaccaatatcttcttttcccctgtatccatcgctacagcatttgcgatgttatccctaggcaccaaggccgacacacacgatgagattctggagggcctcaatttcaatctgaccgagatccccgaggcccaaatccatgagggatttcaggagttgctccggacactgaaccagcccgactcacagctgcaacttactaccggtaatggactgttcttgagcgagggcctgaagctcgttgataagtttctcgaagatgtgaaaaagttgtaccatagcgaagcgtttaccgtcaactttggcgacactgaagaggcaaaaaaacaaataaatgattacgtggagaagggaacacagggtaaaattgtggacttagtaaaagaacttgaccgggacactgttttcgcccttgttaactatattttcttcaaaggtaagtgggaacggcctttcgaggtgaaagacactgaggaggaagatttccacgtggatcaggtgactaccgtgaaagttcctatgatgaagagacttggcatgtttaacatacagcactgcaaaaagctatccagctgggtactgctcatgaagtacttgggaaacgctaccgccattttctttctacccgacgaaggcaagctccaacatctagaaaacgaactgacccacgatattatcaccaaattcttggagaacgaagacagaaggtcggcgtcactacatttaccaaagctgtctataaccggtacctatgacctaaagagcgtcctagggcaattgggcataactaaggttttttctaatggagccgatctttcaggagtgaccgaggaagcacctctgaaactgtccaaagccgtccacaaggcggtcctgacgattgacgagaaagggaccgaggctgctggtgctatgtttctggaggccatcccaatgtcaattccccctgaggtgaagtttaacaagccatttgtttttctcatgatcgagcagaataccaagtcgccactgtttatggggaaggtggtcaatccaacccaaaaatag

SEQ ID NO: 45606 - DNA, 279 bp, Artificial Sequence
  derived and/or modified sequence
atgccgtcctccgtgtcctggggaatcctgctgctcgccggcctgtgctgtctggtccctgttagcctcgctgaagacccccagggggacgccgctcagaagaccgacacaagccaccatgatcaggatcatccaacattcaataaaattactcccaaccttgctgaattcgccttttcactctatcgccagttagcccatcagagcaattctaccaacatcttttttagcccggtgtcgattgccaccgcctttgctatgttatcccttggcacctag

SEQ ID NO: 45607 - DNA, 471 bp, Artificial Sequence
  derived and/or modified sequence
atgccaagctctgtgtcctggggtatcctccttctggcaggcttgtgttgcttggtaccagtatccctcgcagaggacccacaaggtgacgctgcacagaaaacagatactagccaccatgaccaagaccaccctacgttcaacaaaattacgcccaacctcgctgaatttgctttcagtctataccgacaactagcacaccagtctaatagcacaaacatcttcttcagccccgtgagtattgctaccgcattcgccatgttgtcactaggaacaaaggctgacacacacgatgagatcctggaggggctcaatttcaatctcacagaaatacccgaggctcagattcatgagggatttcaggagctgttacgaactctgaaccaacctgattcccagctgcagttaaccaccgggaatgggctgttcctctccgaaggtttgaagttggtggataagtttctagagtag

SEQ ID NO: 45608 - DNA, 354 bp, Artificial Sequence
  derived and/or modified sequence
atgccaagcagtgtatcctgggggattcttctcctagccggtctctgttgtcttgtccctgtgtctctggccgaggatccccagggcgacgctgcacaaaagacagatacctctcatcatgatcaggaccaccccacattcaacaaaatcacccccaatcttgccgaatttgccttctcactgtatcgccaactcgcccaccagtccaatagcacaaacatattcttttcccccgtgtccattgccactgccttcgctatgctgagtctcggaactaaagccgatacacacgacgagattctggaaggtttaaatttcaatcttaccgaaatccccgaagcccaaattcactag

SEQ ID NO: 45609 - DNA, 69 bp, Artificial Sequence
  derived and/or modified sequence
atgccttcctccgttagttggggaattctacttctggccggcttatgttgcttggtgcccgtgtcctag

SEQ ID NO: 45610 - DNA, 435 bp, Artificial Sequence
  derived and/or modified sequence
atgccctcatctgtgtcctggggaatcctactgctggcgggactgtgctgcctagttccggtgagtttagcagaagacccccagggggatgctgcccagaaaactgacacgtcacatcatgaccaagatcatcctacttttaacaagataacccctaacctagcggagttcgccttttccttatatagacaactcgctcatcaatctaattctacaaacatcttttttagccccgtcagcatagctaccgcctttgccatgctgtcccttgggaccaaggcagatactcatgacgagatcctagaaggcctaaacttcaatttaaccgaaatccctgaggctcagatacatgaagggtttcaagagcttctccgcaccctcaaccagcctgacagtcaactccagctaacaacaggtaacggtctatttctctag

SEQ ID NO: 45611 - DNA, 1257 bp, Artificial Sequence
  derived and/or modified sequence
atgccaagctcagtcagttggggcatcctgctccttgccggcctttgttgtttggtgcccgtatcacttgcagaggatccccagggtgatgccgctcagaagacagatacttcacaccacgatcaggaccatcccacctttaataagattaccccgaacttggcagaatttgctttcagtctgtaccgtcagctagctcatcaatctaacagtactaatatctttttctcccctgtttctatcgctaccgcctttgctatgctttcattaggcaccaaggcagacacccacgacgagattcttgagggtctgaattttaatctgacagagatacccgaagcacaaatccacgaggggtttcaggagctgctgcgcaccctcaatcagccggactcacaactgcagctgaccacaggaaatggcctattccttagcgaggggttgaagctcgtggacaagttcttggaggacgtgaagaaactctatcactcggaagcattcaccgtgaatttcggggataccgaagaggcgaagaaacaaatcaatgactacgtggagaagggaacccagggaaaaatagttgacttggtgaaagagctggatcgggacacagtgttcgctctcgtgaattacattttctttaaaggcaagtgggaacgtccctttgaggtgaaagatactgaagaagaggatttccatgtggatcaagtgacaactgtaaaagtccccatgatgaagagacttgggatgtttaatatccaacattgtaaaaaactgagctcctgggtgttactcatgaagtacctgggcaacgcgactgccatttttttcctgccagacgagggtaagctgcagcatctggagaacgaactgacacatgatatcattactaagttcctcgaaaatgaagatcgtcggagcgcatccctccatctaccaaaattaagcatcacaggcacatatgatttgaaaagcgtcctgggccagttaggaatcacaaaagttttctctaatggggcagatttgagcggcgtaaccgaagaggcacctctgaaactgagcaaggctgtgcataaggctgtgctcacaattgatgagaagggaacagaagccgcaggcgctatgttccttgaagcaattccgatgtccatcccaccagaagtaaagtttaacaaacctttcgtatttctaatgattgaacagaataccaaatctccactcttcatgggtaaagtcgttaatccaacacaaaagtag

SEQ ID NO: 45612 - DNA, 1257 bp, Artificial Sequence
  derived and/or modified sequence
atgccatcatccgtgtcctggggaatattacttctggccggactttgttgtctggtccccgtgtcgctggcggaagacccacagggagacgcagcacagaagaccgacaccagtcaccacgaccaagatcacccgacttttaataaaatcacacccaacctggccgagttcgcgttcagtctgtacagacagctcgctcaccaatccaactccactaacatattcttctcacccgttagcatcgccaccgcttttgctatgttgtccctcggaactaaagctgacacacacgacgaaatactggagggtctaaatttcaatctgacagaaattcccgaggcacaaatccacgagggatttcaggagttactcaggacacttaatcagcccgactcacagttgcaactaacaacaggaaacggtcttttcttgtctgaaggactcaagctcgttgacaagtttctcgaagatgtaaagaaattataccactctgaagcctttacggtcaacttcggggatacggaggaagccaagaagcagattaatgactacgtagagaaggggacccagggaaagattgttgatcttgtgaaggaactcgatcgggatacagtcttcgccctggtcaattatatcttctttaaggggaagtgggaaagaccttttgaagttaaggacacagaggaggaggattttcatgtggaccaggttacaactgtgaaggtgcccatgatgaagaggctagggatgtttaatatacagcactgcaagaaactttccagctgggtcttactcatgaagtatcttggtaacgctacagcaatcttttttttaccagacgagggaaaattgcaacacttagaaaatgagttgacacatgatataataacgaagtttctggagaacgaagaccgacgctctgcctccttgcacttaccaaaactatcaataaccggcacctacgatctcaagtccgtactggggcaactcgggattaccaaagtattttccaacggtgcagatctatctggggttacagaggaggccccacttaaactatcgaaggccgttcataaagccgtgctgacaattgacgagaagggcaccgaagctgctggtgcgatgttcctggaagccatacctatgtcaatccctcctgaggtcaaatttaataagccatttgtgttcctgatgatcgagcagaacaccaaaagccctctttttatgggaaaagttgtcaaccccacccagaaatag

SEQ ID NO: 45613 - DNA, 1257 bp, Artificial Sequence
  derived and/or modified sequence
atgccttcaagcgtgtcttggggcattttgcttctggccggtttatgctgcttggtgcccgtctctctcgccgaagatccacagggagacgctgctcagaaaacggatacctcccatcatgatcaagaccaccctacgtttaacaagattactcccaatttagcggaatttgctttctctctatacagacaactggcccaccagtccaatagcacaaacatcttcttctctcccgtttcgatcgctacagccttcgccatgctgagcctgggtacaaaagccgacacacatgatgaaatcctggaaggcttgaacttcaatcttacagagatccccgaggcgcagatccatgagggatttcaagaattgcttcgaaccttaaatcagccggattcccagctccagcttaccacagggaatggtctctttctatcagagggcctcaaactcgtcgataaattcctggaagatgtcaagaaactgtaccattccgaagcattcactgttaatttcggggacacagaagaagctaaaaaacagatcaatgactacgtggaaaagggaactcaagggaaaattgttgacctggtaaaggaacttgatagagacacggtgttcgccctggtgaattatatcttctttaagggaaagtgggagagaccatttgaagtgaaagataccgaagaagaagactttcatgtagatcaggtaactacagtgaaggttcccatgatgaaacgcttaggcatgttcaacatacagcattgtaaaaaactatccagctgggtgctcctgatgaaataccttggtaatgcaactgccatatttttcctacctgacgaaggaaagctccagcatttggaaaatgagctcacacacgacataatcacaaaatttctggagaatgaagatcgccgaagcgctagtctgcacctgccaaagctctctataactgggacgtatgaccttaagagcgtgctcggacagttaggaattactaaagtgtttagcaacggggccgacctgtccggtgtcactgaggaagccccccttaagctcagcaaggctgtccacaaagctgtgctcaccatcgacgagaaaggaacagaggctgctggagccatgtttttagaagcaatacctatgtcaattccccctgaggtgaaatttaataaaccattcgtgttcctcatgatagagcagaataccaagtctccgctgtttatgggcaaagtcgtgaatcctactcagaaatag

SEQ ID NO: 45614 - DNA, 1080 bp, Artificial Sequence
  derived and/or modified sequence
atgccaagtagtgtgtcctggggaattctgctgctggccggactttgctgcttggtaccagtgtccctggccgaagatccccaaggagatgcagcacagaaaaccgacacaagtcaccacgaccaagaccatccgaccttcaataagattacaccgaacctcgctgaattcgccttctccctgtaccgacagttagctcaccagtctaactctaccaacatttttttctccccagtctccatcgccaccgcattcgctatgctgtctctgggcaccaaagccgacactcatgacgagatacttgaagggttgaatttcaatctgaccgaaattccagaagcccagatacacgagggattccaggaactgcttagaacattaaatcagcctgattcccaactgcagttgaccacagggaatggattgttcttaagcgaaggcctcaagctggttgataagtttcttgaggacgtgaaaaagctctatcattcggaggcatttacggttaatttcggagatacagaggaagcaaaaaaacagataaacgactacgtcgagaaaggtacacagggcaagattgtggatcttgtaaaggaattggatcgggataccgtgttcgctctcgtgaattacattttttttaagggaaaatgggagagacctttcgaggttaaagataccgaggaggaggatttccatgtagatcaggtaaccaccgttaaagtgccaatgatgaaacgcttgggaatgttcaacatccagcactgtaaaaaactgtcctcctgggtcctgctcatgaagtaccttgggaacgcgaccgctatcttttttttgccagatgagggtaaactgcagcacctggagaatgaactgacccacgacataattactaagtttctggagaatgaggatcgtcgctccgcttctctccacctgcctaagctgagcatcaccggtacctacgatctaaagagcgttttgggccagttgggcataaccaaagtatttagtaacggcgccgatttatcaggcgtgacagaggaagctccactcaagcttagcaaagttcggagtccatag

SEQ ID NO: 45615 - DNA, 1257 bp, Artificial Sequence
  derived and/or modified sequence
atgcccagcagcgtgtcctggggcatcttgttgctcgctggcctgtgctgtctggtgccagtctcccttgccgaggacccacaaggcgatgccgcccagaaaaccgatacctctcaccatgaccaagaccatccaacctttaataagatcacgccaaatcttgcagaatttgctttcagcctttaccgccaactcgcccatcagtcaaactccacaaatatttttttctctcctgtgtccatcgctactgccttcgcaatgctcagcctgggaactaaggccgacacacatgatgagattctggaaggattaaattttaacttaaccgagatccctgaagcgcaaattcatgaaggctttcaggagcttctgcgcactcttaatcagccagattctcaactacagctcacaaccggcaatggacttttcttgtctgaaggactgaagctcgtagacaagttcctagaggatgtcaaaaagttataccactccgaagctttcacagttaattttggagacacagaggaggcaaaaaaacagattaatgactatgtcgagaagggaacacagggcaagattgtggatctcgtgaaggagctggaccgagatacagtgtttgccttagtcaattacattttttttaaaggaaagtgggaacgcccctttgaagtcaaagacactgaagaagaggatttccatgtagatcaggtgactacagtaaaggttccaatgatgaagagacttggtatgttcaatatacagcactgcaagaagttgagctcctgggtactattgatgaaatacttgggaaatgcgaccgctattttcttcctcccagacgaaggaaagcttcaacacctggagaacgaactcacacacgatattataacaaagtttcttgagaatgaagaccgacgttctgcatccctgcacctgccaaagctctccatcaccggcacatatgacctgaaatcagtgctgggccagcttggaataacaaaggtcttctcgaatggtgccgaccttagcggcgtaactgaagaagccccacttaagctttccaaggctgtccacaaagctgtgcttacaattgatgaaaaaggcaccgaggcagctggggcaatgttcctggaagccattcctatgtctattcctcccgaagtcaaatttaataaaccttttgtgttcctgatgattgaacagaataccaagtctcccctcttcatgggtaaagtcgtaaacccaacccaaaaatag

SEQ ID NO: 45616 - DNA, 1257 bp, Artificial Sequence
  derived and/or modified sequence
atgcctagtagtgtctcctgggggattctcctgttagcgggtctctgctgcttggtgcctgtcagcctcgccgaggatccccagggcgacgccgcacagaaaaccgacacttcacaccatgaccaagaccacccaacttttaataaaataactcctaacctcgctgaattcgcttttagcctttaccgtcaacttgcccaccagtctaactctaccaacatctttttctcaccagtatccatcgcaacagccttcgccatgcttagcttagggactaaagccgatacacacgatgaaatactcgaggggctcaattttaacttaacagaaattcccgaggcacaaatccatgaggggtttcaggaacttctgcgaaccttgaatcagccggattctcaactccaactcaccaccggaaacgggctattcctgtccgaaggcctaaaattagttgacaagttcctcgaggatgttaaaaagttatatcacagtgaggcttttacagtaaattttggggataccgaggaggcaaaaaagcagatcaatgactacgtggagaagggcacacagggcaaaatcgtcgatttggtaaaggaactggatcgagacacagtctttgcactggtcaattatattttcttcaaaggtaaatgggagcggccttttgaagtgaaggataccgaggaggaagatttccatgttgatcaggtcaccacagtgaaggtgcccatgatgaaaagactcggaatgtttaacatccaacattgcaaaaaactgtccagctgggtcttgctgatgaagtatctggggaacgctactgctatctttttcttgcccgatgaaggaaaattacaacacctggagaatgaattaactcatgatattataacaaaatttctcgagaatgaagacagaaggagcgctagtttgcacttacccaaactgtctatcacaggcacctatgatctgaaatccgtgttggggcagctgggcatcacgaaggtcttttctaacggcgctgacctgtccggagtgactgaagaagcccccctcaagttgtctaaggctgttcataaggctgtgttgaccatcgatgagaaagggaccgaggccgcgggcgcaatgttcctcgaagcaatacccatgtctataccccctgaagttaaattcaacaaacccttcgtgtttctgatgatagaacagaatactaagtcacccctctttatgggcaaagttgtaaaccccacacagaaatag

SEQ ID NO: 45617 - DNA, 1257 bp, Artificial Sequence
  derived and/or modified sequence
atgccctcctccgtttcatggggcatcttactcttagcggggctctgctgcctcgtccccgtaagcctggccgaagaccctcaaggcgatgctgcccagaaaaccgatacaagccatcacgaccaagatcaccctactttcaacaagattactcctaacctcgcagagtttgccttctcactgtatcggcaactggcacaccaatctaactctacaaacattttcttttcccccgtgtcaatcgctaccgccttcgccatgctctccctaggtactaaggccgacacacatgatgaaatcttggagggattgaacttcaacttaacagaaattcctgaagctcaaatacatgaaggctttcaagaactgctgagaacattgaatcagcctgattcccaactccagctaactaccggaaacggactgtttttaagcgagggtttgaaactggtggacaaattcctggaagatgtaaaaaaactgtaccactccgaagcctttactgtcaatttcggcgatacagaggaggcaaaaaaacaaattaatgattacgtagaaaaaggaacacagggaaaaattgtggatctggtgaaggagctggacagagacaccgtgtttgcactggttaattatatttttttcaagggcaaatgggagcgaccatttgaggttaaagatacagaggaagaggactttcacgttgatcaggtgacgacagttaaggtcccaatgatgaagagactgggaatgttcaatatacagcattgcaagaaactgtctagttgggttctgctcatgaaatacctaggtaacgctactgcaatattcttcctgcctgacgaaggcaagctgcaacacttagagaacgaactgacacacgatattatcacgaagtttttggagaacgaagatcgcaggtcagcaagccttcacctaccaaaactgagcatcacaggaacctacgacctgaaatccgtactaggccaactgggtatcacgaaggtttttagcaatggcgccgatttgagcggcgtgactgaagaggccccgctcaaacttagcaaagcagtccacaaggccgtcctaactattgacgagaagggtaccgaagctgctggggcgatgttcctggaagccattcctatgagcattcctcctgaggtaaagtttaataagccttttgtgtttctgatgattgagcagaacaccaaatcaccgctcttcatgggaaaagtcgtcaacccaacacagaagtag

SEQ ID NO: 45618 - DNA, 1257 bp, Artificial Sequence
  derived and/or modified sequence
atgccttcaagcgtatcttggggcatacttttactcgcgggattatgttgcttagttcccgtaagtctcgccgaggacccccaaggagacgccgcccagaagactgataccagccatcacgaccaagaccaccctactttcaataagataactccgaatctggccgagtttgccttcagtctgtatcgccagttggcccaccaatccaattctaccaatatctttttctcccctgtatctatagctaccgccttcgcgatgctctcactcggcaccaaagctgatacccacgatgagatcttggagggattgaactttaacttaactgagatcccagaggcacagatccacgaggggttccaagaactgctgcgtaccctgaaccaacctgactcccagcttcaactaactactggcaatggattatttttgtctgaaggactgaaactggtagataaattcctggaggacgtcaagaaactctatcacagtgaagcttttaccgtgaattttggcgatactgaggaagctaagaaacagattaatgattacgtggaaaaggggacacaaggaaaaatagtcgatctcgtgaaagagcttgatagagatacagtctttgcgttggttaattacatatttttcaagggaaagtgggaaaggccctttgaagtaaaggacacagaagaggaggacttccacgtggaccaggtgacgactgtcaaggtccccatgatgaaaagactgggtatgtttaatattcagcattgcaaaaagctctctagttgggtgctcttgatgaaatatctagggaacgccaccgccatttttttcctcccagatgaaggtaaattgcaacatttagagaatgaactcactcatgacatcatcactaagttcctggaaaacgaggaccgaagatctgccagtctccacctgcctaaattaagcattacagggacttacgacttgaagagcgtcctggggcagctcggaatcactaaggtattttcaaatggcgcagacctgtccggagtcaccgaagaagccccactgaagctgagcaaagcagtgcacaaggccgtgttgaccatcgacgaaaagggtacagaagccgcaggtgctatgtttctggaggccatcccaatgagtatcccgcctgaagttaagttcaacaaaccgttcgtgttcctcatgattgagcaaaataccaaatcccccctcttcatgggaaaggtcgttaatccaacacagaaatag

SEQ ID NO: 45619 - DNA, 1257 bp, Artificial Sequence
  derived and/or modified sequence
atgccctcaagtgtcagctggggtatactgctcctcgctggcttatgttgcctggtcccagtcagcctcgccgaggacccacagggggacgctgcccagaaaaccgatacctcccaccacgaccaagaccatccaacatttaataaaattactcccaacctcgccgaattcgcttttagcttatatagacaactggcccatcaatccaattctactaacatctttttcagccccgtgagtatcgcgaccgcgtttgccatgctgagcctcggaaccaaagccgatacgcatgacgaaatcctcgagggcttgaattttaatttgacggagatacccgaggctcagattcatgagggatttcaagaactgctcagaaccctgaatcaacccgacagccaactccagctcaccacagggaacgggctattcttgtccgaagggctcaagctggttgacaaatttttggaggacgtcaaaaaattgtaccacagcgaagcttttacagtcaatttcggggatacagaagaagcgaagaaacagatcaacgattacgtcgaaaaaggcactcaaggaaaaatcgtagatctcgttaaagaactggaccgagacaccgtttttgcgctcgtgaactacatcttttttaaaggcaaatgggaacggcctttcgaggtcaaggacacagaggaggaagactttcacgtagatcaagtgaccacagtgaaagtacctatgatgaaacgccttgggatgtttaacatccagcattgtaaaaagctcagtagttgggtcctgctaatgaaatacctggggaatgctactgctatattcttcctccccgatgaaggaaaactacagcatctcgaaaacgagctgacccatgatataattactaaattcttggagaacgaagatagaagaagcgcctccttacacttacctaagctttccatcactgggacttacgatcttaagtctgtactggggcaacttggaatcacaaaggtgttcagtaatggggctgacctatccggcgtgacagaagaagcacccttaaaactgagtaaggctgtgcataaggccgtactgaccattgacgaaaaaggcactgaagctgctggcgcgatgtttctggaagctatacctatgtccatccctcctgaggtaaagttcaataaacccttcgtctttttgatgatcgaacagaatactaaatctccactctttatgggcaaagtcgtgaaccccactcaaaaatag

SEQ ID NO: 45620 - DNA, 471 bp, Artificial Sequence
  derived and/or modified sequence
atgccatcttccgtatcttggggcatcctcctcctcgccggattatgctgtctggtccccgtatcattggccgaggacccccagggggatgccgcccaaaaaaccgacacctcccatcacgaccaagaccatcccacttttaacaaaatcactccaaacctggcagaattcgcattttccctgtatagacaactggcccatcagagcaattcaaccaatatatttttttctccagtgtcaatcgctactgcattcgccatgctgtctctgggtactaaagccgacactcatgacgagatcttagaaggactgaatttcaacctgaccgagatcccagaggcacagatccatgaaggatttcaagagctccttaggaccctgaatcagcctgactcccagctgcaactcaccacgggaaatggcctcttcctgtcagagggcttaaaattggtggacaagttcctcgagtag

SEQ ID NO: 45621 - DNA, 354 bp, Artificial Sequence
  derived and/or modified sequence
atgccatcttccgtctcctggggcatccttctccttgctggcctatgctgcctggtccccgtgtcattagctgaagacccacaaggtgacgctgcgcagaagacagatacatcccaccacgaccaggatcatcccactttcaacaaaattactcccaacctcgccgagttcgccttctccctataccgacagttagctcaccagagtaactctacgaacattttcttttcccccgtcagcatcgcaacagcctttgccatgctctctctgggcacaaaagctgatacccacgatgagattctggaaggattaaactttaacctaaccgagatccctgaagcacaaatacattag

SEQ ID NO: 45622 - DNA, 435 bp, Artificial Sequence
  derived and/or modified sequence
atgccatccagcgtctcttggggtattctgctgcttgccggcctgtgctgcttggtgccagtcagtctcgcagaggatccacagggggatgcagctcagaaaaccgataccagtcaccacgaccaagaccatcctaccttcaacaaaatcactcccaaccttgccgaattcgccttttctctctataggcagctagctcatcagtccaattcaacaaatatcttctttagcccagtgtctatagctaccgcttttgctatgttaagtcttggcaccaaagccgatacacacgatgaaatactagaaggcctaaacttcaatttaaccgaaatccctgaggctcagatacatgaagggtttcaagagcttctccgcaccctcaaccagcctgacagtcaactccagctaacaacaggtaacggtctatttctctag

SEQ ID NO: 45623 - DNA, 1622 bp, Artificial Sequence
  derived and/or modified sequence
aggtacaatgactcctttcggtaagtgcagtggaagctgtacactgcccaggcaaagcgtccgggcagcgtaggcgggcgactcagatcccagccagtggacttagcccctgtttgctcctccgataactggggtgaccttggttaatattcaccagcagcctcccccgttgcccctctggatccactgcttaaatacggacgaggacagggccctgtctcctcagcttcaggcaccaccactgacctgggacagtgaatcgacaatgccgtcttctgtctcgtggggcatcctcctgctggcaggcctgtgctgcctggtccctgtctccctggctgaggatccccagggagatgctgcccagaagacagatacatcccaccatgatcaggatcacccaaccttcaacaagatcacccccaacctggctgagttcgccttcagcctataccgccagctggcacaccagtccaacagcaccaatatcttcttctccccagtgagcatcgctacagcctttgcaatgctctccctggggaccaaggctgacactcacgatgaaatcctggagggcctgaatttcaacctcacggagattccggaggctcagatccatgaaggcttccaggaactcctccgtaccctcaaccagccagacagccagctccagctgaccaccggcaatggcctgttcctcagcgagggcctgaagctagtggataagtttttggaggatgttaaaaagttgtaccactcagaagccttcactgtcaacttcggggacaccgaagaggccaagaaacagatcaacgattacgtggagaagggtactcaagggaaaattgtggatttggtcaaggagcttgacagagacacagtttttgctctggtgaattacatcttctttaaaggcaaatgggagagaccctttgaagtcaaggacaccgaggaagaggacttccacgtggaccaggtgaccaccgtgaaggtgcctatgatgaagcgtttaggcatgtttaacatccagcactgtaagaagctgtccagctgggtgctgctgatgaaatacctgggcaatgccaccgccatcttcttcctgcctgatgaggggaaactacagcacctggaaaatgaactcacccacgatatcatcaccaagttcctggaaaatgaagacagaaggtctgccagcttacatttacccaaactgtccattactggaacctatgatctgaagagcgtcctgggtcaactgggcatcactaaggtcttcagcaatggggctgacctctccggggtcacagaggaggcacccctgaagctctccaaggccgtgcataaggctgtgctgaccatcgacgagaaagggactgaagctgctggggccatgtttttagaggccatacccatgtctatcccccccgaggtcaagttcaacaaaccctttgtcttcttaatgattgaacaaaataccaagtctcccctcttcatgggaaaagtggtgaatcccacccaaaaataactgcctctcgctcctcaacccctcccctccatccctggccccctccctggatgacattaaagaagggttgagctggtccctgcctgcatgtgactgtaaa

SEQ ID NO: 45624 - DNA, 1885 bp, Artificial Sequence
  derived and/or modified sequence
gtgggcaggaactgggcactgtgcccagggcatgcactgcctccacgcagcaaccctcagagtcctgagctgaaccaagaaggaggagggggtcgggcctccgaggaaggcctagccgctgctgctgccaggaattccaggttggaggggcggcaacctcctgccagccttcaggccactctcctgtgcctgccagaagagacagagcttgaggagagcttgaggagagcaggaaagggcggcagtaagtcttcagcatcaggcattttggggtgactcagtaaatggtagatcttgctaccagtggaacagccactaaggattctgcagtgagagcagagggccagctaagtggtactctcccagagactgtctgactcacgccaccccctccaccttggacacaggacgctgtggtttctgagccaggtacaatgactcctttcgcagcctcccccgttgcccctctggatccactgcttaaatacggacgaggacagggccctgtctcctcagcttcaggcaccaccactgacctgggacagtgaatcgacaatgccgtcttctgtctcgtggggcatcctcctgctggcaggcctgtgctgcctggtccctgtctccctggctgaggatccccagggagatgctgcccagaagacagatacatcccaccatgatcaggatcacccaaccttcaacaagatcacccccaacctggctgagttcgccttcagcctataccgccagctggcacaccagtccaacagcaccaatatcttcttctccccagtgagcatcgctacagcctttgcaatgctctccctggggaccaaggctgacactcacgatgaaatcctggagggcctgaatttcaacctcacggagattccggaggctcagatccatgaaggcttccaggaactcctccgtaccctcaaccagccagacagccagctccagctgaccaccggcaatggcctgttcctcagcgagggcctgaagctagtggataagtttttggaggatgttaaaaagttgtaccactcagaagccttcactgtcaacttcggggacaccgaagaggccaagaaacagatcaacgattacgtggagaagggtactcaagggaaaattgtggatttggtcaaggagcttgacagagacacagtttttgctctggtgaattacatcttctttaaaggcaaatgggagagaccctttgaagtcaaggacaccgaggaagaggacttccacgtggaccaggtgaccaccgtgaaggtgcctatgatgaagcgtttaggcatgtttaacatccagcactgtaagaagctgtccagctgggtgctgctgatgaaatacctgggcaatgccaccgccatcttcttcctgcctgatgaggggaaactacagcacctggaaaatgaactcacccacgatatcatcaccaagttcctggaaaatgaagacagaaggtctgccagcttacatttacccaaactgtccattactggaacctatgatctgaagagcgtcctgggtcaactgggcatcactaaggtcttcagcaatggggctgacctctccggggtcacagaggaggcacccctgaagctctccaaggccgtgcataaggctgtgctgaccatcgacgagaaagggactgaagctgctggggccatgtttttagaggccatacccatgtctatcccccccgaggtcaagttcaacaaaccctttgtcttcttaatgattgaacaaaataccaagtctcccctcttcatgggaaaagtggtgaatcccacccaaaaataactgcctctcgctcctcaacccctcccctccatccctggccccctccctggatgacattaaagaagggttgagc

SEQ ID NO: 45625 - DNA, 1450 bp, Artificial Sequence
  derived and/or modified sequence
ggcaccaccactgacctgggacagtgaatcgacaatgccgtcttctgtctcgtggggcatcctcctgctggcaggcctgtgctgcctggtccctgtctccctggctgaggatccccagggagatgctgcccagaagacagatacatcccaccatgatcaggatcacccaaccttcaacaagatcacccccaacctggctgagttcgccttcagcctataccgccagctggcacaccagtccaacagcaccaatatcttcttctccccagtgagcatcgctacagcctttgcaatgctctccctggggaccaaggctgacactcacgatgaaatcctggagggcctgaatttcaacctcacggagattccggaggctcagatccatgaaggcttccaggaactcctccgtaccctcaaccagccagacagccagctccagctgaccaccggcaatggcctgttcctcagcgagggcctgaagctagtggataagtttttggaggatgttaaaaagttgtaccactcagaagccttcactgtcaacttcggggacaccgaagaggccaagaaacagatcaacgattacgtggagaagggtactcaagggaaaattgtggatttggtcaaggagcttgacagagacacagtttttgctctggtgaattacatcttctttaaaggcaaatgggagagaccctttgaagtcaaggacaccgaggaagaggacttccacgtggaccaggtgaccaccgtgaaggtgcctatgatgaagcgtttaggcatgtttaacatccagcactgtaagaagctgtccagctgggtgctgctgatgaaatacctgggcaatgccaccgccatcttcttcctgcctgatgaggggaaactacagcacctggaaaatgaactcacccacgatatcatcaccaagttcctggaaaatgaagacagaaggtctgccagcttacatttacccaaactgtccattactggaacctatgatctgaagagcgtcctgggtcaactgggcatcactaaggtcttcagcaatggggctgacctctccggggtcacagaggaggcacccctgaagctctccaaggtgagatcaccctgacgaccttgttgcaccctggtatctgtagggaagaatgtgtgggggctgcagctctgtcctgaggctgaggaaggggccgagggaaacaaatgaagacccaggctgagctcctgaagatgcccgtgattcactgacacgggacgtggtcaaacagcaaagccaggcaggggactgctgtgcagctggcactttcggggcctcccttgaggttgtgtcactgaccctgaatttcaactttgcccaagaccttctagacattgggccttgatttatccatactgacacagaaaggtttgggctaagttgtttcaaaggaatttctgactccttcgatct

SEQ ID NO: 45626 - DNA, 1628 bp, Artificial Sequence
  derived and/or modified sequence
atgcactgcctccacgcagcaaccctcagagtcctgagctgaaccaagaaggaggagggggtcgggcctccgaggaaggcctagccgctgctgctgccaggaattccaggttggaggggcggcaacctcctgccagccttcaggccactctcctgtgcctgccagaagagacagagcttgaggagagcttgaggagagcaggaaagcctcccccgttgcccctctggatccactgcttaaatacggacgaggacagggccctgtctcctcagcttcaggcaccaccactgacctgggacagtgaatcgacaatgccgtcttctgtctcgtggggcatcctcctgctggcaggcctgtgctgcctggtccctgtctccctggctgaggatccccagggagatgctgcccagaagacagatacatcccaccatgatcaggatcacccaaccttcaacaagatcacccccaacctggctgagttcgccttcagcctataccgccagctggcacaccagtccaacagcaccaatatcttcttctccccagtgagcatcgctacagcctttgcaatgctctccctggggaccaaggctgacactcacgatgaaatcctggagggcctgaatttcaacctcacggagattccggaggctcagatccatgaaggcttccaggaactcctccgtaccctcaaccagccagacagccagctccagctgaccaccggcaatggcctgttcctcagcgagggcctgaagctagtggataagtttttggaggatgttaaaaagttgtaccactcagaagccttcactgtcaacttcggggacaccgaagaggccaagaaacagatcaacgattacgtggagaagggtactcaagggaaaattgtggatttggtcaaggagcttgacagagacacagtttttgctctggtgaattacatcttctttaaaggcaaatgggagagaccctttgaagtcaaggacaccgaggaagaggacttccacgtggaccaggtgaccaccgtgaaggtgcctatgatgaagcgtttaggcatgtttaacatccagcactgtaagaagctgtccagctgggtgctgctgatgaaatacctgggcaatgccaccgccatcttcttcctgcctgatgaggggaaactacagcacctggaaaatgaactcacccacgatatcatcaccaagttcctggaaaatgaagacagaaggtctgccagcttacatttacccaaactgtccattactggaacctatgatctgaagagcgtcctgggtcaactgggcatcactaaggtcttcagcaatggggctgacctctccggggtcacagaggaggcacccctgaagctctccaaggccgtgcataaggctgtgctgaccatcgacgagaaagggactgaagctgctggggccatgtttttagaggccatacccatgtctatcccccccgaggtcaagttcaacaaaccctttgtcttcttaatgattgaacaaaataccaagtctcccctcttcatgggaaaagtggtgaatcccacccaaaaataactgcctctcgctcctcaacccctcccctccatccctggccccctccctggatgacattaa

SEQ ID NO: 45627 - DNA, 3144 bp, Artificial Sequence
  derived and/or modified sequence
tcagagtcctgagctgaaccaagaaggaggagggggtcgggcctccgaggaaggcctagccgctgctgctgccaggaattccaggttggaggggcggcaacctcctgccagccttcaggccactctcctgtgcctgccagaagagacagagcttgaggagagcttgaggagagcaggaaaggacaatgccgtcttctgtctcgtggggcatcctcctgctggcaggcctgtgctgcctggtccctgtctccctggctgaggatccccagggagatgctgcccagaagacagatacatcccaccatgatcaggatcacccaaccttcaacaagatcacccccaacctggctgagttcgccttcagcctataccgccagctggcacaccagtccaacagcaccaatatcttcttctccccagtgagcatcgctacagcctttgcaatgctctccctggggaccaaggctgacactcacgatgaaatcctggagggcctgaatttcaacctcacggagattccggaggctcagatccatgaaggcttccaggaactcctccgtaccctcaaccagccagacagccagctccagctgaccaccggcaatggcctgttcctcagcgagggcctgaagctagtggataagtttttggaggatgttaaaaagttgtaccactcagaagccttcactgtcaacttcggggacaccgaagaggccaagaaacagatcaacgattacgtggagaagggtactcaagggaaaattgtggatttggtcaaggagcttgacagagacacagtttttgctctggtgaattacatcttctttaaaggcaaatgggagagaccctttgaagtcaaggacaccgaggaagaggacttccacgtggaccaggtgaccaccgtgaaggtgcctatgatgaagcgtttaggcatgtttaacatccagcactgtaagaagctgtccagctgggtgctgctgatgaaatacctgggcaatgccaccgccatcttcttcctgcctgatgaggggaaactacagcacctggaaaatgaactcacccacgatatcatcaccaagttcctggaaaatgaagacagaaggtctgccagcttacatttacccaaactgtccattactggaacctatgatctgaagagcgtcctgggtcaactgggcatcactaaggtcttcagcaatggggctgacctctccggggtcacagaggaggcacccctgaagctctccaaggccgtgcataaggctgtgctgaccatcgacgagaaagggactgaagctgctggggccatgtttttagaggccatacccatgtctatcccccccgaggtcaagttcaacaaaccctttgtcttcttaatgattgaacaaaataccaagtctcccctcttcatgggaaaagtggtgaatcccacccaaaaataactgcctctcgctcctcaacccctcccctccatccctggccccctccctggatgacattaaagaagggttgagctggtccctgcctgcatgtgactgtaaatccctcccatgttttctctgagtctccctttgcctgctgaggctgtatgtgggctccaggtaacagtgctgtcttcgggccccctgaactgtgttcatggagcatctggctgggtaggcacatgctgggcttgaatccaggggggactgaatcctcagcttacggacctgggcccatctgtttctggagggctccagtcttccttgtcctgtcttggagtccccaagaaggaatcacaggggaggaaccagataccagccatgaccccaggctccaccaagcatcttcatgtccccctgctcatcccccactcccccccacccagagttgctcatcctgccagggctggctgtgcccaccccaaggctgccctcctgggggccccagaactgcctgatcgtgccgtggcccagttttgtggcatctgcagcaacacaagagagaggacaatgtcctcctcttgacccgctgtcacctaaccagactcgggccctgcacctctcaggcacttctggaaaatgactgaggcagattcttcctgaagcccattctccatggggcaacaaggacacctattctgtccttgtccttccatcgctgccccagaaagcctcacatatctccgtttagaatcaggtcccttctccccagatgaagaggagggtctctgctttgttttctctatctcctcctcagacttgaccaggcccagcaggccccagaagaccattaccctatatcccttctcctccctagtcacatggccataggcctgctgatggctcaggaaggccattgcaaggactcctcagctatgggagaggaagcacatcacccattgacccccgcaacccctccctttcctcctctgagtcccgactggggccacatgcagcctgacttctttgtgcctgttgctgtccctgcagtcttcagagggccaccgcagctccagtgccacggcaggaggctgttcctgaatagcccctgtggtaagggccaggagagtccttccatcctccaaggccctgctaaaggacacagcagccaggaagtcccctgggcccctagctgaaggacagcctgctccctccgtctctaccaggaatggccttgtcctatggaaggcactgccccatcccaaactaatctaggaatcactgtctaaccactcactgtcatgaatgtgtacttaaaggatgaggttgagtcataccaaatagtgatttcgatagttcaaaatggtgaaattagcaattctacatgattcagtctaatcaatggataccgactgtttcccacacaagtctcctgttctcttaagcttactcactgacagcctttcactctccacaaatacattaaagatatggccatcaccaagccccctaggatgacaccagacctgagagtctgaagacctggatccaagttctgacttttccccctgacagctgtgtgaccttcgtgaagtcgccaaacctctctgagccccagtcattgctagtaagacctgcctttgagttggtatgatgttcaagttagataacaaaatgtttatacccattagaacagagaataaatagaactacatttcttgca

SEQ ID NO: 45628 - DNA, 1559 bp, Artificial Sequence
  derived and/or modified sequence
cacgcagcaaccctcagagtcctgagctgaaccaagaaggaggagggggtcgggcctccgaggaaggcctagccgctgctgctgccaggaattccaggttggaggggcggcaacctcctgccagccttcaggccactctcctgtgcctgccagaagagacagagcttgaggagagcttgaggagagcaggaaagcagcctcccccgttgcccctctggatccactgcttaaatacggacgaggacagggccctgtctcctcagcttcaggcaccaccactgacctgggacagtgaatcgacaatgccgtcttctgtctcgtggggcatcctcctgctggcaggcctgtgctgcctggtccctgtctccctggctgaggatccccagggagatgctgcccagaagacagatacatcccaccatgatcaggatcacccaaccttcaacaagatcacccccaacctggctgagttcgccttcagcctataccgccagctggcacaccagtccaacagcaccaatatcttcttctccccagtgagcatcgctacagcctttgcaatgctctccctggggaccaaggctgacactcacgatgaaatcctggagggcctgaatttcaacctcacggagattccggaggctcagatccatgaaggcttccaggaactcctccgtaccctcaaccagccagacagccagctccagctgaccaccggcaatggcctgttcctcagcgagggcctgaagctagtggataagtttttggaggatgttaaaaagttgtaccactcagaagccttcactgtcaacttcggggacaccgaagaggccaagaaacagatcaacgattacgtggagaagggtactcaagggaaaattgtggatttggtcaaggagcttgacagagacacagtttttgctctggtgaattacatcttctttaaaggcaaatgggagagaccctttgaagtcaaggacaccgaggaagaggacttccacgtggaccaggtgaccaccgtgaaggtgcctatgatgaagcgtttaggcatgtttaacatccagcactgtaagaagctgtccagctgggtgctgctgatgaaatacctgggcaatgccaccgccatcttcttcctgcctgatgaggggaaactacagcacctggaaaatgaactcacccacgatatcatcaccaagttcctggaaaatgaagacagaaggtctgccagcttacatttacccaaactgtccattactggaacctatgatctgaagagcgtcctgggtcaactgggcatcactaaggtcttcagcaatggggctgacctctccggggtcacagaggaggcacccctgaagctctccaaggccgtgcataaggctgtgctgaccatcgacgagaaagggactgaagctgctggggccatgtttttagaggccatacccatgtctatcccccccgaggtcaagttcaacaaaccctttgtcttcttaatgattgaacaaaataccaagtctcccctcttcatgggaaaagtggtgaatcccacccaaaaataa

SEQ ID NO: 45629 - DNA, 581 bp, Artificial Sequence
  derived and/or modified sequence
aaggaggagggggtcgggcctccgaggaaggcctagccgctgctgctgccaggaattccaggttggaggggcggcaacctcctgccagccttcaggccactctcctgtgcctgccagaagagacagagcttgaggagagcttgaggagagcaggaaaggtgggacattgctgctgctgctcactcagttccacagcagcctcccccgttgcccctctggatccactgcttaaatacggacgaggacagggccctgtctcctcagcttcaggcaccaccactgacctgggacagtgaatcgacaatgccgtcttctgtctcgtggggcatcctcctgctggcaggcctgtgctgcctggtccctgtctccctggctgaggatccccagggagatgctgcccagaagacagatacatcccaccatgatcaggatcacccaaccttcaacaagatcacccccaacctggctgagttcgccttcagcctataccgccagctggcacaccagtccaacagcaccaatatcttcttctccccagtgagcatcgctacagcctttgcaatgctctccctggggaccaa

SEQ ID NO: 45630 - DNA, 643 bp, Artificial Sequence
  derived and/or modified sequence
caggcaccaccactgacctgggacagtgaatctgttactgatgtcggcaagtacttggcacaggctggtttaataatccctaggcacttccacgtggtgtcaatccctgatcactgggagtcatcatgtgccttgactcggggcctggcccccccatctctgtcttgcaggacaatgccgtcttctgtctcgtggggcatcctcctgctggcaggcctgtgctgcctggtccctgtctccctggctgaggatccccagggagatgctgcccagaagacagatacatcccaccatgatcaggatcacccaaccttcaacaagatcacccccaacctggctgagttcgccttcagcctataccgccagctggcacaccagtccaacagcaccaatatcttcttctccccagtgagcatcgctacagcctttgcaatgctctccctggggaccaaggctgacactcacgatgaaatcctggagggcctgaatttcaacctcacggagattccggaggctcagatccatgaaggcttccaggaactcctccgtaccctcaaccagccagacagccagctccagctgaccaccggcaatggcctgttcctcagcgagggcctgaagctagtggataagtttttggagg

SEQ ID NO: 45631 - DNA, 571 bp, Artificial Sequence
  derived and/or modified sequence
agagtcctgagctgaaccaagaaggaggagggggtcgggcctccgaggaaggcctagccgctgctgctgccaggaattccaggttggaggggcggcaacctcctgccagccttcaggccactctcctgtgcctgccagaagagacagagcttgaggagagcttgaggagagcaggaaaggtgggacattgctgctgctgctcactcagttccacaggacaatgccgtcttctgtctcgtggggcatcctcctgctggcaggcctgtgctgcctggtccctgtctccctggctgaggatccccagggagatgctgcccagaagacagatacatcccaccatgatcaggatcacccaaccttcaacaagatcacccccaacctggctgagttcgccttcagcctataccgccagctggcacaccagtccaacagcaccaatatcttcttctccccagtgagcatcgctacagcctttgcaatgctctccctggggaccaaggctgacactcacgatgaaatcctggagggcctgaatttcaacctcacggagattccggaggctcagatccat

SEQ ID NO: 45632 - DNA, 583 bp, Artificial Sequence
  derived and/or modified sequence
agagtcctgagctgaaccaagaaggaggagggggtcgggcctccgaggaaggcctagccgctgctgctgccaggaattccaggttggaggggcggcaacctcctgccagccttcaggccactctcctgtgcctgccagaagagacagagcttgaggagagcttgaggagagcaggaaaggtgggacattgctgctgctgctcactcagttccacagggcggcagtaagtcttcagcatcaggcattttggggtgactcagtaaatggtagatcttgctaccagtggaacagccactaaggattctgcagtgagagcagagggccagctaagtggtactctcccagagactgtctgactcacgccaccccctccaccttggacacaggacgctgtggtttctgagccagcagcctcccccgttgcccctctggatccactgcttaaatacggacgaggacagggccctgtctcctcagcttcaggcaccaccactgacctgggacagtgaatcgacaatgccgtcttctgtctcgtggggcatcctcctgctggcaggcctgtgctgcctggtccctgtctccc

SEQ ID NO: 45633 - DNA, 951 bp, Artificial Sequence
  derived and/or modified sequence
actgtgcccagggcatgcactgcctccacgcagcaaccctcagagtcctgagctgaaccaagaaggaggagggggtcgggcctccgaggaaggcctagccgctgctgctgccaggaattccaggttggaggggcggcaacctcctgccagccttcaggccactctcctgtgcctgccagaagagacagagcttgaggagagcttgaggagagcaggaaagggcggcagtaagtcttcagcatcaggcattttggggtgactcagtaaatggtagatcttgctaccagtggaacagccactaaggattctgcagtgagagcagagggccagctaagtggtactctcccagagactgtctgactcacgccaccccctccaccttggacacaggacgctgtggtttctgagccagcctcccccgttgcccctctggatccactgcttaaatacggacgaggacagggccctgtctcctcagcttcaggcaccaccactgacctgggacagtgaatcgacaatgccgtcttctgtctcgtggggcatcctcctgctggcaggcctgtgctgcctggtccctgtctccctggctgaggatccccagggagatgctgcccagaagacagatacatcccaccatgatcaggatcacccaaccttcaacaagatcacccccaacctggctgagttcgccttcagcctataccgccagctggcacaccagtccaacagcaccaatatcttcttctccccagtgagcatcgctacagcctttgcaatgctctccctggggaccaaggctgacactcacgatgaaatcctggagggcctgaatttcaacctcacggagattccggaggctcagatccatgaaggcttccaggaactcctccgtaccctcaaccagccagacagccagctccagctgaccaccggcaatggcctgttcctcag

SEQ ID NO: 45634 - RNA, 1400 nt, Artificial Sequence
  derived and/or modified sequence
gggaaauaagagagaaaagaagaguaagaagaaauauaagagccaccaugccgucaucagugucguggggaauccuucuuuuggcgggacuuugcugccuugugcccguaucauuggccgaagauccccaaggugacgcggcucaaaagaccgauacaucccaccacgaccaggaccauccgacguucaauaagauuacgcccaauuuggcggaauuugccuucucccuuuauagacagcuugcacaucagagcaauucaacuaacaucuucuucucgccggugucaaucgcaacugccuuugcgauguugucccucgggacuaaggccgacacucacgaugagauccucgaagggcucaauuucaaccuuacugaaauucccgaggcccagauucacgagggguuccaagagcuucuccgcacacucaaccagccggacagccaguugcagcugaccacagggaacgguuuguuuuugagcgaaggacugaaacuuguagacaaauuccucgaagaugugaagaaacuuuaucacuccgaggcguucacagugaacuucggagacaccgaggaagcgaaaaagcaaaucaaugacuaugucgagaaagggacacagggcaaaaucguagaccucgugaaagagcuggacagggauacgguauuugcguuggugaacuacaucuuuuucaagggaaaaugggagcgacccuuugaggugaaagauacugaggaagaagauuuucacguagaucaagugacgacggucaaaguaccuaugaugaagagauuggggauguucaauauccagcauuguaagaaacugucgucguggguccugcucaugaaauaccucggaaaugcgacugcuaucuuuuuccuucccgacgaaggaaaguugcagcaccucgaaaacgagcugacacaugacauuaucacgaaguuccuugagaacgaggaccggcgcucggcauccuugcaucugccgaaauugucgaucaccgguacguacgaucucaagagcguccuugggcagcuuggaaucaccaagguauuuucgaacggagccgaucuuuccggugugacggaagaggcgccauugaaguuguccaaggcugugcauaaggccguccucacaauugaugagaagggaacggaagcggcaggggcaauguuucucgaggcgaucccaaugucgauuccgccugaggucaaguucaacaagccuuuugucuuucuuaugauugagcagaauaccaagucgcccuuguuuaugggcaaagucgugaauccuacccagaagugauaagcugccuucugcggggcuugccuucuggccaugcccuucuucucucccuugcaccuguaccucuuggucuuugaauaaagccugaguaggaag

SEQ ID NO: 45635 - RNA, 335 nt, Artificial Sequence
  derived and/or modified sequence
gggaaauaagagagaaaagaagaguaagaagaaauauaagagccaccaugcccucgagcgugucgugggggauucugcuccuugcgggacuuugcugucucguaccggugucccucgcccacggagagggaacguuuacaucggaccugucaaagcagauggaagaggaagcgguccgguuguucaucgagugguugaaaaacgggggucccagcuccggcgcaccaccgccuucaugauaagcugccuucugcggggcuugccuucuggccaugcccuucuucucucccuugcaccuguaccucuuggucuuugaauaaagccugaguaggaag

SEQ ID NO: 45636 - RNA, 192 nt, Artificial Sequence
  derived and/or modified sequence
augcccaguagcguguccuggggcauauuacugcuugccggguugugcugucucgugcccguaucuuuggcucacggagaaggaaccuucacgucggaccuuucuaagcaaauggaagaggaggcugugcgguuauuuauugaauggcuuaaaaacggaggcccaucauccggcgcgccaccaccuaguuag

SEQ ID NO: 45637 - RNA, 1257 nt, Artificial Sequence
  derived and/or modified sequence
augccaucuuccgucucguggggcauucuucuucuggccgggcucuguugucuggucccagugagucuugcagaggacccccaaggugacgccgcucaaaaaacugacaccucgcaccacgaccaagaccauccaacauucaacaagaucacccccaaucucgcagaguuugcauucucacuuuacagacagcuagcccaccaaucaaacucuacuaacaucuucuucuccccagucucgauagcaaccgccuucgccaugcuuucuuuagggacuaaggcagauacucaugacgagauccuggagggacugaacuuuaaucugaccgaaaucccugaggcccagauccaugaaggcuuccaggagcuauuacggacccuuaaccagccagauucacagcuccagcugaccacagguaacggacuguuccuauccgaaggucugaagcuagucgauaaguuccucgaagaugugaagaaacuuuaucacagugaagccuuuacugucaacuuuggcgacacugaagaggcuaaaaagcagauaaacgacuauguggaaaagggaacucagggcaaaauuguggaucuggucaaggaacucgauagggauaccguguuugcucuaguuaacuacauuuuuuucaaaggaaaaugggagcgcccguucgaggugaaggauacagaagaagaggauuuucacguggaccaggucacaaccguaaagguuccaaugaugaagcgccuggggauguuuaacauacagcauuguaagaaacucucuuccuggguccuucugaugaaguaucuuggcaacgcgacagccaucuucuuccuacccgacgaaggaaaguugcagcaccucgaaaacgagcugacucacgauaucaucaccaaauuucuggagaaugaggaccgccguagcgccucucugcaccugcccaaacucucuaucacaggcaccuaugaucuuaaauccguucugggccagcugggcauuaccaagguuuuuuccaacggggcggaucuaagcggagugacugaggaagcuccccugaaacucagcaaggcuguccacaaagcaguucugaccauagacgaaaaaggcacagaggccgcuggugccauguuucuugaggcuauuccaauguccauuccacccgaagugaaguucaacaaaccuuucgucuuucucaugaucgaacagaauacaaagucuccccucuucaugggcaaaguggucaauccuacccaaaaauag

SEQ ID NO: 45638 - RNA, 1257 nt, Artificial Sequence
  derived and/or modified sequence
augccaagcuccguguccugggguauccugcugcuggcaggucuuugcugucuugucccagugucccuggcugaagauccccagggcgaugccgcacagaagaccgacacaucucaucacgaccaagaucacccuacuuucaauaaaaucaccccuaauuuagcggaguuugcguucucacucuacaggcagcuugcccaccagucaaacuccacaaacauauucuucucaccugucucaaucgccacugccuuugcuaugcugagucuggguaccaaggcugauacucacgaugaaauccucgagggucuaaauuuuaacuuaaccgagauuccagaggcucaaauacacgaggguuuucaagaauugcucaggacccucaaucagccggauagucaguuacaacucacaaccgguaacggacuuuuccugucugagggucuuaagcuggucgauaaauuccuugaggauguaaagaagcuguaccacagugaggccuuuaccgucaauuucggagacacugaagaagcaaaaaagcaaauuaacgacuacguggagaaagggacucaaggaaagaucgucgaucuagugaaggaauuggacagagauacuguuuuugcacuggugaauuacaucuucuuuaaaggaaagugggaacguccauuugagguuaaagacaccgaggaggaggauuuucacgucgaucaggugacuacugugaagguuccaaugaugaagagacucggcauguuuaacauacaacacuguaaaaagcuuucuucauggguccugcucaugaaauacuugggaaaugcaacagccauuuuuuuccugccugacgagggcaagcuccaacaucuugagaaugagcuaacccaugacauuauaacgaaauuucuggagaacgaagaucgcagaagugccucccugcaccugccaaaacucaguauaaccgguaccuacgaucugaagucuguccugggccagcuuggaauuacgaaggucuucaguaauggcgcggaucugucuggagugaccgaggaagccccguugaagcucuccaaggccgugcacaaggcgguucuuacuauugaugaaaaagguacggaagccgcaggcgcaauguuccuggaggcaaucccaauguccauaccuccggaagugaaguucaacaagccuuucgucuuccugaugaucgaacagaacaccaaauccccucuauucaugggaaaagucgugaauccuacacagaaauag

SEQ ID NO: 45639 - RNA, 1257 nt, Artificial Sequence
  derived and/or modified sequence
augccuaguaguguuaguugggggauucucuuauuggccggucucugcugucuuguuccagugucauuggcagaggacccucagggcgaugcagcacaaaagacugauacuucucaccacgaucaagaccacccuacguuuaacaagaucacacccaaucuugcugaauuugcauucagccucuacagacagcucgcucaucagaguaacucuacuaacaucuucuucagcccugucucuauagccaccgccuucgccauguuaucacucgggacaaaagcagacacacaugacgagauucucgaaggcuuaaacuuuaauuuaaccgagauccccgaagcccaaauucacgaggguuuucaagagcuacugcggacccugaaccagccagacagccaguugcagcucaccaccggcaauggccuuuuucugucugagggucugaaacugguagacaaauuccucgaggauguaaagaaauuguaucacucagaagcguuuacugugaacuuuggugauacagaagaggcaaaaaagcagauaaaugacuaugucgaaaagggcacccagggaaagauuguggaccuggugaaggaacuugacagagauacaguauucgcucuugucaacuauaucuucuuuaaaggcaagugggagaggccauucgaggugaaggauaccgaagaggaagauuuccacgucgaucaagucaccacagugaaggugccuaugaugaagaggcuuggaauguucaauauccagcacuguaagaaacucagcaguuggguucuccugaugaaguaccuagggaacgccacagcuauauuuuuccugccagacgaggggaagcuccagcaccucgagaaugagcugacucacgacaucaucacaaaguuccuggaaaaugaagauaggcgaucugccagucuucaccucccaaaacugucuauuacuggcacauacgaccugaaguccgucuugggucagcuggggauaaccaagguguucagcaauggcgcagaucugucuggggucacagaggaagccccccuuaaacucuccaaagcugugcauaaggcaguccuaacaaucgaugaaaagggcacugaggccgccggagcuauguuccuagaggcuauaccuaugucgaucccuccggaaguuaaguucaauaaaccguucguauuccucaugauagagcagaacaccaaaucaccccuguucaugggaaaaguggucaacccuacacagaaauag

SEQ ID NO: 45640 - RNA, 1080 nt, Artificial Sequence
  derived and/or modified sequence
augcccuccagcguuuccugggggauccugcuccuggccggccugugcugucucgugcccgugucgcucgccgaggauccccagggggacgccgcccagaaaacagauaccucccaucacgaucaagaucauccuaccuuuaauaagauuacuccuaaucuagcggaguuugccuuuucccuauacaggcagcuugcgcaccaaucaaauuccacaaauauuuuuuuuucuccgguaucgaucgccaccgcuuucgccaugcugagccuuggcacuaaagcugauacacaugacgagauuuuagaaggucugaacuuuaacuugacagagauaccugaggcgcagauucacgaagguuuccaggaauugcugcgcacgcugaaccaacccgauucgcaacuccaguuaaccacuggcaacggccuuuuccuguccgagggccugaaacugguugauaaauucuuagaagaugugaagaagcucuaucacagcgaggcauuuaccgugaacuuuggugacacagaagaagcaaagaagcagauuaaugauuaugucgagaaggggacacagggcaagauuguggaccuggugaaagagcuggaucgagauaccguuuucgcccuggugaacuauauauuuuuuaaaggaaagugggaaagaccauucgaagugaaggacaccgaagaagaagacuuucacguggaccagguaacuacaguuaaagugccuaugaugaaacggcugggaauguuuaauauccagcacugcaaaaaauuaaguagcuggguguugcugaugaaauaucuagggaacgcgacagcuaucuucuuccucccggaugaagggaagcuccagcacuuggagaacgaauugacgcacgauaucauuacuaaauuccuggagaaugaagaccgccgcuccgccucauugcaucugccaaaacucucaaucacgggaacuuaugaccugaaaagcgugcugggucaguuaggcaucacaaagguguuuucaaacggagccgacuuaagcggcgugaccgaggaggccccccugaaacugagcaagguuagaagcccauag

SEQ ID NO: 45641 - RNA, 1257 nt, Artificial Sequence
  derived and/or modified sequence
augccuucuuccguuucauggggaauucugcuacuggccggauuguguugucuggugccagugaguuuagcagaggauccccagggggaugccgcccaaaagacagauacuagccaccaugaucaagaccauccaacauuuaacaagauaaccccgaaccuagccgaauuugcuuucucccuguacagacaguuggcccaucaauccaacucuaccaauauauucuucucaccaguuuccaucgcuacagccuuugcgaugcugucuuuggggaccaaagccgacacacacgacgaaauucuggaagggcucaauuucaauuuaacagaaaucccagaagcccagauccacgagggauuccaggaacugcugaggacucucaaccagccugauagucagcugcagcucaccaccggcaacggucuuuuucuuagcgaaggccuuaaguugguggacaaauuccuggaagaugucaaaaaacucuaucacucugaggcguucacaguuaacuuuggcgacaccgaagaggccaaaaagcagauuaaugacuacguggaaaagggaacccagggaaaaaucguggaccucgugaaggaguuagacagagacacaguuuuugccuuggugaacuacaucuuuuucaagggaaaaugggaacgacccuucgaaguaaaggacacagaggaagaagauuuucauguggaccagguuacaaccguuaaggugccuaugaugaaaagacugggaauguucaacauacagcacugcaagaaauugagcagcuggguacugcuaaugaaguauuuggggaaugcaacagccauuuucuuucugcccgacgaggguaaacugcagcaccuugagaacgaacugacacaugacauuauuaccaaauuucuugaaaacgaagacagaagaagugcgucacugcaucugccaaaguuguccaucaccgguacauacgauuuaaaauccgugcucggccaguuaggcaucaccaagguguuuagcaauggcgcagaucuauccgguguaacugaagaggccccacugaagcugucaaaggccguucacaaagcaguacugaccaucgaugagaagggcacagaggccgccggcgcuauguuucuggaggcuauucccaugucaaucccccccgaagugaaguucaauaagcccuuugucuucuuaaugauugaacagaauacuaagucaccccuguucauggggaaagucgugaauccgacccaaaaguag

SEQ ID NO: 45642 - RNA, 1257 nt, Artificial Sequence
  derived and/or modified sequence
augcccagcucagucucauggggaauuuugcugcuggccggccugugcugcuuggugcccgucagccuugcagaggacccccagggagaugccgcacagaaaaccgauaccucucaccacgaucaggaccauccaaccuucaacaaaauuaccccaaaccucgcagaauuugccuuuucccucuauaggcagcuugcccaccaguccaacaguacuaacaucuuuuuuagcccgguauccaucgccaccgccuuugccaugcuaagccucgggacaaaagccgacacacacgacgaaauccuggaagggcugaauuuuaaucugacugagauaccugaggcgcagauucacgaggguuuccaagaacuauuaaggacgcugaaccagccggacucucaacugcagcugacuacuggcaauggucuuuuucucagugagggucucaagcuggucgauaaguuccuagaggaugugaaaaaacucuaccauucugaagcauuuaccgugaacuuuggugacacagaagaggccaaaaagcaaauuaacgacuauguugaaaagggcacucaggggaagauaguggauuuagugaaagaguuagacagggauaccguguuugcucucgucaauuauauauuuuuuaaaggcaaaugggagcgcccauucgaggucaaggacaccgaggaagaggacuuccacguugaccagguaaccacuguuaaggucccuaugaugaagcgacuggggauguucaacauacagcacugcaagaaguugaguucuuggguucucuugaugaaguaucuggggaaugccaccgcaaucuuuuuucuuccugacgaaggcaagcugcagcaccuggaaaacgagcugacccacgauauaauuacgaaguuccuggagaaugaagacagacgaagugccagucugcaccuuccaaagcugucaaucacaggcacguaugaccucaagucagugcucggccaguugggcaucacaaagguuuucuccaauggcgcugaucuuaguggggucacugaagaagcaccccucaagcugucgaaagcagugcacaaagcuguucugacaaucgaugaaaaggguacugaggccgcuggugccauguuucuggaagcgaucccuaugaguauuccucccgaggugaaguucaacaaacccuucguguuuuuaaugauugaacagaacacuaaaagcccuuuguucaugggaaaagugguuaauccaacacagaaauag

SEQ ID NO: 45643 - RNA, 1257 nt, Artificial Sequence
  derived and/or modified sequence
augccaucuucaguauccuggggcaucuuguuguuagccggcuuguguugccugguucccgugucccuggcagaggauccccaaggugacgcagcgcaaaaaacggauacaagucaccacgaucaggaccauccuacauucaacaagauuacuccuaacuuggcagaguucgccuucucucuguacagacagcuugcacaucagucgaauucuacuaacauuuuuuucagucccgugaguaucgccaccgccuuugcuaugcuuucucuggguacuaaagcugacacccacgacgaaauucuggaggggcugaacuuuaaccugaccgaaauuccugaagcacagauccacgaaggcuuucaagagcugcugcggacucucaaccagccugacagccaacugcaguugacuaccggaaacggccuguuccuaagcgaaggccugaaguuggucgauaaguuuuuggaagauguuaagaaguuauaccauucggaagcauuuacuguaaacuucggcgacacagaagaggccaagaaacagaucaaugauuacgucgaaaaagggacgcaaggaaagaucgucgaccuuguuaaagaacuggaccgagacacagucuucgcacuugugaauuacauauucuuuaaaggcaaaugggagcgaccuuucgagguaaaagacacagaagaggaagacuuucacguugaucaggugaccacagugaaggugcccaugaugaaaaggcuagguauguuuaauauucagcacuguaagaagcucaguaguuggguccugcuuaugaaauaccuaggcaacgcgacggccaucuuuuuucuuccugaugaagggaaguugcagcaccuggaaaacgagcugacucaugauaucauuacuaaauuucucgagaaugaagaucgcaggagcgcaucguuacaucugccaaagcugucuauuaccgguacauacgaccucaaguccgugcucggccaauuggguaucacuaagguguuuagcaauggagcagaccuaucaggaguuacugaggaagcaccacugaaacucucgaaggcugugcauaaagcugugcucacaaucgacgaaaaggggacugaggccgccggagcgauguuccuagaagccaucccaaugucuauuccuccagaggugaaauuuaacaaacccuucguguucuugaugauagagcagaauaccaaguccccauuguuuaugggcaagguggucaacccuacccagaaguag

SEQ ID NO: 45644 - RNA, 1257 nt, Artificial Sequence
  derived and/or modified sequence
augccaucuuccgugaguuggggcauacuccuccuagccggucucugcugucucgugccagugucccuggccgaggacccccagggcgacgcugcacaaaagaccgauaccucacaccacgaccaggaucauccuacuuucaauaaaaucaccccgaaccuagcggaguuugccuuuucccucuacagacaguuagcacaucagucaaauucaacgaacaucuucuucucaccgguuucuauugccaccgcauucgccauguuaagucucgggaccaaggcugauacccacgacgaaauacuggaaggccucaauuuuaaucugacugaaauuccggaggcgcagauucacgaagguuuucaggagcuccuucgaacucuaaaucaaccugauucucagcugcagcucacuacugggaauggguuauuccugagugagggucugaaacugguggacaaguuccuggaggacgugaagaaacuuuaucacagcgaagcuuucaccgucaacuuuggcgacacugaagaggcuaagaaacagauuaacgauuauguugagaaggguacucaggguaaaauuguggaccugguuaaagaauuagaucgugacacugucuuugcccugguaaacuacaucuuuuuuaaggggaaaugggagagacccuuugaggugaaggacacugaagaagaggacuuccauguagaucaggucacuaccguaaaagugcccaugaugaagcgcuuaggaauguucaacauacagcauuguaaaaaauugucuucauggguacuccugaugaaauauuuagggaaugcuaccgcaauuuuuuuccuccccgaugaaggcaaguugcagcaucuugagaacgaauugacccacgauauuauuacuaaauuccuagagaaugaggauagaaggagcgcgucauuacaccugcccaaacucagcaucaccggaacauaugaucugaagucuguuuugggacagcucgguauuacuaagguguucuccaacggugcugaccugucgggaguaaccgaagaagccccgcuaaaguugagcaaggcugugcacaaagcugugcuaacaaucgacgagaaggguaccgaggcagcuggcgcaauguuccuggaggccauuccuaugucaauccccccugagguaaaguucaauaaaccuuucguauuucugaugauugaacaaaauaccaaguccccuuuguuuauggggaaggucgugaacccuacacagaaauag

SEQ ID NO: 45645 - RNA, 1257 nt, Artificial Sequence
  derived and/or modified sequence
augccaaguaguguuucauggggaauacuccugcuagccggguugugcugucucguacccgugucacucgccgaggauccgcagggggaugcagcccaaaagacugacaccagucaucacgaucaagaccacccaaccuucaacaaaauuaccccaaacuuggccgaguucgcguuuucccuguaucgccagcucgcccaccaaaguaacucaaccaauaucuucuuuuccccuguauccaucgcuacagcauuugcgauguuaucccuaggcaccaaggccgacacacacgaugagauucuggagggccucaauuucaaucugaccgagauccccgaggcccaaauccaugagggauuucaggaguugcuccggacacugaaccagcccgacucacagcugcaacuuacuaccgguaauggacuguucuugagcgagggccugaagcucguugauaaguuucucgaagaugugaaaaaguuguaccauagcgaagcguuuaccgucaacuuuggcgacacugaagaggcaaaaaaacaaauaaaugauuacguggagaagggaacacaggguaaaauuguggacuuaguaaaagaacuugaccgggacacuguuuucgcccuuguuaacuauauuuucuucaaagguaagugggaacggccuuucgaggugaaagacacugaggaggaagauuuccacguggaucaggugacuaccgugaaaguuccuaugaugaagagacuuggcauguuuaacauacagcacugcaaaaagcuauccagcuggguacugcucaugaaguacuugggaaacgcuaccgccauuuucuuucuacccgacgaaggcaagcuccaacaucuagaaaacgaacugacccacgauauuaucaccaaauucuuggagaacgaagacagaaggucggcgucacuacauuuaccaaagcugucuauaaccgguaccuaugaccuaaagagcguccuagggcaauugggcauaacuaagguuuuuucuaauggagccgaucuuucaggagugaccgaggaagcaccucugaaacuguccaaagccguccacaaggcgguccugacgauugacgagaaagggaccgaggcugcuggugcuauguuucuggaggccaucccaaugucaauucccccugaggugaaguuuaacaagccauuuguuuuucucaugaucgagcagaauaccaagucgccacuguuuauggggaagguggucaauccaacccaaaaauag

SEQ ID NO: 45646 - RNA, 279 nt, Artificial Sequence
  derived and/or modified sequence
augccguccuccguguccuggggaauccugcugcucgccggccugugcugucuggucccuguuagccucgcugaagacccccagggggacgccgcucagaagaccgacacaagccaccaugaucaggaucauccaacauucaauaaaauuacucccaaccuugcugaauucgccuuuucacucuaucgccaguuagcccaucagagcaauucuaccaacaucuuuuuuagcccggugucgauugccaccgccuuugcuauguuaucccuuggcaccuag

SEQ ID NO: 45647 - RNA, 471 nt, Artificial Sequence
  derived and/or modified sequence
augccaagcucuguguccugggguauccuccuucuggcaggcuuguguugcuugguaccaguaucccucgcagaggacccacaaggugacgcugcacagaaaacagauacuagccaccaugaccaagaccacccuacguucaacaaaauuacgcccaaccucgcugaauuugcuuucagucuauaccgacaacuagcacaccagucuaauagcacaaacaucuucuucagccccgugaguauugcuaccgcauucgccauguugucacuaggaacaaaggcugacacacacgaugagauccuggaggggcucaauuucaaucucacagaaauacccgaggcucagauucaugagggauuucaggagcuguuacgaacucugaaccaaccugauucccagcugcaguuaaccaccgggaaugggcuguuccucuccgaagguuugaaguugguggauaaguuucuagaguag

SEQ ID NO: 45648 - RNA, 354 nt, Artificial Sequence
  derived and/or modified sequence
augccaagcaguguauccugggggauucuucuccuagccggucucuguugucuugucccugugucucuggccgaggauccccagggcgacgcugcacaaaagacagauaccucucaucaugaucaggaccaccccacauucaacaaaaucacccccaaucuugccgaauuugccuucucacuguaucgccaacucgcccaccaguccaauagcacaaacauauucuuuucccccguguccauugccacugccuucgcuaugcugagucucggaacuaaagccgauacacacgacgagauucuggaagguuuaaauuucaaucuuaccgaaauccccgaagcccaaauucacuag

SEQ ID NO: 45649 - RNA, 69 nt, Artificial Sequence
  derived and/or modified sequence
augccuuccuccguuaguuggggaauucuacuucuggccggcuuauguugcuuggugcccguguccuag

SEQ ID NO: 45650 - RNA, 435 nt, Artificial Sequence
  derived and/or modified sequence
augcccucaucuguguccuggggaauccuacugcuggcgggacugugcugccuaguuccggugaguuuagcagaagacccccagggggaugcugcccagaaaacugacacgucacaucaugaccaagaucauccuacuuuuaacaagauaaccccuaaccuagcggaguucgccuuuuccuuauauagacaacucgcucaucaaucuaauucuacaaacaucuuuuuuagccccgucagcauagcuaccgccuuugccaugcugucccuugggaccaaggcagauacucaugacgagauccuagaaggccuaaacuucaauuuaaccgaaaucccugaggcucagauacaugaaggguuucaagagcuucuccgcacccucaaccagccugacagucaacuccagcuaacaacagguaacggucuauuucucuag

SEQ ID NO: 45651 - RNA, 1257 nt, Artificial Sequence
  derived and/or modified sequence
augccaagcucagucaguuggggcauccugcuccuugccggccuuuguuguuuggugcccguaucacuugcagaggauccccagggugaugccgcucagaagacagauacuucacaccacgaucaggaccaucccaccuuuaauaagauuaccccgaacuuggcagaauuugcuuucagucuguaccgucagcuagcucaucaaucuaacaguacuaauaucuuuuucuccccuguuucuaucgcuaccgccuuugcuaugcuuucauuaggcaccaaggcagacacccacgacgagauucuugagggucugaauuuuaaucugacagagauacccgaagcacaaauccacgagggguuucaggagcugcugcgcacccucaaucagccggacucacaacugcagcugaccacaggaaauggccuauuccuuagcgagggguugaagcucguggacaaguucuuggaggacgugaagaaacucuaucacucggaagcauucaccgugaauuucggggauaccgaagaggcgaagaaacaaaucaaugacuacguggagaagggaacccagggaaaaauaguugacuuggugaaagagcuggaucgggacacaguguucgcucucgugaauuacauuuucuuuaaaggcaagugggaacgucccuuugaggugaaagauacugaagaagaggauuuccauguggaucaagugacaacuguaaaaguccccaugaugaagagacuugggauguuuaauauccaacauuguaaaaaacugagcuccuggguguuacucaugaaguaccugggcaacgcgacugccauuuuuuuccugccagacgaggguaagcugcagcaucuggagaacgaacugacacaugauaucauuacuaaguuccucgaaaaugaagaucgucggagcgcaucccuccaucuaccaaaauuaagcaucacaggcacauaugauuugaaaagcguccugggccaguuaggaaucacaaaaguuuucucuaauggggcagauuugagcggcguaaccgaagaggcaccucugaaacugagcaaggcugugcauaaggcugugcucacaauugaugagaagggaacagaagccgcaggcgcuauguuccuugaagcaauuccgauguccaucccaccagaaguaaaguuuaacaaaccuuucguauuucuaaugauugaacagaauaccaaaucuccacucuucauggguaaagucguuaauccaacacaaaaguag

SEQ ID NO: 45652 - RNA, 1257 nt, Artificial Sequence
  derived and/or modified sequence
augccaucauccguguccuggggaauauuacuucuggccggacuuuguugucugguccccgugucgcuggcggaagacccacagggagacgcagcacagaagaccgacaccagucaccacgaccaagaucacccgacuuuuaauaaaaucacacccaaccuggccgaguucgcguucagucuguacagacagcucgcucaccaauccaacuccacuaacauauucuucucacccguuagcaucgccaccgcuuuugcuauguugucccucggaacuaaagcugacacacacgacgaaauacuggagggucuaaauuucaaucugacagaaauucccgaggcacaaauccacgagggauuucaggaguuacucaggacacuuaaucagcccgacucacaguugcaacuaacaacaggaaacggucuuuucuugucugaaggacucaagcucguugacaaguuucucgaagauguaaagaaauuauaccacucugaagccuuuacggucaacuucggggauacggaggaagccaagaagcagauuaaugacuacguagagaaggggacccagggaaagauuguugaucuugugaaggaacucgaucgggauacagucuucgcccuggucaauuauaucuucuuuaaggggaagugggaaagaccuuuugaaguuaaggacacagaggaggaggauuuucauguggaccagguuacaacugugaaggugcccaugaugaagaggcuagggauguuuaauauacagcacugcaagaaacuuuccagcugggucuuacucaugaaguaucuugguaacgcuacagcaaucuuuuuuuuaccagacgagggaaaauugcaacacuuagaaaaugaguugacacaugauauaauaacgaaguuucuggagaacgaagaccgacgcucugccuccuugcacuuaccaaaacuaucaauaaccggcaccuacgaucucaaguccguacuggggcaacucgggauuaccaaaguauuuuccaacggugcagaucuaucugggguuacagaggaggccccacuuaaacuaucgaaggccguucauaaagccgugcugacaauugacgagaagggcaccgaagcugcuggugcgauguuccuggaagccauaccuaugucaaucccuccugaggucaaauuuaauaagccauuuguguuccugaugaucgagcagaacaccaaaagcccucuuuuuaugggaaaaguugucaaccccacccagaaauag

SEQ ID NO: 45653 - RNA, 1257 nt, Artificial Sequence
  derived and/or modified sequence
augccuucaagcgugucuuggggcauuuugcuucuggccgguuuaugcugcuuggugcccgucucucucgccgaagauccacagggagacgcugcucagaaaacggauaccucccaucaugaucaagaccacccuacguuuaacaagauuacucccaauuuagcggaauuugcuuucucucuauacagacaacuggcccaccaguccaauagcacaaacaucuucuucucucccguuucgaucgcuacagccuucgccaugcugagccuggguacaaaagccgacacacaugaugaaauccuggaaggcuugaacuucaaucuuacagagauccccgaggcgcagauccaugagggauuucaagaauugcuucgaaccuuaaaucagccggauucccagcuccagcuuaccacagggaauggucucuuucuaucagagggccucaaacucgucgauaaauuccuggaagaugucaagaaacuguaccauuccgaagcauucacuguuaauuucggggacacagaagaagcuaaaaaacagaucaaugacuacguggaaaagggaacucaagggaaaauuguugaccugguaaaggaacuugauagagacacgguguucgcccuggugaauuauaucuucuuuaagggaaagugggagagaccauuugaagugaaagauaccgaagaagaagacuuucauguagaucagguaacuacagugaagguucccaugaugaaacgcuuaggcauguucaacauacagcauuguaaaaaacuauccagcugggugcuccugaugaaauaccuugguaaugcaacugccauauuuuuccuaccugacgaaggaaagcuccagcauuuggaaaaugagcucacacacgacauaaucacaaaauuucuggagaaugaagaucgccgaagcgcuagucugcaccugccaaagcucucuauaacugggacguaugaccuuaagagcgugcucggacaguuaggaauuacuaaaguguuuagcaacggggccgaccuguccggugucacugaggaagccccccuuaagcucagcaaggcuguccacaaagcugugcucaccaucgacgagaaaggaacagaggcugcuggagccauguuuuuagaagcaauaccuaugucaauucccccugaggugaaauuuaauaaaccauucguguuccucaugauagagcagaauaccaagucuccgcuguuuaugggcaaagucgugaauccuacucagaaauag

SEQ ID NO: 45654 - RNA, 1080 nt, Artificial Sequence
  derived and/or modified sequence
augccaaguaguguguccuggggaauucugcugcuggccggacuuugcugcuugguaccagugucccuggccgaagauccccaaggagaugcagcacagaaaaccgacacaagucaccacgaccaagaccauccgaccuucaauaagauuacaccgaaccucgcugaauucgccuucucccuguaccgacaguuagcucaccagucuaacucuaccaacauuuuuuucuccccagucuccaucgccaccgcauucgcuaugcugucucugggcaccaaagccgacacucaugacgagauacuugaaggguugaauuucaaucugaccgaaauuccagaagcccagauacacgagggauuccaggaacugcuuagaacauuaaaucagccugauucccaacugcaguugaccacagggaauggauuguucuuaagcgaaggccucaagcugguugauaaguuucuugaggacgugaaaaagcucuaucauucggaggcauuuacgguuaauuucggagauacagaggaagcaaaaaaacagauaaacgacuacgucgagaaagguacacagggcaagauuguggaucuuguaaaggaauuggaucgggauaccguguucgcucucgugaauuacauuuuuuuuaagggaaaaugggagagaccuuucgagguuaaagauaccgaggaggaggauuuccauguagaucagguaaccaccguuaaagugccaaugaugaaacgcuugggaauguucaacauccagcacuguaaaaaacuguccuccuggguccugcucaugaaguaccuugggaacgcgaccgcuaucuuuuuuuugccagaugaggguaaacugcagcaccuggagaaugaacugacccacgacauaauuacuaaguuucuggagaaugaggaucgucgcuccgcuucucuccaccugccuaagcugagcaucaccgguaccuacgaucuaaagagcguuuugggccaguugggcauaaccaaaguauuuaguaacggcgccgauuuaucaggcgugacagaggaagcuccacucaagcuuagcaaaguucggaguccauag

SEQ ID NO: 45655 - RNA, 1257 nt, Artificial Sequence
  derived and/or modified sequence
augcccagcagcguguccuggggcaucuuguugcucgcuggccugugcugucuggugccagucucccuugccgaggacccacaaggcgaugccgcccagaaaaccgauaccucucaccaugaccaagaccauccaaccuuuaauaagaucacgccaaaucuugcagaauuugcuuucagccuuuaccgccaacucgcccaucagucaaacuccacaaauauuuuuuucucuccuguguccaucgcuacugccuucgcaaugcucagccugggaacuaaggccgacacacaugaugagauucuggaaggauuaaauuuuaacuuaaccgagaucccugaagcgcaaauucaugaaggcuuucaggagcuucugcgcacucuuaaucagccagauucucaacuacagcucacaaccggcaauggacuuuucuugucugaaggacugaagcucguagacaaguuccuagaggaugucaaaaaguuauaccacuccgaagcuuucacaguuaauuuuggagacacagaggaggcaaaaaaacagauuaaugacuaugucgagaagggaacacagggcaagauuguggaucucgugaaggagcuggaccgagauacaguguuugccuuagucaauuacauuuuuuuuaaaggaaagugggaacgccccuuugaagucaaagacacugaagaagaggauuuccauguagaucaggugacuacaguaaagguuccaaugaugaagagacuugguauguucaauauacagcacugcaagaaguugagcuccuggguacuauugaugaaauacuugggaaaugcgaccgcuauuuucuuccucccagacgaaggaaagcuucaacaccuggagaacgaacucacacacgauauuauaacaaaguuucuugagaaugaagaccgacguucugcaucccugcaccugccaaagcucuccaucaccggcacauaugaccugaaaucagugcugggccagcuuggaauaacaaaggucuucucgaauggugccgaccuuagcggcguaacugaagaagccccacuuaagcuuuccaaggcuguccacaaagcugugcuuacaauugaugaaaaaggcaccgaggcagcuggggcaauguuccuggaagccauuccuaugucuauuccucccgaagucaaauuuaauaaaccuuuuguguuccugaugauugaacagaauaccaagucuccccucuucauggguaaagucguaaacccaacccaaaaauag

SEQ ID NO: 45656 - RNA, 1257 nt, Artificial Sequence
  derived and/or modified sequence
augccuaguagugucuccugggggauucuccuguuagcgggucucugcugcuuggugccugucagccucgccgaggauccccagggcgacgccgcacagaaaaccgacacuucacaccaugaccaagaccacccaacuuuuaauaaaauaacuccuaaccucgcugaauucgcuuuuagccuuuaccgucaacuugcccaccagucuaacucuaccaacaucuuuuucucaccaguauccaucgcaacagccuucgccaugcuuagcuuagggacuaaagccgauacacacgaugaaauacucgaggggcucaauuuuaacuuaacagaaauucccgaggcacaaauccaugagggguuucaggaacuucugcgaaccuugaaucagccggauucucaacuccaacucaccaccggaaacgggcuauuccuguccgaaggccuaaaauuaguugacaaguuccucgaggauguuaaaaaguuauaucacagugaggcuuuuacaguaaauuuuggggauaccgaggaggcaaaaaagcagaucaaugacuacguggagaagggcacacagggcaaaaucgucgauuugguaaaggaacuggaucgagacacagucuuugcacuggucaauuauauuuucuucaaagguaaaugggagcggccuuuugaagugaaggauaccgaggaggaagauuuccauguugaucaggucaccacagugaaggugcccaugaugaaaagacucggaauguuuaacauccaacauugcaaaaaacuguccagcugggucuugcugaugaaguaucuggggaacgcuacugcuaucuuuuucuugcccgaugaaggaaaauuacaacaccuggagaaugaauuaacucaugauauuauaacaaaauuucucgagaaugaagacagaaggagcgcuaguuugcacuuacccaaacugucuaucacaggcaccuaugaucugaaauccguguuggggcagcugggcaucacgaaggucuuuucuaacggcgcugaccuguccggagugacugaagaagccccccucaaguugucuaaggcuguucauaaggcuguguugaccaucgaugagaaagggaccgaggccgcgggcgcaauguuccucgaagcaauacccaugucuauacccccugaaguuaaauucaacaaacccuucguguuucugaugauagaacagaauacuaagucaccccucuuuaugggcaaaguuguaaaccccacacagaaauag

SEQ ID NO: 45657 - RNA, 1257 nt, Artificial Sequence
  derived and/or modified sequence
augcccuccuccguuucauggggcaucuuacucuuagcggggcucugcugccucguccccguaagccuggccgaagacccucaaggcgaugcugcccagaaaaccgauacaagccaucacgaccaagaucacccuacuuucaacaagauuacuccuaaccucgcagaguuugccuucucacuguaucggcaacuggcacaccaaucuaacucuacaaacauuuucuuuucccccgugucaaucgcuaccgccuucgccaugcucucccuagguacuaaggccgacacacaugaugaaaucuuggagggauugaacuucaacuuaacagaaauuccugaagcucaaauacaugaaggcuuucaagaacugcugagaacauugaaucagccugauucccaacuccagcuaacuaccggaaacggacuguuuuuaagcgaggguuugaaacugguggacaaauuccuggaagauguaaaaaaacuguaccacuccgaagccuuuacugucaauuucggcgauacagaggaggcaaaaaaacaaauuaaugauuacguagaaaaaggaacacagggaaaaauuguggaucuggugaaggagcuggacagagacaccguguuugcacugguuaauuauauuuuuuucaagggcaaaugggagcgaccauuugagguuaaagauacagaggaagaggacuuucacguugaucaggugacgacaguuaaggucccaaugaugaagagacugggaauguucaauauacagcauugcaagaaacugucuaguuggguucugcucaugaaauaccuagguaacgcuacugcaauauucuuccugccugacgaaggcaagcugcaacacuuagagaacgaacugacacacgauauuaucacgaaguuuuuggagaacgaagaucgcaggucagcaagccuucaccuaccaaaacugagcaucacaggaaccuacgaccugaaauccguacuaggccaacuggguaucacgaagguuuuuagcaauggcgccgauuugagcggcgugacugaagaggccccgcucaaacuuagcaaagcaguccacaaggccguccuaacuauugacgagaaggguaccgaagcugcuggggcgauguuccuggaagccauuccuaugagcauuccuccugagguaaaguuuaauaagccuuuuguguuucugaugauugagcagaacaccaaaucaccgcucuucaugggaaaagucgucaacccaacacagaaguag

SEQ ID NO: 45658 - RNA, 1257 nt, Artificial Sequence
  derived and/or modified sequence
augccuucaagcguaucuuggggcauacuuuuacucgcgggauuauguugcuuaguucccguaagucucgccgaggacccccaaggagacgccgcccagaagacugauaccagccaucacgaccaagaccacccuacuuucaauaagauaacuccgaaucuggccgaguuugccuucagucuguaucgccaguuggcccaccaauccaauucuaccaauaucuuuuucuccccuguaucuauagcuaccgccuucgcgaugcucucacucggcaccaaagcugauacccacgaugagaucuuggagggauugaacuuuaacuuaacugagaucccagaggcacagauccacgagggguuccaagaacugcugcguacccugaaccaaccugacucccagcuucaacuaacuacuggcaauggauuauuuuugucugaaggacugaaacugguagauaaauuccuggaggacgucaagaaacucuaucacagugaagcuuuuaccgugaauuuuggcgauacugaggaagcuaagaaacagauuaaugauuacguggaaaaggggacacaaggaaaaauagucgaucucgugaaagagcuugauagagauacagucuuugcguugguuaauuacauauuuuucaagggaaagugggaaaggcccuuugaaguaaaggacacagaagaggaggacuuccacguggaccaggugacgacugucaagguccccaugaugaaaagacuggguauguuuaauauucagcauugcaaaaagcucucuaguugggugcucuugaugaaauaucuagggaacgccaccgccauuuuuuuccucccagaugaagguaaauugcaacauuuagagaaugaacucacucaugacaucaucacuaaguuccuggaaaacgaggaccgaagaucugccagucuccaccugccuaaauuaagcauuacagggacuuacgacuugaagagcguccuggggcagcucggaaucacuaagguauuuucaaauggcgcagaccuguccggagucaccgaagaagccccacugaagcugagcaaagcagugcacaaggccguguugaccaucgacgaaaaggguacagaagccgcaggugcuauguuucuggaggccaucccaaugaguaucccgccugaaguuaaguucaacaaaccguucguguuccucaugauugagcaaaauaccaaauccccccucuucaugggaaaggucguuaauccaacacagaaauag

SEQ ID NO: 45659 - RNA, 1257 nt, Artificial Sequence
  derived and/or modified sequence
augcccucaagugucagcugggguauacugcuccucgcuggcuuauguugccuggucccagucagccucgccgaggacccacagggggacgcugcccagaaaaccgauaccucccaccacgaccaagaccauccaacauuuaauaaaauuacucccaaccucgccgaauucgcuuuuagcuuauauagacaacuggcccaucaauccaauucuacuaacaucuuuuucagccccgugaguaucgcgaccgcguuugccaugcugagccucggaaccaaagccgauacgcaugacgaaauccucgagggcuugaauuuuaauuugacggagauacccgaggcucagauucaugagggauuucaagaacugcucagaacccugaaucaacccgacagccaacuccagcucaccacagggaacgggcuauucuuguccgaagggcucaagcugguugacaaauuuuuggaggacgucaaaaaauuguaccacagcgaagcuuuuacagucaauuucggggauacagaagaagcgaagaaacagaucaacgauuacgucgaaaaaggcacucaaggaaaaaucguagaucucguuaaagaacuggaccgagacaccguuuuugcgcucgugaacuacaucuuuuuuaaaggcaaaugggaacggccuuucgaggucaaggacacagaggaggaagacuuucacguagaucaagugaccacagugaaaguaccuaugaugaaacgccuugggauguuuaacauccagcauuguaaaaagcucaguaguuggguccugcuaaugaaauaccuggggaaugcuacugcuauauucuuccuccccgaugaaggaaaacuacagcaucucgaaaacgagcugacccaugauauaauuacuaaauucuuggagaacgaagauagaagaagcgccuccuuacacuuaccuaagcuuuccaucacugggacuuacgaucuuaagucuguacuggggcaacuuggaaucacaaagguguucaguaauggggcugaccuauccggcgugacagaagaagcacccuuaaaacugaguaaggcugugcauaaggccguacugaccauugacgaaaaaggcacugaagcugcuggcgcgauguuucuggaagcuauaccuauguccaucccuccugagguaaaguucaauaaacccuucgucuuuuugaugaucgaacagaauacuaaaucuccacucuuuaugggcaaagucgugaaccccacucaaaaauag

SEQ ID NO: 45660 - RNA, 471 nt, Artificial Sequence
  derived and/or modified sequence
augccaucuuccguaucuuggggcauccuccuccucgccggauuaugcugucugguccccguaucauuggccgaggacccccagggggaugccgcccaaaaaaccgacaccucccaucacgaccaagaccaucccacuuuuaacaaaaucacuccaaaccuggcagaauucgcauuuucccuguauagacaacuggcccaucagagcaauucaaccaauauauuuuuuucuccagugucaaucgcuacugcauucgccaugcugucucuggguacuaaagccgacacucaugacgagaucuuagaaggacugaauuucaaccugaccgagaucccagaggcacagauccaugaaggauuucaagagcuccuuaggacccugaaucagccugacucccagcugcaacucaccacgggaaauggccucuuccugucagagggcuuaaaauugguggacaaguuccucgaguag

SEQ ID NO: 45661 - RNA, 354 nt, Artificial Sequence
  derived and/or modified sequence
augccaucuuccgucuccuggggcauccuucuccuugcuggccuaugcugccugguccccgugucauuagcugaagacccacaaggugacgcugcgcagaagacagauacaucccaccacgaccaggaucaucccacuuucaacaaaauuacucccaaccucgccgaguucgccuucucccuauaccgacaguuagcucaccagaguaacucuacgaacauuuucuuuucccccgucagcaucgcaacagccuuugccaugcucucucugggcacaaaagcugauacccacgaugagauucuggaaggauuaaacuuuaaccuaaccgagaucccugaagcacaaauacauuag

SEQ ID NO: 45662 - RNA, 435 nt, Artificial Sequence
  derived and/or modified sequence
augccauccagcgucucuugggguauucugcugcuugccggccugugcugcuuggugccagucagucucgcagaggauccacagggggaugcagcucagaaaaccgauaccagucaccacgaccaagaccauccuaccuucaacaaaaucacucccaaccuugccgaauucgccuuuucucucuauaggcagcuagcucaucaguccaauucaacaaauaucuucuuuagcccagugucuauagcuaccgcuuuugcuauguuaagucuuggcaccaaagccgauacacacgaugaaauacuagaaggccuaaacuucaauuuaaccgaaaucccugaggcucagauacaugaaggguuucaagagcuucuccgcacccucaaccagccugacagucaacuccagcuaacaacagguaacggucuauuucucuag

SEQ ID NO: 45663 - protein, 1363 aa, Artificial Sequence
  derived and/or modified sequence
MAWKTLPIYLLLLLSVFVIQQVSSQELSCKGRCFESFERGRECDCDAQCKKYDKCCPDYESFCAEVHNPTSPPSSKKAPPPSGASQTIKSTTKRSPKPPNKKKTKKVIESEEITEEHSVSENQESSSSSSSSSSSSTIRKIKSSKNSAANRELQKKLKVKDNKKNRTKKKPTPKPPVVDEAGSGLDNGDFKVTTPDTSTTQHNKVSTSPKITTAKPINPRPSLPPNSDTSKETSLTVNKETTVETKETTTTNKQTSTDGKEKTTSAKETQSIEKTSAKDLAPTSKVLAKPTPKAETTTKGPALTTPKEPTPTTPKEPASTTPKEPTPTTIKSAPTTPKEPAPTTTKSAPTTPKEPAPTTTKEPAPTTPKEPAPTTTKEPAPTTTKSAPTTPKEPAPTTPKKPAPTTPKEPAPTTPKEPTPTTPKEPAPTTKEPAPTTPKEPAPTAPKKPAPTTPKEPAPTTPKEPAPTTTKEPSPTTPKEPAPTTTKSAPTTTKEPAPTTTKSAPTTPKEPSPTTTKEPAPTTPKEPAPTTPKKPAPTTPKEPAPTTPKEPAPTTTKKPAPTTPKEPAPTTPKETAPTTPKKLTPTTPEKLAPTTPEKPAPTTPEELAPTTPEEPTPTTPEEPAPTTPKAAAPNTPKEPAPTTPKEPAPTTPKEPAPTTPKETAPTTPKGTAPTTLKEPAPTTPKKPAPKELAPTTTKEPTSTTCDKPAPTTPKGTAPTTPKEPAPTTPKEPAPTTPKGTAPTTLKEPAPTTPKKPAPKELAPTTTKGPTSTTSDKPAPTTPKETAPTTPKEPAPTTPKKPAPTTPETPPPTTSEVSTPTTTKEPTTIHKSPDESTPELSAEPTPKALENSPKEPGVPTTKTPAATKPEMTTTAKDKTTERDLRTTPETTTAAPKMTKETATTTEKTTESKITATTTQVTSTTTQDTTPFKITTLKTTTLAPKVTTTKKTITTTEIMNKPEETAKPKDRATNSKATTPKPQKPTKAPKKPTSTKKPKTMPRVRKPKTTPTPRKMTSTMPELNPTSRIAEAMLQTTTRPNQTPNSKLVEVNPKSEDAGGAEGETPHMLLRPHVFMPEVTPDMDYLPRVPNQGIIINPMLSDETNICNGKPVDGLTTLRNGTLVAFRGHYFWMLSPFSPPSPARRITEVWGIPSPIDTVFTRCNCEGKTFFFKDSQYWRFTNDIKDAGYPKPIFKGFGGLTGQIVAALSTAKYKNWPESVYFFKRGGSIQQYIYKQEPVQKCPGRRPALNYPVYGETTQVRRRRFERAIGPSQTHTIRIQYSPARLAYQDKGVLHNEVKVSILWRGLPNVVTSAISLPNIRKPDGYDYYAFSKDQYYNIDVPSRTARAITTRSGQTLSKVWYNCP

SEQ ID NO: 45664 - protein, 933 aa, Artificial Sequence
  derived and/or modified sequence
MAWKTLPIYLLLLLSVFVIQQVSSQELSCKGRCFESFERGRECDCDAQCKKYDKCCPDYESFCAEVHNPTSPPSSKKAPPPSGASQTIKSTTKRSPKPPNKKKTKKVIESEEITEEHSVSENQESSSSSSSSSSSSTIRKIKSSKNSAANRELQKKLKVKDNKKNRTKKKPTPKPPVVDEAGSGLDNGDFKVTTPDTSTTQHNKVSTSPKITTAKPINPRPSLPPNSDTSKETSLTVNKETTVETKETTTTNKQTSTDGKEKTTSAKETQSIEKTSAKDLAPTSKVLAKPTPKAETTTKGPALTTPKEPTPTTPKEPASTTPKEPTPTTIKSAPTTPKEPAPTTTKSAPTTPKEPAPTTTKEPAPTTPKKPAPTTPETPPPTTSEVSTPTTTKEPTTIHKSPDESTPELSAEPTPKALENSPKEPGVPTTKTPAATKPEMTTTAKDKTTERDLRTTPETTTAAPKMTKETATTTEKTTESKITATTTQVTSTTTQDTTPFKITTLKTTTLAPKVTTTKKTITTTEIMNKPEETAKPKDRATNSKATTPKPQKPTKAPKKPTSTKKPKTMPRVRKPKTTPTPRKMTSTMPELNPTSRIAEAMLQTTTRPNQTPNSKLVEVNPKSEDAGGAEGETPHMLLRPHVFMPEVTPDMDYLPRVPNQGIIINPMLSDETNICNGKPVDGLTTLRNGTLVAFRGHYFWMLSPFSPPSPARRITEVWGIPSPIDTVFTRCNCEGKTFFFKDSQYWRFTNDIKDAGYPKPIFKGFGGLTGQIVAALSTAKYKNWPESVYFFKRGGSIQQYIYKQEPVQKCPGRRPALNYPVYGETTQVRRRRFERAIGPSQTHTIRIQYSPARLAYQDKGVLHNEVKVSILWRGLPNVVTSAISLPNIRKPDGYDYYAFSKDQYYNIDVPSRTARAITTRSGQTLSKVWYNCP

SEQ ID NO: 45665 - protein, 1311 aa, Artificial Sequence
  derived and/or modified sequence
MAWKTLPIYLLLLLSVFVIQQVSSQDLSSCAGRCGEGYSRDATCNCDYNCQHYMECCPDFKRVCTAELSCKGRCFESFERGRECDCDAQCKKYDKCCPDYESFCAEVKDNKKNRTKKKPTPKPPVVDEAGSGLDNGDFKVTTPDTSTTQHNKVSTSPKITTAKPINPRPSLPPNSDTSKETSLTVNKETTVETKETTTTNKQTSTDGKEKTTSAKETQSIEKTSAKDLAPTSKVLAKPTPKAETTTKGPALTTPKEPTPTTPKEPASTTPKEPTPTTIKSAPTTPKEPAPTTTKSAPTTPKEPAPTTTKEPAPTTPKEPAPTTTKEPAPTTTKSAPTTPKEPAPTTPKKPAPTTPKEPAPTTPKEPTPTTPKEPAPTTKEPAPTTPKEPAPTAPKKPAPTTPKEPAPTTPKEPAPTTTKEPSPTTPKEPAPTTTKSAPTTTKEPAPTTTKSAPTTPKEPSPTTTKEPAPTTPKEPAPTTPKKPAPTTPKEPAPTTPKEPAPTTTKKPAPTTPKEPAPTTPKETAPTTPKKLTPTTPEKLAPTTPEKPAPTTPEELAPTTPEEPTPTTPEEPAPTTPKAAAPNTPKEPAPTTPKEPAPTTPKEPAPTTPKETAPTTPKGTAPTTLKEPAPTTPKKPAPKELAPTTTKEPTSTTCDKPAPTTPKGTAPTTPKEPAPTTPKEPAPTTPKGTAPTTLKEPAPTTPKKPAPKELAPTTTKGPTSTTSDKPAPTTPKETAPTTPKEPAPTTPKKPAPTTPETPPPTTSEVSTPTTTKEPTTIHKSPDESTPELSAEPTPKALENSPKEPGVPTTKTPAATKPEMTTTAKDKTTERDLRTTPETTTAAPKMTKETATTTEKTTESKITATTTQVTSTTTQDTTPFKITTLKTTTLAPKVTTTKKTITTTEIMNKPEETAKPKDRATNSKATTPKPQKPTKAPKKPTSTKKPKTMPRVRKPKTTPTPRKMTSTMPELNPTSRIAEAMLQTTTRPNQTPNSKLVEVNPKSEDAGGAEGETPHMLLRPHVFMPEVTPDMDYLPRVPNQGIIINPMLSDETNICNGKPVDGLTTLRNGTLVAFRGHYFWMLSPFSPPSPARRITEVWGIPSPIDTVFTRCNCEGKTFFFKDSQYWRFTNDIKDAGYPKPIFKGFGGLTGQIVAALSTAKYKNWPESVYFFKRGGSIQQYIYKQEPVQKCPGRRPALNYPVYGETTQVRRRRFERAIGPSQTHTIRIQYSPARLAYQDKGVLHNEVKVSILWRGLPNVVTSAISLPNIRKPDGYDYYAFSKDQYYNIDVPSRTARAITTRSGQTLSKVWYNCP

SEQ ID NO: 45666 - DNA, 201 bp, Artificial Sequence
  derived and/or modified sequence
atgggcaccagcagcatcttcctgtgcgtgctgttcctgtgcggcgccctgggcttgactatgagcccggcgcgcggaaggctgaggtgttatatatgcggttttaccaaaccttgccacccagtgcctacggagtgccgtgatgacgaggcttgcggcatttcaataggaacaagcgaccagtctgagattactgaatag

SEQ ID NO: 45667 - DNA, 627 bp, Artificial Sequence
  derived and/or modified sequence
atgggtgggggaaggggtttgttgggtcgggagactcttggccctggggaccggtgctccggaaagggtccgctttgttattggcctccgccagggtcccccccagcgcctagtctgcgggctagcctgcctctggaaccaccacgctgcccgctgaggtcttgtcccctgccaagatctgcctgcctgtgctccaggaattcagcccctggcagctgctgccgtccctgggcctctctatggagcggcctgccgccaccgtcccgcgcttccagtgccccaccgatgcacatctggaccttaagctgtgcccctgtggcccaggcagaacttctccttcacaccgaccgaccgctgccacctctgccaaccccattgctcttgacacgactcccagacgactacattatgctcccaaccgatctccgctgccattgccacagacaccctagccacagcaccgacagactgctgttactggtaatttgcacacatctgggtggcatatgggcaggacacagcccgtggacgatgatccagaccgctggctgcccctccagggacctgctcccctctgctcgacccatatcgagccccatcccggagaccttctgcgcacctgcctag

SEQ ID NO: 45668 - DNA, 4092 bp, Artificial Sequence
  derived and/or modified sequence
atggcctggaaaacactgcctatctacctgttacttctgctctcagtctttgtgatccagcaagtgtctagccaggaattatcgtgcaagggaagatgttttgagagtttcgagcgcggaagagagtgcgactgcgacgcacagtgtaagaagtatgataaatgttgtcccgactacgagtcattctgcgctgaggttcacaatccgaccagcccgccaagttctaagaaagccccgcctccaagtggcgcctctcaaactattaagtcaactactaagagaagtcctaaacccccaaacaaaaagaaaaccaaaaaggttattgaatccgaggagatcaccgaggaacactctgtgtccgagaatcaggaatcatcaagttcctcctcttcctcctcttcatcctccacaatcaggaaaatcaaatcatcaaagaatagtgcagccaatcgtgaattgcagaagaaactgaaagtgaaagataataagaagaacagaactaaaaaaaagccaacccctaaacctcctgtggtggacgaagccggctcgggattggataatggggattttaaggtcacaacccccgatacgagcacaacccagcacaacaaggtaagtacctctccgaaaattacaacggcaaagcccatcaacccgaggccaagtctgccccctaatagtgatacatccaaggaaacctctttgaccgtgaataaggagacaacagtggagaccaaagagacaactacaaccaataagcagacctctactgatggcaaggaaaaaacaacctctgcaaaagagactcagtcaatagaaaagacttccgctaaagacctcgcccccacctctaaggttctggccaagccaacaccaaaagctgaaactaccacaaaggggccagctttaactaccccgaaagagcccacccccaccacgcctaaagaacccgcaagtacgaccccaaaagaacctacacctacaacaatcaagagcgctcctacgactcccaaagagccggcccctacaactaccaaatccgccccaacgacacccaaagaacctgccccaacgactaccaaggagcccgcaccaactaccccaaaggaacctgccccaactactacaaaagaaccagcacccaccacaacaaagagcgcgcccactactccaaaggaacccgcgcccacgacccctaaaaaacccgcccctaccaccccaaaggaaccggcgcccacgactcccaaagagccgacccccactacaccaaaggaaccagctcctacaaccaaggagcccgctcctacaacaccaaaagagccggcccccacagcccccaaaaagccagctcctacgacaccaaaagagcccgcccccacaacccccaaggagcccgcccccaccaccaccaaggaaccatcacctactacacctaaagagccagcaccgactaccacgaaatccgccccaacgactaccaaagagcctgcccccactacgactaagagcgctccaaccacaccaaaagagccttcccccaccactactaaggaaccggcccctaccacaccaaaagaaccagcccccactacacctaaaaaaccagcacctactacgcctaaagagccagcccccacaactccaaaggaacctgctccaacgacaacgaagaagccggcaccaactacccccaaggaacccgccccgaccacgcctaaagaaaccgcaccaacaactcccaaaaagctcacgcctaccacaccagagaaactggctcccaccactcccgagaaaccagctcctaccacgcccgaagaactcgccccaacaacacccgaggaacccacgcctacgacgccagaagaacctgcacccaccactcccaaggccgcagcccccaacacacccaaggagcccgccccaactacacccaaagaacctgctcctactacacctaaagaacctgctccaaccacgcccaaagaaacagctcctacaaccccaaaaggtaccgctccaacgacattgaaggaacccgcccctactacacccaagaagcccgcacccaaagagctggccccaacgacaacaaaggaaccgacttccacgacatgtgataagcccgcaccaactacccctaaaggcactgcacccacaacgccaaaggagcccgcacctacaacaccaaaggaacctgcaccgacaacacccaaggggacagcaccaacaactctaaaggaaccagcccctactactcccaaaaagcccgccccgaaggaacttgctccgacaaccacaaaaggccccacgagcacaacatccgataagcccgcaccaacaaccccaaaagagaccgcgcccaccacccccaaagaacctgcacccacaacccctaagaagccggctccaactacaccggaaactcctcccccgaccacctctgaggtttcaaccccaacaactaccaaagagccgacgactattcacaaatcaccggacgagtctaccccagagttaagcgcagagcctacccctaaagctctggagaatagccccaaagaaccgggagtccccacaacaaagactcccgcagccaccaaaccagagatgacgaccacggccaaggataaaacaacagagcgagaccttagaacgacccctgaaaccacgaccgctgcccccaagatgacaaaggagaccgccacaacgacagagaagaccactgagagtaaaattaccgccaccaccacccaagtgacttcaactacaacacaagataccacccctttcaagatcacaaccctgaaaacgaccactctcgccccgaaggtcactacaacaaaaaaaaccatcaccacaactgaaattatgaacaaaccggaggaaacagccaaacccaaagatcgagcaaccaactccaaagccactacgccgaagcctcaaaagcctacgaaagcccccaagaagcccaccagcacgaaaaaacccaagacaatgccaagagtgagaaaaccgaagaccactccaactccaagaaagatgaccagcaccatgccagagctgaaccctacctcaaggattgctgaggccatgctgcaaaccactaccaggcccaaccagacccctaactccaagctcgtagaggtgaatcccaagagcgaggatgctggcggagccgagggcgagactccccatatgttattgcggccccatgtgttcatgcctgaagtgacacctgatatggattatcttccccgggttcctaatcaagggatcattatcaacccaatgctgtccgacgagaccaacatctgcaatggcaaaccagtagacggcctcaccactctgagaaatggaaccctcgttgccttcaggggacactacttttggatgttaagtccattctcaccaccctccccagctcgcagaatcaccgaggtgtggggaatcccatcccccatagataccgttttcacaagatgcaattgcgagggaaagacgttctttttcaaggactcccaatactggcgattcactaacgatatcaaggatgccggataccccaaaccaatcttcaagggttttggtggcttgacagggcaaatcgtggctgctctgagcactgccaagtataagaattggcctgaatctgtgtacttctttaagagggggggcagcattcagcaatatatttataaacaagaacctgttcagaaatgccccggcagacgcccagcactgaactaccccgtatacggcgagacaactcaggtgcgaaggcgcaggttcgagagggccatagggccgagccaaactcacaccatcaggatacagtacagtccagcaaggctcgcgtaccaggataagggagtgctccataatgaagtgaaagtgtccatcttgtggaggggactacctaatgtggtgacctctgccatctcattgcccaacatcaggaaaccagatggttacgactactacgcctttagcaaggatcagtactacaacatagacgtgccgagcagaaccgccagagcaatcaccacacgatctgggcaaaccctgagtaaggtatggtacaactgcccatag

SEQ ID NO: 45669 - DNA, 2802 bp, Artificial Sequence
  derived and/or modified sequence
atggcctggaagacactccctatttacctgcttttgctgctgagcgtgttcgtgatccagcaagtgagctcgcaggaattaagctgcaagggccgctgtttcgagtcatttgagcggggccgggagtgcgattgcgacgcccagtgtaagaagtatgacaagtgttgccccgactacgagtcattctgcgccgaagtccacaacccaacctcaccccccagctccaagaaggcgccacctccatccggcgcgagccagacaattaagagtaccactaagcgctccccaaaacctccaaacaaaaaaaaaaccaaaaaagtgatcgaaagcgaggagattaccgaggaacattctgtaagcgagaatcaagagtcctctagtagcagctccagcagttccagtagtagtacgatacgaaaaatcaaatcatctaagaactcagcggctaaccgggaactacagaaaaagctcaaggtgaaagacaacaaaaaaaacagaactaagaagaaacccactccgaaacctcctgtggttgacgaggcgggaagtggactcgataacggagacttcaaagtaactacaccagacacatccaccacgcaacataacaaagtttctacatcgcctaaaatcacaacagctaaacccattaacccaagaccatcgcttccgccgaattcagatacatctaaggagaccagcttaaccgtaaataaggagactacagtggaaacgaaagagaccacaaccacaaataaacagaccagcacggacgggaaggaaaagacgacgtcagctaaggagacgcagtccatcgaaaaaacaagcgctaaggacttggcccccactagtaaggttttagccaagccgacaccgaaagctgaaaccactacgaagggccccgctctgaccacacctaaggaacccacacccactactccgaaagagcctgcttccacgactccaaaagagcccacaccaaccacaatcaaaagcgctcccaccacccctaaagaacctgcaccaacaactacaaaaagcgcccccaccacccccaaggagcccgccccaaccacgacaaaagagccagctcccactacaccgaaaaaacccgcccccacaactcctgaaacacctccacctactacttccgaagtgagcaccccgactaccactaaggagcctactacaatccataaaagccctgacgagagtactcccgagttgtctgctgaacccacacccaaggctctagagaattcaccgaaggaaccgggggtgcctactaccaagacccctgctgcaaccaagcctgaaatgaccaccaccgccaaggacaagacaacagagagagacctccggaccactcctgagactacgacagcggcccctaaaatgaccaaagagaccgccacgacaaccgagaaaaccacagaaagtaagatcaccgcgaccactactcaggtaacttcaacaactactcaagacactacgcccttcaaaatcactaccctgaaaacaaccacgctggctccgaaggtgactactactaaaaaaacaataacaaccactgaaattatgaataaacccgaagagactgctaaacccaaagacagagctaccaattccaaagccaccacgcctaagccgcagaagccaactaaagcccctaagaagcctacttcaacaaagaaaccaaagacgatgccccgcgtccgaaagccaaagactacccctaccccacgcaagatgacatcaactatgccagaactcaacccgactagtcgcattgccgaggccatgctgcagactacaacccgtcccaaccagacaccaaatagtaaactggtggaagttaatccaaaatctgaagacgcagggggtgccgaaggcgagacaccacatatgcttctgcgccctcacgtgtttatgccagaagtgacacctgacatggactacctcccacgggtgcctaaccagggtatcattattaacccaatgttatcggacgagaccaatatatgcaacggaaagccagtggacggcctcactaccctcagaaatggcactctcgtggccttccggggacattatttttggatgcttagccctttttctcccccgtcacccgcccgtagaattacagaagtgtggggcatcccatcaccaatcgacacagtgtttaccagatgcaattgcgaaggaaaaactttcttcttcaaggacagccagtactggcggtttacaaacgatataaaggacgccggttatccaaagcctatctttaagggcttcggtggactcaccggccagatagttgccgccctctctacagccaagtataaaaattggcccgaatcagtctatttttttaagcgcgggggcagcatacagcaatatatctacaaacaggaacccgtacagaagtgtcctggccggaggcccgcactcaactacccagtctatggggagactactcaggtgaggaggcggaggttcgagagagccattggcccaagtcaaacacatacaatccggattcagtattccccagcgagactagcgtaccaggacaaaggagtccttcataacgaggtaaaagtaagcatcttgtggcggggactgcctaatgtcgtgacctccgctattagcctgcccaacattcgaaaacccgatgggtacgactactacgcattttccaaggaccagtattacaatatcgacgtgccatcacgtacggcccgcgcaatcaccacgagaagcgggcagacgctgtcaaaggtctggtacaactgtccctag

SEQ ID NO: 45670 - DNA, 3936 bp, Artificial Sequence
  derived and/or modified sequence
atggcttggaaaacattaccgatctaccttctgcttctgctgagcgtcttcgtgattcagcaggtgtcatcccaggacctgtcctcgtgcgcgggtcgttgtggcgaaggctactctcgggacgccacgtgcaattgcgactacaattgccagcattacatggaatgttgccccgactttaagagagtatgtacagcagagctgtcttgcaagggacgctgcttcgagagtttcgagcgagggagagagtgcgactgcgatgctcaatgtaagaagtacgataagtgctgtccagactacgagtccttttgcgccgaggtgaaagacaataaaaagaatcggacgaaaaaaaagccaacccctaaaccccctgtcgttgacgaggccggctcagggctggataatggtgactttaaggttacaacccccgacacctcaaccacccagcataacaaagtgtctacctcccctaagataacgacagcgaagcctatcaacccccgacctagcttgccacccaactccgacacgtcgaaggagacctccttgaccgtgaataaggagacgacagtcgagactaaggagactaccactaccaataaacagactagtaccgatggcaaagaaaaaaccacctctgccaaggagactcaaagcatcgaaaaaacttctgcaaaggatttggctcctacctccaaggtgctagccaagcctacacctaaagctgaaaccaccaccaagggccccgctctaacaacgcccaaggaacccaccccaacaacccctaaggagccagctagcacaacaccaaaagagccaacccccacaactatcaaatcagcgcccaccactcctaaagaacccgcccctaccacgacaaaatcagcgccaacgacaccaaaagaaccggccccaacaaccacgaaagaaccagccccaaccacgccaaaagagccagccccgactacaactaaagagccggcgcccacgacaaccaaatcggcccctacaacaccaaaagaaccagcacctacaaccccgaaaaagcccgcccccacaacccctaaggagcccgcgcccacaacccccaaggagccaacaccaacaacacccaaagagcctgcccctacgaccaaggaacccgctcccacgacacctaaagaaccagctccaacggctcctaaaaaaccagcccctaccacgcccaaggagccagcacctacaaccccaaaggaacccgcacctaccaccactaaggaaccatcaccaaccactcccaaggagcctgctccaacaaccaccaaaagcgcccccaccaccactaaagagccagccccaacaactactaaatctgcgcctactacgcccaaagaacccagccccactactactaaagagccagctcccactacgccaaaggagccggctcccaccacacccaaaaagcccgcaccaaccacgcctaaggagccggcccctactacgccaaaggaacctgctccaacgacaactaaaaagcccgctccaacaactccaaaggagcctgcaccaacaactcccaaggagacagccccaactacgcctaagaagttgactcctacaactcccgagaaactggctccaactactcccgagaaaccggcccctacgactcccgaggagctggcacctacaactcctgaggaacctacccccacaacccctgaggagcccgcaccgacaactccgaaagccgccgctccaaatacacctaaagaacctgccccaaccactcccaaagagcccgcccctaccaccccaaaggagccggctcccaccacccctaaagagacagccccgaccactcccaagggaactgcccccaccaccctcaaggaaccagcccccacaactcctaagaaacccgcccccaaagagctcgcgcccacaacaactaaagagccaacaagcactacatgtgacaagccggcgccgacaacacccaagggcactgccccgaccacccctaaggagcccgcccctactacgccgaaggagcccgcacccaccaccccaaaagggacagcaccaaccactctaaaggaaccagctcctaccacacctaaaaagccggcccctaaggaactcgctccaaccactacaaagggacccactagcacgacatctgacaagcctgcccctaccacaccaaaagagaccgcccctacgacaccaaaagagccagcccccacaactcccaagaagcctgctccaactacccccgaaacccctcctcctactacctctgaggtgtccacaccgactacaactaaagagcctacgacgattcacaagtctccagatgaatccacgcccgagctgtccgccgaacctacaccgaaggcactggaaaatagtccgaaagaacctggggtccccacgaccaagacccctgcggccacaaagccagagatgaccaccactgcaaaggacaagactacagaaagagacctccgtaccacgcctgaaactactaccgctgctccaaagatgaccaaagaaacagccactacaacagagaaaactaccgaatccaaaattaccgctacaacaacacaggttacttctacaaccacccaagatactacccccttcaagattacaactttaaaaacaacaacccttgcccccaaggtgacaaccactaagaaaacaattacaactaccgaaatcatgaataaaccggaagagactgccaagcctaaggatcgtgccaccaactctaaggcaaccacccccaaaccccagaagcccacaaaggccccaaaaaaaccaacatccactaagaaaccaaagactatgccgcgtgtgcggaaaccaaagaccactcctactccacgcaaaatgacctcaactatgcccgaactgaatccaacctcacgcatcgccgaggccatgctccagacaactacgagacctaaccaaacccccaatagtaaactggtggaggtgaatcccaagagtgaagacgccggaggcgctgaaggtgaaacccctcacatgttgctgagacctcatgtgtttatgccagaagtgactcccgatatggattatttaccacgagtacctaaccaaggcatcataattaatcctatgttgagcgacgagactaacatttgcaacggaaagcctgtggatggcctgacaacattgagaaatggaactctggtcgcgtttagaggccactatttctggatgctctcaccgttttccccacccagccccgccaggagaatcacagaggtgtggggtatccccagcccaattgacactgtgtttactcggtgtaactgtgaagggaaaacctttttcttcaaggatagccagtattggaggttcactaacgatatcaaagacgccggttatccaaaaccaatcttcaagggctttggcggcttaactggacagatcgtcgccgccctctccactgccaaatacaaaaattggcctgagtccgtgtactttttcaagagaggtggtagcattcagcagtatatttacaagcaggagcctgtccagaaatgtccaggtaggcggcctgcactgaactatcctgtctacggagagacgacccaggtgcgacgccgaaggtttgaaagagcaatcggcccttcacagacccatactatacgaatccaatacagcccagcccggctagcttaccaagataagggcgtcctccacaatgaggtgaaagtctctatactctggaggggtcttcccaatgttgtaacatccgcgatctccttacccaacatccgaaagcctgatggttatgattactatgccttcagcaaagatcagtactacaacatcgacgtgccgagtagaacagcacgcgctattacaactcgctccggccagacattgtcgaaggtgtggtacaactgcccatag

SEQ ID NO: 45671 - DNA, 4086 bp, Artificial Sequence
  derived and/or modified sequence
atggcttggaaaaccctccccatctacctcctcctgctcctgtccgttttcgttattcaacaggtcagctcccaggacctcagcagctgcgctggccgctgcggagaaggttacagccgcgacgcgacatgtaactgtgactataattgccagcactacatggaatgctgccctgatttcaagagggtgtgcacagccgagttatcctgtaagggccggtgctttgagtccttcgagcgaggccgagagtgcgattgtgatgcccagtgcaaaaaatatgataagtgttgtccagactatgaatccttctgtgctgaggtacacaacccaacctccccccccagttctaaaaaggccccaccacccagcggcgcaagtcagaccatcaagtccactaccaagcgaagtcccaagcccccaaataaaaaaaagaccaagaaggtgatcgagtctgaggagatcactgaggtcaaagacaataaaaaaaacagaactaagaaaaaaccaacaccaaaaccgcctgtggtcgacgaagcagggagcgggttggacaatggcgactttaaagtgaccactcccgacacatccactacccagcacaacaaggtgtccacttcaccaaagatcacaaccgccaagcccattaaccccagaccatcccttccacccaacagcgatacaagcaaagagacctctttaaccgtcaataaagaaaccacggttgaaacaaaggaaaccaccacaaccaacaagcaaacttccaccgacggtaaagaaaagacgacatctgctaaggagactcagtctattgagaagactagtgcaaaagatttagccccaacgtccaaggttctggccaaacccacccccaaggcggaaactacaactaagggacccgcgctgaccacccccaaagagccaactccgactacgcccaaagaacccgcctccacgaccccaaaggagcctacacccacgaccataaaatccgcgcctacaaccccaaaagaacctgcacctactacaaccaagagtgcgccaaccaccccaaaggaacctgcccctaccactaccaaagagcctgctcccaccacgcccaaagagcccgcccccacaaccacaaaggagcctgcacctacaacgactaaaagcgccccaaccacaccaaaggagccagcccccaccaccccaaagaaacccgccccgacaaccccgaaagagcccgcacctactaccccaaaagagccgacccctacgacccccaaagaaccagcacccactacaaaggagcccgctccgaccacaccgaaggaacctgcccccacggcccccaagaaaccagccccaacaactcctaaagagccagcacccacgacacccaaagagccagcgccaaccacaactaaggaaccgtccccgaccactccaaaggaaccagcccccacaacgaccaaaagcgcccccaccaccaccaaggagcccgctccgactactaccaagtctgccccgactacccctaaggaaccttccccaaccactaccaaggagcccgcccccactacccccaaggagcccgcccccacaacacccaagaagcctgcacctaccacccctaaggaaccagctccgactactccaaaagagccagcgccaactaccacaaagaagccagctcccaccacgcccaaagagccggcccccacaaccccgaaagagacggcacccacgacccctaaaaagctgacccccactactcctgaaaaactagctccaactactcctgaaaagccagcaccgacaaccccggaagaattagccccaactacccccgaggaaccaactcctacaaccccggaggagcccgcaccaacgacccctaaagctgctgcccctaatacaccaaaggaacccgcacctacaacaccaaaagaaccagcccccaccacacccaaagagcctgcacccacaacccctaaggagaccgcccccaccacccctaagggaactgctccaacaactttaaaagaacccgccccaacgacacctaaaaagccagctccaaaggagcttgctccaaccaccaccaaagaaccgacatcaaccacctgtgacaaacctgcccccaccaccccaaagggtacagcgcccactactccgaaggagcccgccccaaccacccctaaagaacctgcgccaacaacaccaaaggggacagcacctactactctgaaggagcctgcacccactacacccaaaaagccagcccccaaggagctcgcgcccaccacaactaaagggcctacatctaccacatcagataaacccgctccaactacacccaaggaaaccgcccccacgacccctaaagagcccgccccaacaacccccaagaagcctgccccaacaacccctgaaacccctcctcctaccacgagcgaagtatctacccccacgacaacaaaagagcctacgacgatccataagtctccggatgagtccacaccagagttgagcgccgagccaactccaaaggctctggaaaactcccccaaagagcccggggtgccaacaacaaagactccagccgccaccaagccagagatgactaccacagccaaggataaaacaactgagagagacctccgcacgactcctgagactacaactgcggctcctaagatgacgaaagaaaccgctactaccaccgaaaagacaaccgaaagcaaaattacggcaactaccacacaggtgacatccactacaacacaggatacaacccccttcaagataactactctgaaaacaactaccctcgcccccaaggtcacgacgacaaaaaaaaccatcacgacgacagagattatgaataagccggaggaaaccgctaagccaaaagaccgggccacaaacagtaaggcgaccactcccaagccccagaagccgaccaaagcccctaagaaacccacgtctactaagaagccgaaaaccatgcctcgcgttcggaagccaaagacaacacctacccctcggaaaatgaccagtaccatgcctgaactcaaccccacaagtagaattgccgaggcgatgctgcaaaccacaactcgacccaaccagacccctaatagcaagcttgtcgaagtgaacccaaaatcagaagatgctgggggagcagaaggagaaacgccccatatgctgctccgcccacacgtattcatgccagaagtgacccccgacatggactatttgccaagggtcccaaatcaagggatcataattaatccaatgcttagcgatgagaccaatatttgtaacgggaagcctgtagacgggcttactaccctgaggaatggaactctggtcgccttccgcggccactacttctggatgctgtctccattttcccctccatcacccgcaagaagaattaccgaagtatgggggatccccagcccaatagataccgtgttcacccgttgcaactgtgaagggaagactttcttctttaaagattctcagtactggcgcttcactaatgatatcaaggatgccggctatccaaagccaatctttaagggttttgggggcttaacaggccagatagtggccgcactgtctacagccaagtacaaaaattggcctgagtccgtgtacttctttaagcggggcggttccatccagcagtatatttacaaacaggagccggtgcagaaatgtccaggacggagaccggcactaaattacccagtgtatggcgagacgacacaggtgcggcgtaggaggttcgagagagctattggtccaagtcagacacacacaatccgcatccaatacagtcctgcccggttggcctaccaagacaagggagttcttcacaacgaagtgaaagtgagcattctgtggagaggactgcccaatgtggtaactagcgcaatcagcctgcctaatattcgcaagcccgacggttacgattattatgccttcagtaaggaccagtattacaatatagatgtcccctctagaaccgctcgcgctatcaccacaagatctgggcaaacattgagtaaggtttggtataattgtccgtag

SEQ ID NO: 45672 - DNA, 4215 bp, Artificial Sequence
  derived and/or modified sequence
atggcctggaaaactcttcctatttacctgctgctcctcttatctgtcttcgtgatccagcaagtgtcctctcaagatctgtcctcctgtgccggtaggtgcggagaaggatatagcagggacgcaacttgtaattgcgattacaactgtcagcactatatggagtgttgccccgatttcaaacgggtatgtactgcagagctgagctgcaaaggtcgatgctttgagtcttttgagaggggcagagaatgcgattgcgatgcccagtgtaaaaaatacgacaagtgttgtccagattacgagagtttttgtgccgaagtccataatcccactagcccacctagctctaaaaaagctccccccccaagcggggcttcacagactattaaaagcacaacaaagaggtcccccaaacctccgaacaagaaaaagactaaaaaggttatcgagtcggaggagatcacggaggaacacagcgtgagtgaaaaccaagaatcatcgagctccagttctagcagtagttcttcaagtaccattagaaagattaaaagcagtaagaacagtgccgccaatagggagctccaaaaaaagctcaaggtgaaagacaacaagaaaaaccgaactaaaaagaagccaacccccaagcctcccgtggtagatgaggcggggtcaggcctggacaacggggattttaaggtcacaacccctgatacttctacaacccaacacaataaggttagcactagtccaaaaataaccactgccaagccaataaatcctcgtccgtcacttccaccgaatagtgacacatcaaaggaaacctcgctgaccgttaacaaggaaaccaccgtcgagactaaagagaccaccacgacgaataagcagacgtcaaccgatggcaaggagaaaactacaagtgctaaggaaactcagagtatagagaaaactagcgccaaggacctggcaccaacaagcaaggtgttagctaagcctacacctaaggccgagaccaccacgaagggacccgcccttacaacccctaaggagcctacgcccaccacgccaaaggagccagcttctaccacaccaaaggagccaacgcccacgaccatcaagtccgccccgaccactcctaaggaacccgccccaacaacaaccaagtctgcacctactacacccaaagagccagcgccgaccacaacgaaagagccagcacctacaacacccaaggagcccgcacctacaactaccaaagagccggccccgaccacgaccaagtccgccccaactacaccaaaggagccagctcctaccaccccaaagaaacccgcccccaccactccaaaagagccagcaccaaccacacctaaagagcctacccccactacccccaaggaacctgcccccacaactaaggaacccgcccctactaccccgaaagaaccagcacccacggcccccaagaagccggcaccgactactccgaaagaacccgcacccaccacaccaaaagaaccagccccgactacaactaaggagcccagcccaaccacacctaaggagcctgcccccacgactacaaaatcagctcctacaacaaccaaggagcccgcaccaacaaccaccaagtctgcaccgaccacacctaaggaaccgtctcctaccactactaaggagcccgctcctacgacacctaaggagcccgcgccgaccactcccaagaaacctgctcccacaacacctaaggagccggcccccaccactccaaaagagccagcacccaccacaacaaaaaaacccgcccctaccactcccaaagagcccgccccgacaacaccaaaggaaacagcgccaaccacacccaaaaagctcactccaacaacgcctgaaaagcttgcaccgactacccccgaaaagccagctcccacgacacctgaggaactcgcacctaccaccccggaagagccaacccctaccacacctgaggaaccagcgcctaccacgcctaaggcggccgcccccaacacacctaaggaaccggctccgacaaccccgaaagaacctgctccaacgactcctaaggagccagcaccaacaactccaaaggagacggcaccaaccactcccaagggaactgctcctactacactcaaggaacctgccccaactactccgaaaaaaccagcccccaaagagctcgccccgacaacaactaaggaaccgacttcaaccacctgtgataaaccggccccaacgacacccaagggcactgcgcccacgacgccaaaagaacctgccccgacaacgcccaaagagcccgcaccaacaacacccaagggaacagcacccactacactgaaggaacccgctcccactactcctaaaaagcctgccccgaaggaattagctcccaccaccaccaagggtccaacatcgaccacgtctgacaaacccgcccccacgacccccaaagagacagctcctaccactcctaaagagccagcccctaccacacccaagaaacccgctcccactacaccggagaccccgcccccaacaacaagcgaagtaagtacccccaccaccaccaaggaacctactactatccacaaatccccagacgagtctacccctgaattaagtgcggaaccaacaccgaaagcgctggagaatagcccgaaggagcctggtgtcccaaccactaaaacccccgcagctacaaagcccgagatgactactacagccaaggataagaccaccgaaagggacctcaggactacacccgagacaaccaccgccgcccctaagatgacgaaagagacggccaccaccacagagaaaactacagagtcaaagatcaccgcaacaacgacccaggttacttctacaacaacacaggatactaccccatttaagattaccacactcaaaaccaccaccctcgcacccaaagtgacaactactaagaaaaccattacaactactgaaatcatgaacaagcccgaggaaactgcaaaaccaaaagacagagctaccaatagcaaggcaactaccccaaagcctcagaaacctactaaggctccgaaaaaaccaacatcgaccaagaagcccaagacgatgcctagagtgaggaagcccaagactacacctactcctcggaaaatgacctcaaccatgccagaattgaatcctacttcccgaattgcggaggctatgctccagacgacaaccagacctaaccaaacacccaactcaaaattggttgaggtaaaccccaagtccgaggatgcaggcggtgctgagggggaaacaccccatatgttactccgaccccatgttttcatgcctgaagtaactcccgacatggactacctccctagggtgccaaatcaaggtattataatcaatcccatgctgagcgacgagacaaacatctgcaatggcaagcctgtggatgggcttacaacgttgaggaatggtacactagtagccttcagaggacattacttttggatgctcagcccatttagcccacccagtcctgccagacgaattactgaagtctgggggattccgtcgccaatcgacacagtgttcactcgctgtaattgcgagggaaagaccttcttctttaaagactcccagtactggcgattcaccaatgacataaaggacgccggatatcctaagccaatctttaagggatttggtggcctgaccggacaaattgttgcagctcttagcacagccaagtacaagaactggcccgagagtgtgtatttctttaaaagaggagggagtattcaacagtatatctacaagcaagagccagtacaaaaatgtcctggaaggaggcccgccctcaattaccccgtgtacggcgaaacaacacaggtgcgacgtagaaggttcgaacgcgccatcggccccagtcagacccacaccatccggatacagtactctcctgccaggttggcataccaggataagggagttttgcacaatgaggtcaaggtgtcaatcctgtggagaggccttcccaatgtcgtgacatccgctattagcctaccaaatatccgcaaacctgatggttatgattattacgccttttccaaggatcagtattacaacatcgacgttcccagtagaactgcccgggcaatcactacacgatcaggacagaccctttcaaaggtatggtataactgtccctag

SEQ ID NO: 45673 - DNA, 4092 bp, Artificial Sequence
  derived and/or modified sequence
atggcctggaagaccctgcccatctacctgctgctgctgctgtctgtgtttgtgatccagcaggtgagcagccaggagctgagctgcaagggccgctgctttgagagctttgagcggggccgggagtgtgactgtgatgcccagtgcaagaagtatgacaagtgctgcccagactatgagagcttctgtgccgaggtgcacaaccccaccagcccccccagcagcaagaaggcccccccacccagcggggccagccagaccatcaagagcaccaccaagaggagccccaagccacccaacaagaagaagaccaagaaggtgattgagagcgaggagatcacagaggagcacagcgtgtctgagaaccaggagagcagcagcagcagcagcagcagcagcagcagcagcaccatcaggaagatcaagagcagcaagaacagcgctgccaaccgggagctgcagaagaagctgaaggtgaaggacaacaagaagaacagaaccaagaagaagcccacccccaagccccctgtggtggatgaagctggcagcggcctggacaatggagacttcaaggtgaccaccccagacaccagcaccacccagcacaacaaggtgtccaccagccccaagatcaccacagccaagcccatcaacccccggcccagcctgccccccaacagcgacaccagcaaggagaccagcctgactgtgaacaaggagaccaccgtggagaccaaggagaccaccaccaccaacaagcagaccagcacagatggcaaggagaagaccaccagcgccaaggagacccagagcattgagaagaccagcgccaaggacctggcccccaccagcaaggtgctggccaagcccacccccaaggccgagaccaccaccaagggccctgccctgaccacccccaaggagcccacccccaccacccccaaggagcccgccagcaccacccccaaggagcccacccccaccaccatcaagagcgcccccaccacccccaaggagcccgcccccaccaccaccaagagcgcccccaccacccccaaggagcccgcccccaccaccaccaaggagcccgcccccaccacccccaaggagcccgcccccaccaccaccaaggagcccgcccccaccaccaccaagagcgcccccaccacccccaaggagcccgcccccaccacccccaagaagccagcccccaccacccccaaggagcccgcccccaccacccccaaggagcccacccccaccacccccaaggagcccgcccccaccaccaaggagcccgcccccaccacccccaaggagcccgcccccacagcccccaagaagccagcccccaccacccccaaggagcccgcccccaccacccccaaggagcccgcccccaccaccaccaaggagcccagccccaccacccccaaggagcccgcccccaccaccaccaagagcgcccccaccaccaccaaggagcccgcccccaccaccaccaagagcgcccccaccacccccaaggagcccagccccaccaccaccaaggagcccgcccccaccacccccaaggagcccgcccccaccacccccaagaagccagcccccaccacccccaaggagcccgcccccaccacccccaaggagcccgcccccaccaccaccaagaagccagcccccaccacccccaaggagcccgcccccaccacccccaaggagacagcccccaccacccccaagaagctgacccccaccaccccagagaagctggcccccaccaccccagagaagccagcccccaccaccccagaggagctggcccccaccaccccagaggagcccacccccaccaccccagaggagcccgcccccaccacccccaaggctgctgcccccaacacccccaaggagcccgcccccaccacccccaaggagcccgcccccaccacccccaaggagcccgcccccaccacccccaaggagacagcccccaccacccccaagggcacagcccccaccaccctgaaggagcccgcccccaccacccccaagaagccagcccccaaggagctggcccccaccaccaccaaggagcccaccagcaccacctgtgacaagccagcccccaccacccccaagggcacagcccccaccacccccaaggagcccgcccccaccacccccaaggagcccgcccccaccacccccaagggcacagcccccaccaccctgaaggagcccgcccccaccacccccaagaagccagcccccaaggagctggcccccaccaccaccaagggccccaccagcaccaccagtgacaagccagcccccaccacccccaaggagacagcccccaccacccccaaggagcccgcccccaccacccccaagaagccagcccccaccaccccagagaccccaccacccaccaccagcgaggtgtccacccccaccaccaccaaggagcccaccaccatccacaagagcccagatgagagcaccccagagctgtctgctgagcccacccccaaggccctggagaacagccccaaggagcccggggtgcccaccaccaagaccccagctgccaccaagccagagatgaccaccacagccaaggacaagaccacagagcgggacctgcggaccaccccagagaccaccacagctgcccccaagatgaccaaggagacagccaccaccacagagaagaccacagagagcaagatcacagccaccaccacccaggtgaccagcaccaccacccaggacaccacccccttcaagatcaccaccctgaagaccaccaccctggcccccaaggtgaccaccaccaagaagaccatcaccaccacagagatcatgaacaagccagaggagacagccaagcccaaggaccgggccaccaacagcaaggccaccacccccaagccccagaagcccaccaaggcccccaagaagcccaccagcaccaagaagcccaagaccatgccccgggtgaggaagcccaagaccacccccacccccaggaagatgaccagcaccatgcctgagctgaaccccaccagcagaattgctgaggccatgctgcagaccaccacccggcccaaccagacccccaacagcaagctggtggaggtgaaccccaagtcagaagatgctgggggcgctgagggggagaccccccacatgctgctgcggccccacgtgttcatgcctgaggtgaccccagacatggactacctgccccgggtgcccaaccagggcatcatcatcaaccccatgctgagtgatgagaccaacatctgcaatggcaagcctgtggatggcctgaccaccctgagaaatggcaccctggtggccttccggggccactacttctggatgctgagccccttcagcccccccagccctgcccggcgcatcacagaggtgtggggcatccccagccccatcgacaccgtcttcacccgctgcaactgtgagggcaagaccttcttcttcaaggacagccagtactggaggttcaccaatgacatcaaggatgctggctaccccaagcccatcttcaagggctttggaggcctgaccggccagatcgtggccgccctgagcacagccaagtacaagaactggccagagagcgtgtacttcttcaagaggggcggcagcatccagcagtacatctacaagcaggagcctgtgcagaagtgccctggaagaagacctgccctgaactaccctgtgtatggagagaccacccaggtgagaagaagaagatttgagcgggccatcggccccagccagacccacaccatccgcatccagtacagccctgcccggctggcctaccaggacaagggcgtgctgcacaatgaggtgaaggtgtccatcctgtggaggggcctgcccaacgtggtgaccagcgccatcagcctgcccaacatcaggaagccagatggctatgactactatgccttcagcaaggaccagtactacaacattgatgtgcccagcaggacagcccgggccatcaccaccaggagcggccagaccctgagcaaggtgtggtacaactgcccctag

SEQ ID NO: 45674 - DNA, 2802 bp, Artificial Sequence
  derived and/or modified sequence
atggcctggaagaccctgcccatctacctgctgctgctgctgtctgtgtttgtgatccagcaggtgagcagccaggagctgagctgcaagggccgctgctttgagagctttgagcggggccgggagtgtgactgtgatgcccagtgcaagaagtatgacaagtgctgcccagactatgagagcttctgtgccgaggtgcacaaccccaccagcccccccagcagcaagaaggcccccccacccagcggggccagccagaccatcaagagcaccaccaagaggagccccaagccacccaacaagaagaagaccaagaaggtgattgagagcgaggagatcacagaggagcacagcgtgtctgagaaccaggagagcagcagcagcagcagcagcagcagcagcagcagcaccatcaggaagatcaagagcagcaagaacagcgctgccaaccgggagctgcagaagaagctgaaggtgaaggacaacaagaagaacagaaccaagaagaagcccacccccaagccccctgtggtggatgaagctggcagcggcctggacaatggagacttcaaggtgaccaccccagacaccagcaccacccagcacaacaaggtgtccaccagccccaagatcaccacagccaagcccatcaacccccggcccagcctgccccccaacagcgacaccagcaaggagaccagcctgactgtgaacaaggagaccaccgtggagaccaaggagaccaccaccaccaacaagcagaccagcacagatggcaaggagaagaccaccagcgccaaggagacccagagcattgagaagaccagcgccaaggacctggcccccaccagcaaggtgctggccaagcccacccccaaggccgagaccaccaccaagggccctgccctgaccacccccaaggagcccacccccaccacccccaaggagcccgccagcaccacccccaaggagcccacccccaccaccatcaagagcgcccccaccacccccaaggagcccgcccccaccaccaccaagagcgcccccaccacccccaaggagcccgcccccaccaccaccaaggagcccgcccccaccacccccaagaagccagcccccaccaccccagagaccccaccacccaccaccagcgaggtgtccacccccaccaccaccaaggagcccaccaccatccacaagagcccagatgagagcaccccagagctgtctgctgagcccacccccaaggccctggagaacagccccaaggagcccggggtgcccaccaccaagaccccagctgccaccaagccagagatgaccaccacagccaaggacaagaccacagagcgggacctgcggaccaccccagagaccaccacagctgcccccaagatgaccaaggagacagccaccaccacagagaagaccacagagagcaagatcacagccaccaccacccaggtgaccagcaccaccacccaggacaccacccccttcaagatcaccaccctgaagaccaccaccctggcccccaaggtgaccaccaccaagaagaccatcaccaccacagagatcatgaacaagccagaggagacagccaagcccaaggaccgggccaccaacagcaaggccaccacccccaagccccagaagcccaccaaggcccccaagaagcccaccagcaccaagaagcccaagaccatgccccgggtgaggaagcccaagaccacccccacccccaggaagatgaccagcaccatgcctgagctgaaccccaccagcagaattgctgaggccatgctgcagaccaccacccggcccaaccagacccccaacagcaagctggtggaggtgaaccccaagtcagaagatgctgggggcgctgagggggagaccccccacatgctgctgcggccccacgtgttcatgcctgaggtgaccccagacatggactacctgccccgggtgcccaaccagggcatcatcatcaaccccatgctgagtgatgagaccaacatctgcaatggcaagcctgtggatggcctgaccaccctgagaaatggcaccctggtggccttccggggccactacttctggatgctgagccccttcagcccccccagccctgcccggcgcatcacagaggtgtggggcatccccagccccatcgacaccgtcttcacccgctgcaactgtgagggcaagaccttcttcttcaaggacagccagtactggaggttcaccaatgacatcaaggatgctggctaccccaagcccatcttcaagggctttggaggcctgaccggccagatcgtggccgccctgagcacagccaagtacaagaactggccagagagcgtgtacttcttcaagaggggcggcagcatccagcagtacatctacaagcaggagcctgtgcagaagtgccctggaagaagacctgccctgaactaccctgtgtatggagagaccacccaggtgagaagaagaagatttgagcgggccatcggccccagccagacccacaccatccgcatccagtacagccctgcccggctggcctaccaggacaagggcgtgctgcacaatgaggtgaaggtgtccatcctgtggaggggcctgcccaacgtggtgaccagcgccatcagcctgcccaacatcaggaagccagatggctatgactactatgccttcagcaaggaccagtactacaacattgatgtgcccagcaggacagcccgggccatcaccaccaggagcggccagaccctgagcaaggtgtggtacaactgcccctag

SEQ ID NO: 45675 - DNA, 3936 bp, Artificial Sequence
  derived and/or modified sequence
atggcctggaagaccctgcccatctacctgctgctgctgctgtctgtgtttgtgatccagcaggtgagcagccaggacctgagcagctgtgccggccgctgtggggagggctacagcagagatgccacctgcaactgtgactacaactgccagcactacatggagtgctgcccagacttcaagagggtgtgcacagctgagctgagctgcaagggccgctgctttgagagctttgagcggggcagagaatgtgactgtgatgcccagtgcaagaagtatgacaagtgctgcccagactatgagagcttctgtgccgaggtgaaggacaacaagaagaacagaaccaagaagaagcccacccccaagccccctgtggtggatgaagctggcagcggcctggacaatggagacttcaaggtgaccaccccagacaccagcaccacccagcacaacaaggtgtccaccagccccaagatcaccacagccaagcccatcaacccccggcccagcctgccccccaacagcgacaccagcaaggagaccagcctgactgtgaacaaggagaccaccgtggagaccaaggagaccaccaccaccaacaagcagaccagcacagatggcaaggagaagaccaccagcgccaaggagacccagagcattgagaagaccagcgccaaggacctggcccccaccagcaaggtgctggccaagcccacccccaaggccgagaccaccaccaagggccctgccctgaccacccccaaggagcccacccccaccacccccaaggagcccgccagcaccacccccaaggagcccacccccaccaccatcaagagcgcccccaccacccccaaggagcccgcccccaccaccaccaagagcgcccccaccacccccaaggagcccgcccccaccaccaccaaggagcccgcccccaccacccccaaggagcccgcccccaccaccaccaaggagcccgcccccaccaccaccaagagcgcccccaccacccccaaggagcccgcccccaccacccccaagaagccagcccccaccacccccaaggagcccgcccccaccacccccaaggagcccacccccaccacccccaaggagcccgcccccaccaccaaggagcccgcccccaccacccccaaggagcccgcccccacagcccccaagaagccagcccccaccacccccaaggagcccgcccccaccacccccaaggagcccgcccccaccaccaccaaggagcccagccccaccacccccaaggagcccgcccccaccaccaccaagagcgcccccaccaccaccaaggagcccgcccccaccaccaccaagagcgcccccaccacccccaaggagcccagccccaccaccaccaaggagcccgcccccaccacccccaaggagcccgcccccaccacccccaagaagccagcccccaccacccccaaggagcccgcccccaccacccccaaggagcccgcccccaccaccaccaagaagccagcccccaccacccccaaggagcccgcccccaccacccccaaggagacagcccccaccacccccaagaagctgacccccaccaccccagagaagctggcccccaccaccccagagaagccagcccccaccaccccagaggagctggcccccaccaccccagaggagcccacccccaccaccccagaggagcccgcccccaccacccccaaggctgctgcccccaacacccccaaggagcccgcccccaccacccccaaggagcccgcccccaccacccccaaggagcccgcccccaccacccccaaggagacagcccccaccacccccaagggcacagcccccaccaccctgaaggagcccgcccccaccacccccaagaagccagcccccaaggagctggcccccaccaccaccaaggagcccaccagcaccacctgtgacaagccagcccccaccacccccaagggcacagcccccaccacccccaaggagcccgcccccaccacccccaaggagcccgcccccaccacccccaagggcacagcccccaccaccctgaaggagcccgcccccaccacccccaagaagccagcccccaaggagctggcccccaccaccaccaagggccccaccagcaccaccagtgacaagccagcccccaccacccccaaggagacagcccccaccacccccaaggagcccgcccccaccacccccaagaagccagcccccaccaccccagagaccccaccacccaccaccagcgaggtgtccacccccaccaccaccaaggagcccaccaccatccacaagagcccagatgagagcaccccagagctgtctgctgagcccacccccaaggccctggagaacagccccaaggagcccggggtgcccaccaccaagaccccagctgccaccaagccagagatgaccaccacagccaaggacaagaccacagagcgggacctgcggaccaccccagagaccaccacagctgcccccaagatgaccaaggagacagccaccaccacagagaagaccacagagagcaagatcacagccaccaccacccaggtgaccagcaccaccacccaggacaccacccccttcaagatcaccaccctgaagaccaccaccctggcccccaaggtgaccaccaccaagaagaccatcaccaccacagagatcatgaacaagccagaggagacagccaagcccaaggaccgggccaccaacagcaaggccaccacccccaagccccagaagcccaccaaggcccccaagaagcccaccagcaccaagaagcccaagaccatgccccgggtgaggaagcccaagaccacccccacccccaggaagatgaccagcaccatgcctgagctgaaccccaccagcagaattgctgaggccatgctgcagaccaccacccggcccaaccagacccccaacagcaagctggtggaggtgaaccccaagtcagaagatgctgggggcgctgagggggagaccccccacatgctgctgcggccccacgtgttcatgcctgaggtgaccccagacatggactacctgccccgggtgcccaaccagggcatcatcatcaaccccatgctgagtgatgagaccaacatctgcaatggcaagcctgtggatggcctgaccaccctgagaaatggcaccctggtggccttccggggccactacttctggatgctgagccccttcagcccccccagccctgcccggcgcatcacagaggtgtggggcatccccagccccatcgacaccgtcttcacccgctgcaactgtgagggcaagaccttcttcttcaaggacagccagtactggaggttcaccaatgacatcaaggatgctggctaccccaagcccatcttcaagggctttggaggcctgaccggccagatcgtggccgccctgagcacagccaagtacaagaactggccagagagcgtgtacttcttcaagaggggcggcagcatccagcagtacatctacaagcaggagcctgtgcagaagtgccctggaagaagacctgccctgaactaccctgtgtatggagagaccacccaggtgagaagaagaagatttgagcgggccatcggccccagccagacccacaccatccgcatccagtacagccctgcccggctggcctaccaggacaagggcgtgctgcacaatgaggtgaaggtgtccatcctgtggaggggcctgcccaacgtggtgaccagcgccatcagcctgcccaacatcaggaagccagatggctatgactactatgccttcagcaaggaccagtactacaacattgatgtgcccagcaggacagcccgggccatcaccaccaggagcggccagaccctgagcaaggtgtggtacaactgcccctag

SEQ ID NO: 45676 - DNA, 4086 bp, Artificial Sequence
  derived and/or modified sequence
atggcctggaagaccctgcccatctacctgctgctgctgctgtctgtgtttgtgatccagcaggtgagcagccaggacctgagcagctgtgccggccgctgtggggagggctacagcagagatgccacctgcaactgtgactacaactgccagcactacatggagtgctgcccagacttcaagagggtgtgcacagctgagctgagctgcaagggccgctgctttgagagctttgagcggggcagagaatgtgactgtgatgcccagtgcaagaagtatgacaagtgctgcccagactatgagagcttctgtgccgaggtgcacaaccccaccagcccccccagcagcaagaaggcccctcctccttctggggccagccagaccatcaagagcaccaccaagaggagccccaagccacccaacaagaagaagaccaagaaggtgattgaaagtgaggagatcacagaggtgaaggacaacaagaagaacagaaccaagaagaagcccacccccaagccccctgtggtggatgaagctggcagcggcctggacaatggagacttcaaggtgaccaccccagacaccagcaccacccagcacaacaaggtgtccaccagccccaagatcaccacagccaagcccatcaacccccggcccagcctgccccccaacagcgacaccagcaaggagaccagcctgactgtgaacaaggagaccaccgtggagaccaaggagaccaccaccaccaacaagcagaccagcacagatggcaaggagaagaccaccagcgccaaggagacccagagcattgagaagaccagcgccaaggacctggcccccaccagcaaggtgctggccaagcccacccccaaggccgagaccaccaccaagggccctgccctgaccacccccaaggagcccacccccaccacccccaaggagcccgccagcaccacccccaaggagcccacccccaccaccatcaagagcgcccccaccacccccaaggagcccgcccccaccaccaccaagagcgcccccaccacccccaaggagcccgcccccaccaccaccaaggagcccgcccccaccacccccaaggagcccgcccccaccaccaccaaggagcccgcccccaccaccaccaagagcgcccccaccacccccaaggagcccgcccccaccacccccaagaagccagcccccaccacccccaaggagcccgcccccaccacccccaaggagcccacccccaccacccccaaggagcccgcccccaccaccaaggagcccgcccccaccacccccaaggagcccgcccccacagcccccaagaagccagcccccaccacccccaaggagcccgcccccaccacccccaaggagcccgcccccaccaccaccaaggagcccagccccaccacccccaaggagcccgcccccaccaccaccaagagcgcccccaccaccaccaaggagcccgcccccaccaccaccaagagcgcccccaccacccccaaggagcccagccccaccaccaccaaggagcccgcccccaccacccccaaggagcccgcccccaccacccccaagaagccagcccccaccacccccaaggagcccgcccccaccacccccaaggagcccgcccccaccaccaccaagaagccagcccccaccacccccaaggagcccgcccccaccacccccaaggagacagcccccaccacccccaagaagctgacccccaccaccccagagaagctggcccccaccaccccagagaagccagcccccaccaccccagaggagctggcccccaccaccccagaggagcccacccccaccaccccagaggagcccgcccccaccacccccaaggctgctgcccccaacacccccaaggagcccgcccccaccacccccaaggagcccgcccccaccacccccaaggagcccgcccccaccacccccaaggagacagcccccaccacccccaagggcacagcccccaccaccctgaaggagcccgcccccaccacccccaagaagccagcccccaaggagctggcccccaccaccaccaaggagcccaccagcaccacctgtgacaagccagcccccaccacccccaagggcacagcccccaccacccccaaggagcccgcccccaccacccccaaggagcccgcccccaccacccccaagggcacagcccccaccaccctgaaggagcccgcccccaccacccccaagaagccagcccccaaggagctggcccccaccaccaccaagggccccaccagcaccaccagtgacaagccagcccccaccacccccaaggagacagcccccaccacccccaaggagcccgcccccaccacccccaagaagccagcccccaccaccccagagaccccaccacccaccaccagcgaggtgtccacccccaccaccaccaaggagcccaccaccatccacaagagcccagatgagagcaccccagagctgtctgctgagcccacccccaaggccctggagaacagccccaaggagcccggggtgcccaccaccaagaccccagctgccaccaagccagagatgaccaccacagccaaggacaagaccacagagcgggacctgcggaccaccccagagaccaccacagctgcccccaagatgaccaaggagacagccaccaccacagagaagaccacagagagcaagatcacagccaccaccacccaggtgaccagcaccaccacccaggacaccacccccttcaagatcaccaccctgaagaccaccaccctggcccccaaggtgaccaccaccaagaagaccatcaccaccacagagatcatgaacaagccagaggagacagccaagcccaaggaccgggccaccaacagcaaggccaccacccccaagccccagaagcccaccaaggcccccaagaagcccaccagcaccaagaagcccaagaccatgccccgggtgaggaagcccaagaccacccccacccccaggaagatgaccagcaccatgcctgagctgaaccccaccagcagaattgctgaggccatgctgcagaccaccacccggcccaaccagacccccaacagcaagctggtggaggtgaaccccaagtcagaagatgctgggggcgctgagggggagaccccccacatgctgctgcggccccacgtgttcatgcctgaggtgaccccagacatggactacctgccccgggtgcccaaccagggcatcatcatcaaccccatgctgagtgatgagaccaacatctgcaatggcaagcctgtggatggcctgaccaccctgagaaatggcaccctggtggccttccggggccactacttctggatgctgagccccttcagcccccccagccctgcccggcgcatcacagaggtgtggggcatccccagccccatcgacaccgtcttcacccgctgcaactgtgagggcaagaccttcttcttcaaggacagccagtactggaggttcaccaatgacatcaaggatgctggctaccccaagcccatcttcaagggctttggaggcctgaccggccagatcgtggccgccctgagcacagccaagtacaagaactggccagagagcgtgtacttcttcaagaggggcggcagcatccagcagtacatctacaagcaggagcctgtgcagaagtgccctggaagaagacctgccctgaactaccctgtgtatggagagaccacccaggtgagaagaagaagatttgagcgggccatcggccccagccagacccacaccatccgcatccagtacagccctgcccggctggcctaccaggacaagggcgtgctgcacaatgaggtgaaggtgtccatcctgtggaggggcctgcccaacgtggtgaccagcgccatcagcctgcccaacatcaggaagccagatggctatgactactatgccttcagcaaggaccagtactacaacattgatgtgcccagcaggacagcccgggccatcaccaccaggagcggccagaccctgagcaaggtgtggtacaactgcccctag

SEQ ID NO: 45677 - DNA, 4215 bp, Artificial Sequence
  derived and/or modified sequence
atggcctggaagaccctgcccatctacctgctgctgctgctgtctgtgtttgtgatccagcaggtgagcagccaggacctgagcagctgtgccggccgctgtggggagggctacagcagagatgccacctgcaactgtgactacaactgccagcactacatggagtgctgcccagacttcaagagggtgtgcacagctgagctgagctgcaagggccgctgctttgagagctttgagcggggcagagaatgtgactgtgatgcccagtgcaagaagtatgacaagtgctgcccagactatgagagcttctgtgccgaggtgcacaaccccaccagcccccccagcagcaagaaggcccctcctccttctggggccagccagaccatcaagagcaccaccaagaggagccccaagccacccaacaagaagaagaccaagaaggtgattgaaagtgaggagatcacagaggagcacagcgtgtctgagaaccaggagagcagcagcagcagcagcagcagcagcagcagcagcaccatcaggaagatcaagagcagcaagaacagcgctgccaaccgggagctgcagaagaagctgaaggtgaaggacaacaagaagaacagaaccaagaagaagcccacccccaagccccctgtggtggatgaggccggcagcggcctggacaacggggacttcaaggtgaccaccccagacaccagcaccacccagcacaacaaggtgtccaccagccccaagatcaccacagccaagcccatcaacccccggcccagcctgccccccaacagcgacaccagcaaggagaccagcctgactgtgaacaaggagaccaccgtggagaccaaggagaccaccaccaccaacaagcagaccagcacagatggcaaggagaagaccaccagcgccaaggagacccagagcattgagaagaccagcgccaaggacctggcccccaccagcaaggtgctggccaagcccacccccaaggccgagaccaccaccaagggccctgccctgaccacccccaaggagcccacccccaccacccccaaggagcccgccagcaccacccccaaggagcccacccccaccaccatcaagagcgcccccaccacccccaaggagcccgcccccaccaccaccaagagcgcccccaccacccccaaggagcccgcccccaccaccaccaaggagcccgcccccaccacccccaaggagcccgcccccaccaccaccaaggagcccgcccccaccaccaccaagagcgcccccaccacccccaaggagcccgcccccaccacccccaagaagccagcccccaccacccccaaggagcccgcccccaccacccccaaggagcccacccccaccacccccaaggagcccgcccccaccaccaaggagcccgcccccaccacccccaaggagcccgcccccacagcccccaagaagccagcccccaccacccccaaggagcccgcccccaccacccccaaggagcccgcccccaccaccaccaaggagcccagccccaccacccccaaggagcccgcccccaccaccaccaagagcgcccccaccaccaccaaggagcccgcccccaccaccaccaagagcgcccccaccacccccaaggagcccagccccaccaccaccaaggagcccgcccccaccacccccaaggagcccgcccccaccacccccaagaagccagcccccaccacccccaaggagcccgcccccaccacccccaaggagcccgcccccaccaccaccaagaagccagcccccaccacccccaaggagcccgcccccaccacccccaaggagacagcccccaccacccccaagaagctgacccccaccaccccagagaagctggcccccaccaccccagagaagccagcccccaccaccccagaggagctggcccccaccaccccagaggagcccacccccaccaccccagaggagcccgcccccaccacccccaaggccgccgcccccaacacccccaaggagcccgcccccaccacccccaaggagcccgcccccaccacccccaaggagcccgcccccaccacccccaaggagacagcccccaccacccccaagggcacagcccccaccaccctgaaggagcccgcccccaccacccccaagaagccagcccccaaggagctggcccccaccaccaccaaggagcccaccagcaccacctgtgacaagccagcccccaccacccccaagggcacagcccccaccacccccaaggagcccgcccccaccacccccaaggagcccgcccccaccacccccaagggcacagcccccaccaccctgaaggagcccgcccccaccacccccaagaagccagcccccaaggagctggcccccaccaccaccaagggccccaccagcaccaccagtgacaagccagcccccaccacccccaaggagacagcccccaccacccccaaggagcccgcccccaccacccccaagaagccagcccccaccaccccagagaccccaccacccaccaccagcgaggtgtccacccccaccaccaccaaggagcccaccaccatccacaagagcccagatgagagcaccccagagctgtctgctgagcccacccccaaggccctggagaacagccccaaggagcccggggtgcccaccaccaagaccccagctgccaccaagccagagatgaccaccacagccaaggacaagaccacagagcgggacctgcggaccaccccagagaccaccacagctgcccccaagatgaccaaggagacagccaccaccacagagaagaccacagagagcaagatcacagccaccaccacccaggtgaccagcaccaccacccaggacaccacccccttcaagatcaccaccctgaagaccaccaccctggcccccaaggtgaccaccaccaagaagaccatcaccaccacagagatcatgaacaagccagaggagacagccaagcccaaggaccgggccaccaacagcaaggccaccacccccaagccccagaagcccaccaaggcccccaagaagcccaccagcaccaagaagcccaagaccatgccccgggtgaggaagcccaagaccacccccacccccaggaagatgaccagcaccatgcctgagctgaaccccaccagcagaattgctgaggccatgctgcagaccaccacccggcccaaccagacccccaacagcaagctggtggaggtgaaccccaagtcagaagatgctggaggagctgagggggagaccccccacatgctgctgcggccccacgtgttcatgcctgaggtgaccccagacatggactacctgccccgggtgcccaaccagggcatcatcatcaaccccatgctgagtgatgagaccaacatctgcaatggcaagcctgtggatggcctgaccaccctgagaaatggcaccctggtggccttccggggccactacttctggatgctgagccccttcagcccccccagccctgcccggcgcatcacagaggtgtggggcatccccagccccatcgacacagtgttcacccgctgcaactgtgagggcaagaccttcttcttcaaggacagccagtactggaggttcaccaatgacatcaaggatgctggctaccccaagcccatcttcaagggctttggaggcctgaccggccagatcgtggccgccctgagcacagccaagtacaagaactggccagagagcgtgtacttcttcaagagaggaggcagcatccagcagtacatctacaagcaggagcctgtgcagaagtgccccggccggcggcctgccctgaactaccctgtgtatggagagaccacccaggtgagaagaagaagatttgagcgggccatcggccccagccagacccacaccatccgcatccagtacagccctgcccggctggcctaccaggacaagggcgtgctgcacaatgaggtgaaggtgtccatcctgtggaggggcctgcccaacgtggtgaccagcgccatcagcctgcccaacatcaggaagccagatggctatgactactatgccttcagcaaggaccagtactacaacattgatgtgcccagcaggacagcccgggccatcaccaccaggagcggccagaccctgagcaaggtgtggtacaactgcccctag

SEQ ID NO: 45678 - DNA, 4092 bp, Artificial Sequence
  derived and/or modified sequence
atggcctggaagaccctgcccatctacctgctgctgctgctgagcgtcttcgtaattcagcaggtatcctcccaggaattaagctgtaagggcagatgcttcgaaagcttcgagcgcggaagggaatgtgattgtgatgctcagtgtaaaaaatacgataagtgctgcccagactacgaatcgttttgcgccgaagtgcataatccgaccagcccaccctccagcaagaaggcacctccacccagcggggccagccagaccatcaaatcaaccactaagaggtcccctaaaccaccaaacaagaaaaaaaccaagaaggtgatcgagtctgaagaaattacagaagagcatagcgtgtcagagaatcaggagtccagctcgagctccagttccagctcgtccagctccaccatcaggaaaatcaagtctagtaagaactcagcagccaatagggaattgcagaagaagctgaaagttaaggacaataagaagaatcgtacaaaaaagaaaccgacccctaaaccaccagtcgtggacgaagctggttcagggctggacaatggagacttcaaagtaacgacccctgatacctctactacacagcataacaaagtgagcacatcccccaaaatcacgaccgctaagcctatcaacccccgcccctctcttccccctaactctgacacctcaaaggagacatctctgacagttaacaaggagactacggtcgagactaaggagacaaccacaacaaacaaacagacctccactgacggcaaagaaaagacaacttcagcgaaggagacccaaagcattgagaagacctcagccaaggaccttgctcccacatccaaagtgctagccaaacccacaccaaaggctgaaaccaccacaaaggggccggcgctcacgaccccgaaagaacccactcctactacccccaaggagcctgccagtacaacacccaaagagccgacccctactaccatcaagagcgcccccactacccccaaggagcccgcccctaccaccaccaaatccgcacccaccaccccaaaggaacccgctccaacaacaacaaaggaaccggccccgacaactcccaaggaaccagctccaacaacaactaaagaacccgcgcctacaaccactaaaagcgccccaaccacccctaaagagcctgcccctacaaccccaaaaaaaccagcaccgacaacacccaaagaaccagccccaactacacccaaggagccaaccccaacaacacccaaagagcctgcgccaactacaaaagaacctgcaccaactaccccgaaagaaccagctcccaccgctcccaaaaaaccggcccctactacaccaaaggagccagcgccgacaacgccaaaggagccagccccaaccactacaaaggaaccttcaccaactacacctaaggaaccagctcccaccacgactaagtccgcacctaccacaacaaaggagccagctcccactaccaccaaaagcgcccctactacgcccaaggaaccatccccaacaactaccaaggagcctgctcctaccactcctaaggagccggcacccacaacccctaaaaaacctgcccctacgacgcccaaggagcctgcccctaccactcccaaagagcccgccccaactaccacgaagaaaccggctcctaccacccctaaagagccagctccgacgactccgaaggagaccgctcccacaactccgaagaagttgacccctacaacgcccgagaagctggctccgaccacccccgagaaacctgctccaactacccccgaggaactcgcaccaactacacccgaagagccaacccccacaacacctgaagaaccagcccccacgactcccaaggctgctgctcccaacaccccgaaggaacccgcacctaccaccccaaaagagcccgcccccacaactcctaaggaaccagcccccaccactccgaaggaaacggcccctaccaccccgaaaggtactgcccctaccacgctaaaggagcctgcgccaaccacccccaagaagcctgctcccaaggagctggcaccgacaaccacgaaggaacctacctctacaacatgcgataagcccgctcctacgaccccaaaaggaacagcacccactactccaaaagagccggcccccactacccccaaagaaccagccccaaccacaccaaaagggacagcgccgacaacactaaaggaaccagctccaaccactcctaagaaacccgcccccaaggaactagcccctacaactacaaagggaccaactagtaccacctcagacaagcctgcgcccaccactccaaaggaaacagcacccaccacccctaaggagccagcaccaaccactccaaagaagcctgctcccacaacccccgagaccccaccacctacgacttctgaagtcagcacccctaccaccaccaaggaacctactaccattcacaaaagtcccgacgagtctaccccagaattatcagcggagcccacccctaaggcactcgagaattctcccaaggaacccggggtgccaacaacaaaaactcccgccgccaccaaacctgaaatgacaaccactgccaaagacaagaccactgaacgagatctgcggaccaccccggagaccactaccgccgccccaaaaatgaccaaggaaactgccaccacaacggagaagaccacagagagcaagataacagctactaccactcaggtgacttcaaccacaacacaggacactacacccttcaagattacgactcttaagactaccaccctggcaccaaaggtcaccaccactaagaaaacaattacaacaaccgagatcatgaataagcctgaggagacagcaaaacccaaagaccgggccaccaatagcaaggctacaactcctaaaccacagaaaccaactaaagcccccaagaaacccacctctaccaagaagccaaagaccatgccccgggtgcggaagcctaaaactaccccaactccacgcaaaatgaccagcaccatgcctgaattaaatccaacctcacgtatcgccgaggccatgcttcagaccaccaccaggccaaatcaaacacccaattcgaagttggtcgaagtgaaccctaagagcgaagatgctggtggcgctgagggcgagacgccacatatgctgttaaggccccacgtcttcatgcccgaagtgactccagacatggattacctgccgcgtgttccaaaccagggaataatcatcaaccctatgcttagcgacgagacaaatatttgcaacggaaagcccgtggatggactcacgaccttaagaaatggcactctcgtcgcttttcgaggacactatttttggatgctgtcccccttctcaccaccctcccccgcccgtaggattaccgaagtgtgggggatcccctcgcccatcgacacagtcttcacacgttgtaattgcgagggaaagaccttctttttcaaggactcccaatactggcggtttacgaacgatattaaagacgcaggctatcctaagccaatttttaagggtttcggcggactgacagggcaaattgttgcggcactttccacggccaagtacaaaaactggcctgagtcagtttatttttttaagcgtgggggatctattcagcagtatatttataaacaagagcctgtccagaagtgtcccggacgcagaccagccctgaattacccagtatacggcgaaaccacacaggttaggcgccggcgatttgagcgcgcaatcgggccctctcagacacatactatccgcatccagtatagtcctgccaggttggcctaccaggacaaaggggtcctacataacgaagtaaaagtgagcattctatggagaggccttcctaatgttgttacttctgcaatcagcctcccaaacatccggaagccagacggctacgattactacgcgttctccaaagaccagtactataacatcgatgtgccaagccgtaccgcccgagccatcacgacacggagcggacagacattgtccaaggtctggtacaactgcccatag

SEQ ID NO: 45679 - DNA, 2802 bp, Artificial Sequence
  derived and/or modified sequence
atggcctggaagaccctgcccatctacctgctgctgctgctgagcgtgttcgtaattcaacaggtttcctcacaggagctatcctgcaagggccggtgctttgagtcctttgaaaggggacgagagtgcgactgtgacgcacaatgtaaaaaatacgataaatgttgtcctgattacgagtccttttgtgcggaagtacacaatcccactagtccgcccagttctaagaaggcacctccgccgagcggcgcctctcagactattaaaagcacaacaaaaagatctcccaagccccccaataaaaagaagaccaagaaggttatcgaatccgaggaaattacagaagagcattcagtgtcagaaaaccaagaatctagcagttccagtagctcatcctcctccagttcaactattaggaaaattaaaagtagcaaaaacagcgccgctaacagagaactgcaaaaaaagctgaaagttaaagacaacaaaaagaataggaccaaaaaaaagcccacccctaaacctccggtggtggacgaagctggtagcggcctagataatggggattttaaggttacgacccctgatacttcaaccacacaacacaataaggtctctacatcgcctaagatcaccactgctaagccaattaatccccggcctagtctgcctcccaattccgacaccagcaaagaaacaagtctaaccgtgaacaaggaaaccactgttgagaccaaagagacaactaccaccaacaagcagacgagcacggacgggaaagagaaaactaccagtgccaaggaaacgcagtccattgaaaaaacctctgctaaagatcttgcccccactagtaaggttctggctaagccaactcctaaagctgaaacaactaccaagggtcccgcactcaccacaccgaaggagccgacgccaaccaccccaaaggaaccagcgagtaccaccccgaaggagcccaccccgactactatcaagtccgcaccaacaacacctaaggagcctgccccaactactacaaagtccgcccctacaacccctaaggaaccggctccaacgactaccaaggagcccgcgcccactactccaaaaaaacctgcccccacaacaccagagacgccccccccgacaacctccgaggtctcaacacctacaactaccaaggaaccaacgactattcacaagagccctgacgagagcacacccgaattgagtgctgaacccacccccaaggctctggaaaacagtcccaaggagccgggcgtacctaccacaaaaacaccagccgccaccaagccagagatgacaacaaccgccaaggataaaaccactgagagagatctacgaaccacccctgagacaactacagccgctcccaagatgactaaagaaactgcaactaccaccgagaagactaccgagagtaaaatcactgcgacgacaacacaggtgacttccactacaacccaggatactactcccttcaaaatcacaacactgaaaacgacaacattggcacctaaggtgacaacgacgaagaagactatcacaacaaccgagattatgaataagcccgaggaaacagctaaacccaaagacagagctacgaattccaaggctaccacacccaaaccccaaaagcctactaaggcccctaagaaacccacttcaaccaagaagccgaagacaatgcccagagtcaggaagccgaaaaccacgcctacgcctaggaaaatgaccagtactatgccagagttaaaccccacctcccgtattgccgaggctatgctgcagacgactactcggcccaaccagacccctaacagcaagcttgttgaggtaaatcctaaatctgaggatgcagggggcgccgagggggaaacccctcacatgctgcttcgaccacatgtctttatgccggaggtaacacccgacatggactacttgcctagggttcccaaccagggcatcattataaacccaatgctgtctgatgagaccaacatttgcaatggcaagccagtggacggcctaacgacactgagaaacggaaccttggtggcattccgcggacactacttctggatgctgtcccccttctcaccaccatcaccggcaaggcgtatcactgaggtgtggggaatcccctcacccatagatacagtctttacaagatgcaactgcgaagggaagactttcttcttcaaggattcccagtattggaggttcactaatgatatcaaagatgccggatatcccaagcctatttttaaaggcttcgggggactgaccggccagatcgtggccgcgctctctacagcaaagtataaaaattggcctgaatctgtttacttctttaaacgcggcggcagtatacaacagtacatttataagcaggagcctgtccaaaagtgtcccggacgtagaccagcacttaattacccagtctacggcgaaacaacccaggtgaggagaagacgattcgagagggcaatagggcctagccagacccacaccatcagaatccaatatagccctgcccggctggcttaccaggataagggggtcctgcacaacgaggtcaaagtgagcatactttggcgaggcttgcctaacgtcgtcactagcgctatttcactcccgaacattcggaaaccggatggctacgactattacgctttctccaaggaccagtactacaacatcgatgtcccctccaggacagctcgagccatcacgacgagaagtggacagactctgtctaaggtgtggtacaactgtccgtag

SEQ ID NO: 45680 - DNA, 3936 bp, Artificial Sequence
  derived and/or modified sequence
atggcctggaagaccctgcccatctacctgctgctgctgctgagcgtgttcgtgatccaacaggtgtcctctcaggacctgagctcttgcgccggccgatgtggcgagggctattcacgagatgctacctgtaactgcgattataactgtcagcactacatggagtgctgccctgatttcaagagagtgtgtaccgctgaattgtcgtgtaaaggaagatgcttcgagtctttcgaaagaggaagggagtgcgactgcgatgctcagtgcaaaaaatatgacaagtgctgtccagattacgagagcttctgcgctgaggtgaaggacaacaagaaaaatcgtacaaaaaagaaaccgacccccaaaccccctgtggtcgatgaggcaggttctgggcttgacaatggagatttcaaagtaacaacacccgacacgtccacaacacaacacaacaaagtctccaccagccctaagatcacaaccgctaagcccattaatccacgtcccagccttccgccaaacagcgataccagcaaagaaaccagcctgactgtaaataaagagacaaccgtcgagactaaggagacaactacgacaaataagcagaccagcactgatggtaaagagaagaccacgtctgccaaggaaactcagtccatcgaaaaaacatccgctaaggatctcgcacccacctccaaggtgcttgccaaacccacaccgaaagccgagaccaccactaagggccccgctctcactacccctaaagagcctactcccacgacgcccaaggagcctgcttcaaccactcccaaggagccaactccgaccacaattaaatcggcgcccacaaccccaaaggaacccgcccctactacaaccaagagtgcgcctactactcccaaggaacctgcccccacaacaacgaaagagccagcccctacgactccaaaggagcctgcaccaactacaactaaagaaccagccccaactacaaccaaatcggcacctacaacccccaaggagcccgctccaactacgcctaagaagcctgcacctaccacgccaaaagagccagcacccaccacacccaaagagcccactcctaccactccaaaggaacctgccccaaccactaaggagcctgctcctacaacaccgaaggaacccgcacccactgcaccaaagaagccagcccccaccacgccaaaggagccagcacccacgaccccaaaagaacccgcccccaccactacaaaggaaccatctcctacaacccctaaggaacctgctccaaccactacgaagtcagcccccacaacaactaaagaacctgcccccaccaccactaaaagcgctccgactacgccaaaagagccatctcccacgactacgaaggagccagcacccactactcccaaagagcccgctcccacgaccccaaagaagcctgctcctaccaccccaaaggagccagctcccaccacaccaaaggaacccgccccaactactacaaagaagcctgcccccactactccgaaggaacccgcaccaaccactccaaaagaaaccgctccaaccaccccaaaaaaactcacgcccacaacaccagagaagttggctccgaccacccccgaaaagccggccccgaccacacccgaggaacttgcccccacgacgccagaggagccaaccccaacgactcccgaggagcccgctcctaccaccccaaaagccgcggctcccaatactccaaaggagccggccccgacaactcccaaggagcccgcccccaccactcctaaggagcccgccccgacaacaccaaaagagactgcaccaaccacccctaaaggcaccgctccaactacccttaaggagccagccccaaccacgcccaagaagccagctccgaaggagctggcaccgaccacaaccaaagagcctacatccacaacctgcgacaagccggcacccaccacccccaaaggtacagcccccaccacgcccaaagaaccagccccgactactcctaaggagccggcccctaccacacccaaagggaccgccccaactaccttgaaggagcctgcgccaactacccccaagaagccagcacccaaggagcttgcgccaaccactaccaagggtcccacatcaaccaccagtgataagcccgctccgacaactccaaaagaaacggctcccacaacccctaaggaacccgccccgaccactcctaagaagcccgccccaaccaccccagaaacaccgcctcccactacaagcgaagtcagcacacctaccaccaccaaggaaccaacaaccatacataaaagtccagacgagagcacccctgagttgagtgcagagcctactccgaaagccctggagaatagtcctaaagaaccaggagtgccaaccaccaagacacctgcagccaccaagccagaaatgacgaccaccgccaaggacaaaacaacagagagggacctgcggacaaccccagaaacaacaacggccgcccccaaaatgactaaagaaaccgccacgactactgagaagaccacggagtcaaagatcaccgctaccaccacgcaggtcactagtaccaccacccaagataccacccccttcaagatcactactctgaagaccacaacccttgcccccaaggtcacaactaccaagaagaccatcactaccaccgaaatcatgaataagcctgaagagacggcaaagccgaaggaccgtgccaccaactctaaggcgaccactcccaaaccccagaaaccaacaaaagcccccaaaaaaccaacgtcaaccaaaaaacccaagacgatgcctcgtgtcagaaagcccaagacaactcctacgcctcgcaaaatgaccagtactatgcccgaactgaatcccacctccaggatcgccgaggccatgcttcagaccacaacaagacctaatcaaacaccaaactcaaagctcgtggaggtcaaccccaaaagtgaagacgccgggggcgcagagggcgagacacctcatatgctcctaaggcctcacgtcttcatgccggaggtaacgccagacatggattacctccctcgggtcccaaatcaaggaataattattaatcctatgctgtcagatgagactaatatatgtaacgggaaaccagtggacggactgacaacgctgcgaaacggcaccctggtggcatttcgtgggcactatttttggatgctgtctcccttttcccctccctccccggcaaggcgcatcaccgaagtgtggggtattcctagtccgatcgacaccgtctttacgagatgcaactgcgagggaaaaaccttttttttcaaggacagccaatactggagatttaccaatgacattaaggacgccgggtacccaaagcctatctttaaagggtttggcggcctgaccgggcaaatcgtggcagcgttgtcaactgccaaatacaagaactggccagagtctgtatacttctttaaacgtggggggagcatccagcaatacatctataaacaggagcccgtacagaaatgtccgggccgcaggccagccctcaattatccagtttacggggaaaccacgcaagttcgccgccggcgatttgagcgggccatcggccctagtcagactcataccattaggattcagtattctcccgcacgactcgcctaccaggataaaggcgtactacataatgaagtcaaggtgtcaattctgtggcggggcctacctaacgttgtgacttccgcgataagcctgcctaacataaggaagccagacggctatgattattatgccttctcaaaggaccagtactacaatatcgacgtgcccagccggaccgcccgcgcaatcacaacacggtcgggccagactctgtcaaaagtttggtacaactgtccatag

SEQ ID NO: 45681 - DNA, 4086 bp, Artificial Sequence
  derived and/or modified sequence
atggcctggaagaccctgcccatctacctgctgctgctgctgagcgtgtttgtgatccaacaggtgtcatcacaggacctgagctcctgtgccggccggtgtggggaaggttactcccgcgacgctacctgcaactgcgactacaactgtcagcactatatggagtgctgccctgatttcaagcgcgtgtgcacagccgagctcagctgcaagggccggtgcttcgagagttttgaacggggtagagaatgcgactgtgatgcacagtgtaagaaatacgataagtgctgtcctgactacgagagtttctgtgctgaagtgcacaaccccacatctcccccttcaagcaaaaaggccccaccaccctcaggcgcatcccagacaatcaagtctaccacaaaaagaagcccaaagcctcctaataaaaaaaagacaaagaaagttattgaatcagaagagattaccgaagtgaaggataataagaagaatagaacaaagaaaaaacccacccccaaacccccagtggtcgacgaggccggctccggcctggataatggcgatttcaaggtcacaacacctgacaccagtactactcagcataataaagtatcaacctctccaaaaatcactacagcgaaaccaataaatcctcggccctcccttccccctaattctgacactagcaaggaaacatctttaaccgtgaacaaagaaaccactgtagagacaaaagaaaccaccacaaccaacaaacagacctccaccgatgggaaggagaagaccacctcagccaaagaaactcagtcaatcgagaagacatcagccaaagacctagctccaacatccaaagttctggctaaacctacacccaaggccgaaaccactactaagggacccgctcttaccacacctaaagagcctacccctaccacgcctaaagagcccgcatccacgacacctaaagaacctacaccaacaactattaaatctgctccaactacaccaaaggaaccagcacccaccacaacaaaatcagctcccacgacccccaaggagcccgcccctaccaccacaaaggagccagctcccaccacccccaaggaaccggcacctactaccacgaaggaacccgctccaactaccacaaagagcgcccctaccactcctaaagagccggctcctacaactcctaaaaaacccgctccgacgacccctaaggaaccagcccctaccacgcctaaggagccaactcctactaccccaaaggaaccagcccccacgacaaaggagcccgcaccaaccactcccaaagagcctgccccaaccgctcccaaaaaacccgcacctaccactccgaaggaacctgctccaactactcccaaggaacctgcgcccacaacaaccaaagaacccagcccaaccaccccgaaggaaccagcccccaccactacgaagtcggctccaacgaccaccaaagaacctgcacccactactaccaagagtgccccaacaacgcccaaagagccctcacctactacaaccaaagagcccgcaccaaccacccccaaagaacccgctccgaccaccccgaagaaacctgcacctacaacacctaaagaacctgcccccacaactcctaaggaacctgcccctaccactactaagaagcccgctcctacgactcccaaagaacccgccccaaccactccaaaagagactgccccaacaactccgaagaaactgacgcccacaacacccgagaagctcgcaccgacgacaccagagaaacccgcgcctacgacacccgaggagctcgcaccaacaacgcccgaagagccaacccctactacccctgaggaacccgcacccacaactcccaaggccgcagcccctaacactcctaaggaacccgcacctactacccctaaggaaccagcccctactacacctaaggagcccgccccaactactcctaaagagacagctccaaccacacccaaagggactgcgcccacaaccttaaaagaaccagctccaactactccaaagaaaccagctcctaaagaattagcgcctaccacaacgaaagaaccaacgagcacaacctgtgataaaccagcgcccaccaccccaaaaggcacggcgcctaccactccgaaagagcccgcaccaaccactcccaaggaaccagccccaacaacacctaaggggacagccccaacgaccctaaaagagcccgccccaacaactcccaagaagcccgctcctaaagaactggctccgactaccacaaaaggccctacctctactacctccgacaagcccgcccctacaacaccgaaggaaacagcaccgacaacgccaaaagaaccagcacccaccactcccaagaagccagcaccgaccacgcctgagacacctccgcccacaacaagcgaggtctccacccccactactaccaaggaacctacaacaattcataaatctccagatgaatcaactccggagctgtccgccgagcctacaccaaaggctctggaaaactctccaaaggagcctggtgtgccaactactaaaacacccgccgctacaaaacccgaaatgacgacaacggccaaagataagaccactgagcgcgatcttaggacgacaccagaaaccaccactgctgcgccaaagatgactaaggaaacagccacgaccacagaaaaaacaacagagtccaaaataacagcaacaaccactcaagtgacttctacaactacacaggatacaactcccttcaagataaccacattgaagaccaccactctggctcccaaggtgacaaccacaaagaagactatcacaacgaccgaaataatgaataaacccgaggaaaccgcgaagcccaaagaccgggcaaccaactcaaaggccactacgccgaaaccacagaagcctactaaagcgcccaaaaaacccacctctacaaagaagcctaagacaatgcctcgggtgcgtaagcctaaaacgactcccacaccccgcaagatgacctctaccatgccagaattaaatcctacctcaagaatcgctgaagccatgctccagactaccacaagaccaaaccagaccccaaactcaaaactcgtcgaggtcaatccaaagtctgaggatgcaggcggggcggaaggagaaaccccacacatgctgctgcggccacacgtgttcatgccagaggtgaccccagatatggattatcttccacgagtgcctaatcagggtattattataaaccctatgctgtccgatgaaactaacatctgtaatggcaagcccgtagacggcttgactaccctgaggaacggcaccctcgttgcctttagaggtcattatttttggatgctctcccctttcagcccgccatctcccgctcgcaggatcacagaagtgtggggtatacccagcccaatcgacaccgtcttcactagatgtaattgtgaggggaaaaccttcttcttcaaagacagtcagtattggaggtttaccaacgacatcaaagacgcaggttatcccaagcctattttcaagggtttcggcggcctgacaggtcagatagtggcggctttaagtaccgccaagtacaaaaactggccggaaagtgtatatttttttaagcgcgggggctccatacaacagtatatttataagcaggaacccgtccagaagtgcccaggacgccgcccagccctgaattaccctgtgtacggcgagactacacaggtgcgcaggaggcgcttcgagagggcgattggtccatcccaaacccacacgatcaggatccagtattctccagctaggctggcctatcaggataagggggtcctgcataatgaagtgaaagtgagcattttatggcgaggtctcccaaatgtcgttacgtcagcaatatcactgcctaatattagaaagccagacggatatgattactacgcatttagcaaggatcagtactacaacattgacgtcccatcgcggacagcacgggcgattacgacgcgctccgggcaaaccctgagcaaagtgtggtataattgcccatag

SEQ ID NO: 45682 - DNA, 4215 bp, Artificial Sequence
  derived and/or modified sequence
atggcctggaagaccctgcccatctacctgctgctgctgctgagcgtctttgtaattcagcaagtgtcctcccaggatttgtcctcctgtgccgggaggtgcggtgagggctactctagggatgccacttgcaactgtgattataattgtcagcattatatggagtgctgccctgactttaagagggtgtgtactgccgagctgtcttgtaaaggtcgctgttttgaaagctttgaacgcgggcgtgagtgcgactgtgatgctcagtgtaagaagtatgacaaatgctgccctgattatgaaagcttttgtgcagaagtgcataatcccacatcgccgccctcatctaagaaggctcccccaccatctggcgcttcgcagaccatcaagtctacaaccaagcgcagcccgaaaccaccaaacaagaagaagacaaagaaggttattgagtcggaggaaattaccgaagagcactccgtgtctgagaaccaggaaagctcctctagtagctcgagtagcagctcctccagcacgatcagaaagatcaagtctagcaagaactctgctgcgaatcgtgagctgcagaagaagctgaaagtcaaagataacaaaaaaaatcgcaccaagaaaaaaccaacgcctaagcctcctgtcgtggacgaagccggatcggggttggacaacggagacttcaaggtgaccacccccgatacatccaccacccagcacaataaggtttcaactagcccaaaaatcacaactgcgaagccaattaaccctcgcccttcactgcctccaaatagtgacacatcaaaggagacatccctgaccgtcaataaggagaccactgtggaaacaaaagagaccacaactactaacaagcagacgtcgaccgatgggaaagagaaaaccaccagcgccaaagagactcagtccatagaaaagacatccgctaaagatctggcccccacaagcaaggtactagcaaagccaactccgaaagctgagacaaccaccaagggccctgccctcacaactcccaaagagcccactccgaccacacccaaggagcctgctagcactacccctaaggaacccactcctacaaccataaagagtgcccccaccactcccaaggagccagcacccaccaccaccaagtcggcccctaccaccccaaaggaaccagccccaactacaactaaagagcccgcccccactacccctaaagaaccagcgcccaccactaccaaagaacccgctcctacaactacaaagtccgctccaacgacccctaaggaaccagcccccaccacccctaaaaaaccagccccgaccactcccaaagaacctgccccaacaacgccaaaagaaccaacccctaccacaccgaaggagcccgcccccaccactaaagagcctgccccaactacacccaaagaacccgctcctaccgcgccaaagaaacctgctccaaccactccaaaggagcctgccccaactacccccaaggagccagctcctacaacaacaaaggaaccgtcacctacaacccccaaagagccagcacccactactaccaagtccgcccccacaacaacaaaagaaccagctcctaccactacaaagtccgcacctaccactcccaaggaaccctcgcctacaaccaccaaggaaccggcaccaacgactccaaaggagcccgctcccaccacccccaaaaagcccgcacccaccacccctaaggagcctgcccccaccacgcccaaagagccagctccaacaactacaaagaagccggctcctacaaccccaaaggagcccgcccctaccacacctaaagagaccgctcccacaactcccaagaaactcacgcccaccactcccgaaaagctggctccaacaacccccgagaagccggcccccaccaccccagaggagctcgccccaaccactcctgaggaacctactcctactacacctgaggaacccgccccaacaactcctaaagcagcagcccctaatacccctaaggagcctgcccccacgactccaaaagaacccgctcccactaccccaaaggaaccggcgcccaccaccccgaaagaaaccgcccctacaacacccaaaggcacagccccaactacactcaaggagcccgccccaaccacacctaagaagcctgcaccaaaggagctcgcccccaccaccacaaaagaaccaacctcaacaacctgtgataaacctgcccccaccacaccaaagggaacagcccccaccacccctaaagagcccgcaccgacaactccaaaggaaccggctcctactactccaaagggcaccgcgcccactacgctgaaggagcccgcccctaccacccccaagaagcctgctcccaaggaactcgcgcccaccactacgaagggaccaacttcaactacatccgacaaacctgcacctaccacacctaaggagacggctccgactacaccaaaagagcctgccccgaccactccgaaaaaacctgctccaactactcctgagactccacccccaactacatcagaagtttccaccccaacaacaaccaaggagccaacaacaatccacaagagtcctgacgagtccacaccagagctttctgccgagccgacacctaaagcacttgagaatagcccaaaggaaccaggagtgcccactacaaaaacccctgccgctacgaagccagagatgacgaccacagcaaaggataaaacaaccgaacgggacctgcgaaccacacctgaaactacaacagccgctcctaagatgactaaggagacggctactacaaccgaaaagacgaccgaatccaagataaccgctaccactacacaggtcacaagcacaacaacacaggacaccacacctttcaaaattactaccttgaaaacaacaacgctggcccccaaggtgacaacaaccaaaaagacaatcaccacaacagaaatcatgaataagcctgaggaaaccgccaaaccaaaagacagagccacaaattccaaggccaccacccccaagccgcagaaacccacaaaggccccaaaaaagccaacatcaactaagaaacccaagacaatgccacgggtgcgcaagccaaagaccactccaactcccaggaagatgacttccacgatgcccgaactgaatcccacctctcgaatcgctgaagccatgcttcagacaaccactcggcctaatcaaacgccgaacagcaagctggtggaagtaaaccccaaaagtgaagacgccggaggagcagagggagaaaccccacacatgctgctaagaccccacgtgttcatgcccgaagtgactcccgacatggactaccttccgcgcgtgcccaaccaagggattattatcaatccaatgctgagtgacgagactaacatctgcaatggcaaaccagtcgacggcctgaccaccctccggaacggtacgctggtggcctttagagggcactacttttggatgctttctccattctcgcccccctctccagctcggaggatcacggaggtttggggaattcccagccccattgatactgtctttacccgatgcaactgtgaagggaaaactttcttctttaaagactcacagtactggaggttcacaaacgacatcaaagacgcaggctatcctaagccaatatttaaaggattcggcgggctgacaggacagatcgttgctgccctatcgactgcgaagtacaaaaattggcccgagagtgtttacttctttaaacgaggtggaagcatccagcaatacatctataagcaggagcccgtgcagaaatgccccggccgtcggccagcgctgaactatccagtgtatggcgaaaccactcaggtgcggcgcaggcggttcgaaagggcaattggaccaagtcagacccacaccatacggatccagtattctcctgccaggctggcctaccaggataagggcgtgctgcataacgaagttaaggttagcatcttgtggcggggtctgcctaacgtggtgacttccgccatcagtctgcctaacattcgtaagccggatggctacgactactatgcctttagtaaggatcaatattacaacattgacgtgccatctagaacagcacgggcaatcactacgcggtctggacagactctgtctaaggtgtggtacaattgcccttag

SEQ ID NO: 45683 - DNA, 4092 bp, Artificial Sequence
  derived and/or modified sequence
atggcctggaaaaccctccctatctatttgttgctgttactgagtgtctttgtgatccagcaagtgtcctcgcaggagctctcctgtaaaggtagatgcttcgagtcttttgagagggggagagagtgcgattgtgatgctcagtgtaagaaatatgacaaatgctgcccagactacgaaagtttctgtgcagaagttcataacccaacctcccctccttccagcaagaaggccccacctcctagtggcgcatcccagacgatcaagtctaccacgaaacgctcccccaagcctcccaataagaaaaagaccaagaaagtgatcgaatccgaagaaatcacagaagagcactcagtgagcgagaaccaggaatctagtagcagctcctcctcatccagctcatcctccaccattcgtaaaattaagtcttctaagaatagtgcggcaaatcgggagctgcagaaaaagctcaaagttaaggataacaagaagaaccggacaaaaaaaaaacctacgcctaagcctcctgtggtcgatgaagctggatccggcctggacaatggagatttcaaagtgactacccctgatacctccactactcagcacaacaaggttagtacgagcccaaagataaccactgccaagcctatcaacccacgcccaagccttccacccaattcagacacttctaaagagacttccctaacagtcaataaggagacaactgtggaaactaaagagacgacaacaacaaataaacagacaagtaccgacggcaaagaaaaaacaacatcagccaaggaaacccagtcgatagagaagacgagcgctaaagacttggcacccacctctaaagtgctggccaagcctacccccaaagccgaaactaccaccaaaggtcccgctctgactacaccaaaagaacccacacccaccactcccaaagaaccagcaagtacaaccccaaaggagcccacacctacaaccattaaatcggctccgactacccctaaagagcccgctccgaccacaacaaagagcgctcccaccacccccaaggagcccgctccaactaccaccaaggaaccagcccctacaacacctaaagaacccgcaccaactacaaccaaggaaccggctcccaccacgacaaagagcgcccctactacaccaaaggaacccgctccaacaacacccaagaaaccggcacccactactccgaaggaaccagcgccaactaccccgaaagaacccactcctacaaccccaaaggaaccagcacctaccacaaaagagccagctcccacaaccccgaaggagccagcgccaacagctccaaagaagcccgctcctactacacctaaggagccagcacctaccacccctaaagaaccagcccctactacgaccaaagaaccctctcccaccacgcctaaagaaccagcccctaccacaacgaagagcgccccaaccacaaccaaagaaccggctcccaccacgacaaaaagcgcaccaacgacaccaaaggagccttcccctaccactactaaagagcctgcgccaacgactcctaaagagcccgcacccaccaccccaaaaaaacctgctccaaccacccccaaagaacccgctcccaccacccccaaggaaccagcgccaaccaccactaaaaagcctgccccaaccaccccaaaagaacctgcccctactacccctaaggagacagctcctactacccctaaaaaacttacacctacgactccagaaaaattggctccaactactccggagaagcctgcgccaacgacccctgaggagctcgcacccaccactccagaggagccaacccctactacacccgaggagccagcgcctaccactccaaaggcagccgcaccaaacacaccaaaggagccagcgcctaccacgcccaaggaaccagcaccgaccactcccaaagagcccgcacctactactccgaaagaaaccgcccctacgacacccaagggtaccgccccaactaccctgaaggaacccgctccaacgacacctaaaaagcctgctccaaaggaattggcccctactacaacgaaagaacccacctccacaacctgcgataagcccgcacctaccactccaaaggggaccgcccctaccacccctaaagagcccgcacccactacacccaaagaaccagctccaacaacgcccaagggaactgcccctaccaccctcaaagaaccggcacccactaccccaaagaaaccagctcccaaagaactcgctccaactactacaaagggcccaaccagcaccacaagcgacaaacctgcacccaccacccccaaagaaacagcgccaacaaccccaaaagaacctgcacccaccaccccaaaaaaaccagctcccacaacaccagagacaccccctcccacaactagcgaggttagtactcctaccactaccaaggaaccaactactatccataaatcccccgacgaaagtactcctgagctgtccgccgagcccacacccaaagctttggaaaattctcctaaagagcccggtgttccaaccactaagactcctgccgcaacaaaaccagagatgaccaccacagcaaaagacaaaacaacagagcgcgacctgcgcacgacgccagaaaccaccactgccgcaccaaaaatgactaaggagaccgcgacgaccaccgaaaaaactacggagtccaagattaccgcgaccactacgcaggtaacctctacaaccacacaagataccacccccttcaaaatcactactctcaaaacaacaactctcgctcctaaggtgactactactaaaaagactatcacgacaaccgagatcatgaataaaccagaggagaccgcgaagcctaaagatagggctactaactcgaaggctacaaccccaaagccccaaaagccgacaaaagctccaaagaagcctacatcaactaagaaacccaagaccatgccaagggtgagaaagccaaagacaacaccaacacctcgcaaaatgacaagtacgatgccagagctcaacccaacatccaggatagccgaagccatgcttcaaacgaccacgcggccaaaccaaactccgaattcaaagctcgtggaggtgaaccctaagagtgaggatgcgggtggagccgagggtgaaacaccccacatgttactgcggccacatgtgttcatgcccgaggtcactcctgacatggactacctgccgagggtacctaaccaaggaatcattattaaccccatgctgagtgacgaaacgaacatctgcaacggcaagccagtagatggcctcaccaccttaaggaacggtacccttgttgccttccgcggtcactacttctggatgctgagccccttctctcctcctagtcctgcacggaggattacagaagtctggggaatcccgtcacccatcgataccgtgtttacaagatgtaattgcgaaggaaaaaccttttttttcaaggatagtcagtactggcggtttaccaacgatatcaaggacgcaggctatcccaagccaatttttaaggggtttggtggcctgacgggccaaatagttgctgcactctctactgccaaatataagaattggccggagtctgtgtacttctttaaaagaggaggttctattcaacagtatatttacaaacaggaaccggtgcagaagtgccctggacgaagacccgctctgaactaccctgtgtatggagagaccactcaagtgcgaagacggaggtttgagcgggcaattggcccaagccagacccacactattcgtattcaatattccccagctaggctggcctatcaggacaaaggcgttcttcacaatgaggtcaaggtgtccatcctgtggcgagggctcccaaacgttgttacctccgccatttcactcccaaacattcgaaagcccgatggttatgattattatgcattttcaaaagatcagtactacaatattgatgttccatcccggacagccagggccatcacaacccgctctggccagaccctgtccaaggtgtggtataactgcccctag

SEQ ID NO: 45684 - DNA, 2802 bp, Artificial Sequence
  derived and/or modified sequence
atggcatggaaaacgctgccgatctacctcctgctcctgctgagcgtattcgtgattcagcaggtatctagccaggagctgagctgtaaaggacgttgtttcgaaagcttcgaacgagggagagagtgcgactgtgatgcacaatgcaagaaatacgacaagtgctgccctgactacgagtctttctgtgccgaagtgcacaaccctacctctcccccatcttctaaaaaagctccccctccctctggcgcatcacagaccatcaaaagtacgactaaacgctccccaaagcccccaaataagaaaaagaccaaaaaggtgatcgagagtgaggagattaccgaagagcactccgtaagtgagaatcaggagagctcctcctcaagtagttctagttcatcttcctccaccatccgcaaaattaagtcatccaagaattcggctgcaaaccgcgagctacagaaaaagctgaaggtgaaggacaataagaaaaatcgcacaaagaagaagcccacgcctaaaccccctgttgtggacgaagctggctctggtctggacaacggagacttcaaagtgacaactccggacacctcgaccacacagcataacaaggtgtctacttccccaaagattacaacagcaaagcccattaaccctaggccctcactcccaccaaacagcgacacctctaaagaaacatcacttacagttaacaaggagactaccgtcgagacaaaggagacgactaccacgaataaacagaccagcacggacgggaaagagaaaacaacgtcggcgaaggagacccagagcatcgagaagaccagtgcaaaagacctagcacccacttccaaggtgctagcaaagccaacccctaaggctgaaactacaactaagggcccagctctgaccacaccaaaggagccaacgccaacaaccccaaaagagcccgcttcaactacccctaaagagcccaccccaacaacgataaagtcggcacctacaaccccaaaggaacccgcacccaccacgacaaaatcagcaccaaccaccccaaaagagcctgcccctaccacaaccaaggagcctgctcctaccactccaaaaaagccagccccaaccacccccgaaacgcctccacctactacttcagaggtttcaaccccaacaacaaccaaagaacctacaacgatccataagtcgcccgatgaatctacacctgaactttctgccgagcctacacccaaagcacttgaaaacagcccaaaggagcccggtgtgcctaccacgaagacccctgcagccactaaacccgaaatgacaacgacagccaaggataagaccaccgaacgggacctccgtactacaccagagactacaaccgccgcacccaagatgacaaaagaaaccgctaccactactgaaaagacgacagaatcaaaaattactgctacaacaacccaagtcacttcaacaaccacccaagatactactccatttaagatcacaaccctgaagacaacaaccctggctccgaaagtgaccacaacaaaaaagacaattaccactaccgaaattatgaataaaccagaggagactgcaaagccaaaagatcgcgctaccaactcaaaagccactaccccaaagccccagaaacctacaaaggccccaaagaaacccacctctacaaaaaaacccaaaaccatgccccgtgtgaggaagcccaagaccaccccgacccccagaaagatgacctcaacaatgcctgagctgaatccaacttcccgcatcgctgaggccatgctgcagactaccacgcggcctaaccaaactcccaacagtaaactggtggaagttaaccctaagagcgaggatgctggtggagcagaaggcgagaccccccatatgctgttgaggccccatgtattcatgcctgaggtgacaccggatatggattacctaccccgagttccaaatcagggtattataatcaaccccatgctgtccgacgagactaatatatgcaacggtaagccagtggatgggttgacaactctgagaaacggcaccctggtggcctttcggggtcattacttctggatgctaagtccattttctcctccctccccagctcgaagaatcacagaagtttggggaataccatccccaattgataccgtcttcacccgctgtaattgcgaaggcaagacctttttctttaaagactcccaatattggcgtttcaccaatgatataaaagatgcaggttatccaaaaccaatattcaaggggttcggagggctcacagggcagatcgtggccgctctgtcgaccgcaaagtacaagaattggccagaatcagtttattttttcaagaggggtggctccatccagcaatatatttataagcaagagcccgtccagaaatgcccaggcaggcgtcctgccttgaactatcctgtttacggagagaccacacaggtcagaaggcgcaggtttgagcgcgcaatcgggccaagccagacgcacacgatccgcatccagtatagcccagcacggttggcgtaccaggacaaaggtgtcctgcataatgaggttaaggtcagcatattatggagaggactgcctaatgtcgttactagtgccatatcactgccaaacatccgcaaaccagacggctacgactactatgccttctctaaggaccagtactacaacatcgacgtccctagccgcaccgctcgtgctatcactacccgaagtggtcagacactcagtaaagtgtggtataactgtccatag

SEQ ID NO: 45685 - DNA, 3936 bp, Artificial Sequence
  derived and/or modified sequence
atggcttggaaaacgctgcccatctacctgctcctgctgctgtccgtttttgtgattcaacaagtgagtagccaggatctctccagttgcgccggacgctgcggcgaaggctattcacgagacgcgacctgcaattgcgattacaactgtcagcactatatggaatgctgccctgacttcaaaagggtctgtacggccgagctatcctgcaagggtagatgttttgagtcatttgagagggggagagaatgcgactgtgatgcccagtgtaagaagtacgataagtgctgtccggattatgagtcattttgcgcggaagtaaaagacaataagaagaaccggaccaaaaagaagccaactccaaaaccccctgtggtggacgaggcaggatcagggcttgacaatggagattttaaggtgactaccccagatacaagcacaacccaacacaataaggtcagcacatcccctaagatcaccactgccaagcccattaacccacgccctagcctgcccccaaacagcgatacatcaaaagagacaagcttgaccgttaataaagagacaacagtggagacgaaggagaccaccaccactaacaagcagacctcgactgacggtaaggagaagaccacatcagccaaggagactcagtctatcgagaaaacttcagctaaggatcttgcccctacgtccaaagtcctggccaagccaacaccgaaggctgagactacaaccaaaggccctgctctgacaacccctaaagagcctacgcctacgactcctaaggagccagcttccactacaccaaaggaacctactcccactacaattaagtccgcccctacgacacccaaggagccggcaccgactacaactaagtccgctcccacgacccccaaggagccagcacccacaacaacgaaggaacccgcacctaccacaccaaaagaacccgctcccaccaccactaaggaacccgctccaacaactaccaagtctgccccaacaactcctaaagagccagcacctactaccccgaagaaacccgcacccaccacccctaaagaacccgctcctacaacgcctaaggagcccacgcctaccacacctaaagagccagctccaacgacaaaggagcctgccccaacaaccccaaaggaacctgccccaacggctcccaagaaaccagcaccaactaccccaaaagaacctgcccctactacccctaaagaaccggcacccacaacgactaaagagccttctccaaccactccaaaggagcctgctccaacaactactaagtctgcaccgactactacaaaggagcccgcacccaccactacaaagagcgcacctactactcccaaggagccctctcctaccactacgaaagaacctgccccaacgacccccaaggaacccgcaccaaccaccccgaagaagcccgctcctacaaccccgaaggaacccgctcctactacacccaaggagcccgcacctacaacgaccaagaaacctgcacctactacgccaaaagaacccgctccaactacccccaaggagaccgccccaaccaccccaaagaagttgactcccaccacaccagagaaactcgcacctacaaccccggaaaagcctgcaccgaccacacccgaggaactggccccaaccacaccagaggagccgaccccaaccaccccagaagagcctgccccaaccacccccaaggctgccgcacccaatacgccaaaagaacctgcccctaccacacccaaagaacccgctccgaccacccccaaagagcctgcacccacgacccctaaggaaacagctcctactaccccaaaggggacagccccaacgactctgaaggaaccggctcccacaacccccaagaaacccgcacccaaggagctcgccccaactactacaaaagaacctacgtctaccacctgcgataagcccgctcccaccacccctaaaggcacagcccctacaacccccaaggagcctgcacctactacaccgaaggagcccgcaccaacgacacctaaggggactgctcccaccacactcaaagagcccgcaccgaccacacctaagaaacccgctccgaaggagttggcacctacaaccaccaaggggccaacctctaccactagcgataaacctgctcctacaacgccaaaggagactgcccctactactccgaaagagcctgctcccactaccccaaagaagcctgctcccacaacaccagagacgcctccgccaacaaccagcgaagtatctaccccaaccacaacgaaagaaccaacgactattcacaaatctccagatgaaagcaccccagaactcagtgctgagcctacacccaaggctctcgagaactcaccaaaagaacctggagtgccaacgacgaagacccccgcagccacaaaacctgagatgacaacgacggccaaggataaaactacggagcgcgacttaaggactactccagagactacgactgccgctcccaaaatgaccaaagagaccgccactacaacagagaagactactgagagcaagattaccgccacaacgacccaggttacctctaccacaacccaggacaccactccttttaagatcaccactctgaagacaacgactttggcccctaaggtaaccactacgaagaaaacaataacaactactgagatcatgaataagcctgaagagacggccaagccaaaagaccgagctacgaattcaaaggcgactacacctaagccacagaagcctactaaagcacctaaaaaacccacgagcacaaaaaagcccaaaaccatgccccgagtccgcaaacccaagactacccctacaccgcgaaaaatgacctccactatgcctgaactgaatccaacaagtagaatcgcggaggccatgctgcaaacgaccacacgtcctaatcagacccctaattctaagttagtggaggtaaaccccaaaagcgaggacgccggaggcgcagagggcgaaaccccccacatgttgctgagaccccacgtctttatgcccgaggtaaccccagacatggattacctgcccagagtgcctaaccagggtataatcattaacccaatgttgtcggatgaaacgaatatttgcaatggtaaaccggttgacggactcacgactttaagaaacggaaccctggtggcattcagaggtcattatttctggatgctctcaccattttctcctccgtcccctgccagaagaataacagaggtgtggggcatcccatctcctatcgataccgtgttcactagatgcaattgcgagggtaagactttcttcttcaaggactctcagtactggagattcacaaatgacatcaaagacgcaggttaccccaagccaatcttcaagggctttggaggattgacgggacagatcgtcgccgctctgtcaactgcaaaatataagaattggcccgaatccgtctatttctttaagcgcggtgggagtattcaacaatatatttacaaacaggagcccgtccagaaatgtcctggccgacggcctgcattgaactatcctgtgtacggcgaaaccacgcaggtgagacggagacgttttgagagggcaatcggtcccagccagacacatactatcaggatccagtacagtcctgcaaggctcgcataccaagataaaggggtgttgcacaacgaagtgaaagtatccattctttggcggggactaccgaatgtggtgactagcgcaatatccctccctaacattcggaaaccagatggctacgattactatgctttctctaaagatcagtactacaacattgatgtgcctagtcgaaccgcacgggcaatcacaacaagatctggacagactctctcaaaagtgtggtataattgcccttag

SEQ ID NO: 45686 - DNA, 4086 bp, Artificial Sequence
  derived and/or modified sequence
atggcgtggaaaacactgccgatatacctgctgctcctcctgtctgtgtttgtaatccagcaggtctcaagccaagatttgagcagctgtgccggacgatgtggcgagggctactccagggatgcgacatgcaattgcgactacaactgtcaacattacatggaatgttgcccggactttaagagggtgtgcactgccgagcttagctgcaaagggcgatgctttgagtcatttgaacggggtcgggagtgcgattgtgacgctcagtgcaagaaatacgacaagtgttgtccagattatgaatccttttgcgcggaggtgcacaatccaacaagtcccccttcctctaaaaaggctccgccacctagtggcgctagtcagactatcaagtccactacaaagcgatctcccaaaccccctaataagaagaagactaagaaagtgatcgaatctgaagagatcaccgaggtgaaagataataaaaaaaaccgcacaaaaaagaaaccaacaccaaagccacccgtggtcgatgaggccggttccggtctagacaatggcgattttaaggttaccacgccggatacatcgaccacgcagcataataaagtctccaccagcccgaaaattactactgccaaaccaataaacccacgtccttccttacccccaaactcagacacttccaaggaaacgagtctaactgtgaataaggagactacagttgaaacgaaagaaacgaccaccacgaataaacagacgtctaccgacggtaaagaaaaaacgacaagcgctaaggagacacagtctatcgagaaaaccagcgctaaggacctggctccaacgtccaaggtgctcgcaaaaccaactcctaaagctgagactactaccaagggccctgcattgaccacaccgaaagagcctaccccaaccaccccgaaggagccagcttccactactcctaaggagcccaccccaacaacaattaagtccgcccctactactccaaaggaacccgcacctacgacaaccaaatccgcacccactacacccaaggaacctgcgcctacaacgaccaaggagcctgcgccaacaacacctaaagaacccgcacctactactaccaaggagcccgcaccgactaccacaaaatctgcccctacgactccaaaagaacctgcccctacgacgcctaagaaaccagcccctactactcccaaggaaccagcccctaccaccccgaaagagccaacacctaccactcctaaggagccggcacccactaccaaggaaccagcacccactacccccaaggagcctgcacccactgcccctaagaaacctgccccaacaactcccaaagagcccgctccaaccacgcctaaggaacctgccccaacaacgaccaaagagccgtcccctactacacctaaagaaccggctcccactaccactaagtcagctccaactacgacgaaggaacccgcacccacaacgactaaatccgcacctaccacacctaaggagccttctcctaccacaactaaggagcccgctccaaccacacccaaggagccggctcctacgaccccaaagaaaccagcacctacgacccccaaggaacctgctccgactacaccaaaggaacctgctcctacaacgacgaaaaaacctgccccaacaaccccaaaagagcccgcaccaacgacacccaaagagacggcccctacaacaccaaagaagctaacaccaacaacaccggagaagctggcaccaactacgcccgaaaagccagcacctacgaccccggaggaactcgctcctaccacccctgaggagcctacccctacgactccagaggagcctgcaccaacgacacccaaagccgctgccccaaacactcctaaggagcctgcacctacgacccctaaagagccggcaccaaccactccaaaggagccagcacccacaactcccaaagaaacagcgccaactacccctaagggaacagcgcctacaaccctgaaagagcctgctccgactacccctaagaaaccagcacccaaagaactggctccaacaacaacaaaagaacccacctccacaacctgtgacaaaccagcccctaccaccccaaaaggtacggcccctaccacacctaaggaacccgcacccactactccgaaggaacctgctcctacaacacccaaggggacagcccctacaacgctaaaggaacctgctcccacaactcctaagaagcctgcgcctaaggagctggctccaaccacgaccaagggacctaccagcactacttccgacaagcccgcacctacgacgccaaaggagaccgctcccaccacgcccaaggagcccgcacccacgactcccaagaagccggcaccaacaactcccgaaaccccccctccaacaaccagtgaagtctcaacaccaaccactaccaaagaaccgacaaccattcataaaagtcccgatgagtccactcctgagctgagtgcagaaccaacgcccaaagcactggaaaattcgccaaaagagcccggtgttcccaccaccaaaaccccagccgcaactaagccagaaatgacaacaacagctaaggataaaacaaccgaacgcgacttgcggactacccctgaaaccacaacggccgctcccaaaatgaccaaggaaaccgccacaaccacggagaaaaccactgagtcgaagataaccgcaacaacgactcaggtgacctcaacgacaacccaggatacaactccgttcaagattactaccctcaagaccaccactctggccccaaaggtcacaactaccaaaaagacaattacgactacggaaattatgaataaacctgaagagaccgccaagccaaaagacagagcaaccaattcaaaggcgactacccctaaacctcaaaaaccaactaaggcccctaaaaaaccgaccagtaccaaaaaaccgaaaactatgccgagagtaagaaaaccaaagaccacaccaactcccaggaaaatgacaagtactatgcctgagctgaacccaacaagccggatagccgaggcaatgctccagaccactactcgcccaaaccagactccaaatagcaagcttgtggaggtcaatccaaaaagcgaggacgcagggggagctgaaggcgaaacaccccacatgctcctgcgccctcatgtctttatgccggaagtaaccccggacatggattaccttccgcgagtgccgaatcagggcataataattaaccctatgttaagcgacgagacgaacatctgtaatggtaagccagttgacggtcttacaactctccggaatgggaccctggtggcctttagaggccattatttctggatgctatcccctttctcgccaccatcccccgcaagacgaataacggaagtctgggggatcccttcacccatcgacacggtctttacgcgatgcaattgcgaaggtaagactttcttttttaaggatagccaatactggcgcttcacgaatgatattaaggatgcaggctaccctaaacccatctttaaaggatttggaggcctaacaggtcagattgtcgccgctttgtcaactgccaagtataagaattggcccgagtctgtatatttcttcaaacggggaggatcgatccagcagtacatttacaagcaggagccggttcagaagtgtcctgggcgtcgaccagccctgaactaccctgtgtatggagagaccacacaagtgcgcagaaggaggtttgaacgagctattgggccttcccagactcacaccatcagaatacagtacagcccagcacgtttagcttaccaggataagggagtgctccataatgaggtgaaagtgtcgattctctggaggggcctgcctaacgtggtgacaagcgcaattagcttacctaatatccggaaacctgatggctacgattactatgcgttctcaaaggatcagtattataatatcgacgtgcccagccggaccgccagggccataacaaccaggtctggccagaccctgagcaaagtctggtataattgcccctag

SEQ ID NO: 45687 - DNA, 4215 bp, Artificial Sequence
  derived and/or modified sequence
atggcttggaaaacactcccaatatatctgttactgctgctctcagtgttcgtgattcagcaggtcagttcacaggacctgtcttcttgcgccggacggtgtggcgaaggttatagccgtgatgccacgtgcaattgcgattacaactgtcagcattacatggaatgttgcccagacttcaagagagtgtgtacagcagagctttcatgcaaagggagatgtttcgagtcattcgagcggggtcgggagtgtgattgtgatgcccaatgtaaaaagtatgacaagtgttgccccgactacgaatcattttgcgctgaggttcataaccctacatcccccccttcctctaagaaagccccaccccctagcggtgcctcacagacgatcaaaagtaccaccaaacggtctccaaagcctcccaataagaaaaagaccaagaaggtgatagaatccgaagagatcaccgaagaacacagcgtgtcggaaaatcaggagtcgtcttcaagtagcagtagtagcagcagtagctcaacgattagaaagatcaagtctagcaaaaattctgcggctaacagggaacttcagaaaaaattgaaggtcaaggacaacaagaaaaataggactaaaaagaagcctacacctaagccccctgttgtcgacgaggccggtagcggtcttgataatggcgacttcaaagtcaccacccctgacaccagcacaacccaacacaataaggtgtccactagtcctaaaatcacaaccgccaagcctatcaaccccaggccatcactaccgcctaacagcgacacatccaaggaaacttctttaactgtcaataaggaaaccaccgttgagaccaaagagaccactacaactaataaacaaaccagcacagacggcaaggagaagactacttccgccaaggagacacaatcaattgagaagactagcgccaaggatttggcccctacaagtaaagtcctggcgaaaccaactcctaaagcagagactaccacaaaagggccagccctcacaaccccaaaagaaccgacgcccactacccccaaggaacccgcttctacaaccccgaaagagcccaccccaacaacaatcaagtcagctcctacaacacctaaagagcctgctcctacaaccaccaagagcgcacccaccactcccaaggagcccgcacctactacaaccaaggagcctgcgccaacaactccgaaggaaccagcccctactaccacaaaggagcccgctccaaccaccactaagtctgccccaaccacaccaaaggagcctgccccaaccactcctaaaaagccagccccaacaaccccgaaagaaccagccccaaccacaccaaaagagcctacgcctacgacccccaaagaacccgctcctaccaccaaggagcctgctcccacgactcctaaagagcctgcccctaccgcccctaaaaagcccgcacccacaactcctaaagagcctgccccaacaactcctaaggaacccgcaccaacaacgacaaaagagccctcacccactactcctaaagaacccgctcccacaaccaccaagtctgccccaaccaccaccaaggaaccggcacccaccacaaccaagtccgcacctacgacacctaaagaacctagtcctactaccactaaagagcctgcgcctacaacgccaaaggaaccagcaccaacaaccccaaaaaagccagccccaacaaccccaaaggagcctgccccaacaacccctaaggaaccggctcccaccacaacgaagaaacccgcaccaaccacccctaaggagccagctcctacaaccccaaaggagacagcccctactacccccaagaagcttacccccacaacgccagaaaagctagccccaacaacgcccgagaagcccgctcccacaacacccgaggaactggcaccgacgactcctgaagaaccgacgccaacaactcctgaagagcccgctccgaccacaccaaaggccgcagcccctaacacccctaaggaacccgcaccaaccactcccaaggagcctgcgccaaccaccccaaaggagcctgcacccaccactccaaaagaaactgctccgaccactcctaaaggcacagcacccactacactgaaggagcccgctccaaccacccccaaaaagcctgcacccaaggaactcgcgcctaccaccactaaggagcccacctcaaccacttgtgacaagccagcccctactacccccaagggtacagctcccacaacacccaaggagcccgctcccacaactcccaaggagcccgcaccgaccaccccaaaaggaacagctcccaccactctcaaggagcccgcacccaccacccccaagaaacccgctccgaaggagttagcgccaacaacaaccaaggggccaaccagtaccaccagcgacaaacccgcacccaccacgcctaaggagaccgccccaacaacaccaaaagaacctgctccaacaactcctaaaaaaccggcacctaccacgccagagacgccacctccaacgacatccgaagtctccacccccaccaccacaaaggagccgaccaccattcataagagcccagacgagtccactcccgaactgtctgccgagccaaccccaaaggccctggagaatagcccaaaggaaccaggggtcccaaccaccaaaaccccggctgctacaaaacccgagatgacaacaaccgccaaggataagacaacagagagggacctgcgaaccacacccgagactaccactgccgcaccaaaaatgaccaaagaaacagccactactacagaaaagaccaccgaatccaaaattactgccacgacaacccaggtcacttcaactacgacccaggacacaaccccgttcaagatcaccaccctcaagacaacgacccttgcacccaaagtcacaacaaccaaaaaaactattaccaccacagagatcatgaacaaaccagaagagactgctaagccgaaggaccgcgctacaaactctaaggcaacaactccgaagcctcagaaaccgaccaaggctcctaaaaagccaacatccaccaagaagccaaaaactatgcccagggtcaggaagcctaagaccacccccactccacgcaaaatgacaagcacaatgccggagcttaaccccaccagtagaatcgccgaggccatgttacagaccaccacacgacccaaccagactccaaacagtaagctcgtcgaggtcaaccccaagagcgaagacgccggaggggcagagggagaaaccccgcacatgctgcttcggccacatgtgtttatgcctgaggtgactccagacatggattatttaccgagggtgcccaatcagggcattattattaacccaatgctgagcgacgaaacgaatatctgcaatggaaagcctgtcgacggccttaccactcttaggaacggcacactggtggccttccgtgggcattatttttggatgctgagtccattcagtcccccatccccagcgagaaggattaccgaagtttggggaattccttcccccattgacaccgtgttcaccagatgtaattgcgagggaaagacttttttctttaaggatagtcagtactggcggtttacgaacgacatcaaagacgcaggctaccccaagccaatattcaaagggtttggcggattgaccggtcagattgtcgctgctttgtcaacagctaaatacaaaaactggcctgaaagcgtgtacttctttaagcggggtggctctattcaacagtacatctataaacaggagccggtccagaagtgtccaggccgaaggccagccctgaactatcctgtctacggggagaccactcaggtgcggaggcgcaggttcgagagggcaatcggaccctcacagacccacacgatccggatacagtatagcccagccaggctggcctaccaggataaaggcgtgctgcacaatgaggttaaagtgagtatcctttggcgcggactacccaacgtcgtgactagcgctatcagcctacccaacattcgaaagcctgatggctatgactactacgccttttcgaaggaccagtattataatatcgacgtgccttctagaacagcgagggctatcacaacccggtctgggcagaccctttcaaaggtttggtataactgtccttag

SEQ ID NO: 45688 - DNA, 4921 bp, Artificial Sequence
  derived and/or modified sequence
atctatcctttacggcaagggtacctacggtacctgaaaacaacgatggcatggaaaacacttcccatttacctgttgttgctgctgtctgttttcgtgattcagcaagtttcatctcaagagctttcctgtaaaggccgctgctttgagtccttcgagagagggagggagtgtgactgcgacgcccaatgtaagaagtatgacaagtgctgtcccgattatgagagtttctgtgcagaagtgcataatcccacatcaccaccatcttcaaagaaagcacctccaccttcaggagcatctcaaaccatcaaatcaacaaccaaacgttcacccaaaccaccaaacaagaagaagactaagaaagttatagaatcagaggaaataacagaagaacattctgtttctgaaaatcaagagtcctcctcctcctcctcctcttcctcttcttcttcaacaattcggaaaatcaagtcttccaaaaattcagctgctaatagagaattacagaagaaactcaaagtaaaagataacaagaagaacagaactaaaaagaaacctacccccaaaccaccagttgtagatgaagctggaagtggattggacaatggtgacttcaaggtcacaactcctgacacgtctaccacccaacacaataaagtcagcacatctcccaagatcacaacagcaaaaccaataaatcccagacccagtcttccacctaattctgatacatctaaagagacgtctttgacagtgaataaagagacaacagttgaaactaaagaaactactacaacaaataaacagacttcaactgatggaaaagagaagactacttccgctaaagagacacaaagtatagagaaaacatctgctaaagatttagcacccacatctaaagtgctggctaaacctacacccaaagctgaaactacaaccaaaggccctgctctcaccactcccaaggagcccacgcccaccactcccaaggagcctgcatctaccacacccaaagagcccacacctaccaccatcaagtctgcacccaccacccccaaggagcctgcacccaccaccaccaagtctgcacccaccactcccaaggagcctgcacccaccaccaccaaggagcctgcacccaccactcccaaggagcctgcacccaccaccaccaaggagcctgcacccaccaccaccaagtctgcacccaccactcccaaggagcctgcacccaccacccccaagaagcctgccccaactacccccaaggagcctgcacccaccactcccaaggagcctacacccaccactcccaaggagcctgcacccaccaccaaggagcctgcacccaccactcccaaagagcctgcacccactgcccccaagaagcctgccccaactacccccaaggagcctgcacccaccactcccaaggagcctgcacccaccaccaccaaggagccttcacccaccactcccaaggagcctgcacccaccaccaccaagtctgcacccaccactaccaaggagcctgcacccaccactaccaagtctgcacccaccactcccaaggagccttcacccaccaccaccaaggagcctgcacccaccactcccaaggagcctgcacccaccacccccaagaagcctgccccaactacccccaaggagcctgcacccaccactcccaaggaacctgcacccaccaccaccaagaagcctgcacccaccactcccaaagagcctgccccaactacccccaaggagactgcacccaccacccccaagaagctcacgcccaccacccccgagaagctcgcacccaccacccctgagaagcccgcacccaccacccctgaggagctcgcacccaccacccctgaggagcccacacccaccacccctgaggagcctgctcccaccactcccaaggcagcggctcccaacacccctaaggagcctgctccaactacccctaaggagcctgctccaactacccctaaggagcctgctccaactacccctaaggagactgctccaactacccctaaagggactgctccaactaccctcaaggaacctgcacccactactcccaagaagcctgcccccaaggagcttgcacccaccaccaccaaggagcccacatccaccacctgtgacaagcccgctccaactacccctaaggggactgctccaactacccctaaggagcctgctccaactacccctaaggagcctgctccaactacccctaaggggactgctccaactaccctcaaggaacctgcacccactactcccaagaagcctgcccccaaggagcttgcacccaccaccaccaaggggcccacatccaccacctctgacaagcctgctccaactacacctaaggagactgctccaactacccccaaggagcctgcacccactacccccaagaagcctgctccaactactcctgagacacctcctccaaccacttcagaggtctctactccaactaccaccaaggagcctaccactatccacaaaagccctgatgaatcaactcctgagctttctgcagaacccacaccaaaagctcttgaaaacagtcccaaggaacctggtgtacctacaactaagactcctgcagcgactaaacctgaaatgactacaacagctaaagacaagacaacagaaagagacttacgtactacacctgaaactacaactgctgcacctaagatgacaaaagagacagcaactacaacagaaaaaactaccgaatccaaaataacagctacaaccacacaagtaacatctaccacaactcaagataccacaccattcaaaattactactcttaaaacaactactcttgcacccaaagtaactacaacaaaaaagacaattactaccactgagattatgaacaaacctgaagaaacagctaaaccaaaagacagagctactaattctaaagcgacaactcctaaacctcaaaagccaaccaaagcacccaaaaaacccacttctaccaaaaagccaaaaacaatgcctagagtgagaaaaccaaagacgacaccaactccccgcaagatgacatcaacaatgccagaattgaaccctacctcaagaatagcagaagccatgctccaaaccaccaccagacctaaccaaactccaaactccaaactagttgaagtaaatccaaagagtgaagatgcaggtggtgctgaaggagaaacacctcatatgcttctcaggccccatgtgttcatgcctgaagttactcccgacatggattacttaccgagagtacccaatcaaggcattatcatcaatcccatgctttccgatgagaccaatatatgcaatggtaagccagtagatggactgactactttgcgcaatgggacattagttgcattccgaggtcattatttctggatgctaagtccattcagtccaccatctccagctcgcagaattactgaagtttggggtattccttcccccattgatactgtttttactaggtgcaactgtgaaggaaaaactttcttctttaaggattctcagtactggcgttttaccaatgatataaaagatgcagggtaccccaaaccaattttcaaaggatttggaggactaactggacaaatagtggcagcgctttcaacagctaaatataagaactggcctgaatctgtgtattttttcaagagaggtggcagcattcagcagtatatttataaacaggaacctgtacagaagtgccctggaagaaggcctgctctaaattatccagtgtatggagaaacgacacaggttaggagacgtcgctttgaacgtgctataggaccttctcaaacacacaccatcagaattcaatattcacctgccagactggcttatcaagacaaaggtgtccttcataatgaagttaaagtgagtatactgtggagaggacttccaaatgtggttacctcagctatatcactgcccaacatcagaaaacctgacggctatgattactatgccttttctaaagatcaatactataacattgatgtgcctagtagaacagcaagagcaattactactcgttctgggcagaccttatccaaagtctggtacaactgtccttagactgatgagcaaaggaggagtcaactaatgaagaaatgaataataaattttgacactgaaaaacattttattaataaagaatattgacatgagtataccagtttatatataaaaatgtttttaaacttgacaatcattacactaaaacagatttgataatcttattcacagttgttattgtttacagaccatttaattaatatttcctctgtttattcctcctctccctcccattgcatggctcacacctgtaaaagaaaaaagaatcaaattgaatatatcttttaagaattcaaaactagtgtattcacttaccctagttcattataaaaaatatctaggcattgtggatataaaactgttgggtattctacaacttcaatggaaattattacaagcagattaatccctctttttgtgacacaagtacaatctaaaagttatattggaaaacatggaaatattaaaattttacacttttactagctaaaacataatcacaaagctttatcgtgttgtataaaaaaattaacaatataatggcaataggtagagatacaacaaatgaatataacactataacacttcatattttccaaatcttaatttggatttaaggaagaaatcaataaatataaaatataagcacatatttattatatatctaaggtatacaaatctgtctacatgaagtttacagattggtaaatatcacctgctcaacatgtaattatttaataaaactttggaacattaaaaaaataaattggaggcttaaggatta

SEQ ID NO: 45689 - DNA, 3629 bp, Artificial Sequence
  derived and/or modified sequence
aaactcatctatcctttacggcaagggtacctacggtacctgaaaacaacgatggcatggaaaacacttcccatttacctgttgttgctgctgtctgttttcgtgattcagcaagtttcatctcaagagctttcctgtaaaggccgctgctttgagtccttcgagagagggagggagtgtgactgcgacgcccaatgtaagaagtatgacaagtgctgtcccgattatgagagtttctgtgcagaagtgcataatcccacatcaccaccatcttcaaagaaagcacctccaccttcaggagcatctcaaaccatcaaatcaacaaccaaacgttcacccaaaccaccaaacaagaagaagactaagaaagttatagaatcagaggaaataacagaagaacattctgtttctgaaaatcaagagtcctcctcctcctcctcctcttcctcttcttcttcaacaattcggaaaatcaagtcttccaaaaattcagctgctaatagagaattacagaagaaactcaaagtaaaagataacaagaagaacagaactaaaaagaaacctacccccaaaccaccagttgtagatgaagctggaagtggattggacaatggtgacttcaaggtcacaactcctgacacgtctaccacccaacacaataaagtcagcacatctcccaagatcacaacagcaaaaccaataaatcccagacccagtcttccacctaattctgatacatctaaagagacgtctttgacagtgaataaagagacaacagttgaaactaaagaaactactacaacaaataaacagacttcaactgatggaaaagagaagactacttccgctaaagagacacaaagtatagagaaaacatctgctaaagatttagcacccacatctaaagtgctggctaaacctacacccaaagctgaaactacaaccaaaggccctgctctcaccactcccaaggagcccacgcccaccactcccaaggagcctgcatctaccacacccaaagagcccacacctaccaccatcaagtctgcacccaccacccccaaggagcctgcacccaccaccaccaagtctgcacccaccactcccaaggagcctgcacccaccaccaccaaggagcctgcacccactacccccaagaagcctgctccaactactcctgagacacctcctccaaccacttcagaggtctctactccaactaccaccaaggagcctaccactatccacaaaagccctgatgaatcaactcctgagctttctgcagaacccacaccaaaagctcttgaaaacagtcccaaggaacctggtgtacctacaactaagactcctgcagcgactaaacctgaaatgactacaacagctaaagacaagacaacagaaagagacttacgtactacacctgaaactacaactgctgcacctaagatgacaaaagagacagcaactacaacagaaaaaactaccgaatccaaaataacagctacaaccacacaagtaacatctaccacaactcaagataccacaccattcaaaattactactcttaaaacaactactcttgcacccaaagtaactacaacaaaaaagacaattactaccactgagattatgaacaaacctgaagaaacagctaaaccaaaagacagagctactaattctaaagcgacaactcctaaacctcaaaagccaaccaaagcacccaaaaaacccacttctaccaaaaagccaaaaacaatgcctagagtgagaaaaccaaagacgacaccaactccccgcaagatgacatcaacaatgccagaattgaaccctacctcaagaatagcagaagccatgctccaaaccaccaccagacctaaccaaactccaaactccaaactagttgaagtaaatccaaagagtgaagatgcaggtggtgctgaaggagaaacacctcatatgcttctcaggccccatgtgttcatgcctgaagttactcccgacatggattacttaccgagagtacccaatcaaggcattatcatcaatcccatgctttccgatgagaccaatatatgcaatggtaagccagtagatggactgactactttgcgcaatgggacattagttgcattccgaggtcattatttctggatgctaagtccattcagtccaccatctccagctcgcagaattactgaagtttggggtattccttcccccattgatactgtttttactaggtgcaactgtgaaggaaaaactttcttctttaaggattctcagtactggcgttttaccaatgatataaaagatgcagggtaccccaaaccaattttcaaaggatttggaggactaactggacaaatagtggcagcgctttcaacagctaaatataagaactggcctgaatctgtgtattttttcaagagaggtggcagcattcagcagtatatttataaacaggaacctgtacagaagtgccctggaagaaggcctgctctaaattatccagtgtatggagaaacgacacaggttaggagacgtcgctttgaacgtgctataggaccttctcaaacacacaccatcagaattcaatattcacctgccagactggcttatcaagacaaaggtgtccttcataatgaagttaaagtgagtatactgtggagaggacttccaaatgtggttacctcagctatatcactgcccaacatcagaaaacctgacggctatgattactatgccttttctaaagatcaatactataacattgatgtgcctagtagaacagcaagagcaattactactcgttctgggcagaccttatccaaagtctggtacaactgtccttagactgatgagcaaaggaggagtcaactaatgaagaaatgaataataaattttgacactgaaaaacattttattaataaagaatattgacatgagtataccagtttatatataaaaatgtttttaaacttgacaatcattacactaaaacagatttgataatcttattcacagttgttattgtttacagaccatttaattaatatttcctctgtttattcctcctctccctcccattgcatggctcacacctgtaaaagaaaaaagaatcaaattgaatatatcttttaagaattcaaaactagtgtattcacttaccctagttcattataaaaaatatctaggcattgtggatataaaactgttgggtattctacaacttcaatggaaattattacaagcagattaatccctctttttgtgacacaagtacaatctaaaagttatattggaaaacatggaaatattaaaattttacacttttactagctaaaacataatcacaaagctttatcgtgttgtataaaaaaattaacaatataatggcaataggtagagatacaacaaatgaatataacactataacacttcatattttccaaatcttaatttggatttaaggaagaaatcaataaatataaaatataagcacatatttattatatatctaaggtatacaaatctgtctacatgaagtttacagattggtaaatatcacctgctcaacatgtaattatttaataaaactttggaacattaaaaaaataaattggaggctt

SEQ ID NO: 45690 - DNA, 4765 bp, Artificial Sequence
  derived and/or modified sequence
atctatcctttacggcaagggtacctacggtacctgaaaacaacgatggcatggaaaacacttcccatttacctgttgttgctgctgtctgttttcgtgattcagcaagtttcatctcaagatttatcaagctgtgcagggagatgtggggaagggtattctagagatgccacctgcaactgtgattataactgtcaacactacatggagtgctgccctgatttcaagagagtctgcactgcggagctttcctgtaaaggccgctgctttgagtccttcgagagagggagggagtgtgactgcgacgcccaatgtaagaagtatgacaagtgctgtcccgattatgagagtttctgtgcagaagtaaaagataacaagaagaacagaactaaaaagaaacctacccccaaaccaccagttgtagatgaagctggaagtggattggacaatggtgacttcaaggtcacaactcctgacacgtctaccacccaacacaataaagtcagcacatctcccaagatcacaacagcaaaaccaataaatcccagacccagtcttccacctaattctgatacatctaaagagacgtctttgacagtgaataaagagacaacagttgaaactaaagaaactactacaacaaataaacagacttcaactgatggaaaagagaagactacttccgctaaagagacacaaagtatagagaaaacatctgctaaagatttagcacccacatctaaagtgctggctaaacctacacccaaagctgaaactacaaccaaaggccctgctctcaccactcccaaggagcccacgcccaccactcccaaggagcctgcatctaccacacccaaagagcccacacctaccaccatcaagtctgcacccaccacccccaaggagcctgcacccaccaccaccaagtctgcacccaccactcccaaggagcctgcacccaccaccaccaaggagcctgcacccaccactcccaaggagcctgcacccaccaccaccaaggagcctgcacccaccaccaccaagtctgcacccaccactcccaaggagcctgcacccaccacccccaagaagcctgccccaactacccccaaggagcctgcacccaccactcccaaggagcctacacccaccactcccaaggagcctgcacccaccaccaaggagcctgcacccaccactcccaaagagcctgcacccactgcccccaagaagcctgccccaactacccccaaggagcctgcacccaccactcccaaggagcctgcacccaccaccaccaaggagccttcacccaccactcccaaggagcctgcacccaccaccaccaagtctgcacccaccactaccaaggagcctgcacccaccactaccaagtctgcacccaccactcccaaggagccttcacccaccaccaccaaggagcctgcacccaccactcccaaggagcctgcacccaccacccccaagaagcctgccccaactacccccaaggagcctgcacccaccactcccaaggaacctgcacccaccaccaccaagaagcctgcacccaccactcccaaagagcctgccccaactacccccaaggagactgcacccaccacccccaagaagctcacgcccaccacccccgagaagctcgcacccaccacccctgagaagcccgcacccaccacccctgaggagctcgcacccaccacccctgaggagcccacacccaccacccctgaggagcctgctcccaccactcccaaggcagcggctcccaacacccctaaggagcctgctccaactacccctaaggagcctgctccaactacccctaaggagcctgctccaactacccctaaggagactgctccaactacccctaaagggactgctccaactaccctcaaggaacctgcacccactactcccaagaagcctgcccccaaggagcttgcacccaccaccaccaaggagcccacatccaccacctgtgacaagcccgctccaactacccctaaggggactgctccaactacccctaaggagcctgctccaactacccctaaggagcctgctccaactacccctaaggggactgctccaactaccctcaaggaacctgcacccactactcccaagaagcctgcccccaaggagcttgcacccaccaccaccaaggggcccacatccaccacctctgacaagcctgctccaactacacctaaggagactgctccaactacccccaaggagcctgcacccactacccccaagaagcctgctccaactactcctgagacacctcctccaaccacttcagaggtctctactccaactaccaccaaggagcctaccactatccacaaaagccctgatgaatcaactcctgagctttctgcagaacccacaccaaaagctcttgaaaacagtcccaaggaacctggtgtacctacaactaagactcctgcagcgactaaacctgaaatgactacaacagctaaagacaagacaacagaaagagacttacgtactacacctgaaactacaactgctgcacctaagatgacaaaagagacagcaactacaacagaaaaaactaccgaatccaaaataacagctacaaccacacaagtaacatctaccacaactcaagataccacaccattcaaaattactactcttaaaacaactactcttgcacccaaagtaactacaacaaaaaagacaattactaccactgagattatgaacaaacctgaagaaacagctaaaccaaaagacagagctactaattctaaagcgacaactcctaaacctcaaaagccaaccaaagcacccaaaaaacccacttctaccaaaaagccaaaaacaatgcctagagtgagaaaaccaaagacgacaccaactccccgcaagatgacatcaacaatgccagaattgaaccctacctcaagaatagcagaagccatgctccaaaccaccaccagacctaaccaaactccaaactccaaactagttgaagtaaatccaaagagtgaagatgcaggtggtgctgaaggagaaacacctcatatgcttctcaggccccatgtgttcatgcctgaagttactcccgacatggattacttaccgagagtacccaatcaaggcattatcatcaatcccatgctttccgatgagaccaatatatgcaatggtaagccagtagatggactgactactttgcgcaatgggacattagttgcattccgaggtcattatttctggatgctaagtccattcagtccaccatctccagctcgcagaattactgaagtttggggtattccttcccccattgatactgtttttactaggtgcaactgtgaaggaaaaactttcttctttaaggattctcagtactggcgttttaccaatgatataaaagatgcagggtaccccaaaccaattttcaaaggatttggaggactaactggacaaatagtggcagcgctttcaacagctaaatataagaactggcctgaatctgtgtattttttcaagagaggtggcagcattcagcagtatatttataaacaggaacctgtacagaagtgccctggaagaaggcctgctctaaattatccagtgtatggagaaacgacacaggttaggagacgtcgctttgaacgtgctataggaccttctcaaacacacaccatcagaattcaatattcacctgccagactggcttatcaagacaaaggtgtccttcataatgaagttaaagtgagtatactgtggagaggacttccaaatgtggttacctcagctatatcactgcccaacatcagaaaacctgacggctatgattactatgccttttctaaagatcaatactataacattgatgtgcctagtagaacagcaagagcaattactactcgttctgggcagaccttatccaaagtctggtacaactgtccttagactgatgagcaaaggaggagtcaactaatgaagaaatgaataataaattttgacactgaaaaacattttattaataaagaatattgacatgagtataccagtttatatataaaaatgtttttaaacttgacaatcattacactaaaacagatttgataatcttattcacagttgttattgtttacagaccatttaattaatatttcctctgtttattcctcctctccctcccattgcatggctcacacctgtaaaagaaaaaagaatcaaattgaatatatcttttaagaattcaaaactagtgtattcacttaccctagttcattataaaaaatatctaggcattgtggatataaaactgttgggtattctacaacttcaatggaaattattacaagcagattaatccctctttttgtgacacaagtacaatctaaaagttatattggaaaacatggaaatattaaaattttacacttttactagctaaaacataatcacaaagctttatcgtgttgtataaaaaaattaacaatataatggcaataggtagagatacaacaaatgaatataacactataacacttcatattttccaaatcttaatttggatttaaggaagaaatcaataaatataaaatataagcacatatttattatatatctaaggtatacaaatctgtctacatgaagtttacagattggtaaatatcacctgctcaacatgtaattatttaataaaactttggaacattaaaaaaataaattggaggcttaaggatta

SEQ ID NO: 45691 - DNA, 4913 bp, Artificial Sequence
  derived and/or modified sequence
aaactcatctatcctttacggcaagggtacctacggtacctgaaaacaacgatggcatggaaaacacttcccatttacctgttgttgctgctgtctgttttcgtgattcagcaagtttcatctcaagatttatcaagctgtgcagggagatgtggggaagggtattctagagatgccacctgcaactgtgattataactgtcaacactacatggagtgctgccctgatttcaagagagtctgcactgcggagctttcctgtaaaggccgctgctttgagtccttcgagagagggagggagtgtgactgcgacgcccaatgtaagaagtatgacaagtgctgtcccgattatgagagtttctgtgcagaagtgcataatcccacatcaccaccatcttcaaagaaagcacctccaccttcaggagcatctcaaaccatcaaatcaacaaccaaacgttcacccaaaccaccaaacaagaagaagactaagaaagttatagaatcagaggaaataacagaagtaaaagataacaagaagaacagaactaaaaagaaacctacccccaaaccaccagttgtagatgaagctggaagtggattggacaatggtgacttcaaggtcacaactcctgacacgtctaccacccaacacaataaagtcagcacatctcccaagatcacaacagcaaaaccaataaatcccagacccagtcttccacctaattctgatacatctaaagagacgtctttgacagtgaataaagagacaacagttgaaactaaagaaactactacaacaaataaacagacttcaactgatggaaaagagaagactacttccgctaaagagacacaaagtatagagaaaacatctgctaaagatttagcacccacatctaaagtgctggctaaacctacacccaaagctgaaactacaaccaaaggccctgctctcaccactcccaaggagcccacgcccaccactcccaaggagcctgcatctaccacacccaaagagcccacacctaccaccatcaagtctgcacccaccacccccaaggagcctgcacccaccaccaccaagtctgcacccaccactcccaaggagcctgcacccaccaccaccaaggagcctgcacccaccactcccaaggagcctgcacccaccaccaccaaggagcctgcacccaccaccaccaagtctgcacccaccactcccaaggagcctgcacccaccacccccaagaagcctgccccaactacccccaaggagcctgcacccaccactcccaaggagcctacacccaccactcccaaggagcctgcacccaccaccaaggagcctgcacccaccactcccaaagagcctgcacccactgcccccaagaagcctgccccaactacccccaaggagcctgcacccaccactcccaaggagcctgcacccaccaccaccaaggagccttcacccaccactcccaaggagcctgcacccaccaccaccaagtctgcacccaccactaccaaggagcctgcacccaccactaccaagtctgcacccaccactcccaaggagccttcacccaccaccaccaaggagcctgcacccaccactcccaaggagcctgcacccaccacccccaagaagcctgccccaactacccccaaggagcctgcacccaccactcccaaggaacctgcacccaccaccaccaagaagcctgcacccaccactcccaaagagcctgccccaactacccccaaggagactgcacccaccacccccaagaagctcacgcccaccacccccgagaagctcgcacccaccacccctgagaagcccgcacccaccacccctgaggagctcgcacccaccacccctgaggagcccacacccaccacccctgaggagcctgctcccaccactcccaaggcagcggctcccaacacccctaaggagcctgctccaactacccctaaggagcctgctccaactacccctaaggagcctgctccaactacccctaaggagactgctccaactacccctaaagggactgctccaactaccctcaaggaacctgcacccactactcccaagaagcctgcccccaaggagcttgcacccaccaccaccaaggagcccacatccaccacctgtgacaagcccgctccaactacccctaaggggactgctccaactacccctaaggagcctgctccaactacccctaaggagcctgctccaactacccctaaggggactgctccaactaccctcaaggaacctgcacccactactcccaagaagcctgcccccaaggagcttgcacccaccaccaccaaggggcccacatccaccacctctgacaagcctgctccaactacacctaaggagactgctccaactacccccaaggagcctgcacccactacccccaagaagcctgctccaactactcctgagacacctcctccaaccacttcagaggtctctactccaactaccaccaaggagcctaccactatccacaaaagccctgatgaatcaactcctgagctttctgcagaacccacaccaaaagctcttgaaaacagtcccaaggaacctggtgtacctacaactaagactcctgcagcgactaaacctgaaatgactacaacagctaaagacaagacaacagaaagagacttacgtactacacctgaaactacaactgctgcacctaagatgacaaaagagacagcaactacaacagaaaaaactaccgaatccaaaataacagctacaaccacacaagtaacatctaccacaactcaagataccacaccattcaaaattactactcttaaaacaactactcttgcacccaaagtaactacaacaaaaaagacaattactaccactgagattatgaacaaacctgaagaaacagctaaaccaaaagacagagctactaattctaaagcgacaactcctaaacctcaaaagccaaccaaagcacccaaaaaacccacttctaccaaaaagccaaaaacaatgcctagagtgagaaaaccaaagacgacaccaactccccgcaagatgacatcaacaatgccagaattgaaccctacctcaagaatagcagaagccatgctccaaaccaccaccagacctaaccaaactccaaactccaaactagttgaagtaaatccaaagagtgaagatgcaggtggtgctgaaggagaaacacctcatatgcttctcaggccccatgtgttcatgcctgaagttactcccgacatggattacttaccgagagtacccaatcaaggcattatcatcaatcccatgctttccgatgagaccaatatatgcaatggtaagccagtagatggactgactactttgcgcaatgggacattagttgcattccgaggtcattatttctggatgctaagtccattcagtccaccatctccagctcgcagaattactgaagtttggggtattccttcccccattgatactgtttttactaggtgcaactgtgaaggaaaaactttcttctttaaggattctcagtactggcgttttaccaatgatataaaagatgcagggtaccccaaaccaattttcaaaggatttggaggactaactggacaaatagtggcagcgctttcaacagctaaatataagaactggcctgaatctgtgtattttttcaagagaggtggcagcattcagcagtatatttataaacaggaacctgtacagaagtgccctggaagaaggcctgctctaaattatccagtgtatggagaaacgacacaggttaggagacgtcgctttgaacgtgctataggaccttctcaaacacacaccatcagaattcaatattcacctgccagactggcttatcaagacaaaggtgtccttcataatgaagttaaagtgagtatactgtggagaggacttccaaatgtggttacctcagctatatcactgcccaacatcagaaaacctgacggctatgattactatgccttttctaaagatcaatactataacattgatgtgcctagtagaacagcaagagcaattactactcgttctgggcagaccttatccaaagtctggtacaactgtccttagactgatgagcaaaggaggagtcaactaatgaagaaatgaataataaattttgacactgaaaaacattttattaataaagaatattgacatgagtataccagtttatatataaaaatgtttttaaacttgacaatcattacactaaaacagatttgataatcttattcacagttgttattgtttacagaccatttaattaatatttcctctgtttattcctcctctccctcccattgcatggctcacacctgtaaaagaaaaaagaatcaaattgaatatatcttttaagaattcaaaactagtgtattcacttaccctagttcattataaaaaatatctaggcattgtggatataaaactgttgggtattctacaacttcaatggaaattattacaagcagattaatccctctttttgtgacacaagtacaatctaaaagttatattggaaaacatggaaatattaaaattttacacttttactagctaaaacataatcacaaagctttatcgtgttgtataaaaaaattaacaatataatggcaataggtagagatacaacaaatgaatataacactataacacttcatattttccaaatcttaatttggatttaaggaagaaatcaataaatataaaatataagcacatatttattatatatctaaggtatacaaatctgtctacatgaagtttacagattggtaaatatcacctgctcaacatgtaattatttaataaaactttggaacattaaaaaaataaattggaggctt

SEQ ID NO: 45692 - DNA, 5044 bp, Artificial Sequence
  derived and/or modified sequence
atctatcctttacggcaagggtacctacggtacctgaaaacaacgatggcatggaaaacacttcccatttacctgttgttgctgctgtctgttttcgtgattcagcaagtttcatctcaagatttatcaagctgtgcagggagatgtggggaagggtattctagagatgccacctgcaactgtgattataactgtcaacactacatggagtgctgccctgatttcaagagagtctgcactgcggagctttcctgtaaaggccgctgctttgagtccttcgagagagggagggagtgtgactgcgacgcccaatgtaagaagtatgacaagtgctgtcccgattatgagagtttctgtgcagaagtgcataatcccacatcaccaccatcttcaaagaaagcacctccaccttcaggagcatctcaaaccatcaaatcaacaaccaaacgttcacccaaaccaccaaacaagaagaagactaagaaagttatagaatcagaggaaataacagaagaacattctgtttctgaaaatcaagagtcctcctcctcctcctcctcttcctcttcttcttcaacaattcggaaaatcaagtcttccaaaaattcagctgctaatagagaattacagaagaaactcaaagtaaaagataacaagaagaacagaactaaaaagaaacctacccccaaaccaccagttgtagatgaagctggaagtggattggacaatggtgacttcaaggtcacaactcctgacacgtctaccacccaacacaataaagtcagcacatctcccaagatcacaacagcaaaaccaataaatcccagacccagtcttccacctaattctgatacatctaaagagacgtctttgacagtgaataaagagacaacagttgaaactaaagaaactactacaacaaataaacagacttcaactgatggaaaagagaagactacttccgctaaagagacacaaagtatagagaaaacatctgctaaagatttagcacccacatctaaagtgctggctaaacctacacccaaagctgaaactacaaccaaaggccctgctctcaccactcccaaggagcccacgcccaccactcccaaggagcctgcatctaccacacccaaagagcccacacctaccaccatcaagtctgcacccaccacccccaaggagcctgcacccaccaccaccaagtctgcacccaccactcccaaggagcctgcacccaccaccaccaaggagcctgcacccaccactcccaaggagcctgcacccaccaccaccaaggagcctgcacccaccaccaccaagtctgcacccaccactcccaaggagcctgcacccaccacccccaagaagcctgccccaactacccccaaggagcctgcacccaccactcccaaggagcctacacccaccactcccaaggagcctgcacccaccaccaaggagcctgcacccaccactcccaaagagcctgcacccactgcccccaagaagcctgccccaactacccccaaggagcctgcacccaccactcccaaggagcctgcacccaccaccaccaaggagccttcacccaccactcccaaggagcctgcacccaccaccaccaagtctgcacccaccactaccaaggagcctgcacccaccactaccaagtctgcacccaccactcccaaggagccttcacccaccaccaccaaggagcctgcacccaccactcccaaggagcctgcacccaccacccccaagaagcctgccccaactacccccaaggagcctgcacccaccactcccaaggaacctgcacccaccaccaccaagaagcctgcacccaccactcccaaagagcctgccccaactacccccaaggagactgcacccaccacccccaagaagctcacgcccaccacccccgagaagctcgcacccaccacccctgagaagcccgcacccaccacccctgaggagctcgcacccaccacccctgaggagcccacacccaccacccctgaggagcctgctcccaccactcccaaggcagcggctcccaacacccctaaggagcctgctccaactacccctaaggagcctgctccaactacccctaaggagcctgctccaactacccctaaggagactgctccaactacccctaaagggactgctccaactaccctcaaggaacctgcacccactactcccaagaagcctgcccccaaggagcttgcacccaccaccaccaaggagcccacatccaccacctgtgacaagcccgctccaactacccctaaggggactgctccaactacccctaaggagcctgctccaactacccctaaggagcctgctccaactacccctaaggggactgctccaactaccctcaaggaacctgcacccactactcccaagaagcctgcccccaaggagcttgcacccaccaccaccaaggggcccacatccaccacctctgacaagcctgctccaactacacctaaggagactgctccaactacccccaaggagcctgcacccactacccccaagaagcctgctccaactactcctgagacacctcctccaaccacttcagaggtctctactccaactaccaccaaggagcctaccactatccacaaaagccctgatgaatcaactcctgagctttctgcagaacccacaccaaaagctcttgaaaacagtcccaaggaacctggtgtacctacaactaagactcctgcagcgactaaacctgaaatgactacaacagctaaagacaagacaacagaaagagacttacgtactacacctgaaactacaactgctgcacctaagatgacaaaagagacagcaactacaacagaaaaaactaccgaatccaaaataacagctacaaccacacaagtaacatctaccacaactcaagataccacaccattcaaaattactactcttaaaacaactactcttgcacccaaagtaactacaacaaaaaagacaattactaccactgagattatgaacaaacctgaagaaacagctaaaccaaaagacagagctactaattctaaagcgacaactcctaaacctcaaaagccaaccaaagcacccaaaaaacccacttctaccaaaaagccaaaaacaatgcctagagtgagaaaaccaaagacgacaccaactccccgcaagatgacatcaacaatgccagaattgaaccctacctcaagaatagcagaagccatgctccaaaccaccaccagacctaaccaaactccaaactccaaactagttgaagtaaatccaaagagtgaagatgcaggtggtgctgaaggagaaacacctcatatgcttctcaggccccatgtgttcatgcctgaagttactcccgacatggattacttaccgagagtacccaatcaaggcattatcatcaatcccatgctttccgatgagaccaatatatgcaatggtaagccagtagatggactgactactttgcgcaatgggacattagttgcattccgaggtcattatttctggatgctaagtccattcagtccaccatctccagctcgcagaattactgaagtttggggtattccttcccccattgatactgtttttactaggtgcaactgtgaaggaaaaactttcttctttaaggattctcagtactggcgttttaccaatgatataaaagatgcagggtaccccaaaccaattttcaaaggatttggaggactaactggacaaatagtggcagcgctttcaacagctaaatataagaactggcctgaatctgtgtattttttcaagagaggtggcagcattcagcagtatatttataaacaggaacctgtacagaagtgccctggaagaaggcctgctctaaattatccagtgtatggagaaacgacacaggttaggagacgtcgctttgaacgtgctataggaccttctcaaacacacaccatcagaattcaatattcacctgccagactggcttatcaagacaaaggtgtccttcataatgaagttaaagtgagtatactgtggagaggacttccaaatgtggttacctcagctatatcactgcccaacatcagaaaacctgacggctatgattactatgccttttctaaagatcaatactataacattgatgtgcctagtagaacagcaagagcaattactactcgttctgggcagaccttatccaaagtctggtacaactgtccttagactgatgagcaaaggaggagtcaactaatgaagaaatgaataataaattttgacactgaaaaacattttattaataaagaatattgacatgagtataccagtttatatataaaaatgtttttaaacttgacaatcattacactaaaacagatttgataatcttattcacagttgttattgtttacagaccatttaattaatatttcctctgtttattcctcctctccctcccattgcatggctcacacctgtaaaagaaaaaagaatcaaattgaatatatcttttaagaattcaaaactagtgtattcacttaccctagttcattataaaaaatatctaggcattgtggatataaaactgttgggtattctacaacttcaatggaaattattacaagcagattaatccctctttttgtgacacaagtacaatctaaaagttatattggaaaacatggaaatattaaaattttacacttttactagctaaaacataatcacaaagctttatcgtgttgtataaaaaaattaacaatataatggcaataggtagagatacaacaaatgaatataacactataacacttcatattttccaaatcttaatttggatttaaggaagaaatcaataaatataaaatataagcacatatttattatatatctaaggtatacaaatctgtctacatgaagtttacagattggtaaatatcacctgctcaacatgtaattatttaataaaactttggaacattaaaaaaataaattggaggcttaaggatta

SEQ ID NO: 45693 - DNA, 4092 bp, Artificial Sequence
  derived and/or modified sequence
atggcctggaagaccctgcccatctacctgctgctgctgctgagcgtgttcgtgatccagcaggtgagcagccaggagctgagctgcaagggcagatgcttcgagagcttcgagagaggcagagagtgcgactgcgacgcccagtgcaagaagtacgacaagtgctgccccgactacgagagcttctgcgccgaggtgcacaaccccaccagcccccccagcagcaagaaggcccccccccccagcggcgccagccagaccatcaagagcaccaccaagagaagccccaagccccccaacaagaagaagaccaagaaggtgatcgagagcgaggagatcaccgaggagcacagcgtgagcgagaaccaggagagcagcagcagcagcagcagcagcagcagcagcagcaccatcagaaagatcaagagcagcaagaacagcgccgccaacagagagctgcagaagaagctgaaggtgaaggacaacaagaagaacagaaccaagaagaagcccacccccaagccccccgtggtggacgaggccggcagcggcctggacaacggcgacttcaaggtgaccacccccgacaccagcaccacccagcacaacaaggtgagcaccagccccaagatcaccaccgccaagcccatcaaccccagacccagcctgccccccaacagcgacaccagcaaggagaccagcctgaccgtgaacaaggagaccaccgtggagaccaaggagaccaccaccaccaacaagcagaccagcaccgacggcaaggagaagaccaccagcgccaaggagacccagagcatcgagaagaccagcgccaaggacctggcccccaccagcaaggtgctggccaagcccacccccaaggccgagaccaccaccaagggccccgccctgaccacccccaaggagcccacccccaccacccccaaggagcccgccagcaccacccccaaggagcccacccccaccaccatcaagagcgcccccaccacccccaaggagcccgcccccaccaccaccaagagcgcccccaccacccccaaggagcccgcccccaccaccaccaaggagcccgcccccaccacccccaaggagcccgcccccaccaccaccaaggagcccgcccccaccaccaccaagagcgcccccaccacccccaaggagcccgcccccaccacccccaagaagcccgcccccaccacccccaaggagcccgcccccaccacccccaaggagcccacccccaccacccccaaggagcccgcccccaccaccaaggagcccgcccccaccacccccaaggagcccgcccccaccgcccccaagaagcccgcccccaccacccccaaggagcccgcccccaccacccccaaggagcccgcccccaccaccaccaaggagcccagccccaccacccccaaggagcccgcccccaccaccaccaagagcgcccccaccaccaccaaggagcccgcccccaccaccaccaagagcgcccccaccacccccaaggagcccagccccaccaccaccaaggagcccgcccccaccacccccaaggagcccgcccccaccacccccaagaagcccgcccccaccacccccaaggagcccgcccccaccacccccaaggagcccgcccccaccaccaccaagaagcccgcccccaccacccccaaggagcccgcccccaccacccccaaggagaccgcccccaccacccccaagaagctgacccccaccacccccgagaagctggcccccaccacccccgagaagcccgcccccaccacccccgaggagctggcccccaccacccccgaggagcccacccccaccacccccgaggagcccgcccccaccacccccaaggccgccgcccccaacacccccaaggagcccgcccccaccacccccaaggagcccgcccccaccacccccaaggagcccgcccccaccacccccaaggagaccgcccccaccacccccaagggcaccgcccccaccaccctgaaggagcccgcccccaccacccccaagaagcccgcccccaaggagctggcccccaccaccaccaaggagcccaccagcaccacctgcgacaagcccgcccccaccacccccaagggcaccgcccccaccacccccaaggagcccgcccccaccacccccaaggagcccgcccccaccacccccaagggcaccgcccccaccaccctgaaggagcccgcccccaccacccccaagaagcccgcccccaaggagctggcccccaccaccaccaagggccccaccagcaccaccagcgacaagcccgcccccaccacccccaaggagaccgcccccaccacccccaaggagcccgcccccaccacccccaagaagcccgcccccaccacccccgagacccccccccccaccaccagcgaggtgagcacccccaccaccaccaaggagcccaccaccatccacaagagccccgacgagagcacccccgagctgagcgccgagcccacccccaaggccctggagaacagccccaaggagcccggcgtgcccaccaccaagacccccgccgccaccaagcccgagatgaccaccaccgccaaggacaagaccaccgagagagacctgagaaccacccccgagaccaccaccgccgcccccaagatgaccaaggagaccgccaccaccaccgagaagaccaccgagagcaagatcaccgccaccaccacccaggtgaccagcaccaccacccaggacaccacccccttcaagatcaccaccctgaagaccaccaccctggcccccaaggtgaccaccaccaagaagaccatcaccaccaccgagatcatgaacaagcccgaggagaccgccaagcccaaggacagagccaccaacagcaaggccaccacccccaagccccagaagcccaccaaggcccccaagaagcccaccagcaccaagaagcccaagaccatgcccagagtgagaaagcccaagaccacccccacccccagaaagatgaccagcaccatgcccgagctgaaccccaccagcagaatcgccgaggccatgctgcagaccaccaccagacccaaccagacccccaacagcaagctggtggaggtgaaccccaagagcgaggacgccggcggcgccgagggcgagaccccccacatgctgctgagaccccacgtgttcatgcccgaggtgacccccgacatggactacctgcccagagtgcccaaccagggcatcatcatcaaccccatgctgagcgacgagaccaacatctgcaacggcaagcccgtggacggcctgaccaccctgagaaacggcaccctggtggccttcagaggccactacttctggatgctgagccccttcagcccccccagccccgccagaagaatcaccgaggtgtggggcatccccagccccatcgacaccgtgttcaccagatgcaactgcgagggcaagaccttcttcttcaaggacagccagtactggagattcaccaacgacatcaaggacgccggctaccccaagcccatcttcaagggcttcggcggcctgaccggccagatcgtggccgccctgagcaccgccaagtacaagaactggcccgagagcgtgtacttcttcaagagaggcggcagcatccagcagtacatctacaagcaggagcccgtgcagaagtgccccggcagaagacccgccctgaactaccccgtgtacggcgagaccacccaggtgagaagaagaagattcgagagagccatcggccccagccagacccacaccatcagaatccagtacagccccgccagactggcctaccaggacaagggcgtgctgcacaacgaggtgaaggtgagcatcctgtggagaggcctgcccaacgtggtgaccagcgccatcagcctgcccaacatcagaaagcccgacggctacgactactacgccttcagcaaggaccagtactacaacatcgacgtgcccagcagaaccgccagagccatcaccaccagaagcggccagaccctgagcaaggtgtggtacaactgcccctag

SEQ ID NO: 45694 - DNA, 2802 bp, Artificial Sequence
  derived and/or modified sequence
atggcctggaagaccctgcccatctacctgctgctgctgctgagcgtgttcgtgatccagcaggtgagcagccaggagctgagctgcaagggcagatgcttcgagagcttcgagagaggcagagagtgcgactgcgacgcccagtgcaagaagtacgacaagtgctgccccgactacgagagcttctgcgccgaggtgcacaaccccaccagcccccccagcagcaagaaggcccccccccccagcggcgccagccagaccatcaagagcaccaccaagagaagccccaagccccccaacaagaagaagaccaagaaggtgatcgagagcgaggagatcaccgaggagcacagcgtgagcgagaaccaggagagcagcagcagcagcagcagcagcagcagcagcagcaccatcagaaagatcaagagcagcaagaacagcgccgccaacagagagctgcagaagaagctgaaggtgaaggacaacaagaagaacagaaccaagaagaagcccacccccaagccccccgtggtggacgaggccggcagcggcctggacaacggcgacttcaaggtgaccacccccgacaccagcaccacccagcacaacaaggtgagcaccagccccaagatcaccaccgccaagcccatcaaccccagacccagcctgccccccaacagcgacaccagcaaggagaccagcctgaccgtgaacaaggagaccaccgtggagaccaaggagaccaccaccaccaacaagcagaccagcaccgacggcaaggagaagaccaccagcgccaaggagacccagagcatcgagaagaccagcgccaaggacctggcccccaccagcaaggtgctggccaagcccacccccaaggccgagaccaccaccaagggccccgccctgaccacccccaaggagcccacccccaccacccccaaggagcccgccagcaccacccccaaggagcccacccccaccaccatcaagagcgcccccaccacccccaaggagcccgcccccaccaccaccaagagcgcccccaccacccccaaggagcccgcccccaccaccaccaaggagcccgcccccaccacccccaagaagcccgcccccaccacccccgagacccccccccccaccaccagcgaggtgagcacccccaccaccaccaaggagcccaccaccatccacaagagccccgacgagagcacccccgagctgagcgccgagcccacccccaaggccctggagaacagccccaaggagcccggcgtgcccaccaccaagacccccgccgccaccaagcccgagatgaccaccaccgccaaggacaagaccaccgagagagacctgagaaccacccccgagaccaccaccgccgcccccaagatgaccaaggagaccgccaccaccaccgagaagaccaccgagagcaagatcaccgccaccaccacccaggtgaccagcaccaccacccaggacaccacccccttcaagatcaccaccctgaagaccaccaccctggcccccaaggtgaccaccaccaagaagaccatcaccaccaccgagatcatgaacaagcccgaggagaccgccaagcccaaggacagagccaccaacagcaaggccaccacccccaagccccagaagcccaccaaggcccccaagaagcccaccagcaccaagaagcccaagaccatgcccagagtgagaaagcccaagaccacccccacccccagaaagatgaccagcaccatgcccgagctgaaccccaccagcagaatcgccgaggccatgctgcagaccaccaccagacccaaccagacccccaacagcaagctggtggaggtgaaccccaagagcgaggacgccggcggcgccgagggcgagaccccccacatgctgctgagaccccacgtgttcatgcccgaggtgacccccgacatggactacctgcccagagtgcccaaccagggcatcatcatcaaccccatgctgagcgacgagaccaacatctgcaacggcaagcccgtggacggcctgaccaccctgagaaacggcaccctggtggccttcagaggccactacttctggatgctgagccccttcagcccccccagccccgccagaagaatcaccgaggtgtggggcatccccagccccatcgacaccgtgttcaccagatgcaactgcgagggcaagaccttcttcttcaaggacagccagtactggagattcaccaacgacatcaaggacgccggctaccccaagcccatcttcaagggcttcggcggcctgaccggccagatcgtggccgccctgagcaccgccaagtacaagaactggcccgagagcgtgtacttcttcaagagaggcggcagcatccagcagtacatctacaagcaggagcccgtgcagaagtgccccggcagaagacccgccctgaactaccccgtgtacggcgagaccacccaggtgagaagaagaagattcgagagagccatcggccccagccagacccacaccatcagaatccagtacagccccgccagactggcctaccaggacaagggcgtgctgcacaacgaggtgaaggtgagcatcctgtggagaggcctgcccaacgtggtgaccagcgccatcagcctgcccaacatcagaaagcccgacggctacgactactacgccttcagcaaggaccagtactacaacatcgacgtgcccagcagaaccgccagagccatcaccaccagaagcggccagaccctgagcaaggtgtggtacaactgcccctag

SEQ ID NO: 45695 - DNA, 3936 bp, Artificial Sequence
  derived and/or modified sequence
atggcctggaagaccctgcccatctacctgctgctgctgctgagcgtgttcgtgatccagcaggtgagcagccaggacctgagcagctgcgccggcagatgcggcgagggctacagcagagacgccacctgcaactgcgactacaactgccagcactacatggagtgctgccccgacttcaagagagtgtgcaccgccgagctgagctgcaagggcagatgcttcgagagcttcgagagaggcagagagtgcgactgcgacgcccagtgcaagaagtacgacaagtgctgccccgactacgagagcttctgcgccgaggtgaaggacaacaagaagaacagaaccaagaagaagcccacccccaagccccccgtggtggacgaggccggcagcggcctggacaacggcgacttcaaggtgaccacccccgacaccagcaccacccagcacaacaaggtgagcaccagccccaagatcaccaccgccaagcccatcaaccccagacccagcctgccccccaacagcgacaccagcaaggagaccagcctgaccgtgaacaaggagaccaccgtggagaccaaggagaccaccaccaccaacaagcagaccagcaccgacggcaaggagaagaccaccagcgccaaggagacccagagcatcgagaagaccagcgccaaggacctggcccccaccagcaaggtgctggccaagcccacccccaaggccgagaccaccaccaagggccccgccctgaccacccccaaggagcccacccccaccacccccaaggagcccgccagcaccacccccaaggagcccacccccaccaccatcaagagcgcccccaccacccccaaggagcccgcccccaccaccaccaagagcgcccccaccacccccaaggagcccgcccccaccaccaccaaggagcccgcccccaccacccccaaggagcccgcccccaccaccaccaaggagcccgcccccaccaccaccaagagcgcccccaccacccccaaggagcccgcccccaccacccccaagaagcccgcccccaccacccccaaggagcccgcccccaccacccccaaggagcccacccccaccacccccaaggagcccgcccccaccaccaaggagcccgcccccaccacccccaaggagcccgcccccaccgcccccaagaagcccgcccccaccacccccaaggagcccgcccccaccacccccaaggagcccgcccccaccaccaccaaggagcccagccccaccacccccaaggagcccgcccccaccaccaccaagagcgcccccaccaccaccaaggagcccgcccccaccaccaccaagagcgcccccaccacccccaaggagcccagccccaccaccaccaaggagcccgcccccaccacccccaaggagcccgcccccaccacccccaagaagcccgcccccaccacccccaaggagcccgcccccaccacccccaaggagcccgcccccaccaccaccaagaagcccgcccccaccacccccaaggagcccgcccccaccacccccaaggagaccgcccccaccacccccaagaagctgacccccaccacccccgagaagctggcccccaccacccccgagaagcccgcccccaccacccccgaggagctggcccccaccacccccgaggagcccacccccaccacccccgaggagcccgcccccaccacccccaaggccgccgcccccaacacccccaaggagcccgcccccaccacccccaaggagcccgcccccaccacccccaaggagcccgcccccaccacccccaaggagaccgcccccaccacccccaagggcaccgcccccaccaccctgaaggagcccgcccccaccacccccaagaagcccgcccccaaggagctggcccccaccaccaccaaggagcccaccagcaccacctgcgacaagcccgcccccaccacccccaagggcaccgcccccaccacccccaaggagcccgcccccaccacccccaaggagcccgcccccaccacccccaagggcaccgcccccaccaccctgaaggagcccgcccccaccacccccaagaagcccgcccccaaggagctggcccccaccaccaccaagggccccaccagcaccaccagcgacaagcccgcccccaccacccccaaggagaccgcccccaccacccccaaggagcccgcccccaccacccccaagaagcccgcccccaccacccccgagacccccccccccaccaccagcgaggtgagcacccccaccaccaccaaggagcccaccaccatccacaagagccccgacgagagcacccccgagctgagcgccgagcccacccccaaggccctggagaacagccccaaggagcccggcgtgcccaccaccaagacccccgccgccaccaagcccgagatgaccaccaccgccaaggacaagaccaccgagagagacctgagaaccacccccgagaccaccaccgccgcccccaagatgaccaaggagaccgccaccaccaccgagaagaccaccgagagcaagatcaccgccaccaccacccaggtgaccagcaccaccacccaggacaccacccccttcaagatcaccaccctgaagaccaccaccctggcccccaaggtgaccaccaccaagaagaccatcaccaccaccgagatcatgaacaagcccgaggagaccgccaagcccaaggacagagccaccaacagcaaggccaccacccccaagccccagaagcccaccaaggcccccaagaagcccaccagcaccaagaagcccaagaccatgcccagagtgagaaagcccaagaccacccccacccccagaaagatgaccagcaccatgcccgagctgaaccccaccagcagaatcgccgaggccatgctgcagaccaccaccagacccaaccagacccccaacagcaagctggtggaggtgaaccccaagagcgaggacgccggcggcgccgagggcgagaccccccacatgctgctgagaccccacgtgttcatgcccgaggtgacccccgacatggactacctgcccagagtgcccaaccagggcatcatcatcaaccccatgctgagcgacgagaccaacatctgcaacggcaagcccgtggacggcctgaccaccctgagaaacggcaccctggtggccttcagaggccactacttctggatgctgagccccttcagcccccccagccccgccagaagaatcaccgaggtgtggggcatccccagccccatcgacaccgtgttcaccagatgcaactgcgagggcaagaccttcttcttcaaggacagccagtactggagattcaccaacgacatcaaggacgccggctaccccaagcccatcttcaagggcttcggcggcctgaccggccagatcgtggccgccctgagcaccgccaagtacaagaactggcccgagagcgtgtacttcttcaagagaggcggcagcatccagcagtacatctacaagcaggagcccgtgcagaagtgccccggcagaagacccgccctgaactaccccgtgtacggcgagaccacccaggtgagaagaagaagattcgagagagccatcggccccagccagacccacaccatcagaatccagtacagccccgccagactggcctaccaggacaagggcgtgctgcacaacgaggtgaaggtgagcatcctgtggagaggcctgcccaacgtggtgaccagcgccatcagcctgcccaacatcagaaagcccgacggctacgactactacgccttcagcaaggaccagtactacaacatcgacgtgcccagcagaaccgccagagccatcaccaccagaagcggccagaccctgagcaaggtgtggtacaactgcccctag

SEQ ID NO: 45696 - DNA, 4086 bp, Artificial Sequence
  derived and/or modified sequence
atggcctggaagaccctgcccatctacctgctgctgctgctgagcgtgttcgtgatccagcaggtgagcagccaggacctgagcagctgcgccggcagatgcggcgagggctacagcagagacgccacctgcaactgcgactacaactgccagcactacatggagtgctgccccgacttcaagagagtgtgcaccgccgagctgagctgcaagggcagatgcttcgagagcttcgagagaggcagagagtgcgactgcgacgcccagtgcaagaagtacgacaagtgctgccccgactacgagagcttctgcgccgaggtgcacaaccccaccagcccccccagcagcaagaaggcccccccccccagcggcgccagccagaccatcaagagcaccaccaagagaagccccaagccccccaacaagaagaagaccaagaaggtgatcgagagcgaggagatcaccgaggtgaaggacaacaagaagaacagaaccaagaagaagcccacccccaagccccccgtggtggacgaggccggcagcggcctggacaacggcgacttcaaggtgaccacccccgacaccagcaccacccagcacaacaaggtgagcaccagccccaagatcaccaccgccaagcccatcaaccccagacccagcctgccccccaacagcgacaccagcaaggagaccagcctgaccgtgaacaaggagaccaccgtggagaccaaggagaccaccaccaccaacaagcagaccagcaccgacggcaaggagaagaccaccagcgccaaggagacccagagcatcgagaagaccagcgccaaggacctggcccccaccagcaaggtgctggccaagcccacccccaaggccgagaccaccaccaagggccccgccctgaccacccccaaggagcccacccccaccacccccaaggagcccgccagcaccacccccaaggagcccacccccaccaccatcaagagcgcccccaccacccccaaggagcccgcccccaccaccaccaagagcgcccccaccacccccaaggagcccgcccccaccaccaccaaggagcccgcccccaccacccccaaggagcccgcccccaccaccaccaaggagcccgcccccaccaccaccaagagcgcccccaccacccccaaggagcccgcccccaccacccccaagaagcccgcccccaccacccccaaggagcccgcccccaccacccccaaggagcccacccccaccacccccaaggagcccgcccccaccaccaaggagcccgcccccaccacccccaaggagcccgcccccaccgcccccaagaagcccgcccccaccacccccaaggagcccgcccccaccacccccaaggagcccgcccccaccaccaccaaggagcccagccccaccacccccaaggagcccgcccccaccaccaccaagagcgcccccaccaccaccaaggagcccgcccccaccaccaccaagagcgcccccaccacccccaaggagcccagccccaccaccaccaaggagcccgcccccaccacccccaaggagcccgcccccaccacccccaagaagcccgcccccaccacccccaaggagcccgcccccaccacccccaaggagcccgcccccaccaccaccaagaagcccgcccccaccacccccaaggagcccgcccccaccacccccaaggagaccgcccccaccacccccaagaagctgacccccaccacccccgagaagctggcccccaccacccccgagaagcccgcccccaccacccccgaggagctggcccccaccacccccgaggagcccacccccaccacccccgaggagcccgcccccaccacccccaaggccgccgcccccaacacccccaaggagcccgcccccaccacccccaaggagcccgcccccaccacccccaaggagcccgcccccaccacccccaaggagaccgcccccaccacccccaagggcaccgcccccaccaccctgaaggagcccgcccccaccacccccaagaagcccgcccccaaggagctggcccccaccaccaccaaggagcccaccagcaccacctgcgacaagcccgcccccaccacccccaagggcaccgcccccaccacccccaaggagcccgcccccaccacccccaaggagcccgcccccaccacccccaagggcaccgcccccaccaccctgaaggagcccgcccccaccacccccaagaagcccgcccccaaggagctggcccccaccaccaccaagggccccaccagcaccaccagcgacaagcccgcccccaccacccccaaggagaccgcccccaccacccccaaggagcccgcccccaccacccccaagaagcccgcccccaccacccccgagacccccccccccaccaccagcgaggtgagcacccccaccaccaccaaggagcccaccaccatccacaagagccccgacgagagcacccccgagctgagcgccgagcccacccccaaggccctggagaacagccccaaggagcccggcgtgcccaccaccaagacccccgccgccaccaagcccgagatgaccaccaccgccaaggacaagaccaccgagagagacctgagaaccacccccgagaccaccaccgccgcccccaagatgaccaaggagaccgccaccaccaccgagaagaccaccgagagcaagatcaccgccaccaccacccaggtgaccagcaccaccacccaggacaccacccccttcaagatcaccaccctgaagaccaccaccctggcccccaaggtgaccaccaccaagaagaccatcaccaccaccgagatcatgaacaagcccgaggagaccgccaagcccaaggacagagccaccaacagcaaggccaccacccccaagccccagaagcccaccaaggcccccaagaagcccaccagcaccaagaagcccaagaccatgcccagagtgagaaagcccaagaccacccccacccccagaaagatgaccagcaccatgcccgagctgaaccccaccagcagaatcgccgaggccatgctgcagaccaccaccagacccaaccagacccccaacagcaagctggtggaggtgaaccccaagagcgaggacgccggcggcgccgagggcgagaccccccacatgctgctgagaccccacgtgttcatgcccgaggtgacccccgacatggactacctgcccagagtgcccaaccagggcatcatcatcaaccccatgctgagcgacgagaccaacatctgcaacggcaagcccgtggacggcctgaccaccctgagaaacggcaccctggtggccttcagaggccactacttctggatgctgagccccttcagcccccccagccccgccagaagaatcaccgaggtgtggggcatccccagccccatcgacaccgtgttcaccagatgcaactgcgagggcaagaccttcttcttcaaggacagccagtactggagattcaccaacgacatcaaggacgccggctaccccaagcccatcttcaagggcttcggcggcctgaccggccagatcgtggccgccctgagcaccgccaagtacaagaactggcccgagagcgtgtacttcttcaagagaggcggcagcatccagcagtacatctacaagcaggagcccgtgcagaagtgccccggcagaagacccgccctgaactaccccgtgtacggcgagaccacccaggtgagaagaagaagattcgagagagccatcggccccagccagacccacaccatcagaatccagtacagccccgccagactggcctaccaggacaagggcgtgctgcacaacgaggtgaaggtgagcatcctgtggagaggcctgcccaacgtggtgaccagcgccatcagcctgcccaacatcagaaagcccgacggctacgactactacgccttcagcaaggaccagtactacaacatcgacgtgcccagcagaaccgccagagccatcaccaccagaagcggccagaccctgagcaaggtgtggtacaactgcccctag

SEQ ID NO: 45697 - DNA, 4215 bp, Artificial Sequence
  derived and/or modified sequence
atggcctggaagaccctgcccatctacctgctgctgctgctgagcgtgttcgtgatccagcaggtgagcagccaggacctgagcagctgcgccggcagatgcggcgagggctacagcagagacgccacctgcaactgcgactacaactgccagcactacatggagtgctgccccgacttcaagagagtgtgcaccgccgagctgagctgcaagggcagatgcttcgagagcttcgagagaggcagagagtgcgactgcgacgcccagtgcaagaagtacgacaagtgctgccccgactacgagagcttctgcgccgaggtgcacaaccccaccagcccccccagcagcaagaaggcccccccccccagcggcgccagccagaccatcaagagcaccaccaagagaagccccaagccccccaacaagaagaagaccaagaaggtgatcgagagcgaggagatcaccgaggagcacagcgtgagcgagaaccaggagagcagcagcagcagcagcagcagcagcagcagcagcaccatcagaaagatcaagagcagcaagaacagcgccgccaacagagagctgcagaagaagctgaaggtgaaggacaacaagaagaacagaaccaagaagaagcccacccccaagccccccgtggtggacgaggccggcagcggcctggacaacggcgacttcaaggtgaccacccccgacaccagcaccacccagcacaacaaggtgagcaccagccccaagatcaccaccgccaagcccatcaaccccagacccagcctgccccccaacagcgacaccagcaaggagaccagcctgaccgtgaacaaggagaccaccgtggagaccaaggagaccaccaccaccaacaagcagaccagcaccgacggcaaggagaagaccaccagcgccaaggagacccagagcatcgagaagaccagcgccaaggacctggcccccaccagcaaggtgctggccaagcccacccccaaggccgagaccaccaccaagggccccgccctgaccacccccaaggagcccacccccaccacccccaaggagcccgccagcaccacccccaaggagcccacccccaccaccatcaagagcgcccccaccacccccaaggagcccgcccccaccaccaccaagagcgcccccaccacccccaaggagcccgcccccaccaccaccaaggagcccgcccccaccacccccaaggagcccgcccccaccaccaccaaggagcccgcccccaccaccaccaagagcgcccccaccacccccaaggagcccgcccccaccacccccaagaagcccgcccccaccacccccaaggagcccgcccccaccacccccaaggagcccacccccaccacccccaaggagcccgcccccaccaccaaggagcccgcccccaccacccccaaggagcccgcccccaccgcccccaagaagcccgcccccaccacccccaaggagcccgcccccaccacccccaaggagcccgcccccaccaccaccaaggagcccagccccaccacccccaaggagcccgcccccaccaccaccaagagcgcccccaccaccaccaaggagcccgcccccaccaccaccaagagcgcccccaccacccccaaggagcccagccccaccaccaccaaggagcccgcccccaccacccccaaggagcccgcccccaccacccccaagaagcccgcccccaccacccccaaggagcccgcccccaccacccccaaggagcccgcccccaccaccaccaagaagcccgcccccaccacccccaaggagcccgcccccaccacccccaaggagaccgcccccaccacccccaagaagctgacccccaccacccccgagaagctggcccccaccacccccgagaagcccgcccccaccacccccgaggagctggcccccaccacccccgaggagcccacccccaccacccccgaggagcccgcccccaccacccccaaggccgccgcccccaacacccccaaggagcccgcccccaccacccccaaggagcccgcccccaccacccccaaggagcccgcccccaccacccccaaggagaccgcccccaccacccccaagggcaccgcccccaccaccctgaaggagcccgcccccaccacccccaagaagcccgcccccaaggagctggcccccaccaccaccaaggagcccaccagcaccacctgcgacaagcccgcccccaccacccccaagggcaccgcccccaccacccccaaggagcccgcccccaccacccccaaggagcccgcccccaccacccccaagggcaccgcccccaccaccctgaaggagcccgcccccaccacccccaagaagcccgcccccaaggagctggcccccaccaccaccaagggccccaccagcaccaccagcgacaagcccgcccccaccacccccaaggagaccgcccccaccacccccaaggagcccgcccccaccacccccaagaagcccgcccccaccacccccgagacccccccccccaccaccagcgaggtgagcacccccaccaccaccaaggagcccaccaccatccacaagagccccgacgagagcacccccgagctgagcgccgagcccacccccaaggccctggagaacagccccaaggagcccggcgtgcccaccaccaagacccccgccgccaccaagcccgagatgaccaccaccgccaaggacaagaccaccgagagagacctgagaaccacccccgagaccaccaccgccgcccccaagatgaccaaggagaccgccaccaccaccgagaagaccaccgagagcaagatcaccgccaccaccacccaggtgaccagcaccaccacccaggacaccacccccttcaagatcaccaccctgaagaccaccaccctggcccccaaggtgaccaccaccaagaagaccatcaccaccaccgagatcatgaacaagcccgaggagaccgccaagcccaaggacagagccaccaacagcaaggccaccacccccaagccccagaagcccaccaaggcccccaagaagcccaccagcaccaagaagcccaagaccatgcccagagtgagaaagcccaagaccacccccacccccagaaagatgaccagcaccatgcccgagctgaaccccaccagcagaatcgccgaggccatgctgcagaccaccaccagacccaaccagacccccaacagcaagctggtggaggtgaaccccaagagcgaggacgccggcggcgccgagggcgagaccccccacatgctgctgagaccccacgtgttcatgcccgaggtgacccccgacatggactacctgcccagagtgcccaaccagggcatcatcatcaaccccatgctgagcgacgagaccaacatctgcaacggcaagcccgtggacggcctgaccaccctgagaaacggcaccctggtggccttcagaggccactacttctggatgctgagccccttcagcccccccagccccgccagaagaatcaccgaggtgtggggcatccccagccccatcgacaccgtgttcaccagatgcaactgcgagggcaagaccttcttcttcaaggacagccagtactggagattcaccaacgacatcaaggacgccggctaccccaagcccatcttcaagggcttcggcggcctgaccggccagatcgtggccgccctgagcaccgccaagtacaagaactggcccgagagcgtgtacttcttcaagagaggcggcagcatccagcagtacatctacaagcaggagcccgtgcagaagtgccccggcagaagacccgccctgaactaccccgtgtacggcgagaccacccaggtgagaagaagaagattcgagagagccatcggccccagccagacccacaccatcagaatccagtacagccccgccagactggcctaccaggacaagggcgtgctgcacaacgaggtgaaggtgagcatcctgtggagaggcctgcccaacgtggtgaccagcgccatcagcctgcccaacatcagaaagcccgacggctacgactactacgccttcagcaaggaccagtactacaacatcgacgtgcccagcagaaccgccagagccatcaccaccagaagcggccagaccctgagcaaggtgtggtacaactgcccctag

SEQ ID NO: 45698 - protein, 553 aa, Artificial Sequence
  derived and/or modified sequence
MAKNRRDRNSWGGFSEKTYEWSSEEEEPVKKAGPVQVLIVKDDHSFELDETALNRILLSEAVRDKEVVAVSVAGAFRKGKSFLMDFMLRYMYNQESVDWVGDYNEPLTGFSWRGGSERETTGIQIWSEIFLINKPDGKKVAVLLMDTQGTFDSQSTLRDSATVFALSTMISSIQVYNLSQNVQEDDLQHLQLFTEYGRLAMEETFLKPFQSLIFLVRDWSFPYEFSYGADGGAKFLEKRLKVSGNQHEELQNVRKHIHSCFTNISCFLLPHPGLKVATNPNFDGKLKEIDDEFIKNLKILIPWLLSPESLDIKEINGNKITCRGLVEYFKAYIKIYQGEELPHPKSMLQATAEANNLAAVATAKDTYNKKMEEICGGDKPFLAPNDLQTKHLQLKEESVKLFRGVKKMGGEEFSRRYLQQLESEIDELYIQYIKHNDSKNIFHAARTPATLFVVIFITYVIAGVTGFIGLDIIASLCNMIMGLTLITLCTWAYIRYSGEYRELGAVIDQVAAALWDQALYKLYSAAATHRHLYHQAFPTPKSESTEQSEKKKM

SEQ ID NO: 45699 - protein, 29 aa, Artificial Sequence
  derived and/or modified sequence
MAKNRRDRNSWGGFSEKTYEWSSEEEEPV

SEQ ID NO: 45700 - protein, 100 aa, Artificial Sequence
  derived and/or modified sequence
MAKNRRDRNSWGGFSEKTYEWSSEEEEPVKKAGPVQVLIVKDDHSFELDETALNRILLSEAVRDKEVVAVSVAGAFRKGKSFLMDFMLRYMYNQESVDWV

SEQ ID NO: 45701 - DNA, 1662 bp, Artificial Sequence
  derived and/or modified sequence
atggccaagaatcggcgagatcgtaacagctggggaggctttagcgagaaaacgtatgagtggtcaagcgaagaagaggaaccagtgaagaaggctggccccgtgcaggtgctgatcgtcaaggacgaccactcttttgaactcgatgagacggccctgaatcggatcctgctctcagaggctgtgcgcgataaggaggtagtggccgtgtctgttgctggcgcttttaggaaagggaaaagtttcttgatggacttcatgcttcgttacatgtacaatcaggagtctgttgattgggtgggagactacaacgagcccttgactggattcagctggagaggtggcagcgagcgagaaaccacaggtatacagatctggtccgagatatttctgataaataaacctgatgggaagaaagtcgccgtgttgctaatggacacacagggaactttcgactcacagtccacccttcgcgattcagccaccgtgtttgcactgtctacaatgatctcgtcaatccaggtgtacaacttatcgcagaatgtgcaagaggacgatctccaacatctccagctgtttacggaatacggacgccttgccatggaggagacattcctaaagccatttcagagccttattttcctggtgcgggactggagcttcccctatgagttttcttatggcgcggacgggggagctaagtttctggagaagcgcttaaaagtgtccggaaatcagcacgaggaactgcagaacgtgagaaaacacatccactcttgctttacaaacattagctgtttcctgctccctcaccccggccttaaggtcgcgacaaacccaaattttgacggaaagcttaaggagattgacgacgaattcatcaaaaacctgaagattctgatcccatggttgctcagtcctgaatccttagacattaaggagatcaacggaaacaaaatcacctgccgcggactggtagagtactttaaggcatacataaagatctaccaaggcgaagaacttccccaccctaagtcaatgcttcaagctaccgccgaggcgaacaatctcgccgctgtggcgacagccaaggacacttacaataagaagatggaagagatatgcggcggagataagcctttcctggcccccaacgaccttcagacaaaacatctgcagctaaaagaggagtccgtgaaacttttcagaggggtgaaaaaaatgggcggtgaagagtttagtcgccggtacctgcagcagttagaaagcgagattgatgaattgtacatacaatatataaagcataacgattccaaaaacatcttccacgcagccagaacaccagccactctcttcgtcgtcatttttattacctatgttattgccggcgttaccgggtttatcggcctggacattattgcatctctgtgtaacatgattatgggactgacactgatcacactgtgcacatgggcatatatccggtacagcggggagtaccgcgaacttggagccgtcatcgatcaagtcgcagctgcattatgggaccaagccttgtataagctctactctgcagctgcaacacaccgacacctgtaccatcaggcttttcccacaccaaaatctgagtcaacggaacagagcgagaagaagaagatgtag

SEQ ID NO: 45702 - DNA, 1662 bp, Artificial Sequence
  derived and/or modified sequence
atggcgaaaaaccggcgcgacagaaattcttggggcggcttctcagaaaagacctacgaatggagctctgaggaggaagagcccgtcaagaaggcagggcctgttcaggtcctgatcgtcaaggatgaccattctttcgaactggacgaaacagctttgaatcgcattctgctgtcagaggctgtgcgagataaagaggtcgtggccgtgtctgtagcaggagcttttcgaaagggcaagtcattcctgatggactttatgttgcgctacatgtacaatcaagaatctgtagattgggtgggggactataacgaaccattgaccggattctcttggagaggcggctcggaaagggagactaccgggatccagatttggtctgagattttccttattaataaacctgatggcaagaaggtggctgtgctgcttatggatacacagggtaccttcgactctcagtccaccctaagggacagtgcaaccgtgttcgccctatctaccatgatatcatccatccaggtctataatctgtctcagaatgtgcaagaagatgacttacagcacctgcagttatttactgaatatggtcgcctggccatggaggaaaccttccttaagcctttccagagccttatcttcctcgtgcgggattggagtttcccatacgaattcagctacggtgcggacggaggcgcaaagttcctcgaaaaacggctaaaggtcagtggaaaccagcacgaggaactgcagaacgtgaggaaacatatccacagttgcttcactaacatcagctgttttttactgcctcacccggggttaaaagtcgctaccaatccgaacttcgatggcaaattgaaagaaatcgacgatgagtttattaagaacttgaaaatcctgatcccttggctcttgtcaccagagtccctggatatcaaagagatcaatggcaataagattacctgcaggggactggtagaatatttcaaagcctacatcaagatctaccagggtgaggagttgccacacccgaaatctatgctgcaggcaacggcggaagcaaataatcttgccgcagtggcgacggcaaaggatacttataacaagaagatggaggagatctgcggaggagacaaaccttttttggctccaaatgatctgcagaccaagcacctgcagctgaaagaggaaagtgtcaagctgttccgtggtgttaagaaaatgggcggagaggagtttagccgacgatatctacagcagctggaatccgaaattgacgagctgtatattcagtacattaagcataacgatagcaaaaacatatttcacgccgcacggacccctgcgacgttatttgtggtgatctttattacttacgtaattgccggggttacaggttttatcggcctggacataatagcctcactgtgcaacatgatcatgggtcttacactgataacgctttgtacatgggcctatatcagatatagcggagaataccgcgagctcggtgccgtcatcgaccaagtcgctgccgctctgtgggatcaggcactgtacaagctgtattccgccgcagctacacaccgtcacctatatcaccaagcattccctaccccaaagtccgagtccaccgagcaatccgagaaaaagaagatgtag

SEQ ID NO: 45703 - DNA, 303 bp, Artificial Sequence
  derived and/or modified sequence
atggcaaaaaaccgacgcgatcggaactcgtggggcggattctccgagaaaacctatgaatggtcatctgaagaggaagagccagttaagaaagcaggaccggtccaggtgctgatcgtcaaagacgaccactcctttgagctcgacgagactgcattgaacaggatcctcctgtccgaagcggtgcgcgacaaggaggtggttgcagtctctgtggctggcgcatttcggaaggggaaatctttcctgatggacttcatgctgcgctacatgtataaccaggagtcggtcgactgggtgtag

SEQ ID NO: 45704 - DNA, 1662 bp, Artificial Sequence
  derived and/or modified sequence
atggccaagaacagaagagacaggaacagctggggcggcttcagcgagaagacctatgagtggagcagcgaggaggaggagcctgtgaagaaggccggccctgtgcaggtgctgattgtgaaggatgaccacagctttgagctggatgaaacagccctgaaccgcatcctgctgtctgaggccgtgcgggacaaggaggtggtggccgtgtctgtggccggggccttcaggaagggcaagagcttcctgatggacttcatgctgcgctacatgtacaaccaggagagcgtggactgggtgggggactacaatgagcccctgaccggcttctcctggaggggcggcagcgagcgggagaccaccggcatccagatctggagcgagatcttcctgatcaacaagccagatggcaagaaggtggccgtgctgctgatggacacccagggcacctttgacagccagagcaccctgcgggacagcgccaccgtgtttgccctgagcaccatgatcagcagcatccaggtgtacaacctgagccagaatgtgcaggaggatgacctgcagcacctgcagctgttcacagaatatggccgcctggccatggaggagaccttcctgaagcccttccagagcctcatcttcctggtgcgggactggagcttcccctatgagttctcctatggagcagatggaggagccaagttcctggagaagaggctgaaggtgtctggcaaccagcacgaggagctgcagaatgtgaggaagcacatccacagctgcttcaccaacatcagctgcttcctgctgccccaccctggcctgaaggtggccaccaaccccaactttgatggcaagctgaaggagattgatgatgagttcatcaagaacctgaagatcctgatcccctggctgctgagccctgagagcctggacatcaaggagatcaatggaaacaagatcacctgccggggcctggtggagtacttcaaggcctacatcaagatctaccagggcgaggagctgccccaccccaagtccatgctgcaggccacagctgaggccaacaacctggccgctgtggccacagccaaggacacctacaacaagaagatggaggagatctgtggcggggacaagcccttcctggccccaaatgacctgcagaccaagcacctgcagctgaaggaggagagcgtgaagctgttccggggcgtgaagaagatgggcggggaggagttcagccgccgctacctgcagcagctggagagcgagattgatgagctgtacatccagtacatcaagcacaatgacagcaagaacatcttccacgccgcccggaccccagccaccctgtttgtggtgatcttcatcacctacgtgattgctggggtgacaggcttcatcggcctggacatcatcgccagcctgtgcaacatgatcatgggcctgaccctcatcaccctgtgcacctgggcctacatccgctacagcggggagtaccgggagctgggcgctgtgattgaccaggtggccgccgccctgtgggaccaggccctgtacaagctgtacagcgctgctgccacccaccgccacctgtaccaccaggccttccccacccccaagtctgagagcacagagcagagcgagaagaagaagatgtag

SEQ ID NO: 45705 - DNA, 303 bp, Artificial Sequence
  derived and/or modified sequence
atggccaagaacagaagagacaggaacagctggggcggcttcagcgagaagacctatgagtggagcagcgaggaggaggagcctgtgaagaaggccggccctgtgcaggtgctgattgtgaaggatgaccacagctttgagctggatgaaacagccctgaaccgcatcctgctgtctgaggccgtgcgggacaaggaggtggtggccgtgtctgtggccggggccttcaggaagggcaagagcttcctgatggacttcatgctgcgctacatgtacaaccaggagagcgtggactgggtgtag

SEQ ID NO: 45706 - DNA, 1662 bp, Artificial Sequence
  derived and/or modified sequence
atggccaagaaccggcgggaccggaacagctggggcggcttcagcgaaaagacatacgagtggagctccgaagaggaagaacccgtaaaaaaagcaggccccgtccaggtgttgattgtcaaagacgatcactccttcgagcttgatgagaccgccttgaacagaatccttctgtctgaagcagtcagggacaaagaggtggtggcggtctcagtcgctggcgcttttagaaaagggaagagctttttgatggatttcatgctgcggtacatgtacaaccaggaatccgttgactgggtgggggattataacgagccactaacagggttctcctggaggggcggatctgaaagagaaaccacaggcattcaaatctggtccgagatttttctcataaacaaaccagatggaaaaaaagtggccgtgttgctgatggatacccaaggtactttcgacagccagtccacattgagggactctgcgaccgtcttcgcactttccaccatgatctctagcatccaggtgtataacctgtcgcagaacgtgcaggaggatgaccttcagcacctgcagttgtttaccgaatacgggcggctggctatggaggagacgttcctgaagcccttccagtcgctgatctttctcgtgagggattggagtttcccttacgaattttcttacggcgcagatgggggcgccaagttcctggagaagagactgaaggtctcggggaatcagcatgaagagcttcaaaacgtgcgaaagcacatccattcatgcttcaccaacatcagctgcttccttctgccgcaccccggattgaaagttgccaccaaccccaacttcgacgggaagcttaaagagattgatgatgagttcatcaagaacctgaagattctaataccctggctattaagcccggagagtctagacatcaaggaaatcaatgggaacaagattacgtgtcgaggactagtggagtactttaaagcgtatattaaaatctatcaaggagaagagcttcctcatccaaagtcaatgcttcaggcaactgcagaagctaataatttagcagccgtcgctactgccaaggatacctacaacaaaaagatggaggagatctgtgggggggacaagccttttcttgctcccaacgatctacaaacaaaacaccttcaactgaaggaagaatccgtcaaactcttccgcggcgtcaaaaagatgggcggcgaagaattttctcgccggtacttacagcagctggaaagcgaaatcgatgaactgtacattcagtacataaaacacaacgattccaagaatattttccacgccgctcggactcctgcaaccttgtttgtagtgatcttcatcacatacgtcatcgcaggcgtgactgggttcataggcctggacataatcgcatcactgtgcaatatgattatgggactcacgctgatcactctgtgtacgtgggcctacatcagatactcgggggaatatagagagctcggggccgttatagatcaggtagctgcggccctgtgggaccaggcattgtataaactctactccgccgcagccacacaccgccacctttaccaccaggcttttcccacccctaagtcggaaagtaccgaacaatccgaaaaaaagaagatgtag

SEQ ID NO: 45707 - DNA, 1662 bp, Artificial Sequence
  derived and/or modified sequence
atggccaagaaccggcgggaccggaacagctggggcggcttcagcgaaaaaacctacgagtggagctctgaggaggaggagcccgttaaaaaggcgggcccagtgcaggtgctgattgtgaaagatgatcacagcttcgagctggacgagaccgccctgaatcgcatcctactgtctgaagcagtgagagataaggaggttgttgcggtgagtgtggccggggcatttaggaaggggaagtcgtttttgatggatttcatgctgaggtatatgtataaccaagaatcagtagactgggtaggcgattataacgaacctctcaccggattcagctggagaggaggaagtgaacgagagaccacaggaattcagatatggagcgaaatattcctgattaataaacctgatggcaagaaagttgcagtgctcctaatggacacccagggcacatttgattcccagtctactcttcgcgactccgccactgtgtttgcactatcgactatgatcagtagtatacaggtttataacctctcccagaacgtgcaggaagatgatcttcagcacctgcagctgtttactgaatacgggcgactggcaatggaagaaacctttctgaaaccctttcagagtttgattttcctcgtgcgggactggagctttccatacgagttcagctatggcgccgatgggggggccaagtttcttgagaagcgcctcaaggtctccggaaatcagcatgaagagctacagaacgtgcgtaagcatatccacagttgttttacgaacataagctgtttcctgttgccccacccgggcctgaaggttgcaactaacccaaattttgatggcaaacttaaggaaatagacgacgaattcatcaaaaaccttaagatccttattccttggctattatcacccgaaagtttagatattaaggagattaacgggaacaagataacctgtagaggcctggtcgagtattttaaagcctatatcaagatttatcagggggaagaactgccccatcccaagagtatgctacaagcgacagccgaggcaaacaacctagctgccgtggcaacagcgaaagacacctataacaagaaaatggaggagatttgcggcggtgataagccattccttgcccctaatgacctccagacgaaacacttgcagttgaaagaggagtcagtaaagttgttccgcggggtgaagaaaatgggtggtgaagaatttagtagacggtacctacagcagctggaaagcgagatcgatgaactttacatacaatacattaaacacaacgatagcaagaacatatttcatgccgccagaacacctgccaccctgttcgtggtgatcttcatcacgtacgtcatagctggggtcaccgggttcatcggcctggacatcattgcctccctgtgcaacatgattatgggactaacgctgattacactgtgcacatgggcatatattaggtattcaggcgagtaccgcgaactgggggccgtcatagaccaggtagctgcagccttgtgggaccaggccctgtacaagctatacagcgcagcagccacacaccggcatctgtaccaccaggcctttcccactcctaaaagcgagagcaccgaacagtcagagaagaagaagatgtag

SEQ ID NO: 45708 - DNA, 303 bp, Artificial Sequence
  derived and/or modified sequence
atggccaagaaccggcgggaccggaacagctggggcggcttcagcgagaaaacctacgaatggtcatctgaggaagaagaaccagtgaagaaggctggacctgtccaggttctgatagtcaaggacgaccacagctttgagctcgatgaaaccgcacttaaccgtattctcctgtctgaggccgtgcgcgacaaggaagtggtggcagtgtccgttgctggagctttccggaagggcaagtcgttcttgatggacttcatgcttcggtacatgtacaaccaggagtccgtggattgggtatag

SEQ ID NO: 45709 - DNA, 1662 bp, Artificial Sequence
  derived and/or modified sequence
atggcaaaaaacagacgcgaccggaactcctgggggggttttagcgaaaagacctatgagtggagctctgaagaggaggagcctgtgaagaaggccggacctgtgcaggtactgatcgtcaaggacgatcattctttcgaactggatgagaccgcattaaataggattctgctgtcggaggctgtccgcgacaaggaggtcgttgctgtctccgttgccggtgcatttcgaaaaggaaagtcattcctgatggactttatgctgcggtatatgtacaaccaggagtcagtggattgggtgggtgattacaacgagcctctaaccggctttagttggcgcggaggatctgagagagaaaccaccggcatccagatttggtccgagattttccttatcaacaagccggacggaaagaaagttgccgtgttgctcatggatacacaaggtacattcgactcccagagtactctaagggatagcgcaactgtgttcgcactgtcaacaatgatttcaagtattcaagtgtataatctctcacagaatgtccaggaggatgatctgcagcacctacaactgtttaccgagtatgggagactggccatggaggaaaccttccttaaacctttccaatctctgatattcttagtgcgcgattggagctttccatacgagttctcctatggagccgatggtggggcaaagtttctcgagaaacgacttaaggttagcggcaatcaacacgaagagctgcagaacgtccggaaacatatacactcctgctttactaacattagttgctttttactaccccacccagggcttaaggtggccaccaacccgaactttgatggcaagctgaaagaaatcgacgacgaatttataaagaacctgaagatcttgattccctggctcctttccccagaatctcttgacattaaggagattaatggaaacaagataacctgtagggggctcgtcgagtattttaaggcatatattaagatctaccaaggagaagagcttccccatccaaagagcatgctgcaagccaccgccgaggcaaacaaccttgcagctgtcgctaccgcaaaagacacttacaacaagaaaatggaggaaatttgcggtggggacaagccctttctggcccctaacgacctccagacgaagcacctgcagctcaaagaagagagcgtgaagctgtttcggggtgtgaagaagatgggaggtgaggaattttcgcgacgctatctccaacagctcgaaagtgagatagacgagctatatatacagtacattaagcataacgattctaagaatatttttcatgcagcaaggacacctgcaacactgtttgtggttatttttataacatacgtgatcgccggagtaacgggctttatcggacttgacatcatcgcctcactgtgtaacatgattatgggcctgacccttataaccctatgtacatgggcatacattaggtattctggggaatatagggaattgggggcagttatcgaccaggtcgctgcggctctttgggaccaagcactgtataaactgtacagtgcagccgcaactcatcgacacctttaccaccaggcattcccaacccctaaatcagagtcaacagagcaatccgagaagaagaaaatgtag

SEQ ID NO: 45710 - DNA, 1662 bp, Artificial Sequence
  derived and/or modified sequence
atggcaaagaataggcgtgaccgaaattcctggggcggtttttccgagaaaacgtatgagtggagctctgaagaagaagagccagtgaagaaagctggcccagtccaggtgctaatcgttaaggatgatcactcatttgagcttgatgagaccgccttgaaccggatcctgctttcggaagctgttcgtgataaggaagtggtggccgtgtccgtcgccggtgccttccgtaaagggaagagctttctaatggacttcatgttgcgatatatgtacaaccaggagagtgtcgattgggtcggggactacaatgagcctcttacagggttctcttggagggggggaagcgagcgggagacaaccgggatccagatttggtccgaaatatttttaatcaacaagcccgatgggaagaaagttgctgtgctgctaatggacacacaagggacgttcgattctcagagcacccttagggacagcgcaaccgtgttcgctctctccaccatgataagctccatccaggtctataacctgtcacaaaacgtgcaggaagatgacctgcagcacctgcagctattcacagaatatggccgattggccatggaggagactttcctgaagccatttcagtctttgatattcctggtgagagactggtcctttccatatgaattctcctacggagcggatggtggagcaaaatttctggagaagcgactaaaggtgagcggaaatcagcacgaggagctgcagaatgtgcgaaaacacatccactcatgcttcacgaacatcagttgctttctgctgccacacccgggtctgaaagtcgctacaaatcctaacttcgatgggaaactgaaagagattgacgacgaattcatcaaaaatctgaaaatactgatcccatggttactcagccctgagtctctcgacatcaaggagatcaatggcaacaaaatcacctgtcgtggcctcgtggagtattttaaggcctatattaagatctatcaaggagaggaactgcctcaccctaagtctatgctccaggccacggccgaggccaataaccttgctgccgtggccaccgctaaggacacttataacaaaaagatggaggagatttgtggtggcgacaaaccgtttcttgcacctaacgatttacaaactaaacatctgcaactgaaggaagaatctgtgaaactgttcagaggagtgaaaaaaatgggcggagaggagttctcaagaaggtatcttcagcagctagagagcgagatcgatgagctgtatatccagtatatcaaacataatgatagcaagaacatatttcatgctgccaggactcctgccacactgttcgtggttatcttcattacctacgttatcgcaggggtcactgggtttatcgggctcgatattattgcgtctctctgtaacatgattatgggactgactctcatcacgttgtgtacctgggcctacataagatatagcggtgaatatcgcgagctgggagcggtgatcgaccaggtagctgccgctctatgggatcaggccttgtataaactctattctgccgcagccacccaccggcatctttatcatcaggccttccctacccctaagagtgagtccacagagcagagtgaaaaaaagaaaatgtag

SEQ ID NO: 45711 - DNA, 303 bp, Artificial Sequence
  derived and/or modified sequence
atggctaagaaccgcagggataggaattcttggggcggattttccgaaaaaacctatgaatggtctagtgaagaagaagagcccgtgaaaaaggcaggccctgtgcaagtactgatcgtcaaagatgaccactcgtttgaactggacgaaaccgcactgaaccgaatcctgttaagcgaggccgtgagggataaagaggtggtggccgtcagtgtggccggagctttcaggaagggtaagagcttccttatggatttcatgttacgctatatgtacaaccaggagtccgtggactgggtgtag

SEQ ID NO: 45712 - DNA, 2628 bp, Artificial Sequence
  derived and/or modified sequence
agggagggtgtgacgctggtatctgtgtgaactcgggcttgtgatgctgagcttggttcatctgctttctcctcccttttcctccccactccttcccaccagcgccacagcaacatcctcagagtctgagcgaactgcgcccagcgcgggcacggagcctcccaccgccagcaacctgcggccccggagaaggcagcgagcgcagtgacagcgcctcaccgccaccagctcctggaccaccatggccaagaaccgcagggacagaaacagttggggtggattttcggaaaagacatatgaatggagctcagaagaggaggagccagtgaaaaaggcaggaccagtccaagtcctcattgtcaaagatgaccattcctttgagttagatgaaactgcattaaatcggatccttctctcggaggctgtcagagacaaggaggttgttgctgtatctgttgctggagcatttagaaaaggaaaatcattcctgatggacttcatgttgagatacatgtacaaccaggaatcagttgattgggttggagactacaatgaaccattgactggtttttcatggagaggtggatctgagcgagagaccacaggaattcagatatggagtgaaatcttccttatcaataaacctgatggtaaaaaggttgcagtgttattgatggatactcagggaacctttgatagtcagtcaactttgagagattcagccacagtatttgcccttagcacaatgatcagctcaatacaggtatataacttatcccaaaatgtccaggaggatgatcttcagcacctccagcttttcactgagtatggcagactggcaatggaggaaacattcctgaagccatttcagagtctgatatttcttgttcgagactggagtttcccatacgaattttcatatggagccgatggtggtgccaaattcttggaaaaacgcctcaaggtctcagggaaccagcatgaagaactacagaacgtcagaaaacacatccattcctgtttcaccaacatttcctgttttctgctacctcatcctggcttaaaagtagctaccaatccaaactttgatggaaaattgaaagaaatagatgatgaattcatcaaaaacttgaaaatactgattccttggctacttagtcccgagagcctagatattaaagagatcaatgggaataaaatcacctgccggggtctggtggagtacttcaaggcttatataaagatctatcaaggtgaagaattaccacatcccaaatccatgttacaggccacagcagaagctaacaatttagcagccgtggcaactgccaaggacacatacaacaaaaaaatggaagagatttgtggtggtgacaaaccatttctggccccaaatgacttgcagaccaaacacctgcaacttaaggaagaatctgtgaagctattccgaggggtgaagaagatgggtggggaagaatttagccggcgttacctgcagcagttggagagtgaaatagatgaactttacatccaatatatcaagcacaatgatagcaaaaatatcttccatgcagctcgtaccccagccacactgtttgtagtcatctttatcacatatgtgattgctggtgtgactggattcattggtttggacatcatagctagcctatgcaatatgataatgggactgacccttatcaccctgtgcacttgggcatatatccggtactctggagaataccgagagctgggagctgtaatagaccaggtggctgcagctctgtgggaccaggctttgtacaagctttacagtgcagcagcaacccacagacatctgtatcatcaagctttccctacaccaaagtcggaatctactgaacaatcagaaaagaaaaaaatgtaatgcaaattttaagaaatacaggtgcatgaccaattgtcaattaaatattcagttttatgtctccatgcaaacattcaaagtgcttccatcagaacggagtaaaatactaaacacctctgaagactgcaaactggattagttcttttacttcagtgtttaataagcagatgtatgtatgcatggttatactattttgttaacatgtacaatttcctgatttttcttcaaaaatgctgttataaagtatttgtctatttatgataacagtacacgtgttctgcttgaatttactaaattctactactgggttataattaaatcatgtgatattccacgtttggatatgctcatttaatttctacagaaaaaattttaaattatttcacattagccatttgttaaaacacagcatcataactcagcaggctggatttaatctgtatcatcttatatatatcacaatcttatttttaagcacattttagagttccttagttgctttatcaaaaaccagatattgcttttacatggtttaatagaatataaacctcttgataaaaaatgcacaaaaaatcactttgtatatgtgagtttcactgcattgtatattttttcatttggtacacaaagaatgtattcttcataggtttattcttttaatatgtgaactattattaaagtttactctggttcctaagattaaaaacaaatgcttactgaatttg

SEQ ID NO: 45713 - DNA, 2853 bp, Artificial Sequence
  derived and/or modified sequence
agtcccggcacaccctactgcaccttcctgttttgcaaaccgatcccggtggtaccagtttgaggctgcactgcacacctgcacaacctgccttctacttagttcttctgagacatttctgaaagtctgaattcctaggactgctcaatgacctttgtccctgttgggcacacgcagtgtctcatcgctggtattgcacctttaatgagaccaggagttccgcaaaagtaaaacaaaggggtcacagactggttctggttctaccacttcctcagtatgtgctctgggacaaaacagcatatttggcaacatctcggtgtccttatctgcagcttgaagaggcgccacagcaacatcctcagagtctgagcgaactgcgcccagcgcgggcacggagcctcccaccgccagcaacctgcggccccggagaaggcagcgagcgcagtgacagcgcctcaccgccaccagctcctggaccaccatggccaagaaccgcagggacagaaacagttggggtggattttcggaaaagacatatgaatggagctcagaagaggaggagccagtgaaaaaggcaggaccagtccaagtcctcattgtcaaagatgaccattcctttgagttagatgaaactgcattaaatcggatccttctctcggaggctgtcagagacaaggaggttgttgctgtatctgttgctggagcatttagaaaaggaaaatcattcctgatggacttcatgttgagatacatgtacaaccaggaatcagttgattgggttggagactacaatgaaccattgactggtttttcatggagaggtggatctgagcgagagaccacaggaattcagatatggagtgaaatcttccttatcaataaacctgatggtaaaaaggttgcagtgttattgatggatactcagggaacctttgatagtcagtcaactttgagagattcagccacagtatttgcccttagcacaatgatcagctcaatacaggtatataacttatcccaaaatgtccaggaggatgatcttcagcacctccagcttttcactgagtatggcagactggcaatggaggaaacattcctgaagccatttcagagtctgatatttcttgttcgagactggagtttcccatacgaattttcatatggagccgatggtggtgccaaattcttggaaaaacgcctcaaggtctcagggaaccagcatgaagaactacagaacgtcagaaaacacatccattcctgtttcaccaacatttcctgttttctgctacctcatcctggcttaaaagtagctaccaatccaaactttgatggaaaattgaaagaaatagatgatgaattcatcaaaaacttgaaaatactgattccttggctacttagtcccgagagcctagatattaaagagatcaatgggaataaaatcacctgccggggtctggtggagtacttcaaggcttatataaagatctatcaaggtgaagaattaccacatcccaaatccatgttacaggccacagcagaagctaacaatttagcagccgtggcaactgccaaggacacatacaacaaaaaaatggaagagatttgtggtggtgacaaaccatttctggccccaaatgacttgcagaccaaacacctgcaacttaaggaagaatctgtgaagctattccgaggggtgaagaagatgggtggggaagaatttagccggcgttacctgcagcagttggagagtgaaatagatgaactttacatccaatatatcaagcacaatgatagcaaaaatatcttccatgcagctcgtaccccagccacactgtttgtagtcatctttatcacatatgtgattgctggtgtgactggattcattggtttggacatcatagctagcctatgcaatatgataatgggactgacccttatcaccctgtgcacttgggcatatatccggtactctggagaataccgagagctgggagctgtaatagaccaggtggctgcagctctgtgggaccaggctttgtacaagctttacagtgcagcagcaacccacagacatctgtatcatcaagctttccctacaccaaagtcggaatctactgaacaatcagaaaagaaaaaaatgtaatgcaaattttaagaaatacaggtgcatgaccaattgtcaattaaatattcagttttatgtctccatgcaaacattcaaagtgcttccatcagaacggagtaaaatactaaacacctctgaagactgcaaactggattagttcttttacttcagtgtttaataagcagatgtatgtatgcatggttatactattttgttaacatgtacaatttcctgatttttcttcaaaaatgctgttataaagtatttgtctatttatgataacagtacacgtgttctgcttgaatttactaaattctactactgggttataattaaatcatgtgatattccacgtttggatatgctcatttaatttctacagaaaaaattttaaattatttcacattagccatttgttaaaacacagcatcataactcagcaggctggatttaatctgtatcatcttatatatatcacaatcttatttttaagcacattttagagttccttagttgctttatcaaaaaccagatattgcttttacatggtttaatagaatataaacctcttgataaaaaatgcacaaaaaatcactttgtatatgtgagtttcactgcattgtatattttttcatttggtacacaaagaatgtattcttcataggtttattcttttaatatgtgaactattattaaagtttactctggttcctaagattaaaaacaaa

SEQ ID NO: 45714 - DNA, 527 bp, Artificial Sequence
  derived and/or modified sequence
atctttgcaaatctagtgggaaattttacccagtggatattgagttacagatcgtaatgaatctacagctttcatttatcttgatcttcttgatataaattttgctattctaattttaagacaaactactcagtatacatatacaaaaatgcatgataccctctttactaacatgaccttgcttttaaaatggaaaaaaaaatgggtgcctcgtagataaatgcacattattttagctactttggctatataaatgttgccagcttgtttgtactaatgtataaccgtgcttgaaacagcgccacagcaacatcctcagagtctgagcgaactgcgcccagcgcgggcacggagcctcccaccgccagcaacctgcggccccggagaaggcagcgagcgcagtgacagcgcctcaccgccaccagctcctggaccaccatggccaagaaccgcagggacagaaacagttggggtggattttcggaaaagacatatgaatggagctcagaagaggaggagccagtgaa

SEQ ID NO: 45715 - DNA, 620 bp, Artificial Sequence
  derived and/or modified sequence
agaagactacaagtatagatttgggaatcatcagcatggaggtcctgtctgaagccatcatagtaaattacattgagagagtgtagcgtgaggagttgcttaccatgaggaattagcagagatcatggatctggtaattaagaggctggcagtgatctcctaagaaccgatcagtacagagtcgccacagcaacatcctcagagtctgagcgaactgcgcccagcgcgggcacggagcctcccaccgccagcaacctgcggccccggagaaggcagcgagcgcagtgacagcgcctcaccgccaccagctcctggaccaccatggccaagaaccgcagggacagaaacagttggggtggattttcggaaaagacatatgaatggagctcagaagaggaggagccagtgaaaaaggcaggaccagtccaagtcctcattgtcaaagatgaccattcctttgagttagatgaaactgcattaaatcggatccttctctcggaggctgtcagagacaaggaggttgttgctgtatctgttgctggagcatttagaaaaggaaaatcattcctgatggacttcatgttgagatacatgtacaaccaggaatcagttgattgggt

SEQ ID NO: 45716 - DNA, 1662 bp, Artificial Sequence
  derived and/or modified sequence
atggccaagaacagaagagacagaaacagctggggcggcttcagcgagaagacctacgagtggagcagcgaggaggaggagcccgtgaagaaggccggccccgtgcaggtgctgatcgtgaaggacgaccacagcttcgagctggacgagaccgccctgaacagaatcctgctgagcgaggccgtgagagacaaggaggtggtggccgtgagcgtggccggcgccttcagaaagggcaagagcttcctgatggacttcatgctgagatacatgtacaaccaggagagcgtggactgggtgggcgactacaacgagcccctgaccggcttcagctggagaggcggcagcgagagagagaccaccggcatccagatctggagcgagatcttcctgatcaacaagcccgacggcaagaaggtggccgtgctgctgatggacacccagggcaccttcgacagccagagcaccctgagagacagcgccaccgtgttcgccctgagcaccatgatcagcagcatccaggtgtacaacctgagccagaacgtgcaggaggacgacctgcagcacctgcagctgttcaccgagtacggcagactggccatggaggagaccttcctgaagcccttccagagcctgatcttcctggtgagagactggagcttcccctacgagttcagctacggcgccgacggcggcgccaagttcctggagaagagactgaaggtgagcggcaaccagcacgaggagctgcagaacgtgagaaagcacatccacagctgcttcaccaacatcagctgcttcctgctgccccaccccggcctgaaggtggccaccaaccccaacttcgacggcaagctgaaggagatcgacgacgagttcatcaagaacctgaagatcctgatcccctggctgctgagccccgagagcctggacatcaaggagatcaacggcaacaagatcacctgcagaggcctggtggagtacttcaaggcctacatcaagatctaccagggcgaggagctgccccaccccaagagcatgctgcaggccaccgccgaggccaacaacctggccgccgtggccaccgccaaggacacctacaacaagaagatggaggagatctgcggcggcgacaagcccttcctggcccccaacgacctgcagaccaagcacctgcagctgaaggaggagagcgtgaagctgttcagaggcgtgaagaagatgggcggcgaggagttcagcagaagatacctgcagcagctggagagcgagatcgacgagctgtacatccagtacatcaagcacaacgacagcaagaacatcttccacgccgccagaacccccgccaccctgttcgtggtgatcttcatcacctacgtgatcgccggcgtgaccggcttcatcggcctggacatcatcgccagcctgtgcaacatgatcatgggcctgaccctgatcaccctgtgcacctgggcctacatcagatacagcggcgagtacagagagctgggcgccgtgatcgaccaggtggccgccgccctgtgggaccaggccctgtacaagctgtacagcgccgccgccacccacagacacctgtaccaccaggccttccccacccccaagagcgagagcaccgagcagagcgagaagaagaagatgtag

SEQ ID NO: 45717 - DNA, 303 bp, Artificial Sequence
  derived and/or modified sequence
atggccaagaacagaagagacagaaacagctggggcggcttcagcgagaagacctacgagtggagcagcgaggaggaggagcccgtgaagaaggccggccccgtgcaggtgctgatcgtgaaggacgaccacagcttcgagctggacgagaccgccctgaacagaatcctgctgagcgaggccgtgagagacaaggaggtggtggccgtgagcgtggccggcgccttcagaaagggcaagagcttcctgatggacttcatgctgagatacatgtacaaccaggagagcgtggactgggtgtag

SEQ ID NO: 45718 - protein, 1151 aa, Artificial Sequence
  derived and/or modified sequence
MRKFNIRKVLDGLTAGSSSASQQQQQQHPPGNREPEIQETLQSEHFQLCKTVRHGFPYQPSALAFDPVQKILAVGTQTGALRLFGRPGVECYCQHDSGAAVIQLQFLINEGALVSALADDTLHLWNLRQKRPAILHSLKFCRERVTFCHLPFQSKWLYVGTERGNIHIVNVESFTLSGYVIMWNKAIELSSKSHPGPVVHISDNPMDEGKLLIGFESGTVVLWDLKSKKADYRYTYDEAIHSVAWHHEGKQFICSHSDGTLTIWNVRSPAKPVQTITPHGKQLKDGKKPEPCKPILKVEFKTTRSGEPFIILSGGLSYDTVGRRPCLTVMHGKSTAVLEMDYSIVDFLTLCETPYPNDFQEPYAVVVLLEKDLVLIDLAQNGYPIFENPYPLSIHESPVTCCEYFADCPVDLIPALYSVGARQKRQGYSKKEWPINGGNWGLGAQSYPEIIITGHADGSVKFWDASAITLQVLYKLKTSKVFEKSRNKDDRPNTDIVDEDPYAIQIISWCPESRMLCIAGVSAHVIIYRFSKQEVITEVIPMLEVRLLYEINDVETPEGEQPPPLPTPVGGSNPQPIPPQSHPSTSSSSSDGLRDNVPCLKVKNSPLKQSPGYQTELVIQLVWVGGEPPQQITSLAVNSSYGLVVFGNCNGIAMVDYLQKAVLLNLGTIELYGSNDPYRREPRSPRKSRQPSGAGLCDISEGTVVPEDRCKSPTSGSSSPHNSDDEQKMNNFIEKVKTKSRKFSKMVANDIAKMSRKLSLPTDLKPDLDVKDNSFSRSRSSSVTSIDKESREAISALHFCETFTRKTDSSPSPCLWVGTTLGTVLVIALNLPPGGEQRLLQPVIVSPSGTILRLKGAILRMAFLDTTGCLIPPAYEPWREHNVPEEKDEKEKLKKRRPVSVSPSSSQEISENQYAVICSEKQAKVISLPTQNCAYKQNITETSFVLRGDIVALSNSICLACFCANGHIMTFSLPSLRPLLDVYYLPLTNMRIARTFCFTNNGQALYLVSPTEIQRLTYSQETCENLQEMLGELFTPVETPEAPNRGFFKGLFGGGAQSLDREELFGESSSGKASRSLAQHIPGPGGIEGVKGAASGVVGELARARLALDERGQKLGDLEERTAAMLSSAESFSKHAHEIMLKYKDKKWYQF

SEQ ID NO: 45719 - protein, 308 aa, Artificial Sequence
  derived and/or modified sequence
MRKFNIRKVLDGLTAGSSSASQQQQQQHPPGNREPEIQETLQSEHFQLCKTVRHGFPYQPSALAFDPVQKILAVGTQTGALRLFGRPGVECYCQHDSGAAVIQLQFLINEGALVSALADDTLHLWNLRQKRPAILHSLKFCRERVTFCHLPFQSKWLYVGTERGNIHIVNVESFTLSGYVIMWNKAIELSSKSHPGPVVHISDNPMDEGKLLIGFESGTVVLWDLKSKKADYRYTYDEAIHSVAWHHEGKQFICSHSDGTLTIWNVRSPAKPVQTITPHGKQLKDGKKPEPCKPILKVEFKTTRSGVC

SEQ ID NO: 45720 - DNA, 3456 bp, Artificial Sequence
  derived and/or modified sequence
atgagaaagttcaacatcagaaaggtgctggacggcctgaccgccggcagcagcagcgccagccagcagcagcagcagcagcacccccccggcaacagagagcccgagatccaggagaccctgcagagcgagcacttccagctgtgcaagaccgtgagacacggcttcccctaccagcccagcgccctggccttcgaccccgtgcagaagatcctggccgtgggcacccagaccggcgccctgagactgttcggcagacccggcgtggagtgctactgccagcacgacagcggcgccgccgtgatccagctgcagttcctgatcaacgagggcgccctggtgagcgccctggccgacgacaccctgcacctgtggaacctgagacagaagagacccgccatcctgcacagcctgaagttctgcagagagagagtgaccttctgccacctgcccttccagagcaagtggctgtacgtgggcaccgagagaggcaacatccacatcgtgaacgtggagagcttcaccctgagcggctacgtgatcatgtggaacaaggccatcgagctgagcagcaagagccaccccggccccgtggtgcacatcagcgacaaccccatggacgagggcaagctgctgatcggcttcgagagcggcaccgtggtgctgtgggacctgaagagcaagaaggccgactacagatacacctacgacgaggccatccacagcgtggcctggcaccacgagggcaagcagttcatctgcagccacagcgacggcaccctgaccatctggaacgtgagaagccccgccaagcccgtgcagaccatcaccccccacggcaagcagctgaaggacggcaagaagcccgagccctgcaagcccatcctgaaggtggagttcaagaccaccagaagcggcgagcccttcatcatcctgagcggcggcctgagctacgacaccgtgggcagaagaccctgcctgaccgtgatgcacggcaagagcaccgccgtgctggagatggactacagcatcgtggacttcctgaccctgtgcgagaccccctaccccaacgacttccaggagccctacgccgtggtggtgctgctggagaaggacctggtgctgatcgacctggcccagaacggctaccccatcttcgagaacccctaccccctgagcatccacgagagccccgtgacctgctgcgagtacttcgccgactgccccgtggacctgatccccgccctgtacagcgtgggcgccagacagaagagacagggctacagcaagaaggagtggcccatcaacggcggcaactggggcctgggcgcccagagctaccccgagatcatcatcaccggccacgccgacggcagcgtgaagttctgggacgccagcgccatcaccctgcaggtgctgtacaagctgaagaccagcaaggtgttcgagaagagcagaaacaaggacgacagacccaacaccgacatcgtggacgaggacccctacgccatccagatcatcagctggtgccccgagagcagaatgctgtgcatcgccggcgtgagcgcccacgtgatcatctacagattcagcaagcaggaggtgatcaccgaggtgatccccatgctggaggtgagactgctgtacgagatcaacgacgtggagacccccgagggcgagcagcccccccccctgcccacccccgtgggcggcagcaacccccagcccatccccccccagagccaccccagcaccagcagcagcagcagcgacggcctgagagacaacgtgccctgcctgaaggtgaagaacagccccctgaagcagagccccggctaccagaccgagctggtgatccagctggtgtgggtgggcggcgagcccccccagcagatcaccagcctggccgtgaacagcagctacggcctggtggtgttcggcaactgcaacggcatcgccatggtggactacctgcagaaggccgtgctgctgaacctgggcaccatcgagctgtacggcagcaacgacccctacagaagagagcccagaagccccagaaagagcagacagcccagcggcgccggcctgtgcgacatcagcgagggcaccgtggtgcccgaggacagatgcaagagccccaccagcggcagcagcagcccccacaacagcgacgacgagcagaagatgaacaacttcatcgagaaggtgaagaccaagagcagaaagttcagcaagatggtggccaacgacatcgccaagatgagcagaaagctgagcctgcccaccgacctgaagcccgacctggacgtgaaggacaacagcttcagcagaagcagaagcagcagcgtgaccagcatcgacaaggagagcagagaggccatcagcgccctgcacttctgcgagaccttcaccagaaagaccgacagcagccccagcccctgcctgtgggtgggcaccaccctgggcaccgtgctggtgatcgccctgaacctgccccccggcggcgagcagagactgctgcagcccgtgatcgtgagccccagcggcaccatcctgagactgaagggcgccatcctgagaatggccttcctggacaccaccggctgcctgatcccccccgcctacgagccctggagagagcacaacgtgcccgaggagaaggacgagaaggagaagctgaagaagagaagacccgtgagcgtgagccccagcagcagccaggagatcagcgagaaccagtacgccgtgatctgcagcgagaagcaggccaaggtgatcagcctgcccacccagaactgcgcctacaagcagaacatcaccgagaccagcttcgtgctgagaggcgacatcgtggccctgagcaacagcatctgcctggcctgcttctgcgccaacggccacatcatgaccttcagcctgcccagcctgagacccctgctggacgtgtactacctgcccctgaccaacatgagaatcgccagaaccttctgcttcaccaacaacggccaggccctgtacctggtgagccccaccgagatccagagactgacctacagccaggagacctgcgagaacctgcaggagatgctgggcgagctgttcacccccgtggagacccccgaggcccccaacagaggcttcttcaagggcctgttcggcggcggcgcccagagcctggacagagaggagctgttcggcgagagcagcagcggcaaggccagcagaagcctggcccagcacatccccggccccggcggcatcgagggcgtgaagggcgccgccagcggcgtggtgggcgagctggccagagccagactggccctggacgagagaggccagaagctgggcgacctggaggagagaaccgccgccatgctgagcagcgccgagagcttcagcaagcacgcccacgagatcatgctgaagtacaaggacaagaagtggtaccagttctag

SEQ ID NO: 45721 - DNA, 3456 bp, Artificial Sequence
  derived and/or modified sequence
atgagaaaatttaacattcgcaaggtgttggatggactcacagccggaagctcatctgcatctcagcagcagcagcagcagcaccctcctgggaaccgagaaccagaaatacaggaaaccctccagtccgaacacttccaactatgtaaaaccgtccggcacggattcccctaccagccgtccgctctggctttcgaccccgtgcagaaaatcctcgcagtgggaacacagactggggcattaaggcttttcggaaggcctggcgtcgaatgctactgtcagcatgatagtggcgccgctgtcatccagctccagttcctcattaacgagggcgccttggtcagcgccctggccgatgatacactgcacctgtggaacttaagacaaaaaagacctgccattctgcactcgctgaagttctgtcgggaaagagtcaccttttgtcacttgccttttcaatcgaagtggctgtatgtcggaaccgagcgagggaatattcacatcgttaacgttgaatccttcacattatcgggttacgtgatcatgtggaacaaggctatcgagctcagcagcaagagccacccaggcccggtggttcatatcagcgacaaccctatggatgaaggaaagctgctaatcggctttgagtctggaacagtagtgctgtgggatctgaaatccaagaaggcagattaccggtacacgtatgacgaggcaattcattctgtggcttggcaccacgaagggaagcagttcatttgctcccactccgacggtaccctgactatctggaacgttcggtcccccgctaagcctgtccaaacaataacaccgcatggtaaacagctcaaggatgggaagaaaccagagccatgtaagcctatccttaaagtggaattcaagaccaccaggagcggcgagccgttcattattcttagtggcggattatcttatgataccgtgggccggcgcccctgtctgacagtgatgcatgggaaaagtacagccgtgttggagatggattactccattgttgacttcctcactctgtgtgagaccccatatcccaatgactttcaggagccatacgccgtggtcgtcctgctggagaaagacctcgtgttaattgatctggcacaaaacggctatcctatttttgaaaacccctatcccctgagcattcacgagtcaccagtgacctgttgtgagtatttcgcggattgtccggtggacttaatccccgcactctactcagtgggtgccaggcagaagagacaggggtacagcaagaaggagtggccaataaacggcggtaattggggactcggagcccaatcctaccctgagatcatcataacgggtcacgctgatggttctgtcaagttctgggatgcctccgcaatcaccctacaagtgctgtataagctgaagacctcaaaagtgttcgaaaagagccgtaataaggacgataggccaaatactgatattgttgacgaagatccctacgcaatacagatcatttcctggtgtcccgaatccagaatgttgtgtatcgcgggagtgtccgcacacgtgataatctacaggttttccaagcaagaagtcatcacagaggtaatccctatgttggaagtgcgcctcctgtatgagattaacgatgtggaaacaccggaaggagagcaacctcctccactccctacccctgtaggaggcagcaacccccagcctatccctccccagagccatccatccacgtcgtcttcctcatcggatggcctcagggataacgtgccatgcctgaaggtcaagaatagtcccctgaagcagtctcctggctaccaaacagaactagtgatccagctcgtatgggtagggggagaaccaccacagcagataacgtccctggccgtcaactcttcatatggcctggtggtattcggaaactgtaacggaatcgctatggtggactaccttcagaaggcagtgctcctgaacttagggaccatagagctgtacgggtccaatgacccatacaggagagaacctcgcagcccgcggaagtcacggcagccgtccggggcgggcctttgtgatatctcagaaggaaccgtggtccccgaggataggtgtaagtctccgacaagtggaagctcaagcccacacaactccgacgatgagcaaaaaatgaacaactttattgaaaaagtcaaaaccaagtctaggaagttttcaaagatggtcgctaatgacattgccaagatgagtaggaaacttagcttaccaacagacctgaaaccagatttagatgtcaaggacaatagctttagcagaagtcgaagttccagcgttacctcgattgacaaagagagccgagaagctatttccgctctgcacttctgtgagacattcactagaaaaacagactcttctccctcaccctgcctgtgggtaggaactaccctcggcactgtgctcgttatcgccttgaatctcccgccaggaggtgagcagagattgctccaacccgtgattgtttctccaagcgggaccattcttcgcctgaagggtgccattcttaggatggcattcctagacaccactgggtgtcttatcccacccgcctacgaaccgtggagagaacacaatgtgcccgaagagaaagatgagaaggaaaagctgaagaagagaaggcctgtgtctgtctcccctagtagcagtcaggaaatcagcgagaaccagtatgcagtgatatgtagtgagaagcaggcaaaagtcataagcctgccgactcaaaactgtgcctacaagcagaacattactgaaacatctttcgtgctgcgaggggatattgtagccctaagcaatagcatctgcttagcatgcttctgcgctaacggacatatcatgacgttctcactccctagcctgcgtccattgctcgatgtctactatcttcccctgactaatatgaggattgcaagaactttctgcttcactaacaatgggcaggctctgtacctagtttcccctacggaaatccagagactgacatattcgcaggaaacctgtgagaacctgcaggagatgctcggtgagttattcacacccgtcgagactccggaggctccaaacagaggctttttcaaaggactttttggtggcggcgctcagtccctggaccgtgaggaactgttcggagagtcatcctcagggaaagcctcccgatcgctggctcagcacattcctggtcccggcggaatcgagggtgtgaagggcgccgctagcggcgtcgtgggagaactggccagagcgagactggcactcgacgagagagggcagaaattgggggacctcgaagagcgtacagccgcaatgctgtctagtgccgagtctttctccaagcacgcccacgagataatgctgaaatacaaagataaaaagtggtaccagttctag

SEQ ID NO: 45722 - DNA, 3456 bp, Artificial Sequence
  derived and/or modified sequence
atgaggaagttcaacatcaggaaggtgctggatggcctgacagctggcagcagcagcgccagccagcagcagcagcagcagcaccccccaggcaaccgggagcctgagatccaggagaccctgcagagcgagcacttccagctgtgcaagacagtgcgccacggcttcccctaccagcccagcgccctggcctttgatcctgtgcagaagatcctggccgtgggcacccagacaggagccctgcggctgtttggccggcctggggtggagtgctactgccagcatgattctggagctgctgtgatccagctgcagttcctgatcaatgaaggagccctggtgtctgccctggctgatgacaccctgcacctgtggaacctgcggcagaagaggcctgccatcctgcacagcctgaagttctgccgggagcgggtgaccttctgccacctgcccttccagagcaagtggctgtatgtgggcacagagcggggcaacatccacatcgtgaatgtggagagcttcaccctgagcggctacgtgatcatgtggaacaaggccatcgagctgagcagcaagagccaccctggccctgtggtgcacatcagtgacaaccccatggatgagggcaagctgctgattggatttgaaagtggcaccgtggtgctgtgggacctgaagagcaagaaggctgactaccgctacacctatgatgaggccatccacagcgtggcctggcaccacgagggcaagcagttcatctgcagccacagtgatggcaccctgaccatctggaatgtgcgcagccctgccaagcctgtgcagaccatcacccctcatggcaagcagctgaaggatggcaagaagccagagccctgcaagcccatcctgaaggtggagttcaagaccaccaggtctggagagcccttcatcatcctgagcggcggcctgtcctatgacacagtgggcagaagaccctgcctgactgtgatgcacggcaagagcacagctgtgctggagatggactacagcatcgtggacttcctgaccctgtgtgagaccccctacccaaatgacttccaggagccctatgctgtggtggtgctgctggagaaggacctggtgctgattgacctggcccagaatggctaccccatctttgagaacccctaccccctgagcatccacgagagccctgtgacctgctgtgagtactttgctgactgccctgtggacctgatcccagccctgtacagcgtgggcgcccggcagaagaggcagggctacagcaagaaggagtggcccatcaatggaggcaactggggcctgggcgcccagagctacccagagatcatcatcactggacatgctgatggctctgtgaagttctgggatgccagcgccatcaccctgcaggtgctgtacaagctgaagaccagcaaggtgtttgagaagagcaggaacaaggatgaccggcccaacacagacatcgtggatgaggacccctatgccatccagatcatctcctggtgcccagagagcaggatgctgtgcatcgccggcgtgtctgcccacgtgatcatctaccgcttcagcaagcaggaggtgatcacagaggtgatccccatgctggaggtgcggctgctgtatgagatcaatgatgtggagaccccagagggggagcagcccccacccctgcccacccctgtgggcggcagcaacccccagcccatccccccccagagccaccccagcaccagcagcagcagcagtgatggcctgcgggacaacgtgccctgcctgaaggtgaagaacagccccctgaagcagagccctggctaccagacagagctggtgatccagctggtgtgggtgggcggggagcccccccagcagatcaccagcctggccgtgaacagcagctatggcctggtggtgtttggaaactgcaatggcatcgccatggtggactacctgcagaaggctgtgctgctgaacctgggcaccatcgagctgtatggcagcaatgacccctacagaagagagcccaggagccccaggaagagccggcagcccagcggggccggcctgtgtgacatcagcgagggcaccgtggtgcctgaagatcgctgcaagagccccaccagcggcagcagcagcccccacaacagtgatgatgagcagaagatgaacaacttcatcgagaaggtgaagaccaagagcaggaagttcagcaagatggtggccaatgacatcgccaagatgagcaggaagctgagcctgcccacagacctgaagccagacctggatgtgaaggacaacagcttcagccgcagccgcagcagctctgtgaccagcattgacaaggagagccgggaggccatcagcgccctgcacttctgtgagaccttcaccaggaagacagacagcagccccagcccctgcctgtgggtgggcaccaccctgggcaccgtgctggtgattgccctgaacctgcccccaggaggagagcagaggctgctgcagcccgtcatcgtgagccccagcggcaccatcctgcggctgaagggggccatcctgaggatggccttcctggacaccaccggctgcctgatccccccagcctatgagccctggagggagcacaacgtgcctgaggagaaggatgagaaggagaagctgaagaagaggaggcctgtgtctgtgagccccagcagcagccaggagatcagcgagaaccagtatgctgtgatctgcagcgagaagcaggccaaggtgatcagcctgcccacccagaactgtgcctacaagcagaacatcacagagaccagctttgtgctgcggggggacatcgtggccctgagcaacagcatctgcctggcctgcttctgtgccaacggccacatcatgaccttcagcctgcccagcctgcggcccctgctggatgtgtactacctgcccctgaccaacatgagaattgcccggaccttctgcttcaccaacaacggccaggccctgtacctggtgagccccacagagatccagaggctgacctacagccaggagacctgtgagaacctgcaggagatgctgggggagctgttcacccctgtggagaccccagaggcccccaacagaggcttcttcaagggcctgtttggaggaggagcccagagcctggaccgggaggagctgtttggagagagcagcagcggcaaggccagccgcagcctggcccagcacatccctggccctgggggcattgaaggagtgaagggagctgccagcggcgtggtgggggagctggcccgggcccggctggccctggatgagcggggccagaagctgggggacctggaggagaggacagctgccatgctgagcagcgctgagagcttcagcaagcacgcccacgagatcatgctgaagtacaaggacaagaagtggtaccagttctag

SEQ ID NO: 45723 - DNA, 3456 bp, Artificial Sequence
  derived and/or modified sequence
atgcggaagttcaacatccggaaggtgctggacggcctgaccgccggatccagttctgcgtcccagcagcaacagcagcagcatcctcccggaaatcgcgagcccgaaatacaagaaacattgcagtccgaacatttccagctgtgcaaaacagtccgccatggattcccatatcagccctccgctttggcctttgaccccgtccagaaaatccttgctgttggaacgcagacaggagccttaagactgttcggcagaccaggggtggagtgctattgccaacacgattcaggagcagctgtgattcaactgcaattcctgattaatgaaggagccttagtcagcgcactggcggatgatactctacacctctggaacctccggcaaaaaagacccgccattcttcattccctgaagttttgtagggaaagggtgaccttctgccaccttccatttcaatctaaatggctgtacgtggggacagagcgcggaaacattcatattgtaaacgtggaatcattcaccttaagcggctacgtgattatgtggaacaaggccattgaactcagctctaaatctcacccgggccctgttgtgcatatatctgataacccaatggatgagggaaagctgctcattggctttgagtctgggactgtggttttatgggacctgaaatccaagaaagcggactaccggtacacgtacgacgaggctattcattcagtggcgtggcaccacgaaggaaagcagtttatttgtagccactctgacggaacactgacaatttggaatgtacggtccccagcaaaaccggtccagaccataacaccccacggcaagcaactaaaggacggaaaaaaacctgaaccatgtaaaccaatcctgaaagtggaatttaaaaccacaagatctggcgagccctttataatcctgtcgggcgggctgagctacgacactgtcggcaggagaccctgcctaacggtgatgcacgggaagtcaacagccgtgctcgagatggactactctattgtggactttctgacattgtgcgagacgccatatccgaatgacttccaggaaccctatgcggtggttgtgctgctagagaaggatctggttctcattgatctggctcagaatggatatccaatattcgaaaatccctatccattgagcatccacgagtctccagtaacctgctgtgagtacttcgccgattgtccggtggatctgatccccgccctgtactctgtaggagcccgccagaagcgacaggggtacagtaagaaagagtggcctattaacggtggaaattggggtttgggcgcacagtcctatccggagattatcatcaccggccatgccgatggttcggtgaagttctgggacgcgtccgcaattacgttgcaggtgttatataagctgaagacatctaaggtgttcgaaaagtctagaaataaggatgatcggcctaacactgacattgtggatgaggatccatacgccatccagattatctcttggtgcccggagagcaggatgctctgcatcgcaggcgtaagtgcgcatgtcattatttacagattttctaaacaggaagtgattacagaggtgatccccatgttggaagtgcgcctcctgtacgagattaacgacgtggagactcccgagggagagcagccacctcccctccctacaccggtcgggggatctaacccacagcccattcccccccaaagccacccaagcactagtagtagcagcagtgatggactgcgggataacgtgccatgtttaaaggtgaaaaattccccactcaaacaatcaccgggatatcaaacagagctcgttatacagctggtttgggtggggggtgaaccccctcagcagatcaccagccttgctgtcaatagttcctatggactggttgtcttcggcaattgtaacggaattgccatggtggattacctacagaaggcggtcctcttgaatctcggaacgattgagctgtacgggtctaatgacccataccgaagggagcccagaagtcctaggaaaagcaggcaacccagtggggcgggtctgtgtgatatatcagaagggacagtcgtaccagaggataggtgtaaatctccgacatccggaagcagttcaccacacaactctgacgacgaacagaaaatgaacaacttcatcgagaaggtgaaaaccaagagtaggaagttctccaaaatggtggccaacgacatagcaaagatgagtcgcaaactttcattgcccacagacctgaaacctgatcttgatgtaaaggataatagcttttcgagaagccgctctagcagcgtgacctccattgataaggagtcccgggaggctatctcagctctgcatttttgtgaaactttcactcgcaaaacagattcgagcccctccccgtgcctgtgggttggaaccacccttggcactgtactggtgattgcgttaaatctgcccccaggcggcgagcagcgattgctccagcccgtaattgtgtcgccaagcggcacaattctgcggctaaagggggcaatcctgagaatggcattcttagacaccacgggatgcctaattcccccggcctacgaaccttggcgcgaacacaacgtgccggaagagaaggatgagaaagagaagctgaagaaacgacggcccgtgtcagtgagcccatcctcaagccaggagattagcgaaaaccaatacgccgtgatttgttcagaaaaacaggcaaaggttatatccctccctacacagaattgcgcatataagcagaatatcacggagacatcatttgtgctcaggggcgatatcgtcgctctttctaacagtatctgtctggcatgtttctgcgcgaatggccatattatgaccttctccctgccttccttgcgaccattgttggatgtttactacctcccgcttacgaacatgaggattgcccggactttctgttttacaaacaacggccaggccctgtacctggtgtcaccaactgagattcagagactgacttattcccaagagacatgcgaaaatcttcaggaaatgctcggagaactctttactccggtcgaaacccccgaagccccaaatagagggttctttaaagggttgttcggtggcggcgcgcagtctctagatagggaagaactgttcggcgaatcctcatctgggaaagcgagccgttccttagctcagcacatccccggtccaggtggcatagaaggagttaaaggggccgctagcggagtggtcggagaattggctcgggcaaggttagctctggatgagcggggtcagaagctgggtgatctcgaagaacgaactgcagccatgctctcctctgcagagtccttttcaaagcacgctcacgagatcatgctcaagtacaaagataaaaagtggtatcagttctag

SEQ ID NO: 45724 - DNA, 3456 bp, Artificial Sequence
  derived and/or modified sequence
atgaggaagtttaacatccgcaaggttttagacggtttgacagctggttctagcagcgccagccagcagcagcagcagcaacaccctcccggaaacagagagccagagatacaggagacactccagtcagagcatttccagctgtgtaagacagtgcggcatgggtttccttaccaaccttccgcactcgcctttgaccctgtacagaagattttggccgtgggcacacagacaggtgctctgagacttttcggacgccctggcgtggagtgctactgccaacacgatagtggcgcagccgtgattcaactgcagtttcttatcaacgagggggcactggtgagcgcactggccgacgacacactgcatctgtggaacctgcgacaaaagcggccagctattctccattcgctgaaattctgtcgggaacgcgttaccttttgtcacttgcccttccaaagcaagtggctgtatgttgggaccgaaaggggcaatatacatattgtcaacgtggaatccttcacattgtcgggctatgtcattatgtggaacaaggctatagagctcagctctaagagtcatccaggcccagtggttcatatctcagataaccccatggatgaaggcaagctgctgattggcttcgaatcaggaaccgtcgttctctgggacctgaaatcaaagaaagccgattaccggtacacttatgatgaagcgattcactcggtcgcatggcatcatgaaggcaagcagtttatttgctcccactcggatgggaccctgaccatctggaacgtacggtctccggctaagccagtgcagacgatcactccccacgggaaacaactgaaggacgggaagaaacctgaaccttgtaaaccaatcctaaaagtcgagttcaaaaccacaagatccggcgagccatttatcattttgagcggtggtctcagctacgacactgtggggaggagaccctgtctcacggtgatgcacgggaaaagcacagccgtactcgagatggactactctatcgtcgatttcctcactctctgcgagactccgtaccctaatgacttccaggaaccctacgcggttgtcgtgctcctggagaaggatctcgtgctgatcgatctcgcccagaatggatatccaatctttgaaaatccttatcctttgagcatccatgagagtccagtgacatgctgcgagtacttcgcagactgcccggtggatctcattcccgctctttacagtgtgggcgcacgccagaagcggcaggggtattctaaaaaagagtggccaattaacggaggaaactggggcttaggcgctcagtcataccccgagattatcattacgggacatgctgacgggagcgttaagttttgggacgcttccgccatcactttacaagtcctctataaactcaaaactagcaaggtgttcgaaaagtccaggaacaaagacgatagaccaaacaccgatatcgttgacgaggatccctacgctatccaaatcatttcttggtgcccggaaagccggatgctgtgtatcgccggagtgagtgcccacgtgatcatctaccgattctccaaacaagaggtgatcaccgaagtcatccccatgctcgaggtgcggctgctctacgagattaacgacgtggagacccctgagggcgagcaaccacccccactgcctacccctgttggcggatccaacccacagcccataccacctcagtctcacccctccaccagcagttcatcaagcgacggactgagagacaacgttccctgcctcaaggtgaagaacagtcctctgaaacagtctcccggttaccagacagagctggtgattcagctcgtttgggtaggtggggaaccacctcagcagataacttccctggccgtcaattctagttatgggctggtcgtcttcggcaattgcaatggcatagccatggtagactatctccagaaggctgtgctgctgaatttgggcacaatcgaactctacggatccaatgatccgtaccgcagggagccgaggtctccgcgtaaatctcgacagccttctggcgcagggctctgtgatatttcagaaggaactgtggtccctgaagatcgctgtaaatcccctacgtcaggatctagttccccccacaacagcgatgacgagcagaaaatgaacaactttatcgagaaggtaaaaacaaagagccgcaaattctctaagatggtcgctaacgatatagcaaaaatgtcacgtaagttgtccttgcctactgacctcaagcctgaccttgatgtgaaggataacagtttctctagatctcgctcctcctcagtaacctcaatagacaaggagtctcgggaggccattagcgcactgcacttttgcgagactttcaccaggaaaactgacagttccccctccccatgtctgtgggtggggacaaccctgggcaccgttcttgttatcgccttgaacttgccccctggcggtgagcagcgcttgctgcagccggtgatcgtgtcaccaagtggtacaatcctgagactcaaaggggcaatattgcgtatggctttcctcgatactacagggtgcctgatccctcctgcctatgaaccgtggagagagcacaatgtaccagaagagaaagatgaaaaggagaaactgaaaaaaagacgccctgtttctgtgtccccaagcagctcgcaggaaatttctgagaaccaatatgctgtcatttgtagcgagaagcaagcgaaggtaatctccctgcccacccagaattgtgcctataaacagaacatcaccgaaacatcttttgttctgcggggagacatagtggccttatccaactccatctgcctggcctgcttctgtgccaatggccacattatgactttctcgctgccctcactaagaccgcttcttgatgtctactatctgcccctaacaaacatgagaatagctagaaccttttgcttcaccaataacgggcaggccttatacctggtctcccctacagagatccagaggctcacctattctcaggagacatgtgaaaatctacaagagatgctgggggagctgttcacacctgtagaaacccccgaggctcccaacagggggtttttcaagggtctcttcgggggaggcgctcaaagcttagatcgcgaggagctgtttggcgaatccagctccggaaaagcgtcacggtctcttgctcaacatatcccaggccctggcggaatcgaaggcgttaagggcgctgctagtggagtggtgggcgagctagcaagggcccgtctggcgttagacgagaggggccagaagctgggagacctggaggagcgcaccgcagctatgctctcttccgctgagtcgttttcaaagcacgcacacgaaatcatgctgaagtacaaagataagaagtggtatcagttttag

SEQ ID NO: 45725 - DNA, 3456 bp, Artificial Sequence
  derived and/or modified sequence
atgaggaaattcaacatcaggaaggtgctggacggcctgaccgccggctcgtcctcggcgtcgcagcagcaacagcagcagcatccgcctgggaaccgggagccggagatccaggaaacgctccagtccgagcactttcagctctgcaagactgttcgccatggatttccctatcaaccctcagccctggcctttgatcctgtacagaagatcctggcagtgggaactcagactggtgctttaaggctctttggtcgtccaggagtagaatgttattgccagcatgacagtggagctgcagtaatccagctccagttcctgattaatgagggagcgcttgtgagtgccttggctgatgacaccttacacttatggaatttacgtcagaagaggcctgccatactacattcgcttaaattttgcagagaaagggttacattttgccatctgcctttccagagtaagtggctctatgtgggcactgaacgaggtaatatacatattgtcaatgtggagtccttcacactctcaggctacgtcattatgtggaataaagccattgaactgtcatctaaatctcacccaggacctgtggtccatataagtgataatccaatggacgagggaaagcttttgattggctttgaatctggaacagtagttttatgggacctcaaatcaaagaaagccgactacagatacacatatgatgaggctatccactctgttgcttggcatcatgaaggaaaacaatttatttgcagtcattcagatggcaccttgactatatggaatgtaaggtcccctgctaaaccagtacagacaatcactccacatggaaaacagttaaaggatgggaagaagccagaaccatgcaaacctatcctcaaggtggaattcaaaacgactagatctggggagccttttattattttatcaggaggtttgtcatatgatactgtaggaagaagaccttgcttaacagtgatgcatgggaaaagcactgctgtgctagaaatggactattcaattgttgattttctaacgctgtgtgaaacaccatacccaaatgattttcaagaaccatatgctgtggttgttcttctagaaaaggatttagtacttatagaccttgcacaaaatggatatcctatatttgaaaatccctaccctttgagtatacatgagtcccctgttacatgttgcgaatattttgcggattgtcctgtggaccttattcctgcactttattctgttggagctagacagaaacgtcaaggttacagcaaaaaggaatggcccatcaacggaggtaattggggcttgggtgctcaaagttacccagaaataattattacagggcatgctgatgggtcagttaagttctgggatgcttctgcaataactctacaagtattatataagctaaagacatctaaagtatttgaaaagtcaagaaataaagatgacaggccaaacacagacattgtagatgaagatccatatgccattcagatcatctcctggtgtccagaaagtagaatgctgtgcatcgctggagtttcagctcatgtcattatttatagattcagcaagcaggaagtaatcacagaagtcattccgatgcttgaagttcgattattatatgagataaatgatgtggaaactccggagggtgagcagccaccacctttgccaacacccgtgggagggtccaaccctcagcccatccctcctcagtctcatccatctaccagtagcagttcatctgatgggcttcgtgataatgtaccttgtttaaaagttaaaaactcaccacttaaacagtctccaggttatcaaacagaactagttattcagttggtttgggtgggtggagaaccaccacaacaaataaccagcctggcagtcaattcttcctatggactggtggtttttggcaattgcaatggcattgctatggttgactacctccagaaagcagtgctgctcaacctgggcactattgaattatatggctctaatgatccttatcggagagaaccccgatctcctcgtaaatctcgacagccttcaggagccggtctgtgtgatattagtgaagggactgttgttccagaggatcgctgcaaatctccaacctctggttcttcatcaccacacaattcagatgatgaacaaaaaatgaataattttatagaaaaggtgaagaccaaaagcagaaagttttccaagatggtagccaatgatatagcaaagatgtcaaggaagttaagcttacctactgacctaaagcctgatttagatgtaaaggataactcctttagccgatcacggagttcaagtgtaacaagcattgacaaagaatcccgagaagcgatctccgctcttcatttctgtgaaacgtttactcgaaagacggactcgtccccttccccttgtctatgggttggaacaacgctaggaacagtgcttgtcattgcactgaaccttcccccagggggagagcaaagacttcttcagccagtaattgtgtctccaagtggtactatattgaggttaaaaggtgcaatcttgagaatggcatttctggataccacaggctgcttaataccacctgcgtatgaaccctggagagagcacaatgttcctgaagaaaaagacgaaaaggagaaattgaaaaaacggcggcctgtctcagtatccccctcctcttctcaggaaattagtgaaaaccagtatgcagtgatatgttctgaaaagcaagcaaaagtaatctcactgccaacccagaactgtgcttataagcaaaatattacagagacctcgtttgtgcttcgtggagatattgtagcattgagtaacagtatctgccttgcctgtttctgtgccaatggacatataatgacttttagtttgccaagtttaagacctctgttggatgtgtattacttgccccttaccaatatgcggatagccagaacgttctgctttaccaacaatggacaagcattataccttgtttcacctacagaaatccagagacttacttatagtcaagagacctgtgaaaatcttcaggaaatgttgggtgaactcttcactcctgtagaaacacctgaagcaccaaacaggggattctttaaaggcttatttggaggtggtgcacaatctcttgacagagaagaactatttggagaatcgtcctcaggaaaggcttcaaggagccttgcacagcatattcctggccctggtggcattgaaggcgtaaaaggggcagcatctggagttgttggtgaattagcacgagccaggctggcactagatgaaagagggcagaaacttggcgatctggaagaaagaactgcggccatgttatcaagtgcagagtcattttctaaacatgctcatgagattatgttgaaatacaaagataagaagtggtaccagttctga

SEQ ID NO: 45726 - protein, 284 aa, Artificial Sequence
  derived and/or modified sequence
MFRAAAPGQLRRAVAQDLCKVAGIAKVLVAQHDVYKGLLPEELTPLILATQKQFNYTHICAGASAFGKNLLPRVAAKLEVAPISDIIAIKSPDTFVRTIYAGNALCTVKCDEKVKVFSVRGTSFDAAATSGGSASSEKASSTSPVEISEWLDQKLTKSDRPELTGAKVVVSGGRGLKSGENFKLLYDLADQLHAAVGASRAAVDAGFVPNDMQVGQTGKIVAPELYIAVGISGAIQHLAGMKDSKTIVAINKDPEAPIFQVADYGIVADLFKVVPEMTEILKKK

SEQ ID NO: 45727 - DNA, 855 bp, Artificial Sequence
  derived and/or modified sequence
atgttccgggctgccgcgccaggtcagctcagacgcgcggtggctcaggatctgtgtaaggtcgcaggtatcgcaaaagtgttggtcgcgcagcatgacgtgtataaaggtcttttgcccgaggagctcactccattgatcctggcaacccagaagcaattcaactatacccatatttgtgccggcgcaagtgctttcggaaagaatctgttgccacgcgtggcggctaaactggaggtggcacctatctctgatattattgctattaaatcgccagatacattcgtcaggaccatctacgctggaaacgccctttgcaccgtcaaatgcgatgaaaaggtgaaggtgttctcagtacggggaacctcatttgatgcagccgccaccagtggtggctctgccagcagcgaaaaagcctcctcaacctctcctgtggagatctctgagtggttggaccagaaactcactaagagcgatcgacctgagctcaccggggccaaggtggttgtgtcaggcgggaggggcttaaaaagtggggaaaactttaaactgctgtacgacttagccgatcaactgcacgccgctgttggagcgtccagggccgcagtcgacgccggctttgtccctaacgacatgcaagttggacagacaggaaagatcgtggccccagagctctacatcgctgtgggcatcagcggcgcaatccagcacctcgctggcatgaaagattcaaagactattgttgccatcaacaaagaccccgaggctccaatctttcaagtggctgactatggaattgtggccgatctctttaaggtggtaccagaaatgacggagattcttaagaagaagtag

SEQ ID NO: 45728 - DNA, 855 bp, Artificial Sequence
  derived and/or modified sequence
atgttccgggctgctgcccctggccagctgcggcgggctgtggcccaggacctgtgcaaggtggccggcatcgccaaggtgctggtggcccagcatgatgtgtacaagggcctgctgcctgaggagctgacccccctcatcctggccacccagaagcagttcaactacacccacatctgtgccggggccagcgccttcggcaagaacctgctgccccgggtggccgccaagctggaggtggcccccatcagtgacatcatcgccatcaagagcccagacacctttgtgaggaccatctatgctggaaatgccctgtgcaccgtgaagtgtgatgagaaggtgaaggtgttttctgtgcggggcaccagctttgatgctgctgccaccagcggcggcagcgccagcagcgagaaggccagcagcaccagccctgtggagatcagcgagtggctggaccagaagctgaccaagagtgacaggcctgagctgaccggggccaaggtggtggtgtctgggggccggggcctgaagagcggggagaacttcaagctgctgtatgacctggccgaccagctgcacgccgctgtgggcgccagcagagctgctgtggatgctggctttgtgcccaatgacatgcaggtgggccagacaggcaagatcgtggcccctgagctgtacatcgctgtgggcatcagcggggccatccagcacctggccggcatgaaggacagcaagaccatcgtggccatcaacaaggaccctgaggcccccatcttccaggtggccgactatggcatcgtggccgacctcttcaaggtggtgcctgagatgacagagatcctgaagaagaagtag

SEQ ID NO: 45729 - DNA, 855 bp, Artificial Sequence
  derived and/or modified sequence
atgttccgggccgccgcccccggccagctgcggcgggccgtggcccaggatctgtgtaaagtagctggtatcgcaaaagtgctggtagcgcagcatgacgtctacaaagggttactccctgaggagctcacgcctctgatcttagctactcaaaaacagtttaattacacccatatttgtgctggcgcatccgcatttggcaaaaacctgctgccccgtgttgccgccaaactggaagtggcacccatcagtgatatcatcgccatcaagtctccagacacattcgtacggacaatttatgccggaaacgcactctgtacagtcaaatgcgatgagaaggtgaaagtttttagcgtgcggggcacgtccttcgatgcggccgcaacttctggcgggtcggctagcagtgaaaaggccagcagcacctcccctgtcgagattagtgaatggctggaccagaaactcacaaaatcagacaggcccgagctgaccggagctaaggtcgtcgtgtctgggggtcgcgggctgaaatctggtgagaacttcaaacttctttacgacctagccgatcaacttcacgccgctgtaggcgcttctcgggcggcagtcgacgccggattcgtgcccaacgacatgcaggtaggtcagaccgggaaaattgtcgcacctgagttgtatatcgccgtgggcatttccggagcaattcagcaccttgcgggaatgaaggactccaagactatcgtcgccattaacaaagatcccgaggctccaatttttcaggtggctgattatggaatcgtggcggacctgtttaaggtggtgcccgagatgacggagatactgaagaagaagtag

SEQ ID NO: 45730 - DNA, 855 bp, Artificial Sequence
  derived and/or modified sequence
atgtttagagcagcagccccagggcagctacggagagctgtcgcccaggatctatgtaaagtagctggcatcgctaaggtcttggtagcccagcacgatgtatacaagggcctgctgcctgaggagcttacaccgttgattcttgccacccagaagcaatttaactatacgcacatttgtgccggtgcaagcgccttcggtaaaaatctgctcccacgagtggccgctaagcttgaggtggcaccgatttcggacatcatcgcaattaaatcacctgacaccttcgttcggaccatttacgctggaaacgccctgtgcacagttaagtgtgatgagaaagtgaaagtcttttctgtgcgaggaacctcatttgacgcagcggcaacatccggagggtccgcatcttctgagaaggccagcagtacaagcccagtcgagataagtgagtggctcgaccagaagctcacaaagagtgatcggcctgagttaacaggggctaaagtagtggtctccggaggtcggggactgaagagcggggaaaacttcaaactgctctacgatctggctgaccaacttcatgctgccgtgggtgcatctcgggctgccgtggacgcaggtttcgtgcctaacgacatgcaagttggacagactgggaaaatcgtcgcacctgaactctacattgctgtcggcattagcggcgcaatacagcatctcgccggtatgaaggacagtaagacaattgtggcaattaataaagacccagaggctcctatcttccaggtcgccgactacgggatagtggcagatctgtttaaagtggtcccagagatgacggagattctgaaaaagaaatag

SEQ ID NO: 45731 - DNA, 855 bp, Artificial Sequence
  derived and/or modified sequence
atgttcagagccgccgcccccggccagctgagaagagccgtggcccaggacctgtgcaaggtggccggcatcgccaaggtgctggtggcccagcacgacgtgtacaagggcctgctgcccgaggagctgacccccctgatcctggccacccagaagcagttcaactacacccacatctgcgccggcgccagcgccttcggcaagaacctgctgcccagagtggccgccaagctggaggtggcccccatcagcgacatcatcgccatcaagagccccgacaccttcgtgagaaccatctacgccggcaacgccctgtgcaccgtgaagtgcgacgagaaggtgaaggtgttcagcgtgagaggcaccagcttcgacgccgccgccaccagcggcggcagcgccagcagcgagaaggccagcagcaccagccccgtggagatcagcgagtggctggaccagaagctgaccaagagcgacagacccgagctgaccggcgccaaggtggtggtgagcggcggcagaggcctgaagagcggcgagaacttcaagctgctgtacgacctggccgaccagctgcacgccgccgtgggcgccagcagagccgccgtggacgccggcttcgtgcccaacgacatgcaggtgggccagaccggcaagatcgtggcccccgagctgtacatcgccgtgggcatcagcggcgccatccagcacctggccggcatgaaggacagcaagaccatcgtggccatcaacaaggaccccgaggcccccatcttccaggtggccgactacggcatcgtggccgacctgttcaaggtggtgcccgagatgaccgagatcctgaagaagaagtag

SEQ ID NO: 45732 - DNA, 1346 bp, Artificial Sequence
  derived and/or modified sequence
ggcggaagcggagaccatgttccgagcggcggctccggggcagctccggcgggcggtggcacaagatctctgtaaagtagcaggcatagcaaaagttctggtggctcagcatgatgtgtacaaaggcctacttccagaggaactgacaccattgattttggcaactcagaagcagttcaattacacacacatctgtgctggagcatctgccttcggaaagaaccttttgcccagagtagcagccaaacttgaggttgccccgatttctgacatcattgcaatcaagtcacctgacacatttgtgagaactatttatgcaggaaatgctctatgtacagtgaagtgtgatgagaaagtgaaagtgttttctgtccgtggaacatcctttgatgctgcagcaacaagtggcggtagtgccagttcagaaaaggcatcaagtacttcaccagtggaaatatcagagtggcttgaccagaaattaacaaaaagtgatcgaccagagctaacaggtgccaaagtggtggtatctggtggtcgaggcttgaagagtggagagaactttaagttgttatatgacttggcagatcaactacatgctgcagttggtgcttcccgtgctgctgttgatgctggctttgttcccaatgacatgcaagttggacagacgggaaaaatagtagcaccagaactttatattgctgttggaatatctggagccatccaacatttagctgggatgaaagacagcaagacaattgtggcaattaataaagacccagaagctccaattttccaagtggcagattatggaatagttgcagatttatttaaggtagttcctgaaatgactgagatattgaagaaaaaatgaatcaggatcatgccttaaaaagaaaacttttgttaaagtattccactgaaatcacagatatttgtgggtattataacaatcattggaaagcatggagagctacatttcataatttgagggaaaatttctaacagatgccagaatgcttgtttatgggattgctgtgtttccttttaattatttgtggttccaaacaattattgtttgaactttttaaattctgtactaaaatctataataaagcttttccacagctttaaaactatcagaaatatgcctagcctctagagaaaattgaagaaaaggagtaaaaattttgtttatttatttatttttttgcctttcttgttcatggagagctctatgttttaggaagattgtaaacatgattgtctccaccagcctaatcaacctactaatctcattgttgaagggcaaacttcataggagaaggtaactgaattggcaagtgcag

SEQ ID NO: 45733 - protein, 3277 aa, Artificial Sequence
  derived and/or modified sequence
MAAAARPRGRALGPVLPPTPLLLLVLRVLPACGATARDPGAAAGLSLHPTYFNLAEAARIWATATCGERGPGEGRPQPELYCKLVGGPTAPGSGHTIQGQFCDYCNSEDPRKAHPVTNAIDGSERWWQSPPLSSGTQYNRVNLTLDLGQLFHVAYILIKFANSPRPDLWVLERSVDFGSTYSPWQYFAHSKVDCLKEFGREANMAVTRDDDVLCVTEYSRIVPLENGEVVVSLINGRPGAKNFTFSHTLREFTKATNIRLRFLRTNTLLGHLISKAQRDPTVTRRYYYSIKDISIGGQCVCNGHAEVCNINNPEKLFRCECQHHTCGETCDRCCTGYNQRRWRPAAWEQSHECEACNCHGHASNCYYDPDVERQQASLNTQGIYAGGGVCINCQHNTAGVNCEQCAKGYYRPYGVPVDAPDGCIPCSCDPEHADGCEQGSGRCHCKPNFHGDNCEKCAIGYYNFPFCLRIPIFPVSTPSSEDPVAGDIKGCDCNLEGVLPEICDAHGRCLCRPGVEGPRCDTCRSGFYSFPICQACWCSALGSYQMPCSSVTGQCECRPGVTGQRCDRCLSGAYDFPHCQGSSSACDPAGTINSNLGYCQCKLHVEGPTCSRCKLLYWNLDKENPSGCSECKCHKAGTVSGTGECRQGDGDCHCKSHVGGDSCDTCEDGYFALEKSNYFGCQGCQCDIGGALSSMCSGPSGVCQCREHVVGKVCQRPENNYYFPDLHHMKYEIEDGSTPNGRDLRFGFDPLAFPEFSWRGYAQMTSVQNDVRITLNVGKSSGSLFRVILRYVNPGTEAVSGHITIYPSWGAAQSKEIIFLPSKEPAFVTVPGNGFADPFSITPGIWVACIKAEGVLLDYLVLLPRDYYEASVLQLPVTEPCAYAGPPQENCLLYQHLPVTRFPCTLACEARHFLLDGEPRPVAVRQPTPAHPVMVDLSGREVELHLRLRIPQVGHYVVVVEYSTEAAQLFVVDVNVKSSGSVLAGQVNIYSCNYSVLCRSAVIDHMSRIAMYELLADADIQLKGHMARFLLHQVCIIPIEEFSAEYVRPQVHCIASYGRFVNQSATCVSLAHETPPTALILDVLSGRPFPHLPQQSSPSVDVLPGVTLKAPQNQVTLRGRVPHLGRYVFVIHFYQAAHPTFPAQVSVDGGWPRAGSFHASFCPHVLGCRDQVIAEGQIEFDISEPEVAATVKVPEGKSLVLVRVLVVPAENYDYQILHKKSMDKSLEFITNCGKNSFYLDPQTASRFCKNSARSLVAFYHKGALPCECHPTGATGPHCSPEGGQCPCQPNVIGRQCTRCATGHYGFPRCKPCSCGRRLCEEMTGQCRCPPRTVRPQCEVCETHSFSFHPMAGCEGCNCSRRGTIEAAMPECDRDSGQCRCKPRITGRQCDRCASGFYRFPECVPCNCNRDGTEPGVCDPGTGACLCKENVEGTECNVCREGSFHLDPANLKGCTSCFCFGVNNQCHSSHKRRTKFVDMLGWHLETADRVDIPVSFNPGSNSMVADLQELPATIHSASWVAPTSYLGDKVSSYGGYLTYQAKSFGLPGDMVLLEKKPDVQLTGQHMSIIYEETNTPRPDRLHHGRVHVVEGNFRHASSRAPVSREELMTVLSRLADVRIQGLYFTETQRLTLSEVGLEEASDTGSGRIALAVEICACPPAYAGDSCQGCSPGYYRDHKGLYTGRCVPCNCNGHSNQCQDGSGICVNCQHNTAGEHCERCQEGYYGNAVHGSCRACPCPHTNSFATGCVVNGGDVRCSCKAGYTGTQCERCAPGYFGNPQKFGGSCQPCSCNSNGQLGSCHPLTGDCINQEPKDSSPAEECDDCDSCVMTLLNDLATMGEQLRLVKSQLQGLSASAGLLEQMRHMETQAKDLRNQLLNYRSAISNHGSKIEGLERELTDLNQEFETLQEKAQVNSRKAQTLNNNVNRATQSAKELDVKIKNVIRNVHMLNRIRTWQKTHQGENNGLANSIRDSLNEYEAKLSDLRARLQEAAAQAKQANGLNQENERALGAIQRQVKEINSLQSDFTKYLTTADSSLLQTNIALQLMEKSQKEYEKLAASLNEARQELSDKVRELSRSAGKTSLVEEAEKHARSLQELAKQLEEIKRNASGDELVRCAVDAATAYENILNAIKAAEDAANRAASASESALQTVIKEDLPRKAKTLSSNSDKLLNEAKMTQKKLKQEVSPALNNLQQTLNIVTVQKEVIDTNLTTLRDGLHGIQRGDIDAMISSAKSMVRKANDITDEVLDGLNPIQTDVERIKDTYGRTQNEDFKKALTDADNSVNKLTNKLPDLWRKIESINQQLLPLGNISDNMDRIRELIQQARDAASKVAVPMRFNGKSGVEVRLPNDLEDLKGYTSLSLFLQRPNSRENGGTENMFVMYLGNKDASRDYIGMAVVDGQLTCVYNLGDREAELQVDQILTKSETKEAVMDRVKFQRIYQFARLNYTKGATSSKPETPGVYDMDGRNSNTLLNLDPENVVFYVGGYPPDFKLPSRLSFPPYKGCIELDDLNENVLSLYNFKKTFNLNTTEVEPCRRRKEESDKNYFEGTGYARVPTQPHAPIPTFGQTIQTTVDRGLLFFAENGDRFISLNIEDGKLMVRYKLNSELPKERGVGDAINNGRDHSIQIKIGKLQKRMWINVDVQNTIIDGEVFDFSTYYLGGIPIAIRERFNISTPAFRGCMKNLKKTSGVVRLNDTVGVTKKCSEDWKLVRSASFSRGGQLSFTDLGLPPTDHLQASFGFQTFQPSGILLDHQTWTRNLQVTLEDGYIELSTSDSGSPIFKSPQTYMDGLLHYVSVISDNSGLRLLIDDQLLRNSKRLKHISSSRQSLRLGGSNFEGCISNVFVQRLSLSPEVLDLTSNSLKRDVSLGGCSLNKPPFLMLLKGSTRFNKTKTFRINQLLQDTPVASPRSVKVWQDACSPLPKTQANHGALQFGDIPTSHLLFKLPQELLKPRSQFAVDMQTTSSRGLVFHTGTKNSFMALYLSKGRLVFALGTDGKKLRIKSKEKCNDGKWHTVVFGHDGEKGRLVVDGLRAREGSLPGNSTISIRAPVYLGSPPSGKPKSLPTNSFVGCLKNFQLDSKPLYTPSSSFGVSSCLGGPLEKGIYFSEEGGHVVLAHSVLLGPEFKLVFSIRPRSLTGILIHIGSQPGKHLCVYLEAGKVTASMDSGAGGTSTSVTPKQSLCDGQWHSVAVTIKQHILHLELDTDSSYTAGQIPFPPASTQEPLHLGGAPANLTTLRIPVWKSFFGCLRNIHVNHIPVPVTEALEVQGPVSLNGCPDQ

SEQ ID NO: 45734 - protein, 1519 aa, Artificial Sequence
  derived and/or modified sequence
MAAAARPRGRALGPVLPPTPLLLLVLRVLPACGATARDPGAAAGLSLHPTYFNLAEAARIWATATCGERGPGEGRPQPELYCKLVGGPTAPGSGHTIQGQFCDYCNSEDPRKAHPVTNAIDGSERWWQSPPLSSGTQYNRVNLTLDLGQLFHVAYILIKFANSPRPDLWVLERSVDFGSTYSPWQYFAHSKVDCLKEFGREANMAVTRDDDVLCVTEYSRIVPLENGEVVVSLINGRPGAKNFTFSHTLRVYQGNKHPLFLRTNTLLGHLISKAQRDPTVTRRYYYSIKDISIGGQCVCNGHAEVCNINNPEKLFRCECQHHTCGETCDRCCTGYNQRRWRPAAWEQSHECEACNCHGHASNCYYDPDVERQQASLNTQGIYAGGGVCINCQHNTAGVNCEQCAKGYYRPYGVPVDAPDGCIPCSCDPEHADGCEQGSGRCHCKPNFHGDNCEKCAIGYYNFPFCLRIPIFPVSTPSSEDPVAGDIKGCDCNLEGVLPEICDAHGRCLCRPGVEGPRCDTCRSGFYSFPICQACWCSALGSYQMPCSSVTGQCECRPGVTGQRCDRCLSGAYDFPHCQGSSSACDPAGTINSNLGYCQCKLHVEGPTCSRCKLLYWNLDKENPSGCSECKCHKAGTVSGTGECRQGDGDCHCKSHVGGDSCDTCEDGYFALEKSNYFGCQGCQCDIGGALSSMCSGPSGVCQCREHVVGKVCQRPENNYYFPDLHHMKYEIEDGSTPNGRDLRFGFDPLAFPEFSWRGYAQMTSVQNDVRITLNVGKSSGSLFRVILRYVNPGTEAVSGHITIYPSWGAAQSKEIIFLPSKEPAFVTVPGNGFADPFSITPGIWVACIKAEGVLLDYLVLLPRDYYEASVLQLPVTEPCAYAGPPQENCLLYQHLPVTRFPCTLACEARHFLLDGEPRPVAVRQPTPAHPVMVDLSGREVELHLRLRIPQVGHYVVVVEYSTEAAQLFVVDVNVKSSGSVLAGQVNIYSCNYSVLCRSAVIDHMSRIAMYELLADADIQLKGHMARFLLHQVCIIPIEEFSAEYVRPQVHCIASYGRFVNQSATCVSLAHETPPTALILDVLSGRPFPHLPQQSSPSVDVLPGVTLKAPQNQVTLRGRVPHLGRYVFVIHFYQAAHPTFPAQVSVDGGWPRAGSFHASFCPHVLGCRDQVIAEGQIEFDISEPEVAATVKVPEGKSLVLVRVLVVPAENYDYQILHKKSMDKSLEFITNCGKNSFYLDPQTASRFCKNSARSLVAFYHKGALPCECHPTGATGPHCSPEGGAHASPTSSGGSAPAVQQAYGFPRCKRKSCSCGRRLCEEMTGQCRCPPRTVRPQCEVCETHSFSFHPMAGCEGCNCSRRGTIEAAMPECDRDSGQCRCKPRITGRQCDRCASGFYRFPECVPCNCNRDGTEPGVCDPGTGACLCKENVEGTECNVCREGSFHLDPANLKGCTSCFCFGVNNQCHSSHKRRTKFVDMLGWHLETADRVDIPVSFNPGSNSMVADLQELPATIHSASWVAP

SEQ ID NO: 45735 - DNA, 9834 bp, Artificial Sequence
  derived and/or modified sequence
atggccgctgccgccagaccccgcggtagagctctcggtccagtgctcccccctacacccctgcttctgttggtgctcagagttctcccagcttgtggtgctactgcccgggacccaggcgcagcagcaggattaagcctccatcccacttatttcaatctcgccgaagctgcacggatctgggccaccgccacatgtggcgagcggggtccaggcgaaggccggccgcagcccgaattgtattgtaagctcgtcggaggcccaaccgcaccaggatctgggcacaccattcaaggccagttctgcgactactgcaatagcgaagacccccgaaaggctcatcctgttaccaatgccattgatgggtccgagcggtggtggcagagtcctccattgagctcaggtactcaatacaatcgtgtcaatctgacgcttgaccttgggcagctcttccatgtggcctacatcctgattaaattcgccaattctcctagacccgacttgtgggttctcgaacgctcagtggacttcggctcgacatactccccctggcagtactttgcacattccaaagtggattgcctaaaagagttcggacgcgaggccaatatggctgttactagagatgacgatgtcctctgtgttactgagtatagcaggatcgttcccctggagaatggcgaggtggtcgtttcactgatcaacgggagacccggtgccaagaactttactttttctcacaccctgcgtgagtttacgaaagccacgaacatccggctccgcttcctgcgcacaaatacactccttggacatctcattagtaaggcgcaacgggaccccacagtaaccagacgctattattactcaattaaagatatcagcattggcggtcaatgtgtttgcaacgggcatgccgaggtatgtaacataaacaaccccgagaaactgtttcggtgcgaatgccaacaccacacatgtggcgagacgtgcgaccgctgctgcacaggctataatcagaggcggtggaggcctgccgcgtgggagcaatctcacgaatgcgaagcctgtaattgccatggtcacgcctcaaactgctactacgatcccgatgtagaacggcagcaggcaagcttaaacactcagggaatatacgctggcggaggcgtttgcatcaactgccagcataacaccgccggagtgaactgcgagcagtgtgctaagggttattaccggccttacggtgttccagttgatgcaccagacggctgcattccctgcagctgcgaccctgaacacgctgatggatgcgagcaggggagtggacgctgtcactgtaaacccaatttccacggagataactgtgaaaagtgcgcgatcggatattacaatttcccattttgcctgaggattcccatctttcccgtaagcacaccatctagcgaggaccccgtggctggcgatataaagggttgtgactgcaacctggagggagtgttgcctgagatctgtgatgcacacggccgatgtctgtgccgaccaggcgtggagggaccacggtgtgatacatgtcggagcggattttattcattccctatctgccaggcctgttggtgttctgctttgggatcttatcaaatgccctgctcctctgtgaccgggcagtgcgagtgtaggcccggggtgaccggccagcgctgtgatcgctgcctgtccggagcctacgatttcccacactgtcagggtagtagctctgcatgtgatccggccggcacgatcaacagtaatctgggatactgccagtgtaagttgcacgtcgagggccctacatgtagccgctgcaaacttctttactggaacctggataaggaaaatccgagcggatgctccgagtgcaagtgtcacaaagctgggactgttagcgggaccggagaatgcaggcaaggtgacggcgattgtcactgcaagagtcatgtcggtggcgacagctgcgacacgtgcgaagacgggtatttcgccctggaaaaatccaactactttggctgccagggctgtcagtgtgacattggaggcgccctctctagcatgtgctcagggccttccggggtctgccaatgccgcgagcacgttgtggggaaggtttgtcaaaggcctgagaacaactactattttccggaccttcatcatatgaagtacgagatcgaggatggctcgacccctaatgggagggacttaaggtttggattcgatcccttggccttccccgaattctcgtggcgcgggtacgcacaaatgacttctgtgcagaatgatgtgcgtatcacacttaatgtgggcaagtcctcaggctctctctttcgtgtcatcctgcgatacgtaaacccaggcacagaagctgtatctggacacataacaatctacccttcctggggcgcagctcagtcaaaagagattatcttccttccgtcaaaggagcccgccttcgtcactgtccctggcaatgggtttgccgatcctttttctatcaccccaggaatctgggtcgcatgtattaaggccgagggcgtgctgctggattatctggtgcttctgcccagagactactacgaggcaagcgtgctgcagttgcccgtgacggagccctgcgcctacgcgggtcctccgcaggagaactgcttgctgtatcagcatcttcctgtaaccagatttccttgcactctagcttgtgaagcgagacatttccttctggacggggagccgaggcccgtggcagtcagacaacctactcccgcccacccagtgatggtggacttgtctggccgcgaggtggaactgcacttgaggctcagaataccgcaggtgggccactatgtggtagtggtggagtattcgacagaagctgctcagctgtttgtagtggacgtaaacgtaaaaagctctggctccgttcttgcaggacaggtgaatatatattcgtgcaattacagcgtactgtgccgctccgcagtgatcgatcacatgtcgaggatagctatgtacgagctacttgcagatgctgacattcagcttaaagggcatatggcccgtttcctgcttcatcaggtgtgtattatccccattgaggaattcagtgccgaatatgtacggcctcaggtgcattgcattgcaagctacggacggttcgttaaccaatccgccacatgtgtgagccttgctcatgagactccccctactgcactcattctcgatgtgttgtcagggcgcccctttccacacctgccccagcagtcaagtccctccgttgacgtgttgcctggtgtgactctgaaagccccacagaaccaggtcaccctgcgtggccgcgtgccccatttaggtaggtacgttttcgtcatacatttttatcaggctgcccatccaacattcccggctcaagtgtctgtagacggtggatggccgcgcgccggaagctttcacgcatctttttgtccacacgtcctcgggtgtagggatcaggtaattgcggagggccaaatagagttcgatatctctgagcccgaggttgccgccactgtcaaggtcccagagggtaagtcgctcgtgttagtgagggttctggtggtgccagctgaaaactacgactaccagattctacataagaagagtatggataagagtctggaatttattacaaattgtggcaagaacagcttctacctagatccacagaccgcctctcgtttttgtaaaaactccgcaagaagccttgtagctttctatcataagggagccttgccttgcgagtgtcatcctacgggagcaaccggccctcactgttcaccagagggtggccagtgtccatgccagcctaatgtgatcggccggcagtgtacccgctgtgccactggacactacggctttccccggtgtaagccctgcagctgcggccgcagactgtgcgaggaaatgacagggcagtgccgctgccctcctcgaactgttcggccccagtgcgaggtgtgtgaaacccattctttctcttttcacccgatggcaggttgcgagggctgtaattgctcccggcggggcactatcgaggctgcgatgcccgaatgcgacagggacagtgggcagtgtcggtgcaagccacggataaccgggcggcaatgcgaccggtgcgcaagcggcttctaccggtttcctgagtgcgtgccttgcaactgcaaccgtgatggcaccgagccaggagtgtgcgatcctggcacgggcgcttgtctgtgcaaggagaatgtcgaaggcactgagtgcaacgtttgtagggaaggaagcttccacctcgaccccgctaatctgaagggatgcaccagctgtttttgcttcggcgtgaacaaccaatgtcactccagccacaagcgtaggacaaagtttgtggatatgctcggctggcatctcgagaccgccgatagggtcgacatcccggtcagcttcaacccaggcagcaacagtatggttgccgacctgcaggaactgcctgctacgattcacagcgcctcatgggtagccccgacatcctacctgggcgataaagtcagtagctacggcggctacctcacatatcaggcgaaatctttcggactgccaggggatatggttctgctcgagaagaaaccagatgtgcagctaacaggacagcatatgtcgatcatctacgaagagacaaacactccaagaccagatcgattgcaccatggacgcgtgcatgtggtggaaggcaactttcgacatgcttctagccgagccccagtatctcgcgaggagttgatgaccgttctatctcggctagccgacgtccgcatccagggattgtacttcactgaaactcagcgactgaccttgagcgaagtgggcctggaagaggcatcggacacaggaagtggcaggatcgccctcgccgtggagatttgcgcttgccctcccgcctacgccggcgactcttgccagggctgttcacctggctattatcgcgaccacaaaggattatataccggccggtgtgtaccttgcaattgcaatggtcattctaatcaatgccaagacggatctggaatctgcgtgaactgccaacacaacacagctggcgaacactgcgagcgctgtcaagaaggatactacggtaacgccgtacacggaagctgccgggcctgcccctgtcctcacaccaatagtttcgcaaccggatgtgtggtgaatgggggggacgtccggtgctcttgcaaggctggctacacgggcactcagtgcgagagatgtgcccccggatacttcgggaatcctcagaagttcggtggatcctgtcagccttgcagctgcaattcaaatggccaactgggaagctgtcatcccctaactggggattgcataaaccaggagccgaaggattcttctccggctgaagagtgcgacgattgcgactcttgcgttatgactcttctcaacgatctcgcaaccatgggagaacagctcaggctggtcaagtctcaactacagggcctgtcagcatccgcagggttgctggagcagatgagacacatggagactcaggccaaggacctccgcaaccaattacttaattaccgtagcgcaatcagcaaccacggctccaaaatcgagggactggaaagggagctgaccgatctgaatcaggagtttgagacgctgcaagaaaaagctcaggtaaatagccggaaagctcagacactgaataacaatgtgaaccgggcaactcaatccgccaaagaactcgacgtgaaaatcaaaaatgttatacggaatgttcatatgctgaaccggataagaacatggcagaagacacaccaaggagaaaataatggtctggcaaactccattagagatagtctgaacgaatacgaggcaaaactcagtgacctgcgtgccagactgcaggaggccgccgcccaggccaagcaagccaacggactgaatcaagaaaatgagagggcactgggagctattcagcggcaggtgaaagagattaattcactgcagtctgactttactaaatacctgactaccgccgactccagtctcctgcaaaccaacattgctctacagttgatggaaaagagtcagaaagagtacgagaaactggccgctagtttgaatgaggcgaggcaggaattaagcgataaagttcgagagctcagcaggagcgcggggaaaactagtcttgttgaagaggctgaaaaacacgcgaggtctctgcaggagctagctaaacagctggaggagatcaaacggaacgcctctggagacgaactggtcagatgtgcggttgatgctgctaccgcctatgagaatatccttaacgccatcaaggccgcagaagacgcagcgaacagagcggccagcgcatctgaatcagccctccagactgtgattaaggaggatttaccaaggaaagcgaaaaccctgagctcaaactccgacaaactgttaaacgaggcaaaaatgacccaaaaaaagctgaagcaggaagtgagcccggcattgaataatctgcagcagaccctcaacatcgtcacggtccagaaggaagtgatagatacgaacctcactacactgcgggacggtctacatggaatacaacgtggtgatatagatgctatgatctcctctgctaagagcatggtccgcaaggcaaacgacatcaccgatgaggtactggacggcctgaatccaatccaaactgacgtggagaggattaaagacacatatgggcgcacgcagaacgaggattttaagaaggcgctcactgacgccgacaacagtgtcaacaaacttaccaacaagcttcccgacctttggaggaaaattgagtccatcaaccagcaactgctccccctggggaacatttctgataatatggatcgcattcgggagttgatacagcaggctcgcgacgccgcaagcaaggtggccgtgcccatgagatttaacgggaaatctggggtggaggtcaggctccccaatgacctggaggatctgaaaggttacaccagtttgtctcttttcctccaaaggcctaattctcgtgagaatggggggacggagaacatgttcgttatgtaccttggaaacaaggacgcaagccgggattacataggcatggcagtggtggacgggcagttgacttgcgtatacaaccttggggaccgagaggctgaactgcaggtcgatcagatcctgactaagagcgagacaaaagaagctgttatggatagggtgaagttccagcggatatatcagttcgctagactcaactataccaaaggggccacgtcttctaagccagaaacacccggagtgtatgatatggatggacggaacagtaataccctgctcaacctggaccccgagaacgtggttttttatgtgggcggataccccccggattttaaactcccaagtcggctctcgttccccccctacaagggctgcattgaactggacgacttaaatgagaatgtgctctctctgtataattttaaaaagactttcaatttgaatactacagaggtagaaccctgccgccgaaggaaggaagagagcgataagaactactttgaagggacgggttatgcgagggttccaacccagccgcacgcccctatcccgactttcggacagactattcagaccacggttgaccgcggtttgctcttcttcgcggaaaatggtgatagatttattagcttaaacatagaagacggaaagctgatggttcgctataagctcaactccgaactccccaaggagagaggcgtgggcgacgccataaacaacggcagggatcacagcatccagattaaaattggaaaactgcagaagcgcatgtggatcaatgtggacgtgcagaacactatcattgatggagaagtctttgacttttccacatattacctgggcggcatacccatcgcgataagggagcgctttaatatctccacaccggcgtttcgggggtgcatgaaaaacctaaaaaaaaccagcggcgttgtgcgcttgaacgacaccgtcggggtgacaaagaaatgctccgaggactggaaactggtcagatccgcctccttttcgagggggggacaactgtctttcactgatctcggcctgcctccgaccgatcacttgcaggccagtttcggattccagacattccagccatctgggattttattggatcaccagacctggactcgaaatctgcaggtgacgctggaagatggctacatcgaactgtctacctctgacagtggaagccccatatttaagtctccccaaacgtacatggacggattactccattatgtttcagttatttctgataactctgggttgaggctcctgatcgacgaccaacttctacggaattccaagagattgaaacatatctcctccagcagacagtccctgcggttgggaggcagtaacttcgaggggtgtatatctaatgtttttgtgcagcgcttaagcctgtccccagaggtcctcgatctgacctccaattcactgaagcgtgatgtgagtctgggcggttgttcactcaataagccgccttttttgatgttactgaaaggatccacaagatttaacaagacaaaaacctttagaatcaatcaattgcttcaggatactcctgtcgccagcccccgctctgtcaaagtatggcaggatgcctgttcccccctccctaaaacgcaggccaaccacggagccctgcaatttggagacattccaacatcacatctgcttttcaagctccctcaggaactgctcaagcctaggagtcagttcgcagtggatatgcaaacgacatctagccgaggcctcgtgttccataccgggactaaaaactcatttatggcgctgtatctgtcaaagggtcgtctcgtgttcgccctcggcacagatggcaagaaacttagaataaagagcaaggagaagtgcaatgacgggaagtggcacacagtggtgttcggacacgatggggagaaggggcggctggtggtggatggtttgagagctagagagggaagcctaccgggcaattctactatttcaattcgagctcccgtttacctcggttctccccctagcggcaaacctaagagcctacccacaaatagcttcgtggggtgtctgaagaactttcagttagactcaaagcccctctacactccctcttccagcttcggagtgtcttcttgtctgggcggtcctttggaaaagggcatttacttttccgaggagggtgggcatgtcgtgctagcccattcagtgcttctcggccccgagttcaaacttgtattttctataaggccaagaagtttaacagggattctgatccatattggatcccaacctggtaaacacctgtgtgtctatctagaggcgggcaaggtgaccgcaagtatggactctggtgcgggtgggacctccaccagcgtgacgcccaaacaaagtttgtgcgatgggcaatggcatagtgttgcagtgaccattaagcagcacatattgcatcttgagctggatactgatagttcatatacagctggacaaataccgttccctcccgcaagtacccaggagcctctccacctagggggggcccccgctaacctgacgacgttaaggattccagtttggaaatctttctttggctgcctcaggaatatacacgtgaaccatattcctgttcctgtgacagaagccctagaagtccagggcccagtaagtctcaacggatgtccagatcagtag

SEQ ID NO: 45736 - DNA, 4560 bp, Artificial Sequence
  derived and/or modified sequence
atggccgcggccgcgcgtccacgtggtagggctttaggccctgtcctccctcctacccctctgttactactcgtattacgtgttttacctgcgtgtggcgccaccgcccgggatcccggtgcagctgcaggcctgagtctgcacccaacatattttaacctcgctgaagcggccagaatttgggccactgcgacatgtggtgagagagggccgggggaaggccgaccccagcccgaactatactgcaagctggtggggggtcccacagcccccgggtccggtcacaccatacagggccagttttgtgactattgtaatagtgaagaccccagaaaagcccaccctgtcacaaatgccatagatgggagcgaacgatggtggcagtctccccctctgagtagcggcactcagtacaaccgggtcaatttaactctggacctggggcaactgttccatgtcgcctacattctgattaaattcgctaacagccccagacccgacttatgggtgctagaaagatccgttgatttcggctcaacatactctccctggcagtatttcgcccatagcaaagtagactgcctgaaggagtttggacgggaggccaacatggcggtaactagagatgatgatgtgttgtgtgtgacggaatacagccgcatcgtgccattggagaatggtgaggtggtggtgtctctgatcaacggccgaccaggagcaaagaattttactttctcacatacgctgagggtctaccagggcaacaaacacccactgtttttgaggactaatacactccttggacatcttatttctaaggcacagcgcgaccccactgtaactcgtaggtactattacagcatcaaagacatttctataggcgggcagtgtgtgtgcaatgggcatgcagaggtctgtaacatcaacaatccagagaagctgttccggtgcgagtgccaacaccatacttgtggggagacctgcgacaggtgttgtacagggtacaaccaacgcaggtggaggccagccgcctgggagcagtcacatgaatgtgaggcatgcaactgtcatggccatgcaagtaactgttactatgatcccgatgtggagcggcagcaggcttctctgaatacccaaggtatttatgctggcgggggggtttgcatcaactgccaacataacaccgccggcgtcaactgtgagcagtgcgcaaagggctattaccggccgtacggggtgcctgtggacgctccggacggttgcataccatgctcctgcgaccctgagcatgccgatggctgcgaacagggcagcggccgctgtcactgcaagcctaactttcatggtgacaactgcgagaagtgcgcgattgggtactacaacttcccattttgcctgagaatccccattttccctgtatcaacgccgtcatccgaggatcccgttgccggggatattaaaggttgcgattgtaaccttgaaggagtgctgccagaaatctgcgatgctcacggtagatgcttgtgccgccccggggtggagggtccccggtgcgacacttgccgctcaggtttttattcattcccaatttgtcaggcttgctggtgttctgctctcgggtcataccagatgccctgtagcagtgttactggccagtgcgagtgtagaccaggagtgactggccaacgatgcgaccgctgtctgagtggagcgtacgacttccctcactgtcagggaagttcttcagcgtgcgatccagctgggaccatcaactccaacctcggctactgccagtgcaaacttcacgtggaggggccaacttgttcccggtgtaaattgttgtattggaatctggataaagaaaaccccagtggctgttccgaatgtaaatgtcacaaagccggcacagtgtccggaacaggtgagtgtcggcaaggggacggggattgtcattgtaagagtcacgtggggggcgattcctgcgacacctgtgaggacggttatttcgcgctcgagaagtctaactacttcgggtgtcaagggtgtcagtgtgacatcggaggagcactctcatccatgtgttccggcccctctggcgtctgccaatgtcgggaacacgttgtcgggaaggtctgccagcggccagagaataattactattttcctgatctgcatcatatgaaatatgaaatagaggacggtagcacaccaaatggtcgcgatctcagatttggcttcgacccgctagccttccctgagttctcttggagaggctacgcccagatgaccagcgtgcagaacgatgtgcgcattaccttgaatgtggggaagtcttcagggagcctgttccgcgtaatactgagatacgtgaacccaggcaccgaggctgtgtctggacatatcactatttatcccagctggggagcggctcaatctaaagaaatcatcttccttccttctaaggagcctgccttcgtgaccgtaccaggcaacggattcgccgatccctttagcataacaccaggcatctgggtggcatgtattaaagcggagggcgttttactggattatctagtattgctgcccagggactactacgaagcgtctgtcttgcagcttcctgtcaccgagccttgcgcctatgctggaccaccccaggaaaattgtctgctttaccaacacctgccagttacaaggtttccatgtacgctcgcctgcgaggcaagacatttcctactagatggagagccgagacccgtggccgtgcgacagcccaccccagcccatcctgtcatggtcgacttatcaggacgcgaggtcgagctgcacttacggctcagaataccccaggtggggcattatgtggtcgtggttgagtacagcaccgaggctgcccagttgttcgtggttgatgttaacgtgaagagctctggaagcgttctcgccggccaggtgaacatttatagctgcaattacagtgtgctctgccgatctgctgtcattgatcatatgtctaggattgcgatgtatgagctgcttgcggacgctgacattcagctgaaaggccacatggcccgattcctgctgcaccaggtgtgcatcattcccatcgaagaatttagtgccgaatacgtgcgcccacaggtgcactgcatcgccagttacggaagatttgtcaaccagtcggccacctgtgtctctctggcacacgagacaccccccactgcacttatcctggatgtgttatctggaagacctttccctcatctcccccagcagagctccccatcagtggatgttttgccgggggtcactctcaaagcccctcagaatcaggtgacactacgcggacgcgtcccccatcttggaagatacgtgttcgtcattcacttttaccaagccgcccaccctactttccccgctcaggtttctgttgatggtggctggccacgggctgggagtttccacgcatccttctgcccccatgttctggggtgccgagatcaggtcattgcagaaggccagatagaattcgacatttccgaaccagaggtggccgccacggtgaaggtgccagagggaaagtcgcttgttctggtgcgcgtgttggtggtacctgcggaaaattatgattatcagatcctgcacaagaagtccatggacaagagtctggagttcatcaccaattgcggtaaaaatagcttttaccttgaccctcagaccgcatctaggttttgcaaaaattctgccagatccctggtggccttttaccataaaggtgcactgccctgcgagtgtcaccccactggagcgacaggaccgcattgcagcccagaaggcggagcacacgcaagccccacttcgtctggaggatccgcaccggcggtgcagcaagcgtacggcttcccccggtgcaagcgcaaatcttgcagctgcggccggcggttatgcgaggaaatgactggacagtgccgctgcccgcccagaaccgtcaggccgcagtgcgaggtctgcgagacacatagcttttctttccatccgatggccggatgtgaaggctgcaactgctctcggcgcgggaccatcgaagcggctatgcctgaatgtgatagggactcgggccagtgccgctgcaagccacggatcacaggaaggcaatgtgaccgttgcgcgtccggcttctaccgtttcccagaatgcgtgccctgtaactgtaatagggatggtacagagcccggagtctgtgacccagggaccggggcgtgcctctgtaaggaaaacgtcgagggtacagaatgtaacgtgtgtagggagggctcctttcatcttgatcctgcaaatctcaaagggtgtacgtcatgcttctgtttcggagtaaacaaccagtgccatagctcccataaaaggcgtacaaaattcgtggatatgttagggtggcacctcgaaaccgccgaccgcgtcgacattcccgtgtctttcaaccctggctccaattcaatggtggcagacctgcaggagctaccggccaccatccattccgcatcttgggtcgccccatag

SEQ ID NO: 45737 - DNA, 1743 bp, Artificial Sequence
  derived and/or modified sequence
atggccgctgcagcgcggccccgaggcagagcactaggtccggtcctaccaccaacaccactgctgctgctcgtgttacgggtattacccgcctgtggagccacggccagagacccaggtgctgccgccgggttgagtttacacccaacttatttcaatttggccgaggccgcccggatttgggccactgccacatgcggcgaacgcggccccggcgaaggaaggccccagccggagctgtactgtaagctagtgggaggtcccaccgcgcctggcagtggccacaccattcagggacagttctgcgactactgtaatagcgaggacccccggaaggcacacccagttaccaatgcaattgacggcagtgagcggtggtggcagagcccccctttgtcctctggcacccaatacaacagggtcaaccttaccctcgaccttgggcaactcttccacgttgcttatatactaattaaattcgctaacagtcctcgtcctgatctctgggtgttagaaagaagtgtagactttggcagcacctattccccttggcagtattttgcacactccaaggtggactgtttgaaagaatttggcagagaagccaatatggccgtaaccagggacgatgacgtgctgtgcgtgaccgagtatagccgcatcgttcctttggaaaatggagaggtggtggtgtcgttgattaatggtcggccaggtgccaaaaacttcacattttcccatacactgagagagtttactaaggccactaatattagactgcggtttctgcgcactaacaccctgcttgggcatctgatctcaaaagcccagcgcgacccaactgtcacaaggcgctattattactcaatcaaagacatatctataggcgggcagtgcgtgtgtaatggacacgccgaggtctgtaatattaacaatccggagaagctgttccggtgtgagtgccagcaccacacatgtggcgaaacttgcgatcggtgctgcacaggatataatcagcggcgttggcgacccgctgcgtgggagcagtctcatgagtgcgaagcttgtaattgtcatggtcatgcctcaaactgttactacgatcccgatgtggagcgtcagcaggcaagcctgaacacacaaggcatatacgccggcggaggtgtttgcattaattgccaacacaacacagccggcgtgaactgtgagcagtgcgcgaaaggctactaccgaccttatggcgttcctgttgatgcgcccgacggctgcattccttgttcctgtgacccagaacatgcggatggctgcgagcagggcagtgggagatgtcattgcaagcccaacttccacggcgacaattgcgaaaaatgcgctatcgggtattataattttcccttctgtttgaggataccgattttcccagtgtcaactcctagctctgaggatcctgtggctggggacatcaaaggaaattggtgtgactgcaacctcgagggggtgcttccggaaatttgcgatgcccacggccggtgtctgtgtagaccaggtgtagaggggccacggtgtgacacttgtaggagtggcttttattccttccctatttgccagggtccgtctgagaaggtggcaatttacaaaccagagtccaggcccagtgctgagactgagccagccagcacctggatcctggatttcccagcatcaaggacaggtgaaatcaatttctactgcctgtctccatag

SEQ ID NO: 45738 - DNA, 10335 bp, Artificial Sequence
  derived and/or modified sequence
gcaggtccgggaggcgcaggcggagagcggcggtgcccccgagcccctctgcggacggctcaggcgggaggaccccgcgcggctggatggcggcggccgcgcggcctcggggtcgggcactggggccagtactgccgccgacgccgctgctcctgctggtactgcgggtgctgccagcctgcggggcgaccgctcgggatcccggggccgcggccgggctcagccttcacccgacttacttcaacctggccgaggcggcgaggatttgggccaccgccacctgcggggagaggggacccggcgaggggaggccccagcccgagctctactgcaagttggtcgggggccccaccgccccaggcagcggccacaccatccagggccagttctgtgactattgcaattctgaagaccccaggaaagcacatcctgtcaccaatgccatcgatggatctgaacgttggtggcaaagccctcccctgtcctcaggcacacagtacaacagagtcaacctcaccttggatctggggcagctcttccatgtggcctatattttaatcaaatttgcaaattctcctcgccctgatctttgggtcttggaaagatctgtagactttggaagcacctactcaccatggcaatattttgctcattctaaagtagactgtttaaaagaatttgggcgggaggcaaatatggctgtcacccgggatgatgatgtactttgtgttactgaatattcccgtattgtacctttggaaaatggtgaggttgtggtgtccttgataaacggtcgtccaggtgcaaaaaattttactttctctcacaccctgagggagtttaccaaggcaacaaacatccgcttgcgttttcttagaaccaatacgcttcttggacacctcatctccaaagcccagcgagatccaactgtcactcggcggtattattacagcataaaggacatcagcattggtgggcagtgtgtttgcaatggccatgctgaagtgtgcaatataaacaatcctgaaaaactgtttcggtgtgaatgccagcaccacacctgtggggagacgtgtgatcgctgctgcacagggtacaatcagaggcgctggcggcccgccgcttgggagcagagccacgagtgtgaagcatgcaactgccacggccatgccagcaactgttactatgatccagatgttgagcggcagcaggcaagcttgaatacccagggcatctatgctggtggaggggtctgcattaactgtcagcacaacacagctggagtaaactgtgaacagtgtgctaagggctattaccgcccttatggggttccagtggatgcccctgatggctgcatcccctgcagctgtgaccctgagcatgcggatggctgtgaacagggttcaggccgctgtcactgcaagccaaatttccacggagacaactgtgagaagtgtgcaattggatactacaatttcccattttgcttgagaattcccatttttcctgtttctacaccaagttcagaagatccagtagctggagatataaaagggtgtgactgtaatctggaaggtgttctccctgaaatatgtgatgcccacggacggtgcctgtgccgccctggggttgagggccctcgatgtgatacctgccgctctggtttctactcattccctatttgccaagcctgctggtgttcagcccttggatcctaccagatgccctgcagctcagtgactggacagtgtgaatgtcggccaggagttacaggacagcggtgtgacaggtgtctctcaggagcttatgatttcccccactgccaaggttccagcagtgcttgtgacccagctggtaccatcaactccaatttggggtattgccaatgcaagcttcatgttgaaggtcctacttgtagccgctgcaaactgttatattggaatctggacaaagaaaaccccagtggatgttcagaatgcaagtgccataaggcgggaacagtgagtggaactggagagtgtaggcagggagatggtgactgtcactgcaagtcccatgtgggtggcgattcctgcgacacctgtgaagatggatattttgctttggaaaagagcaattactttgggtgtcaagggtgtcagtgtgacattggtggggcattgtcctccatgtgcagtgggccctcgggagtgtgccagtgccgagagcatgtcgtgggaaaggtgtgccagcggcctgaaaacaactactatttcccagatttgcatcatatgaagtatgagattgaagacggcagcacacctaatgggagagaccttcgatttggatttgatccgctggcatttcctgagtttagctggagaggatatgcccaaatgacctcagtacagaatgatgtaagaataacattgaatgtagggaagtcaagtggctccttgtttcgtgttattctgagatacgttaaccctggaactgaagcagtatctggccatataactatttatccatcctggggtgctgctcaaagcaaagagatcatcttcctgccgagtaaggagccagcctttgtcactgtccctggaaatggttttgcagacccattttcaatcacaccaggaatatgggttgcttgtattaaggcagaaggagtccttctggattacctggtgctgctccccagggactactatgaagcctctgtactgcagctgccagtcacagaaccatgtgcctacgcaggacctccccaagaaaattgcttactctaccagcatttgccagtgaccagattcccctgtaccctggcttgtgaggccagacacttcctgcttgatggggagccaagacccgtggcagtgaggcagcccacacctgcacaccctgtcatggtggacctcagcgggagagaggtggaattgcatctgcggctgcgcatcccacaggttggccactacgtggttgtggtcgagtattccacggaggcagctcagctgtttgtggttgatgtgaatgtgaagagctccgggtctgttctggcaggccaggtgaacatttacagctgcaactacagtgttctctgccggagtgctgtgattgatcacatgagccgcatcgccatgtatgagctattggcagatgcagacattcagctcaagggacacatggcccgattccttctgcatcaagtttgtatcatacctattgaagaattctcagctgagtatgtgagaccacaagtccactgcattgccagttatgggcgatttgtcaatcaaagtgccacctgtgtctccttggcccatgaaactcctccaacagcattaattttggatgttctaagtggcaggcctttccctcacctgccccagcagtcgtcaccttctgttgatgttcttcctggggtcaccttgaaggcaccgcagaatcaagtgaccctgagaggacgtgtaccacacctgggccgatacgtctttgtcatccatttttaccaagcagcgcacccgacgtttcccgcgcaggtgtcggtggatggcgggtggccacgggcaggctccttccatgcctctttttgcccccatgtgcttggctgccgggatcaagtgattgccgaaggccagattgagtttgacatctcagagcctgaagtggccgcaactgtgaaggttccagaaggaaagtccttggttttggtccgtgttctagtggtgcctgcagaaaactatgactaccaaatacttcacaaaaaatccatggacaagtcactcgagtttatcaccaattgtggaaaaaacagcttttaccttgacccccagacagcctccagattctgtaagaattccgccaggtccctggtggccttttaccacaagggcgccctgccttgtgagtgccaccccactggggccaccggccctcactgcagccctgagggtgggcagtgcccatgccagcccaacgtcatcgggcggcagtgcacccgctgtgcaacaggccactacggattcccacgctgcaagccgtgcagctgtggtcggcgcctttgtgaagagatgacggggcagtgccgctgccctccccgcacggtcaggccccagtgtgaggtgtgtgagacacactcattcagcttccaccccatggccggctgcgaaggctgcaactgttccaggaggggcaccatcgaggctgccatgccggagtgtgaccgggacagcgggcagtgcagatgcaagcccagaatcacagggcggcagtgtgaccgatgtgcttccgggttttaccgctttcctgagtgtgttccctgcaattgcaacagagatgggactgagccaggagtgtgtgacccagggaccggggcttgcctctgcaaggaaaatgtagaaggcacagagtgtaatgtgtgtcgagaaggctcattccatttggacccagccaatctcaagggttgtaccagctgtttctgttttggagtaaataatcaatgtcacagctcacataagcgaaggactaagtttgtggatatgctgggctggcacctggagacagcagacagagtggacatccctgtctctttcaacccaggcagcaacagtatggtggcggatctccaggagctgcccgcaaccatccacagcgcgtcctgggtcgcacccacctcctacctgggggacaaggtttcttcatatggtggttacctcacttaccaagccaagtcctttggcttgcctggcgacatggttcttctggaaaagaagccggatgtacagctcactggtcagcacatgtccatcatctatgaggagacaaacaccccacggccagaccggctgcatcatggacgagtgcacgtggtcgagggaaacttcagacatgccagcagccgtgccccagtgtctagggaggagctgatgacagtgctgtctagactggcagatgtgcgcatccaaggcctctacttcacagagactcaaaggctcaccctgagcgaggtggggctagaggaagcctctgacacaggaagtgggcgcatagcacttgctgtggaaatctgtgcctgcccccctgcctacgctggtgactcttgtcagggttgtagccctggatactatcgggatcataaaggcttgtataccggacggtgtgttccctgcaattgcaacggacattcaaatcaatgccaggatggctcaggcatatgtgttaactgtcagcacaacaccgcgggagagcactgtgaacgctgccaggagggctactatggcaacgccgtccacggatcctgcagggcctgcccatgtcctcacactaacagctttgccactggctgtgtggtgaatgggggagacgtgcggtgctcctgcaaagctgggtacacaggaacacagtgtgaaaggtgtgcaccgggatatttcgggaatccccagaaattcggaggtagctgccaaccatgcagttgtaacagcaatggccagctgggcagctgtcatcccctgactggagactgcataaaccaagaacccaaagatagcagccctgcagaagaatgtgatgattgcgacagctgtgtgatgaccctcctgaacgacctggccaccatgggcgagcagctccgcctggtcaagtctcagctgcagggcctgagtgccagcgcagggcttctggagcagatgaggcacatggagacccaggccaaggacctgaggaatcagttgctcaactaccgttctgccatttcaaatcatggatcaaaaatagaaggcctggaaagagaactgactgatttgaatcaagaatttgagactttgcaagaaaaggctcaagtaaattccagaaaagcacaaacattaaacaacaatgttaatcgggcaacacaaagcgcaaaagaactggatgtgaagattaaaaatgtcatccggaatgtgcacatgctgaaccggataaggacctggcagaaaacccaccagggggagaacaatgggcttgctaacagtatccgggattctttaaatgaatacgaagccaaactcagtgaccttcgtgctcggctgcaggaggcagctgcccaagccaagcaggcaaatggcttgaaccaagaaaacgagagagctttgggagccattcagagacaagtgaaagaaataaattccctgcagagtgatttcaccaagtatctaaccactgcagactcatctttgttgcaaaccaacattgcgctgcagctgatggagaaaagccagaaggaatatgaaaaattagctgccagtttaaatgaagcaagacaagaactaagtgacaaagtaagagaactttccagatctgctggcaaaacatcccttgtggaggaggcagaaaagcacgcgcggtccttacaagagctggcaaagcagctggaagagatcaagagaaacgccagcggggatgagctggtgcgctgtgctgtggatgccgccaccgcctacgagaacatcctcaatgccatcaaagcggccgaggacgcagccaacagggctgccagtgcatctgaatctgccctccagacagtgataaaggaagatctgccaagaaaagctaaaaccctgagttccaacagtgataaactgttaaatgaagccaagatgacacaaaagaagctaaagcaagaagtcagtccagctctcaacaacctacagcaaaccctgaatattgtgacagttcagaaagaagtgatagacaccaatctcacaactctccgagatggtcttcatgggatacagagaggtgatattgatgctatgatcagtagtgcaaagagcatggtcagaaaggccaacgacatcacagatgaggttctggatgggctcaaccccatccagacagatgtggaaagaattaaggacacctatgggaggacacagaacgaagacttcaaaaaggctctgactgatgcagataactcggtgaataagttaaccaacaaactacctgatctttggcgcaagattgaaagtatcaaccaacagctgttgcccttgggaaacatctctgacaacatggacagaatacgagaactaattcagcaggccagagatgctgccagtaaggttgctgtccccatgaggttcaatggtaaatctggagtcgaagtccgactgccaaatgacctggaagatttgaaaggatatacatctctgtccttgtttctccaaaggcccaactcaagagaaaatgggggtactgagaatatgtttgtgatgtaccttggaaataaagatgcctcccgggactacatcggcatggcagttgtggatggccagctcacctgtgtctacaacctgggggaccgtgaggctgaactccaagtggaccagatcttgaccaagagtgagactaaggaggcagttatggatcgggtgaaatttcagagaatttatcagtttgcaaggcttaattacaccaaaggagccacatccagtaaaccagaaacacccggagtctatgacatggatggtagaaatagcaatacactccttaatttggatcctgaaaatgttgtattttatgttggaggttacccacctgattttaaacttcccagtcgactaagtttccctccatacaaaggttgtattgaattagatgacctcaatgaaaatgttctgagcttgtacaacttcaaaaaaacattcaatctcaacacaactgaagtggagccttgtagaaggaggaaggaagagtcagacaaaaattattttgaaggtacgggctatgctcgagttccaactcaaccacatgctcccatcccaacctttggacagacaattcagaccaccgtggatagaggcttgctgttctttgcagaaaacggggatcgcttcatatctctaaatatagaagatggcaagctcatggtgagatacaaactgaattcagagctaccaaaagagagaggagttggagacgccataaacaacggcagagaccattcgattcagatcaaaattggaaaactccaaaagcgtatgtggataaatgtggacgttcaaaacactataattgatggtgaagtatttgatttcagcacatattatctgggaggaattccaattgcaatcagggaaagatttaacatttctacgcctgctttccgaggctgcatgaaaaatttgaagaaaaccagtggtgtcgttagattgaatgatactgtgggagtaaccaaaaagtgctcggaagactggaagcttgtgcgatctgcctcattctccagaggaggacaattgagtttcactgatttgggcttaccacctactgaccacctccaggcctcatttggatttcagacctttcaacccagtggcatattattagatcatcagacatggacaaggaacctgcaggtcactctggaagatggttacattgaattgagcaccagcgatagcggcagcccaatttttaaatctccacagacgtatatggatggtttactgcattatgtatctgtaataagcgacaactctggactacggcttctcatcgatgaccagcttctgagaaatagcaaaaggctaaaacacatttcaagttcccggcagtctctgcgtctgggcgggagcaattttgagggttgtattagcaatgtttttgtccagaggttatcactgagtcctgaagtcctagatttgaccagtaactctctcaagagagatgtgtccctgggaggctgcagtttaaacaaaccaccttttctaatgttgcttaaaggttctaccaggtttaacaagaccaagacttttcgtatcaaccagctgttgcaggacacaccagtggcctccccaaggagcgtgaaggtgtggcaagatgcttgctcaccacttcccaagacccaggccaatcatggagccctccagtttggggacattcccaccagccacttgctattcaagcttcctcaggagctgctgaaacccaggtcacagtttgctgtggacatgcagacaacatcctccagaggactggtgtttcacacgggcactaagaactcctttatggctctttatctttcaaaaggacgtctggtctttgcactggggacagatgggaaaaaattgaggatcaaaagcaaggagaaatgcaatgatgggaaatggcacacggtggtgtttggccatgatggggaaaaggggcgcttggttgtggatggactgagggcccgggagggaagtttgcctggaaactccaccatcagcatcagagcgccagtttacctgggatcacctccatcagggaaaccaaagagcctccccacaaacagctttgtgggatgcctgaagaactttcagctggattcaaaacccttgtataccccttcttcaagcttcggggtgtcttcctgcttgggtggtcctttggagaaaggcatttatttctctgaagaaggaggtcatgtcgtcttggctcactctgtattgttggggccagaatttaagcttgttttcagcatccgcccaagaagtctcactgggatcctaatacacatcggaagtcagcccgggaagcacttatgtgtttacctggaggcaggaaaggtcacggcctctatggacagtggggcaggtgggacctcaacgtcggtcacaccaaagcagtctctgtgtgatggacagtggcactcggtggcagtcaccataaaacaacacatcctgcacctggaactggacacagacagtagctacacagctggacagatccccttcccacctgccagcactcaagagccactacaccttggaggtgctccagccaatttgacgacactgaggatccctgtgtggaaatcattctttggctgtctgaggaatattcatgtcaatcacatccctgtccctgtcactgaagccttggaagtccaggggcctgtcagtctgaatggttgtcctgaccagtaacccaagcctatttcacagcaaggaaattcaccttcaaaagcactgattacccaatgcacctccctccccagctcgagatcattcttcactcaggacacaaaccagacaggtttaatagcgaatctaattttgaattctgaccatggatacccatcactttggcattcagtgctacatgtgtattttatataaaaatcccatttcttgaagataaaaaaattgttattcaaattgttatgcacagaatgtttttggtaatattaatttccactaaaaaattaaatgtcttttaagaaacattcttttccacttgttaaaaaaattaaatatattttaaagcactttaagaatatgaaactttcatatatgttaaaggattataatttatggaattaaaaaatgcagtgtagtcctt

SEQ ID NO: 45739 - DNA, 1826 bp, Artificial Sequence
  derived and/or modified sequence
gcaggtccgggaggcgcaggcggagagcggcggtgcccccgagcccctctgcggacggctcaggcgggaggaccccgcgcggctggatggcggcggccgcgcggcctcggggtcgggcactggggccagtactgccgccgacgccgctgctcctgctggtactgcgggtgctgccagcctgcggggcgaccgctcgggatcccggggccgcggccgggctcagccttcacccgacttacttcaacctggccgaggcggcgaggatttgggccaccgccacctgcggggagaggggacccggcgaggggaggccccagcccgagctctactgcaagttggtcgggggccccaccgccccaggcagcggccacaccatccagggccagttctgtgactattgcaattctgaagaccccaggaaagcacatcctgtcaccaatgccatcgatggatctgaacgttggtggcaaagccctcccctgtcctcaggcacacagtacaacagagtcaacctcaccttggatctggggcagctcttccatgtggcctatattttaatcaaatttgcaaattctcctcgccctgatctttgggtcttggaaagatctgtagactttggaagcacctactcaccatggcaatattttgctcattctaaagtagactgtttaaaagaatttgggcgggaggcaaatatggctgtcacccgggatgatgatgtactttgtgttactgaatattcccgtattgtacctttggaaaatggtgaggttgtggtgtccttgataaacggtcgtccaggtgcaaaaaattttactttctctcacaccctgagggagtttaccaaggcaacaaacatccgcttgcgttttcttagaaccaatacgcttcttggacacctcatctccaaagcccagcgagatccaactgtcactcggcggtattattacagcataaaggacatcagcattggtgggcagtgtgtttgcaatggccatgctgaagtgtgcaatataaacaatcctgaaaaactgtttcggtgtgaatgccagcaccacacctgtggggagacgtgtgatcgctgctgcacagggtacaatcagaggcgctggcggcccgccgcttgggagcagagccacgagtgtgaagcatgcaactgccacggccatgccagcaactgttactatgatccagatgttgagcggcagcaggcaagcttgaatacccagggcatctatgctggtggaggggtctgcattaactgtcagcacaacacagctggagtaaactgtgaacagtgtgctaagggctattaccgcccttatggggttccagtggatgcccctgatggctgcatcccctgcagctgtgaccctgagcatgcggatggctgtgaacagggttcaggccgctgtcactgcaagccaaatttccacggagacaactgtgagaagtgtgcaattggatactacaatttcccattttgcttgagaattcccatttttcctgtttctacaccaagttcagaagatccagtagctggagatataaaaggcaactggtgtgactgtaatctggaaggtgttctccctgaaatatgtgatgcccacggacggtgcctgtgccgccctggggttgagggccctcgatgtgatacctgccgctctggtttctactcattccctatttgccaaggacccagtgaaaaggtggccatctacaagccagaaagcaggccctcagcagaaactgaaccagccagcacctggatcttggacttcccagcctccagaactggagaaataaatttctattgtttaagccca

SEQ ID NO: 45740 - DNA, 9834 bp, Artificial Sequence
  derived and/or modified sequence
atggctgctgctgcccggccccggggccgggccctgggccctgtgctgccccccacccccctgctgctgctggtgctgcgggtgctgcctgcctgtggggccacagcccgggaccctggagctgctgctggcctgagcctgcaccccacctacttcaacctggccgaggccgcccgcatctgggccacagccacctgtggggagcggggccctggagagggccggccccagcctgagctgtactgcaagctggtgggcggccccacagcccctggcagcggccacaccatccagggccagttctgtgactactgcaacagcgaggaccccaggaaggcccaccctgtgaccaatgccattgatggcagcgagcgctggtggcagagcccccccctgagcagcggcacccagtacaacagagtgaacctgaccctggacctgggccagctgttccacgtggcctacatcctgatcaagtttgccaacagccccaggccagacctgtgggtgctggagaggtctgtggactttggcagcacctacagcccctggcagtactttgcccacagcaaggtggactgcctgaaggagtttggccgggaggccaacatggctgtgaccagagatgatgatgtgctgtgtgtgacagagtacagcagaattgtgcccctggagaatggagaggtggtggtgtccctcatcaatggccggcctggggccaagaacttcaccttcagccacaccctgcgggagttcaccaaggccaccaacatccggctgcgcttcctgcggaccaacaccctgctgggccacctgatcagcaaggcccagagggaccccaccgtgacccggcgctactactacagcatcaaggacatcagcattggaggccagtgtgtgtgcaatggacatgctgaggtgtgcaacatcaacaaccctgagaagctgttccgctgtgagtgccagcaccacacctgtggggagacctgtgaccgctgctgcaccggctacaaccagaggcgctggaggcctgctgcctgggagcagagccatgaatgtgaggcctgcaactgccacggccacgccagcaactgctactatgaccctgatgtggagcggcagcaggccagcctgaacacccagggcatctatgccggcggcggcgtgtgcatcaactgccagcacaacacagctggggtgaactgtgagcagtgtgccaagggctactaccggccctatggagtgcctgtggatgccccagatggctgcatcccctgcagctgtgaccctgagcacgcagatggctgtgagcagggcagcggccgctgccactgcaagcccaacttccacggggacaactgtgagaagtgtgccatcggctactacaacttccccttctgcctgcgcatccccatcttccctgtgtccacccccagcagtgaagatcctgtggccggggacatcaagggctgtgactgcaacctggagggcgtgctgcctgagatctgtgatgcccacggccgctgcctgtgcaggcctggggtggagggcccccgctgtgacacctgccgcagcggcttctacagcttccccatctgccaggcctgctggtgcagcgccctgggcagctaccagatgccctgcagctctgtgacaggccagtgtgagtgcaggcctggggtgacaggccagagatgtgaccgctgcctgagcggggcctatgacttcccccactgccagggcagcagcagcgcctgtgaccctgctggcaccatcaacagcaacctgggctactgccagtgcaagctgcacgtggagggccccacctgcagccgctgcaagctgctgtactggaacctggacaaggagaaccccagcggctgcagcgagtgcaagtgccacaaggccggcaccgtgtctggcaccggggagtgccggcagggagatggagactgccactgcaagagccacgtgggcggggacagctgtgacacctgtgaagatggctactttgccctggagaagagcaactacttcggctgccagggctgccagtgtgacatcggcggggccctgagctccatgtgcagcggccccagcggcgtgtgccagtgccgggagcacgtggtgggcaaggtgtgccagaggcctgagaacaactactacttcccagacctgcaccacatgaagtatgaaattgaagatggcagcacccccaacggccgggacctgcgcttcggctttgaccccctggccttccctgagttctcctggaggggctacgcccagatgacctctgtgcagaatgatgtgcgcatcaccctgaatgtgggcaagagcagcggcagcctcttccgggtcatcctgcgctacgtgaaccctggaacagaggccgtgtctggccacatcaccatctaccccagctggggcgccgcccagagcaaggagatcatcttcctgcccagcaaggagcccgcctttgtgacagtgcctggaaatggatttgctgaccccttcagcatcaccccaggcatctgggtggcctgcatcaaggccgagggcgtgctgctggactacctggtgctgctgccccgggactactatgaggcctctgtgctgcagctgcctgtgacagagccctgtgcctatgccggccccccccaggagaactgcctgctgtaccagcacctgcctgtgacccgcttcccctgcaccctggcctgtgaggcccggcacttcctgctggatggagagcccaggcctgtggccgtgcggcagcccaccccagcccaccctgtgatggtggacctgagcggccgggaggtggagctgcacctgcggctgcgcatcccccaggtgggccactacgtggtggtggtggagtacagcacagaggccgcccagctgtttgtggtggatgtgaatgtgaagagcagcggctctgtgctggccggccaggtgaacatctacagctgcaactacagcgtgctgtgccgctctgctgtgattgaccacatgagcagaattgccatgtatgagctgctggctgatgctgacatccagctgaagggccacatggcccgcttcctgctgcaccaggtgtgcatcatccccatcgaggagttcagcgcagaatatgtgcggccccaggtgcactgcatcgccagctatggccgctttgtgaaccagagcgccacctgtgtgtccctggcccacgagaccccacccacagccctgatcctggatgtgctgagcggccggcccttcccccacctgccccagcagagcagccccagcgtggatgtgctgcccggggtgaccctgaaggccccccagaaccaggtgaccctgcggggccgggtgccccacctgggccgctacgtgtttgtgatccacttctaccaggccgcccaccccaccttccctgcccaggtgtctgtggatggcggctggccccgggccggcagcttccacgccagcttctgcccccacgtgctgggctgccgggaccaggtgattgctgagggccagatcgagtttgacatcagcgagcctgaggtggccgccaccgtgaaggtgcctgagggcaagagcctggtgctggtgcgggtgctggtggtgcctgctgagaactatgactaccagatcctgcacaagaagtccatggacaagagcctggagttcatcaccaactgtgggaagaacagcttctacctggacccccagacagccagccgcttctgcaagaacagcgcccggagcctggtggccttctaccacaagggggccctgccctgtgagtgccaccccactggagccaccggcccccactgcagccctgagggcggccagtgcccctgccagcccaacgtcatcggccggcagtgcacccgctgtgccaccggccactacggcttcccccgctgcaagccctgcagctgtggccggcggctgtgtgaggagatgacaggccagtgccgctgcccccccaggacagtgcggccccagtgtgaggtgtgtgagacccacagcttctccttccaccccatggccggctgtgagggctgcaactgcagccggcggggcaccatcgaggccgccatgccagaatgtgaccgggacagcggccagtgccgctgcaagccccgcatcaccggccggcagtgtgacagatgtgccagcggcttctaccgcttcccagaatgtgtgccctgcaactgcaacagagatggaacagagcccggggtgtgtgaccccggcactggagcctgcctgtgcaaggaaaatgtggagggcacagagtgcaatgtgtgccgggagggcagcttccacctggaccctgccaacctgaagggctgcaccagctgcttctgctttggagtgaacaaccagtgccacagcagccacaagaggaggaccaagtttgtggacatgctgggctggcacctggagacagctgacagagtggacatccctgtgtccttcaaccctggcagcaacagcatggtggccgacctgcaggagctgcctgccaccatccacagcgcctcctgggtggcccccaccagctacctgggggacaaggtgtcctcctatggaggctacctgacctaccaggccaagagctttggcctgcccggggacatggtgctgctggagaagaagccagatgtgcagctgaccggccagcacatgagcatcatctatgaggagaccaacacccccaggccagaccggctgcaccacggccgggtgcacgtggtggagggcaacttcagacatgccagcagccgggcccctgtgtcccgggaggagctgatgacagtgctgagccggctggctgatgtgcgcatccagggcctgtacttcacagagacccagaggctgaccctgtctgaggtgggcctggaggaggccagtgacaccggcagcggcagaattgccctggccgtggagatctgtgcctgccccccagcctatgctggggacagctgccagggctgcagccctggctactacagagaccacaagggcctgtacacaggccgctgtgtgccctgcaactgcaatggccacagcaaccagtgccaggacggcagcggcatctgtgtgaactgccagcacaacacagctggggagcactgtgagcgctgccaggagggctactatggaaatgctgtgcacggcagctgccgggcctgcccctgcccccacaccaacagctttgccaccggctgtgtggtgaatggaggagatgtgcgctgcagctgcaaggccggctacacaggcacccagtgtgagcgctgtgcccctggctacttcggcaacccccagaagtttggaggcagctgccagccctgcagctgcaacagcaatggccagctgggcagctgccaccccctgaccggggactgcatcaaccaggagcccaaggacagcagccctgctgaggagtgtgatgactgtgacagctgtgtgatgaccctgctgaatgacctggccaccatgggagagcagctgcggctggtgaagagccagctgcagggcctgagcgccagcgctggcctgctggagcagatgaggcacatggagacccaggccaaggacctgaggaaccagctgctgaactacagaagtgccatcagcaaccacggcagcaagattgagggcctggagcgggagctgacagacctgaaccaggagtttgagaccctgcaggagaaggcccaggtgaacagcaggaaggcccagaccctgaacaacaacgtgaacagagccacccagagcgccaaggagctggatgtgaagatcaagaatgtcatcagaaatgtgcacatgctgaaccgcatccgcacctggcagaagacccaccagggcgagaacaacggcctggccaacagcatccgggacagcctgaatgaatatgaggccaagctgagtgacctgcgggcccggctgcaggaggccgccgcccaggccaagcaggccaacggcctgaaccaggagaatgaaagagccctgggcgccatccagaggcaggtgaaggagatcaacagcctgcagagcgacttcaccaagtacctgaccacagctgacagcagcctgctgcagaccaacatcgccctgcagctgatggagaagagccagaaggagtatgagaagctggccgccagcctgaatgaggcccggcaggagctgagtgacaaggtgcgggagctgagccgctctgctgggaagaccagcctggtggaggaggccgagaagcacgcccggagcctgcaggagctggccaagcagctggaggagatcaagagaaatgccagcggagatgagctggtgcgctgtgctgtggatgctgccacagcctatgagaacatcctgaatgccatcaaggctgctgaagatgctgccaacagagctgccagcgccagcgagagcgccctgcagaccgtcatcaaggaggacctgcccaggaaggccaagaccctgagcagcaacagcgacaagctgctgaatgaggccaagatgacccagaagaagctgaagcaggaggtgtccccagccctgaacaacctgcagcagaccctgaacatcgtgacagtgcagaaggaggtgattgacaccaacctgaccaccctgagagatggcctgcacggcatccagagaggagacattgatgccatgatcagcagcgccaagtccatggtgaggaaggccaatgacatcacagatgaggtgctggatggcctgaaccccatccagacagatgtggagcgcatcaaggacacctacggccgcacccagaatgaagacttcaagaaggccctgacagatgctgacaacagcgtgaacaagctgaccaacaagctgcctgacctgtggaggaagattgagagcatcaaccagcagctgctgcccctgggcaacatcagtgacaacatggaccgcatccgggagctgatccagcaggccagagatgctgccagcaaggtggccgtgcccatgaggttcaacgggaagtctggagtggaggtgcggctgcccaatgacctggaggacctgaagggctacaccagcctgagcctcttcctgcagaggcccaacagcagagaaaatggaggaacagagaacatgtttgtgatgtacctgggcaacaaggatgccagccgggactacatcggcatggctgtggtggatggccagctgacctgtgtgtacaacctgggggaccgggaggccgagctgcaggtggaccagatcctgaccaagtctgagaccaaggaggccgtgatggacagagtgaagttccagaggatctaccagtttgcccggctgaactacaccaagggggccaccagcagcaagccagagaccccaggagtgtatgacatggatggaagaaacagcaacaccctgctgaacctggaccctgaaaatgtggtgttctacgtgggcggctaccccccagacttcaagctgcccagccggctgtccttccccccctacaagggctgcatcgagctggatgacctgaatgaaaatgtgctgagcctgtacaacttcaagaagaccttcaacctgaacaccacagaggtggagccctgcagaagaaggaaggaggagagtgacaagaactactttgagggcaccggctacgcccgggtgcccacccagccccacgcccccatccccaccttcggccagaccatccagaccaccgtggaccggggcctgctcttctttgctgaaaatggagaccgcttcatcagcctgaacattgaagatggcaagctgatggtgcgctacaagctgaacagcgagctgcccaaggagcggggcgtgggagatgccatcaacaacggccgggaccacagcatccagatcaagattggcaagctgcagaagaggatgtggatcaacgtggatgtgcagaacaccatcattgatggagaggtgtttgacttcagcacctactacctgggcggcatccccatcgccatccgggagcgcttcaacatcagcaccccagccttccggggctgcatgaagaacctgaagaagaccagcggcgtggtgcggctgaatgacacagtgggcgtgaccaagaagtgcagcgaggactggaagctggtgcgcagcgccagcttcagcagaggaggccagctgtccttcacagacctgggcctgcccccaacagaccacctgcaggccagctttggcttccagaccttccagcccagcggcatcctgctggaccaccagacctggaccaggaacctgcaggtgaccctggaggatggctacatcgagctgagcaccagtgacagcggcagccccatcttcaagagcccccagacctacatggatggcctgctgcactacgtgtctgtcatcagtgacaacagcggcctgcggctgctgattgatgaccagctgctgaggaacagcaagaggctgaagcacatcagcagcagccggcagagcctgcggctgggcggcagcaactttgagggctgcatcagcaatgtgtttgtgcagaggctgagcctgagccctgaggtgctggacctgaccagcaacagcctgaagagagatgtgtccctgggcggctgcagcctgaacaagccacccttcctgatgctgctgaagggcagcacccgcttcaacaagaccaagaccttccgcatcaaccagctgctgcaggacacccctgtggccagccccaggtctgtgaaggtgtggcaggatgcctgcagccccctgcccaagacccaggccaaccacggggccctgcagtttggagacatccccaccagccacctgctcttcaagctgccccaggagctgctgaagcccaggagccagtttgctgtggacatgcagaccaccagcagccggggcctggtgttccacacaggcaccaagaacagcttcatggccctgtacctgagcaagggccgcctggtgtttgccctgggcacagatggcaagaagctgcgcatcaagagcaaggagaagtgcaatgatggcaagtggcacacagtggtgtttggacatgatggagagaagggccgcctggtggtggatggcctgcgggcccgggagggcagcctgcccggcaacagcaccatcagcatccgggcccctgtgtacctgggcagccccccatctgggaagcccaagagcctgcccaccaacagctttgtgggctgcctgaagaacttccagctggacagcaagcccctgtacacccccagcagcagctttggagtgagcagctgcctgggcggccccctggagaagggcatctacttcagcgaggagggcggccacgtggtgctggcccacagcgtgctgctgggccctgagttcaagctggtgttcagcatccggcccaggagcctgaccggcatcctgatccacatcggcagccagcccgggaagcacctgtgtgtgtacctggaggccggcaaggtgacagcctccatggattctggagctgggggcaccagcacctctgtgacccccaagcagagcctgtgtgatggccagtggcacagcgtggccgtgaccatcaagcagcacatcctgcacctggagctggacacagacagcagctacacagctggccagatccccttccccccagccagcacccaggagcccctgcacctgggcggggccccagccaacctgaccaccctgcgcatccctgtgtggaagagcttcttcggctgcctgaggaacatccacgtgaaccacatccctgtgcctgtgacagaggccctggaggtgcagggccctgtgtccctgaatggctgcccagaccagtag

SEQ ID NO: 45741 - DNA, 4560 bp, Artificial Sequence
  derived and/or modified sequence
atggctgctgctgcccggccccggggccgggccctgggccctgtgctgccccccacccccctgctgctgctggtgctgcgggtgctgcctgcctgtggggccacagcccgggaccctggagctgctgctggcctgagcctgcaccccacctacttcaacctggccgaggccgcccgcatctgggccacagccacctgtggggagcggggccctggagagggccggccccagcctgagctgtactgcaagctggtgggcggccccacagcccctggcagcggccacaccatccagggccagttctgtgactactgcaacagcgaggaccccaggaaggcccaccctgtgaccaatgccattgatggcagcgagcgctggtggcagagcccccccctgagcagcggcacccagtacaacagagtgaacctgaccctggacctgggccagctgttccacgtggcctacatcctgatcaagtttgccaacagccccaggccagacctgtgggtgctggagaggtctgtggactttggcagcacctacagcccctggcagtactttgcccacagcaaggtggactgcctgaaggagtttggccgggaggccaacatggctgtgaccagagatgatgatgtgctgtgtgtgacagagtacagcagaattgtgcccctggagaatggagaggtggtggtgtccctcatcaatggccggcctggggccaagaacttcaccttcagccacaccctgcgggtgtaccagggcaacaagcaccccctcttcctgcggaccaacaccctgctgggccacctgatcagcaaggcccagagggaccccaccgtgacccggcgctactactacagcatcaaggacatcagcattggaggccagtgtgtgtgcaatggacatgctgaggtgtgcaacatcaacaaccctgagaagctgttccgctgtgagtgccagcaccacacctgtggggagacctgtgaccgctgctgcaccggctacaaccagaggcgctggaggcctgctgcctgggagcagagccatgaatgtgaggcctgcaactgccacggccacgccagcaactgctactatgaccctgatgtggagcggcagcaggccagcctgaacacccagggcatctatgccggcggcggcgtgtgcatcaactgccagcacaacacagctggggtgaactgtgagcagtgtgccaagggctactaccggccctatggagtgcctgtggatgccccagatggctgcatcccctgcagctgtgaccctgagcacgcagatggctgtgagcagggcagcggccgctgccactgcaagcccaacttccacggggacaactgtgagaagtgtgccatcggctactacaacttccccttctgcctgcgcatccccatcttccctgtgtccacccccagcagtgaagatcctgtggccggggacatcaagggctgtgactgcaacctggagggcgtgctgcctgagatctgtgatgcccacggccgctgcctgtgcaggcctggggtggagggcccccgctgtgacacctgccgcagcggcttctacagcttccccatctgccaggcctgctggtgcagcgccctgggcagctaccagatgccctgcagctctgtgacaggccagtgtgagtgcaggcctggggtgacaggccagagatgtgaccgctgcctgagcggggcctatgacttcccccactgccagggcagcagcagcgcctgtgaccctgctggcaccatcaacagcaacctgggctactgccagtgcaagctgcacgtggagggccccacctgcagccgctgcaagctgctgtactggaacctggacaaggagaaccccagcggctgcagcgagtgcaagtgccacaaggccggcaccgtgtctggcaccggggagtgccggcagggagatggagactgccactgcaagagccacgtgggcggggacagctgtgacacctgtgaagatggctactttgccctggagaagagcaactacttcggctgccagggctgccagtgtgacatcggcggggccctgagctccatgtgcagcggccccagcggcgtgtgccagtgccgggagcacgtggtgggcaaggtgtgccagaggcctgagaacaactactacttcccagacctgcaccacatgaagtatgaaattgaagatggcagcacccccaacggccgggacctgcgcttcggctttgaccccctggccttccctgagttctcctggaggggctacgcccagatgacctctgtgcagaatgatgtgcgcatcaccctgaatgtgggcaagagcagcggcagcctcttccgggtcatcctgcgctacgtgaaccctggaacagaggccgtgtctggccacatcaccatctaccccagctggggcgccgcccagagcaaggagatcatcttcctgcccagcaaggagcccgcctttgtgacagtgcctggaaatggatttgctgaccccttcagcatcaccccaggcatctgggtggcctgcatcaaggccgagggcgtgctgctggactacctggtgctgctgccccgggactactatgaggcctctgtgctgcagctgcctgtgacagagccctgtgcctatgccggccccccccaggagaactgcctgctgtaccagcacctgcctgtgacccgcttcccctgcaccctggcctgtgaggcccggcacttcctgctggatggagagcccaggcctgtggccgtgcggcagcccaccccagcccaccctgtgatggtggacctgagcggccgggaggtggagctgcacctgcggctgcgcatcccccaggtgggccactacgtggtggtggtggagtacagcacagaggccgcccagctgtttgtggtggatgtgaatgtgaagagcagcggctctgtgctggccggccaggtgaacatctacagctgcaactacagcgtgctgtgccgctctgctgtgattgaccacatgagcagaattgccatgtatgagctgctggctgatgctgacatccagctgaagggccacatggcccgcttcctgctgcaccaggtgtgcatcatccccatcgaggagttcagcgcagaatatgtgcggccccaggtgcactgcatcgccagctatggccgctttgtgaaccagagcgccacctgtgtgtccctggcccacgagaccccacccacagccctgatcctggatgtgctgagcggccggcccttcccccacctgccccagcagagcagccccagcgtggatgtgctgcccggggtgaccctgaaggccccccagaaccaggtgaccctgcggggccgggtgccccacctgggccgctacgtgtttgtgatccacttctaccaggccgcccaccccaccttccctgcccaggtgtctgtggatggcggctggccccgggccggcagcttccacgccagcttctgcccccacgtgctgggctgccgggaccaggtgattgctgagggccagatcgagtttgacatcagcgagcctgaggtggccgccaccgtgaaggtgcctgagggcaagagcctggtgctggtgcgggtgctggtggtgcctgctgagaactatgactaccagatcctgcacaagaagtccatggacaagagcctggagttcatcaccaactgtgggaagaacagcttctacctggacccccagacagccagccgcttctgcaagaacagcgcccggagcctggtggccttctaccacaagggggccctgccctgtgagtgccaccccactggagccaccggcccccactgcagccctgagggcggggcccacgccagccccaccagcagcggcggcagcgccccagctgtgcagcaggcctacggcttcccccgctgcaagaggaagagctgcagctgtggccggcggctgtgtgaggagatgacaggccagtgccgctgcccccccaggacagtgcggccccagtgtgaggtgtgtgagacccacagcttctccttccaccccatggccggctgtgagggctgcaactgcagccggcggggcaccatcgaggccgccatgccagaatgtgaccgggacagcggccagtgccgctgcaagccccgcatcaccggccggcagtgtgacagatgtgccagcggcttctaccgcttcccagaatgtgtgccctgcaactgcaacagagatggaacagagcccggggtgtgtgaccccggcactggagcctgcctgtgcaaggaaaatgtggagggcacagagtgcaatgtgtgccgggagggcagcttccacctggaccctgccaacctgaagggctgcaccagctgcttctgctttggagtgaacaaccagtgccacagcagccacaagaggaggaccaagtttgtggacatgctgggctggcacctggagacagctgacagagtggacatccctgtgtccttcaaccctggcagcaacagcatggtggccgacctgcaggagctgcctgccaccatccacagcgcctcctgggtggccccctag

SEQ ID NO: 45742 - DNA, 1743 bp, Artificial Sequence
  derived and/or modified sequence
atggctgctgctgcccggccccggggccgggccctgggccctgtgctgccccccacccccctgctgctgctggtgctgcgggtgctgcctgcctgtggggccacagcccgggaccctggagctgctgctggcctgagcctgcaccccacctacttcaacctggccgaggccgcccgcatctgggccacagccacctgtggggagcggggccctggagagggccggccccagcctgagctgtactgcaagctggtgggcggccccacagcccctggcagcggccacaccatccagggccagttctgtgactactgcaacagcgaggaccccaggaaggcccaccctgtgaccaatgccattgatggcagcgagcgctggtggcagagcccccccctgagcagcggcacccagtacaacagagtgaacctgaccctggacctgggccagctgttccacgtggcctacatcctgatcaagtttgccaacagccccaggccagacctgtgggtgctggagaggtctgtggactttggcagcacctacagcccctggcagtactttgcccacagcaaggtggactgcctgaaggagtttggccgggaggccaacatggctgtgaccagagatgatgatgtgctgtgtgtgacagagtacagcagaattgtgcccctggagaatggagaggtggtggtgtccctcatcaatggccggcctggggccaagaacttcaccttcagccacaccctgcgggagttcaccaaggccaccaacatccggctgcgcttcctgcggaccaacaccctgctgggccacctgatcagcaaggcccagagggaccccaccgtgacccggcgctactactacagcatcaaggacatcagcattggaggccagtgtgtgtgcaatggacatgctgaggtgtgcaacatcaacaaccctgagaagctgttccgctgtgagtgccagcaccacacctgtggggagacctgtgaccgctgctgcaccggctacaaccagaggcgctggaggcctgctgcctgggagcagagccatgaatgtgaggcctgcaactgccacggccacgccagcaactgctactatgaccctgatgtggagcggcagcaggccagcctgaacacccagggcatctatgccggcggcggcgtgtgcatcaactgccagcacaacacagctggggtgaactgtgagcagtgtgccaagggctactaccggccctatggagtgcctgtggatgccccagatggctgcatcccctgcagctgtgaccctgagcacgcagatggctgtgagcagggcagcggccgctgccactgcaagcccaacttccacggggacaactgtgagaagtgtgccatcggctactacaacttccccttctgcctgcgcatccccatcttccctgtgtccacccccagcagtgaagatcctgtggccggggacatcaagggcaactggtgtgactgcaacctggagggcgtgctgcctgagatctgtgatgcccacggccgctgcctgtgcaggcctggggtggagggcccccgctgtgacacctgccgcagcggcttctacagcttccccatctgccagggccccagcgagaaggtggccatctacaagccagagagccggcccagcgctgagacagagcccgccagcacctggatcctggacttccctgccagcaggactggagagatcaacttctactgcctgagcccctag

SEQ ID NO: 45743 - DNA, 9834 bp, Artificial Sequence
  derived and/or modified sequence
atggccgccgccgcccggccccggggccgggccctgggccccgtgctgcctcccacacctttgctattgctcgtccttcgcgtgcttcccgcctgtggcgccacagcccgcgatccaggagctgctgctggtttgtcactccaccctacgtatttcaatctcgcagaggcagctaggatctgggccacggctacatgcggtgaacgaggacccggtgagggccgtccccaaccggaattatactgcaagctcgttggcgggccaacagcgcctggctcaggccacacgattcaaggacagttctgtgactattgcaactctgaagatccccgcaaagcgcacccggtgactaatgcaatcgatggttcggaaagatggtggcaatctccccctctgtctagcgggacacagtacaaccgggtgaatctgactcttgatttgggtcagctgtttcatgtcgcctacattctgatcaaattcgccaattctccacgccccgacctgtgggtgctcgaaagaagcgtggacttcggttctacatacagcccctggcagtattttgcccactcaaaagtggattgcctcaaggagttcgggagggaggccaacatggccgtgacaagagacgacgatgtgttgtgcgtgactgaatacagccgcatcgtgccactggaaaatggcgaagtggtggtgtcgttgatcaacggacggcctggcgcaaaaaacttcactttctcacacacactacgcgaatttacgaaggcaactaacatacggctgcgctttctgagaaccaacaccctactgggccacctgatttccaaagcacagagagaccctaccgtcacacgccgctactactacagcatcaaggacatctccatcggaggtcagtgtgtttgcaacggccatgccgaggtttgcaacatcaacaatcctgagaagcttttcagatgtgagtgtcagcatcacacatgcggggagacctgtgaccggtgctgcactggatataaccaaagacgttggcggcccgccgcttgggaacaatctcatgaatgcgaggcctgtaactgccatggccatgcaagtaactgctattacgacccagacgtggaacgacagcaggcatccttaaatacccaaggtatctatgctggtggcggggtttgtattaactgtcagcataacactgcaggagtaaactgcgaacagtgcgcaaagggatactatcgaccttacggggttcctgtagacgcccctgacggatgtatcccttgcagctgtgatcccgagcatgcggatggatgcgagcaggggtcggggagatgccattgtaagcctaactttcacggggataactgtgaaaagtgtgcaatagggtactacaattttccgttctgtctaagaatccccatcttccccgtgtccacgccctcttcggaggatccagtagctggcgacatcaaaggttgcgattgtaatctggaaggcgtcctgcccgaaatctgcgatgcccatggccgatgcctgtgcagacctggggtcgaggggccgaggtgtgatacttgtcgatctggcttctatagttttccgatttgccaggcctgctggtgttctgccttgggaagttatcagatgccatgcagctctgtgaccggccagtgtgaatgtagaccaggcgtgacgggccagcgctgcgacaggtgcttgtcaggagcatacgacttccctcattgccagggctcatcctcagcctgtgatcctgcaggcaccattaactctaatttagggtattgccagtgcaaacttcacgtcgagggccctacctgctcccgctgcaagcttttgtactggaatctcgacaaggaaaacccatcaggctgctcagagtgtaagtgccataaggcaggaaccgtgagtggcactggtgagtgcagacagggcgacggagactgtcattgtaaatctcacgtgggcggtgacagctgtgacacctgcgaagacgggtattttgctcttgagaaatcaaattattttggttgccagggatgtcaatgcgatatcggaggtgccctgagcagtatgtgttctgggccgtctggcgtttgccagtgtcgcgagcatgttgtcgggaaggtgtgccagagaccggagaacaactactatttcccagatctgcaccatatgaaatatgagattgaggacgggagcacaccaaacggtagagacctgcgtttcggattcgatcccttggcttttccagaattcagttggagggggtacgcccaaatgaccagcgtgcagaacgacgtgcgaatcactctgaacgtgggcaaatcttcagggtcactctttagggttattctcagatacgtcaaccccggcaccgaggctgtgagcgggcacattaccatctatccaagttggggcgcagcacagagtaaagagatcattttcctaccatcgaaggagccagcgttcgtaaccgtccccgggaatggattcgccgacccattcagtatcacaccaggaatctgggtggcatgcatcaaagcagagggcgttctactcgactacttagtgcttctgccccgcgattactatgaggcctctgtgcttcagctgccagtcaccgagccatgtgcctacgcgggcccccctcaggagaattgtctgctgtaccagcatttgcctgtcacccgatttccctgcaccctggcatgcgaggcacggcactttctcctcgatggcgagccgcgccccgtcgctgtgagacaacctacacccgcgcaccctgtcatggtggacttgagcgggcgtgaggtagagttacacctcaggctacgaatacctcaggtgggccactacgtggttgtggtggagtatagtacagaggccgcccagctgttcgtggtggatgtgaacgtgaaatcttcggggtcagtgttagcgggacaggtgaatatctactcctgcaattatagtgtgctgtgccggagtgccgtcattgatcatatgagccgaatcgcaatgtacgagttgctggctgacgctgatattcagttgaaaggacacatggcacgatttcttctccaccaggtctgcatcattcctattgaggaattttctgccgaatacgtgaggccacaggtccactgtatcgcatcttacggcaggtttgtgaatcagtcagctacctgtgtgagcctagctcacgagacgccccccacagcgctgattcttgacgtgctgagcggtcgcccgtttccccacctcccgcagcaaagttcccctagcgttgacgtcctgcccggggtgacactgaaggcacctcagaatcaggtgactttacggggccgggtcccccacctcggccggtacgtattcgtgattcacttctaccaggctgcacatccaaccttcccagcacaggtgagcgtggacggcgggtggccaagggcgggctcgttccatgccagcttctgcccacatgttctgggttgtagagaccaagtaatcgcagagggtcagatcgagttcgatatctctgaacctgaagtagccgctacagtgaaagtaccagagggcaaaagtctggtgctggtgagagtgctggttgtacccgccgaaaactacgactatcagatcctccataaaaagagcatggacaagagccttgagttcataaccaactgcggaaaaaatagcttctatctcgacccgcagacagcctcaagattttgtaagaatagcgctcgctctctggtggcattttatcacaagggagccctgccgtgcgaatgccacccgacaggcgccacaggtccccactgctctccagagggtggccagtgcccctgccagcccaacgttatcggcaggcagtgcacacggtgtgctacaggacactatggtttccctcgatgtaagccttgttcttgcggaaggagactgtgtgaggaaatgaccggtcagtgcaggtgtccgcctcggactgtgcggccccagtgcgaggtgtgtgagactcactcattttcatttcaccccatggccggatgtgaaggctgcaattgttcacgtaggggcacaatcgaggccgccatgcctgaatgcgatagagattcgggtcagtgccgttgtaaacccagaatcacaggcagacagtgtgataggtgtgcctccggcttctataggtttcctgagtgtgtcccatgtaactgtaatcgggacggcacagagcccggcgtctgcgatccgggaaccggagcttgtctgtgtaaggaaaatgtcgaagggaccgaatgtaacgtttgtagggaggggtctttccacttggatcccgcaaatctgaaaggatgcacgtcctgtttctgcttcggggttaataaccaatgtcacagcagtcataagagacgtaccaaattcgtggacatgctaggttggcacttggaaactgcggatcgggtagatatccctgtgagttttaatccaggcagcaactctatggtcgcagatcttcaggagcttcccgctaccatacacagcgcctcctgggtcgcaccaacgtcatacttgggagacaaagtctcttcttacggtggttatctgacctatcaagcaaagtcgttcggtctgcccggtgatatggtgctcttggaaaagaagcccgacgtgcaattgactgggcagcacatgtcaattatttatgaagaaaccaacactcctcggcccgacagactgcaccatggccgggttcacgtcgtagagggaaattttcgacacgcaagcagcagagcccccgtctctcgcgaggaactgatgacggtgctgtcgcgcctggcagacgtgaggattcagggtctgtacttcaccgagacccagcgattgacccttagcgaagtgggcctggaagaagcatcagatactgggtcaggccgcatcgcactggcagttgagatttgcgcatgccctccagcctacgccggcgactcatgtcagggatgtagccccggatactaccgggatcacaagggactgtacacgggcagatgcgtaccatgtaactgtaacggccattctaaccagtgccaggacggatcaggcatttgtgtcaattgccagcacaacaccgcaggagagcattgtgaacgatgccaggagggctattatggtaacgccgtccacggatcatgtagggcctgcccatgtccgcacacaaattcctttgctaccggctgcgtcgttaacggtggcgacgtgaggtgctcatgtaaagctgggtacaccggcactcagtgtgagcgatgcgctcctgggtattttggaaacccccaaaaattcggtggttcctgtcaaccttgttcatgtaactctaatggacaactaggctcatgccatccgctgactggcgattgtatcaaccaggaacccaaggattctagcccagccgaagaatgtgatgattgtgacagctgcgtgatgactctcttgaacgacctggctaccatgggagaacagctccggttagttaaaagccagcttcaggggctatcagcctcggccggactgctggaacagatgaggcatatggaaacacaagccaaagacttgagaaaccagctgttgaactacagatcagctatctcaaatcacggatctaagatcgagggattggaacgcgagctcactgacctgaatcaggagtttgagacacttcaagagaaagcacaagtgaacagcaggaaagctcagacgctgaacaacaatgtcaatagagccactcagtccgccaaggaactggatgtcaaaattaagaacgttatccggaacgtgcacatgcttaaccgtatacgtacctggcagaaaacccatcagggagaaaacaacggtctggcaaattctatacgcgatagcttgaacgaatacgaagccaagttgagtgatctgagggcaagacttcaggaggctgccgctcaggccaaacaagctaacgggctgaatcaggaaaatgaacgcgctttgggcgcaatccagcgacaggtgaaagaaattaatagtctgcagtccgatttcaccaagtaccttacaactgcagactctagcctgcttcaaacaaacatcgccctccagctcatggaaaagtctcagaaggaatacgaaaaacttgccgcctcactaaacgaagccaggcaggagctctccgataaggtgagggagctatctaggtctgcaggcaaaacaagcctcgtggaagaagccgagaaacacgccagaagcctgcaggaactggccaaacaattagaggaaatcaagcggaacgcttcaggcgatgagctcgtgaggtgtgcagtggacgccgctactgcttacgagaacattctgaacgccatcaaggccgcggaagacgccgcgaatcgcgctgctagcgcctcagagagcgctctccagacagttataaaagaggatctcccacgaaaagcaaagacactgtctagcaactcagataaactattgaacgaagccaagatgacacagaaaaagctgaagcaggaagtatcccctgctttgaacaatttgcagcagactctcaatattgtgacagtgcaaaaagaggtgatcgataccaatctgaccaccctgagagatggtctgcacggaattcagagaggagacattgatgccatgattagtagtgctaaatccatggttcggaaggccaacgacatcactgacgaagtcttggatggcctgaatccgatccagacagatgtggaacgaatcaaggatacttacggtcggacacaaaatgaagattttaaaaaagccctgaccgatgccgataatagtgtgaataaactcaccaacaagctccctgacctttggcgcaaaatcgaatcaatcaaccagcagctcctgcccctcggcaacatcagcgataatatggaccgcatccgtgaattgatccaacaggctagagacgctgctagcaaagtggcggtcccaatgcgtttcaacggcaaatccggagtcgaagtgaggttaccaaatgacctggaggatttaaagggatatacctccttgtcccttttcctgcagcgccctaattctcgcgagaatggggggactgaaaacatgtttgttatgtatcttggaaacaaagatgccagtcgtgactatattggtatggccgtcgtcgatggccagctcacctgtgtgtacaaccttggagatagagaggccgagctgcaagtggaccagatcttaactaagtcagagacaaaagaagcggtcatggacagagtgaaatttcagcggatctatcaattcgcacggctgaattacacaaagggcgccacctcttcaaaaccagagactcccggagtgtacgacatggatggtcgcaattctaacaccctgctgaacttggatccagagaatgtcgtgttctatgtgggcggttacccaccagacttcaagctgcctagccggttgagctttcccccttataaagggtgcattgaactggatgaccttaacgagaatgtgctttctctctacaactttaaaaaaaccttcaatctgaacacgactgaggtggagccttgtaggcggaggaaggaggaaagtgacaaaaactattttgaagggactggctacgcgcgcgtaccaacccagccacacgcaccgattcctaccttcggccagaccatacagacgactgtggatagaggcctcctgttttttgccgaaaatggggatagatttatctccctgaacatcgaagacgggaagttaatggtccggtataagctgaattcagagctgcccaaggaaagaggcgtgggtgacgcaatcaataacggcagggaccacagtattcagattaagattggaaaattgcagaagcggatgtggataaatgtagatgtgcaaaacacgattatcgatggtgaggttttcgattttagtacgtattacctcggggggattcctatcgcaatcagagagcggtttaacataagcacacccgcgttccggggatgcatgaagaacttgaagaagacctctggggtggtgcggctgaacgatacagtaggggtgacaaagaagtgttctgaggattggaaactggttagatccgccagctttagtcgagggggacaactgagcttcaccgacctgggactgccgcccaccgaccatcttcaggcatccttcggcttccagacgttccagccgtccggcatcttgttggaccaccaaacatggactcgaaatttgcaggtcacactggaagatggctacatcgagctatctacaagcgattctggaagcccgatttttaagagtccccagacgtacatggatggcttgctgcattacgtttccgtgatctctgataacagcggtttgcggcttctgattgatgatcagctgttgcgcaattctaagcgactcaagcatatttctagtagtcggcaaagtctcagacttggaggctccaatttcgaggggtgcataagcaacgtgtttgtgcaaagactgagcctgagtcccgaggtgctggatctcactagtaactctcttaagagagacgtcagcctgggcggatgctctctgaacaaaccaccctttctgatgctgctgaaaggctccacgcggttcaataaaactaagaccttcaggatcaaccagttgctccaggacacgccagtggcctctcctagaagcgtgaaagtctggcaggacgcttgttctccgctgcccaaaacccaggctaaccatggcgcgctacaatttggcgacatccccacctctcatcttctgtttaaacttcctcaggagctgctgaagcctaggagtcagttcgcagtagatatgcaaaccacttcatccagggggctggtgtttcacacagggaccaaaaactccttcatggcactttatctttcaaagggtcgcctggtgtttgccttgggaaccgatggaaagaagctgagaatcaaaagcaaggaaaagtgcaatgacggtaaatggcataccgtggtgttcggtcacgatggagagaagggacgcctagttgtggacggtctgagagccagagagggttccctgcccggaaactcgactattagtattcgggcacctgtttatctgggaagtcccccttcggggaaaccgaagtcattgcctaccaatagttttgtgggatgcttgaaaaatttccagctcgattctaagccactatatactccatccagcagcttcggcgtttctagctgtctgggaggtccactggaaaaaggaatctacttcagcgaggaagggggacatgtggtgctagcccattcagtgttactaggacccgaattcaaattggttttcagtattcgcccccgtagcctcaccggaatcttgatccacatcggatctcagcccggaaagcacttgtgcgtttatctggaggccggaaaagtcacggcaagtatggactcaggggctgggggtacatccacaagtgtaacacctaaacagagcctgtgtgatggccagtggcatagcgtggccgtgaccattaagcaacacatcctccacttggagcttgacactgactcttcctacaccgcggggcagattcccttcccccccgcatctacgcaagaaccgcttcacttaggcggggccccagcaaacctgaccactctccgtatccctgtgtggaaatccttcttcggctgtcttcggaacatccacgtcaatcatatccctgtcccagtaacagaggcccttgaggtccaggggccagtgtccctaaacggatgccccgaccagtag

SEQ ID NO: 45744 - DNA, 4560 bp, Artificial Sequence
  derived and/or modified sequence
atggccgccgccgcccggccccggggccgggccctgggccccgtgctccctccaacacctctgctactcctggttctgagagttttacccgcctgcggcgctaccgctagagatccgggggcggccgccggactcagtctgcatcctacttacttcaatctcgccgaagcagcaaggatatgggctaccgctacctgtggagaacgcggaccaggcgagggtcggccccagccagaactgtactgtaaattagtgggtggaccaactgcacccggttccgggcatacaatccaggggcagttctgcgactattgtaactctgaggacccgaggaaagcccatccagttacaaacgccattgacgggtctgaacgttggtggcaatctccaccgttgagctcaggcactcaatacaaccgagtgaacctcaccctggatctgggccagctgttccacgtggcttatatattgatcaaatttgccaatagcccacggccggatctgtgggtcttggagcggtccgtagactttggatccacttacagtccttggcaatattttgcccactcaaaagttgactgcctcaaagaattcggccgggaggccaatatggctgtgacacgggatgatgatgtgctctgtgtcacggagtacagtaggatcgtgcctctagagaatggagaggtggtggttagcctgatcaatgggcggcccggggccaagaacttcacttttagccatactctcagggtgtatcaaggtaataagcatccactgttcctgaggacaaacactctcttagggcatctgatttccaaagctcaacgggatcccaccgtaacacgccgctactattattccatcaaggatatatcaattggcgggcaatgcgtctgtaacggccacgccgaggtctgcaatataaacaatcccgagaaactgttcaggtgtgagtgtcaacaccatacatgcggggaaacatgcgatcgatgctgcaccgggtataatcagagaaggtggagacccgccgcctgggaacagtcccacgagtgtgaagcttgtaattgccatgggcatgccagcaattgttactacgacccagatgtcgagaggcagcaggcttccctgaacactcagggaatttatgcaggcggcggagtgtgtattaattgtcagcataacaccgccggagtgaactgcgaacaatgcgcaaaaggttattatagaccgtacggggtcccagtcgacgccccggacggctgtattccatgctcatgtgatcccgaacacgcagacggttgcgagcagggatcggggaggtgccattgtaaacccaatttccacggggacaattgcgaaaagtgcgcgattggctactataatttccccttttgtctcaggatcccaatcttccctgtgagtacgccctctagcgaagacccggttgcaggagacataaagggttgtgactgtaatctcgagggcgtactgcccgaaatctgtgacgcacatggtcgttgtctctgtagacctggagtggagggtcccagatgcgatacatgccgcagtggcttctactcctttccaatttgccaggcgtgttggtgttccgcgctagggagctaccagatgccctgcagctccgtgaccggtcaatgcgagtgcaggcccggcgtaaccgggcagcgctgcgatcgatgcctctctggagcctatgactttccgcactgtcaaggcagttcatctgcttgcgacccagccggcaccatcaactctaatcttggctactgtcagtgtaaacttcacgtcgaggggcctacctgcagccggtgcaagcttctgtactggaatcttgacaaagaaaaccccagcgggtgcagtgagtgtaagtgtcacaaggccggtacagtatcaggaactggcgagtgtcgccagggcgatggagactgtcactgcaaatcacatgtcggcggggattcttgtgacacatgtgaggacgggtacttcgccctggaaaagtcaaattatttcggatgccaaggatgccagtgtgatattggcggcgccctgtcctcaatgtgtagtgggccgagcggcgtctgtcagtgtagggaacacgtcgtcggcaaagtgtgccaacgaccggagaacaattattacttcccggacctgcaccacatgaagtacgaaatagaagacggatcaactcctaatggccgtgacctgcggttcggatttgatcccctagccttccccgaattctcttggcgagggtacgcgcagatgaccagtgtgcagaatgacgtgagaatcaccttgaacgttgggaaatcaagcggatcgcttttccgggtgatactccgctacgttaaccctgggaccgaggccgtgtcagggcatatcacaatctacccatcatggggcgcagcccaaagtaaagaaatcatcttcctgcccagtaaggagcctgccttcgtgacagtgcctggcaacggcttcgccgatccattctcaatcactcctggcatctgggtagcctgcattaaggcggaaggcgtattgctcgattacttggtcctgttgccaagggattactacgaagcaagcgtattgcagttacccgtgacagaaccatgtgcctacgctggaccacctcaggagaactgcctgctgtatcagcatctgcctgtgactcgtttcccctgcaccctcgcatgtgaggcgcgccattttctgcttgacggggagcccagaccagtagccgtgaggcagcccactcctgctcatcccgtgatggtggatctgtctggaagggaagtcgagctgcacctgaggctgagaattccccaggtgggccattatgttgtggtggttgaatattcaaccgaggccgcacagcttttcgtagtcgatgtcaatgtgaaatcctccggttccgttctggcggggcaggtgaatatctactcttgcaattattcagtgctttgtagatccgctgtgattgatcacatgtcacgcattgctatgtacgagctcctagccgacgctgatattcagctcaagggccacatggcccgctttctactgcaccaggtgtgcataatcccaatagaggaattcagcgccgaatatgttaggccccaggttcactgcatcgcaagctatgggaggttcgtgaatcagtcagcgacgtgcgtgtccttagcccacgaaactcctcctaccgcactcattttggacgttttgtctggccgcccgtttcctcatctgccgcagcagagctcaccttccgtggacgtgctgccaggtgtgacacttaaggccccgcagaaccaagtgacactcaggggtcgcgtgccacatctggggagatatgtgttcgtcatacatttctatcaggcagcccacccaacctttcctgctcaagtgtccgtcgacggcgggtggccacgcgctggctcctttcatgcttcattctgcccacatgtcctggggtgcagggatcaggttatagcggaaggccagattgagtttgacatttctgagcctgaggtggctgcgaccgtcaaggttcctgagggcaagagcttagtgctggtcagagtgctggtggtgcccgccgagaactatgactatcagatactgcacaaaaagtccatggacaagtccctagaatttataactaactgtggaaaaaactcattctatctagatccccagaccgccagccggttttgcaagaactccgctaggagcttggtggccttttaccacaagggagcactgccgtgcgaatgtcatcccacaggggctacagggccccattgtagccccgaaggcggtgcccacgctagcccgacatctagcgggggctcagcccctgccgtacaacaggcttacggcttccccagatgcaagcggaagagctgctcatgcggcaggcggctgtgcgaggagatgaccggacagtgcaggtgcccaccaaggaccgtccggccacagtgtgaagtgtgtgaaacacatagtttcagctttcatcctatggccggttgcgaagggtgcaattgctcacggaggggcacaatcgaagctgccatgcctgaatgcgatagagatagcgggcagtgtagatgcaagcccagaataaccgggcggcagtgtgaccgatgcgcctccgggttttatcgtttccccgagtgtgtgccttgcaactgcaaccgggacgggacagaacccggcgtttgcgacccaggtactggagcatgtctgtgcaaggagaacgtagaaggaaccgagtgcaatgtgtgccgcgagggatcctttcatcttgatcccgctaacctcaagggatgtactagctgcttctgctttggagtgaacaaccaatgtcatagtagccacaagcgcaggaccaaatttgtcgatatgctgggctggcatcttgaaactgcagacagggtggacatccccgtgtcgtttaatccagggagtaatagcatggtggccgacttgcaagagttgccagccacgatccacagcgcctcatgggtggccccatag

SEQ ID NO: 45745 - DNA, 1743 bp, Artificial Sequence
  derived and/or modified sequence
atggccgccgccgcccggccccggggccgggccctgggccccgtgctgccaccaacacccctgttgctgctggtgctcagggtgctgccagcatgcggtgcaactgccagggatccaggagccgcggcgggattgtccctgcaccccacatattttaaccttgccgaggccgccaggatttgggcgacagcaacatgtggcgagcggggcccaggagaaggtcggccgcaaccagagttatattgcaaattagtggggggacctaccgctcctggaagcgggcacacaattcagggtcagttctgtgattactgcaatagtgaggaccctcgtaaggcccatcctgtgacaaatgctatcgatggctctgagcggtggtggcagagccctccattatccagtggcacccaatacaacagggttaacctgacactggacttggggcagctgtttcatgtagcctatatacttatcaaatttgcgaactctcccagacccgacctgtgggtcctggaaagaagcgttgactttggatcaacatatagtccatggcaatacttcgcacattctaaggtcgactgtctgaaggagttcggcagagaggcgaacatggcagtcaccagagacgatgatgtgttgtgcgtcacggagtattctagaattgtgccgctggaaaacggcgaggtggtagtgtctctgatcaacgggagacctggtgccaagaactttacatttagccataccttaagagagtttacaaaggcaactaacataagactccgctttttgcgaactaacactctcctcggacatttaatttctaaggctcagcgggacccgactgtgacccggaggtactactacagcatcaaggatatctcgatcggaggtcagtgcgtttgcaatgggcatgccgaagtttgtaacattaacaaccctgaaaagctgtttaggtgcgaatgtcagcaccatacatgcggcgaaacgtgcgacagatgttgcacaggctacaaccagcgtaggtggcggcctgctgcatgggaacaaagccacgagtgtgaagcctgtaattgtcatggccatgcgtctaattgctattacgatcccgatgttgagaggcagcaggcatcattgaacacacagggtatatacgcaggaggaggtgtgtgcattaactgtcagcataacacagcaggcgttaactgtgaacaatgtgccaagggttactataggccttacggtgtcccagttgacgcccccgacggatgcattccttgctcgtgcgaccctgaacacgctgacgggtgcgagcaaggtagtgggagatgtcactgcaagcccaacttccacggtgacaactgcgaaaagtgcgcaattggctactataacttccctttttgtttgagaattcctatctttcccgtgtccaccccttcctcagaggatcctgtggctggagatatcaaaggcaactggtgcgactgcaatctggagggtgtgctacctgaaatttgcgacgctcatggacggtgcctgtgcagacccggcgtcgagggaccacgatgtgatacctgccgaagcggcttctactcattccctatatgccaaggcccttccgaaaaggtggccatatataaaccagaatccagaccctcagccgaaacggaacccgcctcgacgtggatccttgattttcccgcatctagaacaggagagatcaacttttattgtctatcaccatag

SEQ ID NO: 45746 - DNA, 9833 bp, Artificial Sequence
  derived and/or modified sequence
atggcagccgcagccagacccagaggtagagcactgggcccagtgctgccacctacacccctcctgctgctagtactccgagtgctccccgcatgcggtgccacagccagggaccctggagcagccgctgggctgtctctccaccctacctattttaatctagcagaggctgcccgaatctgggccactgccacctgcggggagagaggtcccggtgaaggacgtccacagcccgaactgtactgtaagttagtggggggacccacggccccaggtagcggccacacgatccagggacagttctgtgattactgtaactcggaggaccctcggaaagctcaccccgtgactaacgcaatcgacgggagtgagcgctggtggcaatctccaccactgagctcaggaacacaatataatcgcgtgaatctcacgctcgatctgggccagctgtttcatgtagcatacatcttgatcaaattcgctaattcacccaggccagacctgtgggtgctggaacggagtgtcgatttcggcagcacttacagcccctggcagtattttgcacattctaaagtggactgtcttaaagagttcggcagggaggctaacatggccgtgactagggatgacgatgtcttgtgcgtgacagaatatagtcgcattgttcccctcgagaacggagaagtcgtcgtgtcactgataaacgggagaccaggtgccaaaaactttactttctctcacacactccgcgagttcacaaaggccacaaacatccgccttagatttctccgcaccaatacgttactggggcaccttatcagcaaagcacagcgggaccctaccgtgactcgcaggtattactactcgatcaaggatatttctattggcggacagtgtgtgtgcaacggacatgcggaggtatgtaacatcaacaatccagagaagctctttagatgcgagtgtcagcaccacacttgcggagagacctgtgaccggtgctgcacgggatataatcagcgccgatggcgcccagctgcctgggagcagtctcacgagtgtgaagcctgtaactgtcacggccacgcgtcaaattgctattacgatccggatgtagagcgacaacaggctagcttgaacacgcagggaatctatgcagggggaggggtgtgcatcaactgccagcacaatacagctggggttaactgtgaacagtgtgctaaaggatactatcggccttatggagtgccagttgacgcaccagacggctgtatcccatgttcctgtgacccagagcatgccgacggctgtgagcagggcagcggtaggtgccattgtaagccaaacttccacggggacaactgcgaaaagtgtgcaattggatactataattttccattttgtcttcggatcccaattttccctgtgtccactccttccagtgaggacccggttgcaggggatatcaagggatgcgattgtaatcttgagggcgtgctgcctgaaatctgtgacgcccatggacgctgcctgtgcagacctggcgttgagggaccacgatgcgacacctgcagaagcggcttctactccttcccaatctgccaggcttgttggtgttctgccctggggtcttatcagatgccctgttccagcgtgactgggcagtgcgaatgtcgtccgggtgttacagggcagcgctgtgatcggtgcttgtcaggagcttacgactttccccattgccaagggagctctagtgcttgcgacccagccggaacaataaactctaaccttggatactgccagtgtaaactgcacgtcgaggggccaacatgttctaggtgcaaactgctttattggaatcttgacaaagagaatccttcaggctgttcggaatgcaaatgccataaagctggaactgtgtccggcacaggcgagtgccgacagggggacggcgattgccactgcaaatcccatgtgggaggggatagttgcgacacctgcgaggatgggtatttcgctcttgaaaaaagcaattacttcggatgtcagggatgtcagtgtgacattgggggtgccctgtcctctatgtgctccggccctagcggcgtctgccaatgcagagagcacgtcgtcggaaaggtgtgccagcgcccagaaaataattactattttcctgatctacaccatatgaagtacgaaatcgaggacggctcaacaccaaatggtcgggatctgagattcggctttgacccactagcattcccagaattcagttggagagggtacgctcaaatgacatctgttcaaaatgacgtaagaataactctgaatgtcgggaaaagctccgggtctctgttccgggtgatccttagatacgtgaacccgggaacagaggctgtgtctggccacataacaatctaccctagctggggagccgcacaaagtaaagagattatatttctgccctccaaagaacccgcttttgtgaccgtgccagggaatgggtttgctgaccccttcagcattacaccaggaatctgggtggcatgtataaaagccgaaggcgtcctgttggattacctggtgctcctgcctcgggactattacgaagcctcagtgctgcagctccccgttaccgagccttgtgcttacgctggtcccccacaggaaaactgcttgctctaccaacaccttccagtgacccgattcccgtgtactctagcatgcgaggcaagacattttttgttggacggggagccccgtcccgtggccgtgcgccagcctacccccgcacacccagtcatggtggatttgtcgggcagggaagtcgagcttcacctccgccttcgaattccccaggtcgggcactatgtggtggtggtcgagtatagcacagaagccgcacagctgtttgtggtggacgtaaacgtaaaatcttcgggttccgtacttgcaggacaggtgaatatatatagctgtaattactccgtcctgtgcaggagcgctgtgattgatcacatgtccaggatagcaatgtacgagctgctggctgacgccgatatccagctgaagggccacatggcaagatttttgctgcaccaggtgtgcattatcccaattgaggagttcagcgccgagtacgtcagaccccaggtccattgcatcgcttcgtacgggagatttgttaatcaatccgcgacttgcgtgtccctggcccatgagaccccacctactgccctgattctcgacgttctgtccggtcgcccttttccccacctgccacagcagtcctcaccttcagtggacgtccttcccggtgtcacactaaaggctccccagaaccaagtgacgctgaggggtcgtgttccccacctggggagatatgttttcgttattcacttttatcaggcagcccacccgacattccccgctcaagtgagcgtcgatgggggttggcctcgagcgggaagcttccatgccagtttttgtcctcatgtactcggctgccgagatcaggtaatcgccgaaggccagatcgagtttgacatatcagagcctgaagtggcagccacggtgaaagtacctgagggcaaaagccttgtgcttgtccgggtgctcgttgtgcctgctgagaactacgattaccagatactgcataaaaaaagcatggataagtcactggagtttataactaactgtggaaagaacagcttctatttagacccccagactgcctcacggttctgcaagaattctgcccgatccctggtcgcattttatcataagggtgccctcccatgcgaatgtcatcctacaggcgcaaccgggccacattgttctcctgagggcggtcagtgtccttgccagccaaatgtcatcggtcggcagtgcactaggtgcgccactggacattacggattccctcgctgtaagccatgtagctgcgggcgtcgcctttgcgaggagatgactgggcagtgtcgctgtccacccaggaccgttcgtccccagtgcgaagtttgcgagacccacagctttagtttccatccgatggccggttgtgaaggatgcaattgctcccgcagagggactattgaagcagcgatgcccgagtgcgatagagattcagggcagtgtaggtgtaagccacggattactggcaggcaatgcgataggtgtgcttctggcttctaccgatttcctgagtgcgtaccgtgtaactgcaatcgtgacggcacagagccaggcgtctgtgatcccggtaccggcgcttgcctttgtaaggagaatgtggagggcaccgaatgcaatgtctgccgggagggaagcttccacctcgaccccgctaacctgaaggggtgtacgtcctgtttttgtttcggcgtcaataaccagtgccatagcagccacaaaaggagaaccaaattcgtagacatgcttggatggcacctcgagactgccgacagggttgacattcctgtatcgttcaatcccggttctaattctatggttgccgatctgcaggaactccctgctacaatccacagcgcgagctgggtagccccaactagttacttgggagataaggtttcaagctatggcggttacctcacttaccaggccaagagctttggactgccaggagacatggtcctcttggaaaaaaagcctgatgtccagctgacaggacaacatatgagcataatctatgaagaaaccaatacacccaggcctgaccgtcttcaccatgggagggtgcacgtggttgagggaaatttccgacatgcaagcagcagagctcccgtttcacgggaagagctgatgacagtgctttcacgattggctgatgtgcgcattcagggcctgtactttactgagacacagaggttaacactaagcgaagtcggactggaagaagcatcggacacaggcagcggacgcattgcccttgcagtcgaaatctgtgcatgcccacccgcttacgcaggggatagctgtcagggatgctctccagggtattatcgagatcacaaaggactgtataccggccgttgcgtcccctgcaactgcaatgggcatagcaaccagtgtcaggacggctccgggatctgtgtgaattgtcaacacaatacagccggagagcactgtgaaagatgtcaggagggctattacggtaatgccgtccacgggagctgccgcgcatgcccatgcccacatacaaactctttcgccacagggtgcgtcgtcaacggcggagacgtgaggtgcagctgcaaggcagggtataccggcacacagtgcgagagatgtgcaccgggttatttcgggaacccacagaagttcggcggtagctgtcagccatgcagttgtaactcaaacggacagctcgggagttgccatccactcaccggcgactgtatcaaccaggaaccgaaagactcatcccccgctgaggagtgcgatgactgtgacagctgtgttatgacactgttgaatgatctcgctacgatgggagaacagcttcgcctggtgaaatctcagttgcaaggactgagcgcctctgctggactcctggagcagatgcggcacatggagactcaggccaaagacctgcgaaatcagctgctgaattaccgaagtgcaatatccaatcacggcagcaaaatcgagggactggagagagaacttaccgacctcaaccaggagtttgagaccctgcaggaaaaagcccaggttaacagcagaaaagcccagacgttaaacaacaacgtcaatcgtgcaacccagtccgccaaggaacttgacgtcaagatcaaaaatgtcataaggaacgtccacatgctgaataggattaggacttggcagaaaacccaccagggggagaacaacggactcgccaactcaattcgtgacagtctgaacgagtacgaggctaagttgtctgacctgagggccagattgcaggaggccgctgcccaggcaaagcaggccaacggattgaatcaggaaaatgagagggccctcggagccatacagaggcaggtgaaggaaatcaactccctgcaatccgattttacgaaatacctgacaacagccgatagcagcctcttgcagaccaacatagcccttcagcttatggagaagagccagaaggaatatgagaaactggctgccagcctgaatgaagccaggcaggagttgtccgataaagttagagaactgtctcggtccgccggtaagaccagcttggtggaggaagcagagaagcatgcacgcagtctgcaagagttggcgaagcagttagaggaaatcaaacggaacgcaagcggggacgagcttgttcggtgtgctgtggacgcagccacagcatatgagaatattctgaacgccattaaagccgcagaggacgctgctaatagagctgccagcgcgagcgagtccgccttgcagacagttattaaggaggacctgcccagaaaagctaagactctcagctcgaacagtgataaattgctgaatgaggctaagatgacacagaaaaagcttaagcaggaggtgtcacctgcactgaataatctccagcagacactgaatatcgtaacagtgcagaaagaagtgatcgacacaaatctgacgaccttgcgtgatggcctgcatggaattcagagaggagacatcgacgcgatgatctcatccgccaagagtatggtacgaaaagctaacgatattacggatgaggtgttagacggactgaaccctatccagacagacgtagagagaattaaggatacctacggcagaacgcagaacgaggattttaagaaggcccttactgatgcggacaattcagtgaataagctgaccaataaactcccggatctgtggaggaagattgagtctattaatcaacaactccttcccctcggtaatatctccgataatatggataggatccgtgaattaatacagcaggcaagagacgccgcaagcaaagtcgccgtgccgatgaggttcaacgggaagagtggggtggaggtaaggttgcctaatgacctggaggatcttaaggggtatacaagcctctccctgttcttgcagagaccaaatagtcgagagaacggtgggactgaaaatatgttcgtgatgtatctgggcaacaaggacgccagcagagattacataggcatggccgtggtggatggccagctgacatgcgtgtataaccttggcgatcgcgaagccgaactacaggttgaccagatcctgaccaagagtgagacgaaggaggcagttatggatcgggtgaaattccagcgaatctatcagttcgccaggctcaactatactaaaggggcaacgtccagcaaacctgaaaccccaggcgtgtatgatatggacggaagaaactctaatactcttctgaatctggatcccgagaatgtggtattctacgtgggtggatacccacccgattttaagcttccaagccgcctctcttttcccccatacaaggggtgcatcgagctggacgacttaaatgaaaacgtgctttctctttacaacttcaagaagacatttaacctgaacacaaccgaggttgagccatgccgacgaagaaaggaggaatccgacaagaattactttgaaggtaccggctacgccagggtgccgactcaaccccacgcacccattcctacctttggtcagactattcagacaactgtggaccggggactgcttttcttcgcagagaatggagaccgattcatctcacttaatattgaggacggcaaattgatggtacgatacaaactgaattccgagcttcctaaagagaggggcgtcggagacgctatcaacaacggcagggaccactccatccagatcaaaattggcaagctgcagaaacggatgtggatcaatgtggacgtgcagaacaccattattgatggagaggtgtttgacttttccacgtattatttggggggtattccgatcgctattagagaacgatttaatatctccacacccgcatttcgagggtgtatgaaaaacctaaagaagacatccggagtggtgcgattaaacgacactgttggcgtgacaaagaaatgtagcgaggactggaagctcgtgcggtccgcatcattcagcaggggcggtcaactgtcctttacagaccttggcctgccccctacagaccatctgcaggcctctttcggcttccagacttttcaaccctcaggtatcctgctggaccatcagacctggacccgcaacctacaggtgacattggaagacggatatatcgagctgagcacctcagattccgggtctcctatatttaagtctcctcaaacctacatggacggtctgctacactacgttagtgtcatcagtgataactctggcctccgcttgctgatcgacgaccaactgttgaggaattctaagcgcctaaagcacattagctcctctcgccagagcttacgcctgggtgggtctaacttcgaggggtgtatttctaatgtgtttgtacagaggctgtccctgtcacctgaagttctcgatctgacgagcaactctctaaagagagatgtatccctgggtggatgttcccttaataaaccaccctttctcatgcttttgaaggggtccaccaggttcaacaagaccaagaccttccgcataaatcagctattacaggatacacccgtggcctccccccgatctgtgaaagtgtggcaggacgcatgttcccctctcccaaagactcaggccaatcacggcgcactacagttcggtgatatcccgacatcccacttgctgttcaagcttccacaggagctactgaagccaaggagccagtttgcagtggacatgcagacgacatcctcaagaggactggtatttcatacaggcaccaaaaacagctttatggccttgtatctgtctaaaggccgactcgttttcgccctagggaccgatggcaagaagctgcgcatcaagagcaaagagaagtgcaacgatggcaaatggcacaccgtggtctttgggcacgatggggaaaaaggccgactggtggtagacgggcttagggcacgagagggatccctgcctggaaactccactatatccatcagagcccctgtgtatctgggcagtcctcccagcggcaaacccaagagtctgccgactaattccttcgtgggttgcctgaagaattttcagctggattctaagcctctgtacactccttctagctccttcggcgtttcctcctgcctgggaggacccctagaaaaaggcatctacttcagtgaggagggtggccatgtggtgctagcccactccgtcctcctgggccctgagttcaaactcgtcttttccatacgacctcgctcgttgaccgggattcttatccacatcggttctcagcctggaaagcatttgtgtgtgtatcttgaagcgggtaaagtaaccgccagcatggactctggtgctggaggcacatccacgagcgtcactcccaagcagtccctatgcgatggacagtggcactcagtggcagtgaccatcaagcagcacattcttcacctggaactcgatactgacagctcatataccgctggacagatccctttcccaccagcctcaacccaggaacctctccacctgggcggagctccagcaaatctcactaccctgcggattcctgtatggaagagtttcttcggctgcctgcgtaacattcacgtaaaccatatacccgtaccagtcaccgaagccctcgaggtacagggcccagtgagcctgaatggatgcccagaccagta

SEQ ID NO: 45747 - DNA, 4559 bp, Artificial Sequence
  derived and/or modified sequence
atggccgcagcggcaagaccacggggacgggctttgggcccagtcttgcctccaacgccactcctgcttctggtgcttagggtgctgcccgcatgtggtgccaccgctcgggatccgggagccgctgccggactcagcctgcaccccacatacttcaacctagccgaagcagcccgaatctgggcgaccgctacttgtggagaacggggaccaggtgagggaaggccccagccagaactgtattgtaaacttgtagggggtccgaccgcgccaggatctggccacactatacagggtcagttctgtgattattgtaattccgaggacccccgaaaggctcaccctgtcacaaatgctattgacgggtcagagaggtggtggcagagccctcccttgagcagcggtactcagtataaccgggtgaacctcacccttgatctcggccagctgttccatgtggcttacattctgataaagttcgccaatagcccccgacctgacctgtgggtgttagagaggagtgtggactttggatctacctactctccatggcagtattttgcccacagcaaagtcgactgtcttaaagaatttggccgagaggcaaatatggccgtgacccgggacgatgatgtgctctgcgttaccgagtatagtcgcatcgtcccactggaaaatggagaagtggttgttagtctgattaatggcagacctggcgctaaaaactttaccttctcccacactctgcgagtgtatcagggtaacaaacatccgctgtttctcagaacgaatacactgctgggtcacctgatttccaaagctcagagagatccaactgttacacgtagatattattatagcatcaaggatatctccatcggtggtcagtgtgtgtgtaatgggcacgcagaggtgtgtaatattaacaatcccgagaagttgttccggtgtgaatgccagcaccatacttgtggcgaaacatgtgaccggtgctgcacaggctacaaccagcgcagatggcgacccgctgcttgggagcaaagccacgagtgcgaggcctgtaattgccatgggcatgcctccaactgttattatgaccccgatgtggaaagacagcaggcaagcctgaacacacaggggatctacgcgggtggcggtgtctgtattaattgtcagcataatactgccggtgttaattgtgagcagtgcgctaaggggtattacagaccttacggtgtgcctgtagacgcccctgacggttgtataccttgctcttgtgaccccgagcacgcggatggctgcgagcaaggaagtgggagatgccactgcaaacctaatttccacggtgataattgtgaaaaatgtgcaatcgggtattacaactttccgttctgccttcgtattcctatctttccggtgtccaccccctccagtgaagacccagtggcgggagacatcaagggatgtgactgtaatctggaaggagtcttgccggagatctgtgacgctcatggtcgatgcttatgtaggcctggagttgaggggcctagatgcgatacatgtcgctccggattctacagctttcctatctgccaggcctgttggtgcagcgccttgggtagctaccagatgccatgctcctcagtcaccggccagtgcgaatgcagacccggagtaacagggcagaggtgtgatcgctgtctgagtggggcatatgactttccccactgccagggtagcagcagcgcctgcgatccagcaggaaccattaattctaacctgggatactgccagtgtaagctgcatgtcgaggggcctacgtgcagccggtgtaaactgctgtactggaatctcgataaagagaaccccagcggctgttcagagtgcaagtgccataaggcgggtactgtcagcgggactggagaatgcagacaaggagacggtgactgccactgtaagtctcacgttgggggagattcatgcgacacctgcgaggacggctacttcgccctggagaagagtaattacttcgggtgccaggggtgtcagtgtgatatagggggtgcccttagctctatgtgctccggtccctctggcgtgtgtcagtgtagggaacacgtcgtgggcaaggtctgtcaaaggcccgaaaataattattatttcccagatctccaccacatgaagtacgagattgaggacggctctaccccaaatgggagggatctccgattcgggttcgatcctctcgcttttcccgaattcagttggcggggatatgcacaaatgacatcagttcaaaacgatgtcagaattacattgaacgtcggaaagtcaagtggcagtctgttccgtgttattttgaggtacgtcaatcctggtaccgaagccgtgtccggacacattacaatttacccgtcctggggagcagcacagtccaaagagataatcttccttccctcaaaagaacctgcctttgtaaccgtacccggtaacggattcgcagaccctttttctattacacccggaatttgggtcgcttgtattaaagcagagggggtactgctagactatctcgtcctgctccctcgagattattacgaggcctcagtactgcagctccccgtgacagaaccgtgtgcttatgccggtcccccacaagaaaattgcctcctctatcagcacctacccgtgactcgcttcccttgtacgctggcatgtgaagctcgacactttctactggacggggaaccacgacccgtcgcagtccggcagccgacccctgcccatccggtaatggttgatttgtctggtagagaggtggaactccacctccgtcttcggattccacaggtgggccactatgtggtcgtggtcgaatatagtactgaagccgcacaattgttcgtagtggatgtgaacgtaaagtcaagcggctcagttctggctgggcaggtgaacatatacagctgtaattactccgttctgtgtcgcagcgccgtcatcgaccatatgagccgcatcgcgatgtacgagttactggcggatgccgatatccagctcaaaggccatatggctaggttcttattgcaccaggtctgcataattcccatcgaagagttctcagcagagtacgtgcgcccacaggtacattgtattgcatcgtatggcagatttgtaaatcagtcagccacatgtgtttccctggcccatgaaactcccccaactgcgctgattctggacgtcttgagcggcaggccgtttccacacttgcctcaacagagttccccaagtgtggacgtattacctggcgtaacactaaaggcccctcagaaccaggtcactctgcgtggccgagtcccgcacctcggcaggtatgttttcgtgatccacttctaccaggctgcccatccgaccttccctgcgcaggtcagcgtggacggcggatggcctagagcaggctcttttcacgcttcattttgcccacatgttctcgggtgccgcgaccaggtgattgcagagggacagatagagtttgatatcagcgagcccgaagttgctgctacagttaaagttcccgagggcaagtccctggtgttggtacgggtccttgtggtacccgctgaaaactacgattaccagatcctgcacaaaaaatcaatggacaagtccctggagtttattacaaactgtggcaaaaactcgttttatttggaccctcagaccgcatcaaggttctgtaagaattccgccagatcactggtcgctttttaccataagggtgctctcccgtgcgaatgtcacccgactggtgctaccggcccacactgcagtccagagggaggggcacatgcttctcctaccagctccggtggatctgccccagctgtccagcaagcctatggcttccccagatgcaagcgaaagtcctgcagttgtggccgtagactctgcgaggaaatgacaggccagtgccgctgtcctcctcgcactgtacgccctcagtgcgaagtttgcgagacacatagcttctcctttcaccccatggctgggtgcgaggggtgcaattgctccaggagagggactatcgaggccgctatgcctgagtgcgacagagacagtggccagtgccgctgcaaaccgcgaatcactgggcgacaatgtgaccgatgcgcaagtgggttctacaggtttccggagtgcgtgccctgcaactgcaacagggacggaactgagccgggtgtgtgcgaccccggaactggcgcttgcctgtgtaaggaaaacgtggaaggcacagagtgcaatgtatgcagggaaggcagttttcacttagatcctgctaacctcaagggatgcaccagttgcttttgctttggcgtcaataatcagtgccactctagccataaaaggcgtactaaattcgttgatatgctcggttggcacctggaaaccgccgaccgggtggacatacccgtgtcttttaaccctgggtctaactccatggtggctgatctgcaggagctccctgccactatccatagcgccagctgggtggcgccata

SEQ ID NO: 45748 - DNA, 1743 bp, Artificial Sequence
  derived and/or modified sequence
atggccgcagccgcacgacccagaggcagagcgcttggtcccgtattgcccccaacaccattgctattactagtgttgagggttctccccgcttgtggcgcaaccgctcgggatcctggcgcagcagcaggtctgagcctgcaccccacttactttaaccttgcagaagccgcaaggatttgggcaacggccacttgtggcgagcgcggacccggagaaggaagaccccaacccgaactctattgtaagcttgtcggcggaccgacggcgcctggttccggccacactatccagggacagttctgcgactattgtaactcagaggatccaaggaaggcacatccagtgaccaacgccattgacggttccgaaagatggtggcagagccctcccctctcatctgggacccaatacaaccgggtgaacctcaccctagatctaggccagctgttccacgtggcctatatcttgattaagtttgccaatagtcccaggccagatctgtgggtcctcgaaaggtctgtggactttggaagtacatatagcccctggcagtactttgcgcactctaaagtggactgcctcaaagagtttggtcgcgaggccaacatggccgtgactagagatgacgacgtgctctgtgtgaccgaatattctcgcattgtacctctagaaaacggcgaagttgtggtctcgcttatcaatggcagacctggtgccaagaactttacattttctcatacactccgagagttcaccaaggcaaccaatatacgtctccggtttctgcggactaatacactgctcggccatctcatttcgaaggctcagcgggaccccaccgtcacacgcagatactattattccatcaaggatatctcaattggcggtcagtgcgtctgtaacggccatgccgaggtgtgtaacatcaataatcctgagaagttgttccgctgcgaatgtcagcatcacacctgcggggaaacctgcgatcgctgttgtaccggttataaccagcgaaggtggcgtcccgctgcctgggaacagagccatgagtgtgaagcatgcaactgccacggccacgcttctaactgttactatgaccccgatgtcgaacggcagcaggcgagtctcaatactcagggcatctacgccggtggcggtgtatgcattaactgccagcataatacggctggggtcaactgcgagcagtgtgcaaagggatactacagaccctacggggtgccggtggatgcacctgatggctgcatcccctgtagttgcgacccagagcacgccgatggctgtgaacaaggaagcggcaggtgtcactgcaagccgaattttcacggcgacaattgcgagaagtgcgctattgggtactacaacttccctttttgcctacggatccctatctttcctgtcagcacaccttcctctgaggaccctgtggccggagatatcaaaggcaactggtgtgattgcaacctcgaaggggtgttgcctgaaatctgcgacgctcatggaaggtgcctatgccggccaggtgtagagggccctagatgcgacacatgcagatctggattctatagcttccctatctgtcagggccctagcgagaaggtggccatttacaaacccgagtcccgccctagtgccgagaccgagccagcctcaacctggattttggactttcccgcatccagaaccggcgagataaatttttattgtctatcgccctag

SEQ ID NO: 45749 - DNA, 9834 bp, Artificial Sequence
  derived and/or modified sequence
atggccgccgccgccagacccagaggcagagccctgggccccgtgctgccccccacccccctgctgctgctggtgctgagagtgctgcccgcctgcggcgccaccgccagagaccccggcgccgccgccggcctgagcctgcaccccacctacttcaacctggccgaggccgccagaatctgggccaccgccacctgcggcgagagaggccccggcgagggcagaccccagcccgagctgtactgcaagctggtgggcggccccaccgcccccggcagcggccacaccatccagggccagttctgcgactactgcaacagcgaggaccccagaaaggcccaccccgtgaccaacgccatcgacggcagcgagagatggtggcagagcccccccctgagcagcggcacccagtacaacagagtgaacctgaccctggacctgggccagctgttccacgtggcctacatcctgatcaagttcgccaacagccccagacccgacctgtgggtgctggagagaagcgtggacttcggcagcacctacagcccctggcagtacttcgcccacagcaaggtggactgcctgaaggagttcggcagagaggccaacatggccgtgaccagagacgacgacgtgctgtgcgtgaccgagtacagcagaatcgtgcccctggagaacggcgaggtggtggtgagcctgatcaacggcagacccggcgccaagaacttcaccttcagccacaccctgagagagttcaccaaggccaccaacatcagactgagattcctgagaaccaacaccctgctgggccacctgatcagcaaggcccagagagaccccaccgtgaccagaagatactactacagcatcaaggacatcagcatcggcggccagtgcgtgtgcaacggccacgccgaggtgtgcaacatcaacaaccccgagaagctgttcagatgcgagtgccagcaccacacctgcggcgagacctgcgacagatgctgcaccggctacaaccagagaagatggagacccgccgcctgggagcagagccacgagtgcgaggcctgcaactgccacggccacgccagcaactgctactacgaccccgacgtggagagacagcaggccagcctgaacacccagggcatctacgccggcggcggcgtgtgcatcaactgccagcacaacaccgccggcgtgaactgcgagcagtgcgccaagggctactacagaccctacggcgtgcccgtggacgcccccgacggctgcatcccctgcagctgcgaccccgagcacgccgacggctgcgagcagggcagcggcagatgccactgcaagcccaacttccacggcgacaactgcgagaagtgcgccatcggctactacaacttccccttctgcctgagaatccccatcttccccgtgagcacccccagcagcgaggaccccgtggccggcgacatcaagggctgcgactgcaacctggagggcgtgctgcccgagatctgcgacgcccacggcagatgcctgtgcagacccggcgtggagggccccagatgcgacacctgcagaagcggcttctacagcttccccatctgccaggcctgctggtgcagcgccctgggcagctaccagatgccctgcagcagcgtgaccggccagtgcgagtgcagacccggcgtgaccggccagagatgcgacagatgcctgagcggcgcctacgacttcccccactgccagggcagcagcagcgcctgcgaccccgccggcaccatcaacagcaacctgggctactgccagtgcaagctgcacgtggagggccccacctgcagcagatgcaagctgctgtactggaacctggacaaggagaaccccagcggctgcagcgagtgcaagtgccacaaggccggcaccgtgagcggcaccggcgagtgcagacagggcgacggcgactgccactgcaagagccacgtgggcggcgacagctgcgacacctgcgaggacggctacttcgccctggagaagagcaactacttcggctgccagggctgccagtgcgacatcggcggcgccctgagcagcatgtgcagcggccccagcggcgtgtgccagtgcagagagcacgtggtgggcaaggtgtgccagagacccgagaacaactactacttccccgacctgcaccacatgaagtacgagatcgaggacggcagcacccccaacggcagagacctgagattcggcttcgaccccctggccttccccgagttcagctggagaggctacgcccagatgaccagcgtgcagaacgacgtgagaatcaccctgaacgtgggcaagagcagcggcagcctgttcagagtgatcctgagatacgtgaaccccggcaccgaggccgtgagcggccacatcaccatctaccccagctggggcgccgcccagagcaaggagatcatcttcctgcccagcaaggagcccgccttcgtgaccgtgcccggcaacggcttcgccgaccccttcagcatcacccccggcatctgggtggcctgcatcaaggccgagggcgtgctgctggactacctggtgctgctgcccagagactactacgaggccagcgtgctgcagctgcccgtgaccgagccctgcgcctacgccggccccccccaggagaactgcctgctgtaccagcacctgcccgtgaccagattcccctgcaccctggcctgcgaggccagacacttcctgctggacggcgagcccagacccgtggccgtgagacagcccacccccgcccaccccgtgatggtggacctgagcggcagagaggtggagctgcacctgagactgagaatcccccaggtgggccactacgtggtggtggtggagtacagcaccgaggccgcccagctgttcgtggtggacgtgaacgtgaagagcagcggcagcgtgctggccggccaggtgaacatctacagctgcaactacagcgtgctgtgcagaagcgccgtgatcgaccacatgagcagaatcgccatgtacgagctgctggccgacgccgacatccagctgaagggccacatggccagattcctgctgcaccaggtgtgcatcatccccatcgaggagttcagcgccgagtacgtgagaccccaggtgcactgcatcgccagctacggcagattcgtgaaccagagcgccacctgcgtgagcctggcccacgagaccccccccaccgccctgatcctggacgtgctgagcggcagacccttcccccacctgccccagcagagcagccccagcgtggacgtgctgcccggcgtgaccctgaaggccccccagaaccaggtgaccctgagaggcagagtgccccacctgggcagatacgtgttcgtgatccacttctaccaggccgcccaccccaccttccccgcccaggtgagcgtggacggcggctggcccagagccggcagcttccacgccagcttctgcccccacgtgctgggctgcagagaccaggtgatcgccgagggccagatcgagttcgacatcagcgagcccgaggtggccgccaccgtgaaggtgcccgagggcaagagcctggtgctggtgagagtgctggtggtgcccgccgagaactacgactaccagatcctgcacaagaagagcatggacaagagcctggagttcatcaccaactgcggcaagaacagcttctacctggacccccagaccgccagcagattctgcaagaacagcgccagaagcctggtggccttctaccacaagggcgccctgccctgcgagtgccaccccaccggcgccaccggcccccactgcagccccgagggcggccagtgcccctgccagcccaacgtgatcggcagacagtgcaccagatgcgccaccggccactacggcttccccagatgcaagccctgcagctgcggcagaagactgtgcgaggagatgaccggccagtgcagatgcccccccagaaccgtgagaccccagtgcgaggtgtgcgagacccacagcttcagcttccaccccatggccggctgcgagggctgcaactgcagcagaagaggcaccatcgaggccgccatgcccgagtgcgacagagacagcggccagtgcagatgcaagcccagaatcaccggcagacagtgcgacagatgcgccagcggcttctacagattccccgagtgcgtgccctgcaactgcaacagagacggcaccgagcccggcgtgtgcgaccccggcaccggcgcctgcctgtgcaaggagaacgtggagggcaccgagtgcaacgtgtgcagagagggcagcttccacctggaccccgccaacctgaagggctgcaccagctgcttctgcttcggcgtgaacaaccagtgccacagcagccacaagagaagaaccaagttcgtggacatgctgggctggcacctggagaccgccgacagagtggacatccccgtgagcttcaaccccggcagcaacagcatggtggccgacctgcaggagctgcccgccaccatccacagcgccagctgggtggcccccaccagctacctgggcgacaaggtgagcagctacggcggctacctgacctaccaggccaagagcttcggcctgcccggcgacatggtgctgctggagaagaagcccgacgtgcagctgaccggccagcacatgagcatcatctacgaggagaccaacacccccagacccgacagactgcaccacggcagagtgcacgtggtggagggcaacttcagacacgccagcagcagagcccccgtgagcagagaggagctgatgaccgtgctgagcagactggccgacgtgagaatccagggcctgtacttcaccgagacccagagactgaccctgagcgaggtgggcctggaggaggccagcgacaccggcagcggcagaatcgccctggccgtggagatctgcgcctgcccccccgcctacgccggcgacagctgccagggctgcagccccggctactacagagaccacaagggcctgtacaccggcagatgcgtgccctgcaactgcaacggccacagcaaccagtgccaggacggcagcggcatctgcgtgaactgccagcacaacaccgccggcgagcactgcgagagatgccaggagggctactacggcaacgccgtgcacggcagctgcagagcctgcccctgcccccacaccaacagcttcgccaccggctgcgtggtgaacggcggcgacgtgagatgcagctgcaaggccggctacaccggcacccagtgcgagagatgcgcccccggctacttcggcaacccccagaagttcggcggcagctgccagccctgcagctgcaacagcaacggccagctgggcagctgccaccccctgaccggcgactgcatcaaccaggagcccaaggacagcagccccgccgaggagtgcgacgactgcgacagctgcgtgatgaccctgctgaacgacctggccaccatgggcgagcagctgagactggtgaagagccagctgcagggcctgagcgccagcgccggcctgctggagcagatgagacacatggagacccaggccaaggacctgagaaaccagctgctgaactacagaagcgccatcagcaaccacggcagcaagatcgagggcctggagagagagctgaccgacctgaaccaggagttcgagaccctgcaggagaaggcccaggtgaacagcagaaaggcccagaccctgaacaacaacgtgaacagagccacccagagcgccaaggagctggacgtgaagatcaagaacgtgatcagaaacgtgcacatgctgaacagaatcagaacctggcagaagacccaccagggcgagaacaacggcctggccaacagcatcagagacagcctgaacgagtacgaggccaagctgagcgacctgagagccagactgcaggaggccgccgcccaggccaagcaggccaacggcctgaaccaggagaacgagagagccctgggcgccatccagagacaggtgaaggagatcaacagcctgcagagcgacttcaccaagtacctgaccaccgccgacagcagcctgctgcagaccaacatcgccctgcagctgatggagaagagccagaaggagtacgagaagctggccgccagcctgaacgaggccagacaggagctgagcgacaaggtgagagagctgagcagaagcgccggcaagaccagcctggtggaggaggccgagaagcacgccagaagcctgcaggagctggccaagcagctggaggagatcaagagaaacgccagcggcgacgagctggtgagatgcgccgtggacgccgccaccgcctacgagaacatcctgaacgccatcaaggccgccgaggacgccgccaacagagccgccagcgccagcgagagcgccctgcagaccgtgatcaaggaggacctgcccagaaaggccaagaccctgagcagcaacagcgacaagctgctgaacgaggccaagatgacccagaagaagctgaagcaggaggtgagccccgccctgaacaacctgcagcagaccctgaacatcgtgaccgtgcagaaggaggtgatcgacaccaacctgaccaccctgagagacggcctgcacggcatccagagaggcgacatcgacgccatgatcagcagcgccaagagcatggtgagaaaggccaacgacatcaccgacgaggtgctggacggcctgaaccccatccagaccgacgtggagagaatcaaggacacctacggcagaacccagaacgaggacttcaagaaggccctgaccgacgccgacaacagcgtgaacaagctgaccaacaagctgcccgacctgtggagaaagatcgagagcatcaaccagcagctgctgcccctgggcaacatcagcgacaacatggacagaatcagagagctgatccagcaggccagagacgccgccagcaaggtggccgtgcccatgagattcaacggcaagagcggcgtggaggtgagactgcccaacgacctggaggacctgaagggctacaccagcctgagcctgttcctgcagagacccaacagcagagagaacggcggcaccgagaacatgttcgtgatgtacctgggcaacaaggacgccagcagagactacatcggcatggccgtggtggacggccagctgacctgcgtgtacaacctgggcgacagagaggccgagctgcaggtggaccagatcctgaccaagagcgagaccaaggaggccgtgatggacagagtgaagttccagagaatctaccagttcgccagactgaactacaccaagggcgccaccagcagcaagcccgagacccccggcgtgtacgacatggacggcagaaacagcaacaccctgctgaacctggaccccgagaacgtggtgttctacgtgggcggctacccccccgacttcaagctgcccagcagactgagcttccccccctacaagggctgcatcgagctggacgacctgaacgagaacgtgctgagcctgtacaacttcaagaagaccttcaacctgaacaccaccgaggtggagccctgcagaagaagaaaggaggagagcgacaagaactacttcgagggcaccggctacgccagagtgcccacccagccccacgcccccatccccaccttcggccagaccatccagaccaccgtggacagaggcctgctgttcttcgccgagaacggcgacagattcatcagcctgaacatcgaggacggcaagctgatggtgagatacaagctgaacagcgagctgcccaaggagagaggcgtgggcgacgccatcaacaacggcagagaccacagcatccagatcaagatcggcaagctgcagaagagaatgtggatcaacgtggacgtgcagaacaccatcatcgacggcgaggtgttcgacttcagcacctactacctgggcggcatccccatcgccatcagagagagattcaacatcagcacccccgccttcagaggctgcatgaagaacctgaagaagaccagcggcgtggtgagactgaacgacaccgtgggcgtgaccaagaagtgcagcgaggactggaagctggtgagaagcgccagcttcagcagaggcggccagctgagcttcaccgacctgggcctgccccccaccgaccacctgcaggccagcttcggcttccagaccttccagcccagcggcatcctgctggaccaccagacctggaccagaaacctgcaggtgaccctggaggacggctacatcgagctgagcaccagcgacagcggcagccccatcttcaagagcccccagacctacatggacggcctgctgcactacgtgagcgtgatcagcgacaacagcggcctgagactgctgatcgacgaccagctgctgagaaacagcaagagactgaagcacatcagcagcagcagacagagcctgagactgggcggcagcaacttcgagggctgcatcagcaacgtgttcgtgcagagactgagcctgagccccgaggtgctggacctgaccagcaacagcctgaagagagacgtgagcctgggcggctgcagcctgaacaagccccccttcctgatgctgctgaagggcagcaccagattcaacaagaccaagaccttcagaatcaaccagctgctgcaggacacccccgtggccagccccagaagcgtgaaggtgtggcaggacgcctgcagccccctgcccaagacccaggccaaccacggcgccctgcagttcggcgacatccccaccagccacctgctgttcaagctgccccaggagctgctgaagcccagaagccagttcgccgtggacatgcagaccaccagcagcagaggcctggtgttccacaccggcaccaagaacagcttcatggccctgtacctgagcaagggcagactggtgttcgccctgggcaccgacggcaagaagctgagaatcaagagcaaggagaagtgcaacgacggcaagtggcacaccgtggtgttcggccacgacggcgagaagggcagactggtggtggacggcctgagagccagagagggcagcctgcccggcaacagcaccatcagcatcagagcccccgtgtacctgggcagcccccccagcggcaagcccaagagcctgcccaccaacagcttcgtgggctgcctgaagaacttccagctggacagcaagcccctgtacacccccagcagcagcttcggcgtgagcagctgcctgggcggccccctggagaagggcatctacttcagcgaggagggcggccacgtggtgctggcccacagcgtgctgctgggccccgagttcaagctggtgttcagcatcagacccagaagcctgaccggcatcctgatccacatcggcagccagcccggcaagcacctgtgcgtgtacctggaggccggcaaggtgaccgccagcatggacagcggcgccggcggcaccagcaccagcgtgacccccaagcagagcctgtgcgacggccagtggcacagcgtggccgtgaccatcaagcagcacatcctgcacctggagctggacaccgacagcagctacaccgccggccagatccccttcccccccgccagcacccaggagcccctgcacctgggcggcgcccccgccaacctgaccaccctgagaatccccgtgtggaagagcttcttcggctgcctgagaaacatccacgtgaaccacatccccgtgcccgtgaccgaggccctggaggtgcagggccccgtgagcctgaacggctgccccgaccagtag

SEQ ID NO: 45750 - DNA, 4560 bp, Artificial Sequence
  derived and/or modified sequence
atggccgccgccgccagacccagaggcagagccctgggccccgtgctgccccccacccccctgctgctgctggtgctgagagtgctgcccgcctgcggcgccaccgccagagaccccggcgccgccgccggcctgagcctgcaccccacctacttcaacctggccgaggccgccagaatctgggccaccgccacctgcggcgagagaggccccggcgagggcagaccccagcccgagctgtactgcaagctggtgggcggccccaccgcccccggcagcggccacaccatccagggccagttctgcgactactgcaacagcgaggaccccagaaaggcccaccccgtgaccaacgccatcgacggcagcgagagatggtggcagagcccccccctgagcagcggcacccagtacaacagagtgaacctgaccctggacctgggccagctgttccacgtggcctacatcctgatcaagttcgccaacagccccagacccgacctgtgggtgctggagagaagcgtggacttcggcagcacctacagcccctggcagtacttcgcccacagcaaggtggactgcctgaaggagttcggcagagaggccaacatggccgtgaccagagacgacgacgtgctgtgcgtgaccgagtacagcagaatcgtgcccctggagaacggcgaggtggtggtgagcctgatcaacggcagacccggcgccaagaacttcaccttcagccacaccctgagagtgtaccagggcaacaagcaccccctgttcctgagaaccaacaccctgctgggccacctgatcagcaaggcccagagagaccccaccgtgaccagaagatactactacagcatcaaggacatcagcatcggcggccagtgcgtgtgcaacggccacgccgaggtgtgcaacatcaacaaccccgagaagctgttcagatgcgagtgccagcaccacacctgcggcgagacctgcgacagatgctgcaccggctacaaccagagaagatggagacccgccgcctgggagcagagccacgagtgcgaggcctgcaactgccacggccacgccagcaactgctactacgaccccgacgtggagagacagcaggccagcctgaacacccagggcatctacgccggcggcggcgtgtgcatcaactgccagcacaacaccgccggcgtgaactgcgagcagtgcgccaagggctactacagaccctacggcgtgcccgtggacgcccccgacggctgcatcccctgcagctgcgaccccgagcacgccgacggctgcgagcagggcagcggcagatgccactgcaagcccaacttccacggcgacaactgcgagaagtgcgccatcggctactacaacttccccttctgcctgagaatccccatcttccccgtgagcacccccagcagcgaggaccccgtggccggcgacatcaagggctgcgactgcaacctggagggcgtgctgcccgagatctgcgacgcccacggcagatgcctgtgcagacccggcgtggagggccccagatgcgacacctgcagaagcggcttctacagcttccccatctgccaggcctgctggtgcagcgccctgggcagctaccagatgccctgcagcagcgtgaccggccagtgcgagtgcagacccggcgtgaccggccagagatgcgacagatgcctgagcggcgcctacgacttcccccactgccagggcagcagcagcgcctgcgaccccgccggcaccatcaacagcaacctgggctactgccagtgcaagctgcacgtggagggccccacctgcagcagatgcaagctgctgtactggaacctggacaaggagaaccccagcggctgcagcgagtgcaagtgccacaaggccggcaccgtgagcggcaccggcgagtgcagacagggcgacggcgactgccactgcaagagccacgtgggcggcgacagctgcgacacctgcgaggacggctacttcgccctggagaagagcaactacttcggctgccagggctgccagtgcgacatcggcggcgccctgagcagcatgtgcagcggccccagcggcgtgtgccagtgcagagagcacgtggtgggcaaggtgtgccagagacccgagaacaactactacttccccgacctgcaccacatgaagtacgagatcgaggacggcagcacccccaacggcagagacctgagattcggcttcgaccccctggccttccccgagttcagctggagaggctacgcccagatgaccagcgtgcagaacgacgtgagaatcaccctgaacgtgggcaagagcagcggcagcctgttcagagtgatcctgagatacgtgaaccccggcaccgaggccgtgagcggccacatcaccatctaccccagctggggcgccgcccagagcaaggagatcatcttcctgcccagcaaggagcccgccttcgtgaccgtgcccggcaacggcttcgccgaccccttcagcatcacccccggcatctgggtggcctgcatcaaggccgagggcgtgctgctggactacctggtgctgctgcccagagactactacgaggccagcgtgctgcagctgcccgtgaccgagccctgcgcctacgccggccccccccaggagaactgcctgctgtaccagcacctgcccgtgaccagattcccctgcaccctggcctgcgaggccagacacttcctgctggacggcgagcccagacccgtggccgtgagacagcccacccccgcccaccccgtgatggtggacctgagcggcagagaggtggagctgcacctgagactgagaatcccccaggtgggccactacgtggtggtggtggagtacagcaccgaggccgcccagctgttcgtggtggacgtgaacgtgaagagcagcggcagcgtgctggccggccaggtgaacatctacagctgcaactacagcgtgctgtgcagaagcgccgtgatcgaccacatgagcagaatcgccatgtacgagctgctggccgacgccgacatccagctgaagggccacatggccagattcctgctgcaccaggtgtgcatcatccccatcgaggagttcagcgccgagtacgtgagaccccaggtgcactgcatcgccagctacggcagattcgtgaaccagagcgccacctgcgtgagcctggcccacgagaccccccccaccgccctgatcctggacgtgctgagcggcagacccttcccccacctgccccagcagagcagccccagcgtggacgtgctgcccggcgtgaccctgaaggccccccagaaccaggtgaccctgagaggcagagtgccccacctgggcagatacgtgttcgtgatccacttctaccaggccgcccaccccaccttccccgcccaggtgagcgtggacggcggctggcccagagccggcagcttccacgccagcttctgcccccacgtgctgggctgcagagaccaggtgatcgccgagggccagatcgagttcgacatcagcgagcccgaggtggccgccaccgtgaaggtgcccgagggcaagagcctggtgctggtgagagtgctggtggtgcccgccgagaactacgactaccagatcctgcacaagaagagcatggacaagagcctggagttcatcaccaactgcggcaagaacagcttctacctggacccccagaccgccagcagattctgcaagaacagcgccagaagcctggtggccttctaccacaagggcgccctgccctgcgagtgccaccccaccggcgccaccggcccccactgcagccccgagggcggcgcccacgccagccccaccagcagcggcggcagcgcccccgccgtgcagcaggcctacggcttccccagatgcaagagaaagagctgcagctgcggcagaagactgtgcgaggagatgaccggccagtgcagatgcccccccagaaccgtgagaccccagtgcgaggtgtgcgagacccacagcttcagcttccaccccatggccggctgcgagggctgcaactgcagcagaagaggcaccatcgaggccgccatgcccgagtgcgacagagacagcggccagtgcagatgcaagcccagaatcaccggcagacagtgcgacagatgcgccagcggcttctacagattccccgagtgcgtgccctgcaactgcaacagagacggcaccgagcccggcgtgtgcgaccccggcaccggcgcctgcctgtgcaaggagaacgtggagggcaccgagtgcaacgtgtgcagagagggcagcttccacctggaccccgccaacctgaagggctgcaccagctgcttctgcttcggcgtgaacaaccagtgccacagcagccacaagagaagaaccaagttcgtggacatgctgggctggcacctggagaccgccgacagagtggacatccccgtgagcttcaaccccggcagcaacagcatggtggccgacctgcaggagctgcccgccaccatccacagcgccagctgggtggccccctag

SEQ ID NO: 45751 - DNA, 1743 bp, Artificial Sequence
  derived and/or modified sequence
atggccgccgccgccagacccagaggcagagccctgggccccgtgctgccccccacccccctgctgctgctggtgctgagagtgctgcccgcctgcggcgccaccgccagagaccccggcgccgccgccggcctgagcctgcaccccacctacttcaacctggccgaggccgccagaatctgggccaccgccacctgcggcgagagaggccccggcgagggcagaccccagcccgagctgtactgcaagctggtgggcggccccaccgcccccggcagcggccacaccatccagggccagttctgcgactactgcaacagcgaggaccccagaaaggcccaccccgtgaccaacgccatcgacggcagcgagagatggtggcagagcccccccctgagcagcggcacccagtacaacagagtgaacctgaccctggacctgggccagctgttccacgtggcctacatcctgatcaagttcgccaacagccccagacccgacctgtgggtgctggagagaagcgtggacttcggcagcacctacagcccctggcagtacttcgcccacagcaaggtggactgcctgaaggagttcggcagagaggccaacatggccgtgaccagagacgacgacgtgctgtgcgtgaccgagtacagcagaatcgtgcccctggagaacggcgaggtggtggtgagcctgatcaacggcagacccggcgccaagaacttcaccttcagccacaccctgagagagttcaccaaggccaccaacatcagactgagattcctgagaaccaacaccctgctgggccacctgatcagcaaggcccagagagaccccaccgtgaccagaagatactactacagcatcaaggacatcagcatcggcggccagtgcgtgtgcaacggccacgccgaggtgtgcaacatcaacaaccccgagaagctgttcagatgcgagtgccagcaccacacctgcggcgagacctgcgacagatgctgcaccggctacaaccagagaagatggagacccgccgcctgggagcagagccacgagtgcgaggcctgcaactgccacggccacgccagcaactgctactacgaccccgacgtggagagacagcaggccagcctgaacacccagggcatctacgccggcggcggcgtgtgcatcaactgccagcacaacaccgccggcgtgaactgcgagcagtgcgccaagggctactacagaccctacggcgtgcccgtggacgcccccgacggctgcatcccctgcagctgcgaccccgagcacgccgacggctgcgagcagggcagcggcagatgccactgcaagcccaacttccacggcgacaactgcgagaagtgcgccatcggctactacaacttccccttctgcctgagaatccccatcttccccgtgagcacccccagcagcgaggaccccgtggccggcgacatcaagggcaactggtgcgactgcaacctggagggcgtgctgcccgagatctgcgacgcccacggcagatgcctgtgcagacccggcgtggagggccccagatgcgacacctgcagaagcggcttctacagcttccccatctgccagggccccagcgagaaggtggccatctacaagcccgagagcagacccagcgccgagaccgagcccgccagcacctggatcctggacttccccgccagcagaaccggcgagatcaacttctactgcctgagcccctag

SEQ ID NO: 45752 - protein, 1668 aa, Artificial Sequence
  derived and/or modified sequence
MPPAVRRSACSMGWLWIFGAALGQCLGYSSQQQRVPFLQPPGQSQLQASYVEFRPSQGCSPGYYRDHKGLYTGRCVPCNCNGHSNQCQDGSGICVNCQHNTAGEHCERCQEGYYGNAVHGSCRACPCPHTNSFATGCVVNGGDVRCSCKAGYTGTQCERCAPGYFGNPQKFGGSCQPCSCNSNGQLGSCHPLTGDCINQEPKDSSPAEECDDCDSCVMTLLNDLATMGEQLRLVKSQLQGLSASAGLLEQMRHMETQAKDLRNQLLNYRSAISNHGSKIEGLERELTDLNQEFETLQEKAQVNSRKAQTLNNNVNRATQSAKELDVKIKNVIRNVHMLNRIRTWQKTHQGENNGLANSIRDSLNEYEAKLSDLRARLQEAAAQAKQANGLNQENERALGAIQRQVKEINSLQSDFTKYLTTADSSLLQTNIALQLMEKSQKEYEKLAASLNEARQELSDKVRELSRSAGKTSLVEEAEKHARSLQELAKQLEEIKRNASGDELVRCAVDAATAYENILNAIKAAEDAANRAASASESALQTVIKEDLPRKAKTLSSNSDKLLNEAKMTQKKLKQEVSPALNNLQQTLNIVTVQKEVIDTNLTTLRDGLHGIQRGDIDAMISSAKSMVRKANDITDEVLDGLNPIQTDVERIKDTYGRTQNEDFKKALTDADNSVNKLTNKLPDLWRKIESINQQLLPLGNISDNMDRIRELIQQARDAASKVAVPMRFNGKSGVEVRLPNDLEDLKGYTSLSLFLQRPNSRENGGTENMFVMYLGNKDASRDYIGMAVVDGQLTCVYNLGDREAELQVDQILTKSETKEAVMDRVKFQRIYQFARLNYTKGATSSKPETPGVYDMDGRNSNTLLNLDPENVVFYVGGYPPDFKLPSRLSFPPYKGCIELDDLNENVLSLYNFKKTFNLNTTEVEPCRRRKEESDKNYFEGTGYARVPTQPHAPIPTFGQTIQTTVDRGLLFFAENGDRFISLNIEDGKLMVRYKLNSELPKERGVGDAINNGRDHSIQIKIGKLQKRMWINVDVQNTIIDGEVFDFSTYYLGGIPIAIRERFNISTPAFRGCMKNLKKTSGVVRLNDTVGVTKKCSEDWKLVRSASFSRGGQLSFTDLGLPPTDHLQASFGFQTFQPSGILLDHQTWTRNLQVTLEDGYIELSTSDSGSPIFKSPQTYMDGLLHYVSVISDNSGLRLLIDDQLLRNSKRLKHISSSRQSLRLGGSNFEGCISNVFVQRLSLSPEVLDLTSNSLKRDVSLGGCSLNKPPFLMLLKGSTRFNKTKTFRINQLLQDTPVASPRSVKVWQDACSPLPKTQANHGALQFGDIPTSHLLFKLPQELLKPRSQFAVDMQTTSSRGLVFHTGTKNSFMALYLSKGRLVFALGTDGKKLRIKSKEKCNDGKWHTVVFGHDGEKGRLVVDGLRAREGSLPGNSTISIRAPVYLGSPPSGKPKSLPTNSFVGCLKNFQLDSKPLYTPSSSFGVSSCLGGPLEKGIYFSEEGGHVVLAHSVLLGPEFKLVFSIRPRSLTGILIHIGSQPGKHLCVYLEAGKVTASMDSGAGGTSTSVTPKQSLCDGQWHSVAVTIKQHILHLELDTDSSYTAGQIPFPPASTQEPLHLGGAPANLTTLRIPVWKSFFGCLRNIHVNHIPVPVTEALEVQGPVSLNGCPDQ

SEQ ID NO: 45753 - DNA, 5007 bp, Artificial Sequence
  derived and/or modified sequence
atgcctcctgccgtaagacgctccgcatgcagcatgggttggttatggatctttggggccgctctggggcagtgcctgggatactcatctcagcagcaacgagttccattcctacagcctccgggccagagtcagctacaggcctcttatgtggagttccggccgagtcagggatgcagcccaggttattatagggaccataagggattatacacaggtaggtgtgtcccttgcaattgcaatgggcatagcaatcagtgccaggacggctccggaatatgcgtgaattgtcaacataataccgcgggtgagcactgtgaacggtgtcaagaaggctattacggcaacgccgtccacggatcatgccgcgcctgcccatgtccacacaccaacagcttcgccactggatgcgtcgtaaacggcggcgacgtgcgatgtagctgtaaagcgggatatactggtactcagtgtgagaggtgcgcccctgggtattttggcaacccgcagaaatttggcggttcatgtcaaccttgttcctgtaactctaacggccagctgggttcatgccatccactcacaggagactgcattaatcaagaacccaaggactcctcgcctgctgaggaatgtgacgactgtgattcttgcgtgatgacccttctgaacgacttggccaccatgggggaacagcttcgattagtgaagtcccaactacaagggctgtcagcctccgcgggccttctcgagcaaatgcggcacatggagacacaggcaaaagatctgcgtaaccaactacttaattatcggtccgcaatttccaaccacgggtccaagattgaaggattagaaagagagctgaccgacctcaaccaggaatttgaaaccctgcaggaaaaagcacaggtcaactctagaaaagcccagactctgaacaataacgtcaacagagcgacccaaagtgccaaggaactggacgttaagatcaaaaatgtaatacgcaatgtgcacatgcttaatcggatccgtacatggcagaagacccaccaaggggaaaacaatggcttagcaaatagcattcgcgactctctgaatgagtacgaggcaaaactttccgacttgcgggccaggctccaggaggctgccgctcaggccaagcaagcaaacggcctgaaccaggaaaacgaaagggcgctcggagcgatccaaagacaggttaaggaaattaattcattgcagtctgatttcacaaaataccttacgacagcagatagctctttgcttcagaccaacattgccctgcaactcatggagaaaagccagaaggagtatgagaagctggcagcatccttgaatgaagctcgtcaggagctgtccgacaaagtgagagagctgtcacggagcgctggtaagacctccctcgtcgaggaggccgagaaacacgcccgctcactccaagagctagcgaagcagctcgaggaaattaaacgtaacgcttctggcgacgagttggtgcgatgtgcagtggatgctgcgaccgcgtacgagaatatcctgaacgccataaaggctgcagaagatgccgctaatcgggcggcatccgcctcagagtccgctcttcagacagtcatcaaagaagacttaccccgcaaggcaaagaccctgtcctccaacagcgacaagctcctgaatgaagccaagatgacccaaaaaaagcttaaacaggaggtgagccctgctctgaataatcttcaacagacgttgaacatcgttaccgtgcaaaaggaagtgattgacaccaatctgacaaccttgagggacgggctccacgggattcagcggggtgacatcgatgccatgattagttctgccaagagcatggtgagaaaagctaacgatattactgacgaggtcttggacggcctgaacccgatacagactgatgtggagagaatcaaggacacatacggccggacacaaaatgaggattttaagaaggctctcacagacgcagacaattccgtcaacaagctgacaaacaaactgcctgatctgtggagaaagatcgagtctatcaaccaacaactcctgcctctgggtaatataagcgacaacatggatagaatacgggagctgatccagcaggctcgagacgccgccagtaaagtcgccgtgcccatgagattcaatgggaaatcgggtgtggaagtacgattgcctaacgatctggaggatcttaaggggtacaccagcttgagcctttttctgcagcggcctaactcccgagaaaacggagggacagaaaacatgtttgtaatgtacctaggtaacaaggacgcaagtagggactacattggcatggcagtggtcgacggtcagctcacatgtgtctataatttaggcgacagggaagctgaactgcaggttgatcagattctgaccaagtcagaaacaaaggaagctgtaatggaccgggtgaagtttcagcgcatataccagttcgcccgcttgaattacacaaaaggagccacttcttcaaaacccgagaccccaggtgtgtatgacatggatgggcgcaactctaatactctgcttaacctggacccggagaacgttgttttttacgtcggcgggtacccgccagatttcaaactaccatcacgcctgtctttccccccttacaaaggttgtattgagttggatgacctgaacgagaacgtcctgagtttgtataactttaaaaagacttttaatctcaatactacggaggttgaaccctgtaggcgccggaaggaggagtctgacaagaattacttcgaaggcactggttatgctagagtacccacccagccacatgcaccaatccccaccttcggccagactatccagacgacagtggatcgtgggcttttgttttttgccgaaaatggtgaccggtttatttctctgaacattgaggacgggaagctgatggtccgctacaaactgaactctgaactcccaaaagagagaggtgtgggggatgccatcaataacggcagggatcattccattcagataaaaattgggaaactccaaaagagaatgtggatcaatgttgacgtccagaacacaattatcgacggcgaagtctttgatttcagcacttattatctcggggggattcctatagcaatccgcgaaagattcaatattagcactcctgcttttagaggttgcatgaaaaacctcaaaaagacctccggggtggttagattgaacgatacagtgggcgttaccaagaaatgcagtgaggactggaagctggtgcgctccgcatcattctccagaggtggtcagctgtcttttaccgatttagggctgccccctaccgaccacttacaagcatccttcgggttccagacattccagccatccggcatccttttggatcaccagacctggaccaggaacctgcaggtgacgctggaggatggctatatcgagctgtccacctccgacagcgggtcccccatatttaagagccctcagacatacatggacggcctgctccattatgtgagcgtgattagtgacaactcaggattgcgtctgctcatcgacgaccagttgctgcgcaactccaagcgtttgaaacacattagcagtagcaggcagagcctccgcctgggcggatccaattttgaaggatgcatctccaacgtgttcgtgcagaggctctcattgagcccagaggtgttagatctgacctccaatagcttgaaacgagacgtctccctcgggggatgcagcctcaataagcctccatttctgatgctgctcaaaggaagcactcgctttaataagactaagaccttccgaatcaatcagctgctgcaggatacacccgtggcctccccacgaagtgtgaaagtgtggcaagatgcctgctcccctctgcccaagacacaggccaaccacggtgctttgcagtttggcgacataccaacctcccatctcttattcaaacttcctcaagagctcctcaagcctcgttctcagtttgcagtcgatatgcagactacctcctcacgggggttagtgttccacacaggcacaaaaaacagtttcatggccctatacctctccaaaggcagactcgtattcgctctcggcacggacggcaaaaaattgcgaatcaagtctaaggagaaatgcaacgacggtaaatggcataccgttgtgttcggccatgatggcgagaaaggacgcttggttgtcgatgggctgcgagcccgcgaagggtccctgcctggtaacagcactatctcaatccgcgccccagtgtacctgggttctcctccttctgggaagccgaaatctctacccaccaactcttttgttggttgtctgaaaaattttcagctggacagcaagcccctgtatacacccagctcctcatttggcgtgtccagctgtctcggaggaccgttggaaaaaggaatttatttcagcgaagagggaggacacgtggtcttggctcacagtgtactgctcggtccagagttcaaactcgtcttctccatccgccccaggtccctcaccgggatcttaatccacatcggcagtcagccaggaaaacacctgtgtgtatatttggaggctgggaaagtcaccgcatctatggactcgggcgcgggcgggacttccaccagtgtcaccccaaagcagtcactatgcgacggccagtggcactccgttgctgttacaattaaacagcatatcctgcaccttgaactggacacggactcatcttatacagcaggacaaatccccttcccacccgctagcacccaggaacctctgcatctgggaggagcccccgctaacctaacaactttacgaatcccagtgtggaaatccttttttggttgtcttagaaatatccacgtgaatcacattcccgtgcctgttacggaagccttagaagttcagggtcctgtgagcctcaatggctgcccagatcagtag

SEQ ID NO: 45754 - DNA, 5007 bp, Artificial Sequence
  derived and/or modified sequence
atgcctccagcagtgaggcggtcagcctgcagcatgggatggctgtggatctttggggcagccctggggcagtgtctgggctacagttcacagcagcaaagggtgccatttcttcagcctcccggtcaaagtcaactgcaagcgagttatgtggagtttagacccagccagggttgtagccctggatactatcgggatcataaaggcttgtataccggacggtgtgttccctgcaattgcaacggacattcaaatcaatgccaggatggctcaggcatatgtgttaactgtcagcacaacaccgcgggagagcactgtgaacgctgccaggagggctactatggcaacgccgtccacggatcctgcagggcctgcccatgtcctcacactaacagctttgccactggctgtgtggtgaatgggggagacgtgcggtgctcctgcaaagctgggtacacaggaacacagtgtgaaaggtgtgcaccgggatatttcgggaatccccagaaattcggaggtagctgccaaccatgcagttgtaacagcaatggccagctgggcagctgtcatcccctgactggagactgcataaaccaagaacccaaagatagcagccctgcagaagaatgtgatgattgcgacagctgtgtgatgaccctcctgaacgacctggccaccatgggcgagcagctccgcctggtcaagtctcagctgcagggcctgagtgccagcgcagggcttctggagcagatgaggcacatggagacccaggccaaggacctgaggaatcagttgctcaactaccgttctgccatttcaaatcatggatcaaaaatagaaggcctggaaagagaactgactgatttgaatcaagaatttgagactttgcaagaaaaggctcaagtaaattccagaaaagcacaaacattaaacaacaatgttaatcgggcaacacaaagcgcaaaagaactggatgtgaagattaaaaatgtcatccggaatgtgcacatgctgaaccggataaggacctggcagaaaacccaccagggggagaacaatgggcttgctaacagtatccgggattctttaaatgaatacgaagccaaactcagtgaccttcgtgctcggctgcaggaggcagctgcccaagccaagcaggcaaatggcttgaaccaagaaaacgagagagctttgggagccattcagagacaagtgaaagaaataaattccctgcagagtgatttcaccaagtatctaaccactgcagactcatctttgttgcaaaccaacattgcgctgcagctgatggagaaaagccagaaggaatatgaaaaattagctgccagtttaaatgaagcaagacaagaactaagtgacaaagtaagagaactttccagatctgctggcaaaacatcccttgtggaggaggcagaaaagcacgcgcggtccttacaagagctggcaaagcagctggaagagatcaagagaaacgccagcggggatgagctggtgcgctgtgctgtggatgccgccaccgcctacgagaacatcctcaatgccatcaaagcggccgaggacgcagccaacagggctgccagtgcatctgaatctgccctccagacagtgataaaggaagatctgccaagaaaagctaaaaccctgagttccaacagtgataaactgttaaatgaagccaagatgacacaaaagaagctaaagcaagaagtcagtccagctctcaacaacctacagcaaaccctgaatattgtgacagttcagaaagaagtgatagacaccaatctcacaactctccgagatggtcttcatgggatacagagaggtgatattgatgctatgatcagtagtgcaaagagcatggtcagaaaggccaacgacatcacagatgaggttctggatgggctcaaccccatccagacagatgtggaaagaattaaggacacctatgggaggacacagaacgaagacttcaaaaaggctctgactgatgcagataactcggtgaataagttaaccaacaaactacctgatctttggcgcaagattgaaagtatcaaccaacagctgttgcccttgggaaacatctctgacaacatggacagaatacgagaactaattcagcaggccagagatgctgccagtaaggttgctgtccccatgaggttcaatggtaaatctggagtcgaagtccgactgccaaatgacctggaagatttgaaaggatatacatctctgtccttgtttctccaaaggcccaactcaagagaaaatgggggtactgagaatatgtttgtgatgtaccttggaaataaagatgcctcccgggactacatcggcatggcagttgtggatggccagctcacctgtgtctacaacctgggggaccgtgaggctgaactccaagtggaccagatcttgaccaagagtgagactaaggaggcagttatggatcgggtgaaatttcagagaatttatcagtttgcaaggcttaattacaccaaaggagccacatccagtaaaccagaaacacccggagtctatgacatggatggtagaaatagcaatacactccttaatttggatcctgaaaatgttgtattttatgttggaggttacccacctgattttaaacttcccagtcgactaagtttccctccatacaaaggttgtattgaattagatgacctcaatgaaaatgttctgagcttgtacaacttcaaaaaaacattcaatctcaacacaactgaagtggagccttgtagaaggaggaaggaagagtcagacaaaaattattttgaaggtacgggctatgctcgagttccaactcaaccacatgctcccatcccaacctttggacagacaattcagaccaccgtggatagaggcttgctgttctttgcagaaaacggggatcgcttcatatctctaaatatagaagatggcaagctcatggtgagatacaaactgaattcagagctaccaaaagagagaggagttggagacgccataaacaacggcagagaccattcgattcagatcaaaattggaaaactccaaaagcgtatgtggataaatgtggacgttcaaaacactataattgatggtgaagtatttgatttcagcacatattatctgggaggaattccaattgcaatcagggaaagatttaacatttctacgcctgctttccgaggctgcatgaaaaatttgaagaaaaccagtggtgtcgttagattgaatgatactgtgggagtaaccaaaaagtgctcggaagactggaagcttgtgcgatctgcctcattctccagaggaggacaattgagtttcactgatttgggcttaccacctactgaccacctccaggcctcatttggatttcagacctttcaacccagtggcatattattagatcatcagacatggacaaggaacctgcaggtcactctggaagatggttacattgaattgagcaccagcgatagcggcagcccaatttttaaatctccacagacgtatatggatggtttactgcattatgtatctgtaataagcgacaactctggactacggcttctcatcgatgaccagcttctgagaaatagcaaaaggctaaaacacatttcaagttcccggcagtctctgcgtctgggcgggagcaattttgagggttgtattagcaatgtttttgtccagaggttatcactgagtcctgaagtcctagatttgaccagtaactctctcaagagagatgtgtccctgggaggctgcagtttaaacaaaccaccttttctaatgttgcttaaaggttctaccaggtttaacaagaccaagacttttcgtatcaaccagctgttgcaggacacaccagtggcctccccaaggagcgtgaaggtgtggcaagatgcttgctcaccacttcccaagacccaggccaatcatggagccctccagtttggggacattcccaccagccacttgctattcaagcttcctcaggagctgctgaaacccaggtcacagtttgctgtggacatgcagacaacatcctccagaggactggtgtttcacacgggcactaagaactcctttatggctctttatctttcaaaaggacgtctggtctttgcactggggacagatgggaaaaaattgaggatcaaaagcaaggagaaatgcaatgatgggaaatggcacacggtggtgtttggccatgatggggaaaaggggcgcttggttgtggatggactgagggcccgggagggaagtttgcctggaaactccaccatcagcatcagagcgccagtttacctgggatcacctccatcagggaaaccaaagagcctccccacaaacagctttgtgggatgcctgaagaactttcagctggattcaaaacccttgtataccccttcttcaagcttcggggtgtcttcctgcttgggtggtcctttggagaaaggcatttatttctctgaagaaggaggtcatgtcgtcttggctcactctgtattgttggggccagaatttaagcttgttttcagcatccgcccaagaagtctcactgggatcctaatacacatcggaagtcagcccgggaagcacttatgtgtttacctggaggcaggaaaggtcacggcctctatggacagtggggcaggtgggacctcaacgtcggtcacaccaaagcagtctctgtgtgatggacagtggcactcggtggcagtcaccataaaacaacacatcctgcacctggaactggacacagacagtagctacacagctggacagatccccttcccacctgccagcactcaagagccactacaccttggaggtgctccagccaatttgacgacactgaggatccctgtgtggaaatcattctttggctgtctgaggaatattcatgtcaatcacatccctgtccctgtcactgaagccttggaagtccaggggcctgtcagtctgaatggttgtcctgaccagtaa

SEQ ID NO: 45755 - DNA, 5007 bp, Artificial Sequence
  derived and/or modified sequence
atgcccccagctgtgcggcgcagcgcctgcagcatgggctggctgtggatctttggagctgccctgggccagtgcctgggctacagcagccagcagcagagggtgcccttcctgcagcccccaggccagagccagctgcaggccagctatgtggagttccggcccagccagggctgcagccctggctactacagagaccacaagggcctgtacacaggccgctgtgtgccctgcaactgcaatggccacagcaaccagtgccaggacggcagcggcatctgtgtgaactgccagcacaacacagctggggagcactgtgagcgctgccaggagggctactatggaaatgctgtgcacggcagctgccgggcctgcccctgcccccacaccaacagctttgccaccggctgtgtggtgaatggaggagatgtgcgctgcagctgcaaggccggctacacaggcacccagtgtgagcgctgtgcccctggctactttggaaacccccagaagtttggaggcagctgccagccctgcagctgcaacagcaatggccagctgggcagctgccaccccctgactggagactgcatcaaccaggagcccaaggacagcagccctgcagaagaatgtgatgactgtgacagctgtgtgatgaccctgctgaatgacctggccaccatgggagagcagctgcggctggtgaagagccagctgcagggcctgagcgccagcgctggcctgctggagcagatgaggcacatggagacccaggccaaggacctgaggaaccagctgctgaactaccgcagcgccatcagcaaccacggcagcaagattgagggcctggagcgggagctgacagacctgaaccaggagtttgagaccctgcaggagaaggcccaggtgaacagcaggaaggcccagaccctgaacaacaacgtgaacagagccacccagagcgccaaggagctggatgtgaagatcaagaatgtcatcagaaatgtgcacatgctgaaccgcatccgcacctggcagaagacccaccagggagaaaataatggcctggccaacagcatccgggacagcctgaatgaatatgaggccaagctgagtgacctgcgggcccggctgcaggaggccgccgcccaggccaagcaggccaacggcctgaaccaggagaatgaaagagccctgggcgccatccagaggcaggtgaaggagatcaacagcctgcagagcgacttcaccaagtacctgaccacagctgacagcagcctgctgcagaccaacatcgccctgcagctgatggagaagagccagaaggagtatgagaagctggccgccagcctgaatgaggcccggcaggagctgagtgacaaggtgcgggagctgagccgctctgctgggaagaccagcctggtggaggaggccgagaagcacgcccggagcctgcaggagctggccaagcagctggaggagatcaagagaaatgccagcggagatgagctggtgcgctgtgctgtggatgctgccacagcctatgagaacatcctgaatgccatcaaggccgcagaagatgctgccaacagagctgccagcgccagcgagagcgccctgcagaccgtcatcaaggaggacctgcccaggaaggccaagaccctgagcagcaacagcgacaagctgctgaatgaggccaagatgacccagaagaagctgaagcaggaggtgtccccagccctgaacaacctgcagcagaccctgaacatcgtgacagtgcagaaggaggtgattgacaccaacctgaccaccctgagagatggcctgcacggcatccagagaggagacattgatgccatgatcagcagcgccaagtccatggtgaggaaggccaatgacatcacagatgaggtgctggatggcctgaaccccatccagacagatgtggagcgcatcaaggacacctacggccgcacccagaatgaagacttcaagaaggccctgacagatgctgacaacagcgtgaacaagctgaccaacaagctgcctgacctgtggaggaagattgagagcatcaaccagcagctgctgcccctgggcaacatcagtgacaacatggaccgcatccgggagctgatccagcaggccagagatgctgccagcaaggtggccgtgcccatgaggttcaacgggaagagcggcgtggaggtgcggctgcccaatgacctggaggacctgaagggctacaccagcctgagcctcttcctgcagaggcccaacagccgggagaatggaggaacagagaacatgtttgtgatgtacctgggcaacaaggatgccagccgggactacatcggcatggctgtggtggatggccagctgacctgtgtgtacaacctgggggaccgggaggccgagctgcaggtggaccagatcctgaccaagtctgagaccaaggaggccgtgatggacagagtgaagttccagaggatctaccagtttgcccggctgaactacaccaagggggccaccagcagcaagccagagaccccaggagtgtatgacatggatggcaggaacagcaacaccctgctgaacctggaccctgaaaatgtggtgttctacgtgggcggctaccccccagacttcaagctgcccagccggctgtccttccccccctacaagggctgcatcgagctggatgacctgaatgaaaatgtgctgagcctgtacaacttcaagaagaccttcaacctgaacaccacagaggtggagccctgcagaagaaggaaggaggagagtgacaagaactactttgagggcaccggctacgcccgggtgcccacccagccccacgcccccatccccaccttcggccagaccatccagaccaccgtggaccggggcctgctcttctttgctgaaaatggagaccgcttcatcagcctgaacattgaagatggcaagctgatggtgcgctacaagctgaacagcgagctgcccaaggagcggggcgtgggagatgccatcaacaacggccgggaccacagcatccagatcaagattggcaagctgcagaagaggatgtggatcaacgtggatgtgcagaacaccatcattgatggagaggtgtttgacttcagcacctactacctgggcggcatccccatcgccatccgggagcgcttcaacatcagcaccccagccttccggggctgcatgaagaacctgaagaagaccagcggcgtggtgcggctgaatgacacagtgggcgtgaccaagaagtgcagcgaggactggaagctggtgcgcagcgccagcttcagccggggcggccagctgtccttcacagacctgggcctgcccccaacagaccacctgcaggccagctttggcttccagaccttccagcccagcggcatcctgctggaccaccagacctggaccaggaacctgcaggtgaccctggaggatggctacatcgagctgagcaccagtgacagcggcagccccatcttcaagagcccccagacctacatggatggcctgctgcactacgtgtctgtcatcagtgacaacagcggcctgcggctgctgattgatgaccagctgctgaggaacagcaagaggctgaagcacatcagcagcagccggcagagcctgcggctgggcggcagcaactttgagggctgcatcagcaatgtgtttgtgcagaggctgagcctgagccctgaggtgctggacctgaccagcaacagcctgaagagagatgtgtccctgggcggctgcagcctgaacaagccacccttcctgatgctgctgaagggcagcacccgcttcaacaagaccaagaccttccgcatcaaccagctgctgcaggacacccctgtggccagccccaggtctgtgaaggtgtggcaggatgcctgcagccccctgcccaagacccaggccaaccacggggccctgcagtttggagacatccccaccagccacctgctcttcaagctgccccaggagctgctgaagcccaggagccagtttgctgtggacatgcagaccaccagcagccggggcctggtgttccacacaggcaccaagaacagcttcatggccctgtacctgagcaagggccgcctggtgtttgccctgggcacagatggcaagaagctgcgcatcaagagcaaggagaagtgcaatgatggcaagtggcacacagtggtgtttggacatgatggagagaagggccgcctggtggtggatggcctgcgggcccgggagggcagcctgcccggcaacagcaccatcagcatccgggcccctgtgtacctgggcagcccccccagcggcaagcccaagagcctgcccaccaacagctttgtgggctgcctgaagaacttccagctggacagcaagcccctgtacacccccagcagcagctttggagtgagcagctgcctgggcggccccctggagaagggcatctacttcagcgaggagggcggccacgtggtgctggcccacagcgtgctgctgggccctgagttcaagctggtgttcagcatccggcccaggagcctgaccggcatcctgatccacatcggcagccagcccgggaagcacctgtgtgtgtacctggaggccggcaaggtgacagcctccatggacagcggggccggcggcaccagcacctctgtgacccccaagcagagcctgtgtgatggccagtggcacagcgtggccgtgaccatcaagcagcacatcctgcacctggagctggacacagacagcagctacacagctggccagatccccttccccccagccagcacccaggagcccctgcacctgggcggggccccagccaacctgaccaccctgcgcatccctgtgtggaagagcttcttcggctgcctgaggaacatccacgtgaaccacatccctgtgcctgtgacagaggccctggaggtgcagggccctgtgtccctgaatggctgcccagaccagtag

SEQ ID NO: 45756 - DNA, 5007 bp, Artificial Sequence
  derived and/or modified sequence
atgccccccgccgtgcggcggagcgcctgcagcatgggctggctgtggattttcggcgctgccctcgggcagtgcctggggtacagcagccaacagcagcgtgtacccttcttgcagccgccggggcaaagtcagctgcaggcttcatacgtcgagttccgaccttcgcagggttgcagtcccggctattatcgggatcacaaaggattatatactggacgctgtgttccatgtaactgcaacggtcactcaaatcagtgccaggatggcagcggcatttgcgtgaattgccagcacaacaccgccggcgaacattgtgaacggtgccaagaaggttactatggaaatgctgtgcacggcagttgcagagcctgtccttgcccacatactaatagcttcgccactggctgtgtggtgaacggaggcgatgtgagatgcagttgcaaggccggttacacagggacacagtgtgaaagatgtgcacctggctacttcggcaatccgcagaagtttggcggtagctgccagccttgcagctgtaacagcaacgggcagctgggctcttgtcatccacttactggagactgcatcaatcaagagccaaaggacagctctcccgctgaggagtgcgatgattgtgatagttgtgtgatgacactgctgaatgatctcgcaacgatgggagagcagctgagacttgtgaaatcccagctgcagggactgagtgccagtgcggggctgttagaacagatgcgtcatatggagacacaggctaaggatttaaggaaccagctactaaactacaggagcgctatatctaaccacgggagcaaaatcgaaggtcttgaacgggagcttaccgatctcaatcaggagtttgagactctccaggaaaaagcccaggttaactcacggaaagcacaaacattgaacaacaatgtgaatagggctacacaatccgcaaaggaactggacgtcaaaattaaaaatgtgatccgtaacgtgcatatgctgaaccggattagaacatggcaaaagacccaccaaggcgagaataacggcctggccaattcaatccgcgattctctcaatgaatacgaggctaaactttctgatctccgcgcccgactccaggaggcagccgcccaggccaaacaggctaacggactcaaccaggagaacgagagagctctcggcgccatccagcggcaggtcaaggagattaattctctgcaatctgattttactaagtacctcacaaccgcggatagcagcctgctgcagacaaatattgctttacaattgatggaaaagtctcaaaaagagtacgaaaagcttgctgcgtccctgaacgaggctcgccaggagctttcagataaggttagggagttgtcaagatctgccggtaagactagcctggtggaggaggctgagaagcatgctcggtcattgcaagagcttgccaaacagctggaagaaatcaaaagaaacgccagcggcgacgaactggttagatgcgctgtggatgccgccaccgcttatgagaacattctgaatgccatcaaggcagccgaagacgcggctaaccgggccgctagtgcgtctgaaagtgctctgcagactgttatcaaagaggatctgcctcggaaagccaagactctgagttcaaattcggataaactgctgaatgaggctaagatgactcagaagaagctcaagcaagaggtgtctccagcactgaataaccttcagcagactctcaatatcgtcaccgtgcaaaaggaggtgatcgacacgaacctgaccaccctacgtgatggactccatgggatccagaggggtgatattgatgccatgatctcctccgcaaagtctatggtgcgcaaggccaacgatattaccgatgaagtgctggatggtctgaatccaatccagaccgacgtagaaaggataaaagatacttatggtaggacgcaaaacgaagatttcaagaaggcactaaccgacgctgataattctgttaacaaactcaccaacaagctgccagacctgtggagaaaaatcgagagcatcaatcagcagttgctgccgctcgggaacatttccgataacatggatcggatcagagaactgattcaacaagcaagagacgcggcctcgaaagtcgctgtccctatgcgtttcaatgggaaaagtggagtggaggtccgcttaccaaatgacctcgaggatctgaagggttatacatcactgtcactgtttttgcaacgaccaaactccagggaaaatggcggcaccgaaaatatgtttgttatgtatctcggaaataaagatgcatcccgggactatattggcatggccgtggtggacgggcagctaacgtgcgtctacaacctgggtgacagggaagctgagctgcaggtcgaccagatacttactaagtctgaaactaaggaagccgtgatggatagggtgaaattccaacgcatctatcagttcgcacgactcaattacacaaagggagctacttccagcaagcccgagaccccaggagtatacgacatggatggacgcaacagcaacacgttgcttaacttggaccctgagaacgtcgtgttctacgtcgggggatatccccctgatttcaagctaccttcacggctctcctttcccccttataaaggctgtatcgagctggacgacttgaatgagaatgtgctgtctctttataatttcaagaagacctttaatctcaatacgaccgaggtggagccttgtagaaggaggaaagaagagtctgacaaaaactacttcgaaggcaccgggtacgcaagagtccctacgcagccgcatgctcctatacccaccttcgggcagacaattcagactaccgtggacagaggcctgctcttctttgccgaaaacggcgatcgatttatctctttaaacatagaagacggtaagctgatggtacggtacaaacttaacagtgaactgccaaaggagagaggcgtgggcgatgcgattaacaatgggagggaccatagtatccaaattaaaattggaaagctgcagaaacgcatgtggatcaacgtggacgtgcagaacaccataatcgacggagaagtattcgattttagcacatactacctaggcggcatcccaattgccattcgtgagaggttcaacatctccacccctgctttccgtggatgcatgaagaatctgaaaaagaccagtggcgtggtccggctgaatgatactgtgggggtgaccaaaaagtgttccgaggactggaaactggtccggtctgcttccttttcccgcgggggccagctctctttcaccgatctgggactccctccgacggaccacctgcaggcctcctttggctttcagaccttccagcctagtggtatcctgcttgatcaccagacctggactaggaacctgcaggtgacactggaagatggctatatcgagctttccaccagcgatagtggatcaccgatttttaagtctccgcaaacttacatggacggcctattgcactatgtgagcgtaattagcgataatagcggccttcgcctccttattgacgaccagctcctcagaaactccaagcggttgaaacacatttcctctagccggcagtccttgagactcggcggcagcaactttgaaggttgtatttccaacgtctttgtacaacgcctatcgctgtctcctgaggtcctcgacctaacctcaaacagtttgaaaagagacgtgagccttggcgggtgttctctgaataagcccccctttctgatgttgctcaagggcagcacgcgattcaataagaccaaaacctttcggatcaaccaactgctgcaagacactccggttgcgtctcctcgctcggtaaaagtctggcaagacgcctgcagcccactaccgaagacccaggcaaatcacggcgctctgcaattcggcgatataccaacctcacacttactctttaagctacctcaagagctgctcaagccccgctctcagtttgccgttgacatgcagaccaccagtagccggggattagttttccatacgggaacaaagaatagctttatggccctctacctctccaagggtaggctggtgtttgcactgggaactgatgggaagaagctccgcatcaaatccaaagagaagtgtaatgatgggaaatggcataccgtcgtgttcgggcatgacggcgagaaaggcagactggtagttgatggtctcagagctagggaagggtccctcccggggaattcaactatctctatcagggccccagtgtatctcggctccccgccctccggcaagcccaaatccctgcctaccaatagcttcgtcgggtgtctgaagaacttccaactggacagcaagcccctctatactccaagctcatctttcggggtctcaagctgtctgggaggcccactcgaaaaagggatttactttagtgaggaaggaggacacgtagtcctagcgcactccgttctcctgggtccagaattcaagctggtctttagtatccgtcctcgctctttaactggcattctgatccacatcggctcccagccagggaaacacctatgcgtgtatctggaggccggaaaggtaacggcatctatggacagcggagccggaggcacatcgacaagcgtgacccctaagcagtctctttgtgatgggcagtggcatagtgtggcagtcactattaagcagcatatccttcatttagaactggataccgactcttcctacactgccggtcaaattccatttcctcccgccagcacacaggaacccctgcacctgggaggcgcacccgctaatctgaccacactgaggattccagtctggaaatcatttttcggctgcctgaggaacattcatgtgaaccatattccggtccccgtaacggaggcactcgaagtccaaggcccagtcagtctgaacggttgtccggaccagtag

SEQ ID NO: 45757 - DNA, 5007 bp, Artificial Sequence
  derived and/or modified sequence
atgccaccggcagttcgccgatctgcgtgttctatggggtggctgtggattttcggcgctgcccttgggcaatgtttgggttactccagtcagcagcaacgtgttccgttcttgcagccgcctggccagtcacagttacaggccagctatgtcgagttccgtcctagccagggttgctcacctgggtattaccgtgaccacaaagggctgtatacaggaaggtgcgtgccctgcaactgcaacggacacagcaaccagtgtcaggatggctctgggatatgcgttaactgtcagcataataccgcaggggagcattgtgagcggtgccaggaggggtactacggcaacgcagtccacggatcatgtagggcgtgcccttgtcctcacacaaattctttcgcaaccgggtgcgtggtgaacggcggagacgttcggtgttcctgtaaagcgggatacactgggacccagtgcgaaagatgtgctccaggctattttggaaacccacagaagttcggaggaagctgccaaccatgctcatgtaattcaaatggccaactggggtcctgccatcccctcaccggagattgtattaaccaggagcccaaggactcttcccctgctgaagaatgcgatgattgtgattcctgcgttatgacacttctgaacgacctcgccaccatgggggaacagctccgcctggtcaagtcccagctgcaagggctgtcggcctctgccggactgctggagcagatgagacatatggagactcaggccaaggacctaagaaaccagctgcttaactaccggagcgcgataagtaaccatggtagtaaaattgagggcctggaaagagagctgaccgacctcaaccaggagttcgagaccctccaagaaaaggcacaagtgaactctcgaaaggctcagaccttaaacaacaacgtcaatagggcaacacagtccgccaaagagctcgatgtcaagataaagaatgtcatcagaaatgttcatatgctgaatcgcattcgcacatggcaaaagacacaccaaggggagaacaatggcttagccaacagcatcagggatagcctgaacgaatacgaagctaagctctccgacctacgagctcgactgcaagaagccgctgctcaggctaaacaggctaatggcttgaaccaagagaacgaacgcgcactgggggcaattcaacgccaggtgaaggaaattaattctttgcaatcggacttcaccaagtatttgactactgccgacagctccctgctccagaccaacattgcactgcagctgatggagaaatcccagaaggaatatgagaaattggctgcttcacttaacgaggctcgccaagaactgtctgataaggtgagagagttaagccgtagtgcaggaaagacctccctcgtcgaagaagccgagaaacacgccagatcactacaggaacttgcaaagcaactggaagagataaagcggaatgcatctggcgacgagttggtgagatgcgctgtggacgccgctacagcttacgagaatattttaaatgctatcaaggccgcagaggatgcagccaatagagcggcttcagcatctgaatccgcactccagaccgttataaaagaggacttgccacgaaaagcgaaaactctgagctcaaattctgataagcttctgaacgaggctaaaatgacccagaaaaaactcaaacaggaggttagtcctgcgctcaataacttacagcaaacgctgaatatcgttaccgtgcagaaagaagtcatcgacacaaatcttaccaccctacgtgatgggctgcatggaatacaacggggagacattgacgccatgatctcatccgctaaatcaatggtccggaaagctaacgacattactgatgaagtgctggatgggctgaaccctattcagacagatgtggagcggatcaaagacacttacggccgtacccagaacgaagactttaagaaggccctcaccgacgctgataactctgtgaataaactcaccaacaaattaccagatctgtggaggaaaatcgaatcaatcaaccagcagctcctccccctagggaacatttccgataatatggatcgaatccgtgaattaatccagcaggccagggacgctgcttccaaggtagctgtgcctatgagatttaacggaaaaagcggcgtggaagtacgactcccaaatgatctggaggacctgaagggctatactagcctgtccctgttccttcagagaccaaattcacgcgagaatggcggaacagaaaacatgttcgtaatgtacctaggaaacaaggatgcctctagggattatatcgggatggctgtggttgacggtcagttgacgtgtgtgtacaacctcggcgacagggaggctgagttgcaagtggaccagatcctcaccaagtccgaaaccaaggaagctgtcatggatcgcgtgaaattccagagaatttatcagttcgctcgattgaattacaccaagggggcaacttcgagcaaacctgaaacgccgggagtgtacgatatggatggccgtaattctaacaccctgctgaacctagaccccgagaatgtcgtgttctatgtcggagggtatccacccgactttaaactgccttcacgtctgagtttccctccttataaggggtgtatagaactagacgacctgaacgaaaacgtgctctccctgtacaattttaaaaaaacattcaatctgaacacaactgaggttgagccttgtagaaggcgtaaagaagaaagcgacaagaactatttcgagggcacaggatatgctcgggttcctacccagcctcacgccccaatcccgacatttggacaaaccattcagacaacagtagatcgaggcttactcttctttgcggagaatggcgatcgttttattagtctgaatattgaagatggcaaactcatggtgcggtacaaacttaattccgagttgccaaaagaacgcggagtaggggatgcaattaacaacgggagggatcatagtatccagattaaaataggaaagctgcagaaacgaatgtggataaacgtagacgttcagaacaccataatcgacggcgaggtcttcgacttttcaacatactacctcggcggaattcccattgcgatccgggaacgcttcaacataagcaccccagccttcagaggatgcatgaagaacctgaagaagacaagtggcgtggtgcggttgaacgataccgtcggtgtaaccaagaagtgctcagaagactggaagctggtgcgaagtgcctcgttttcacgaggcggtcagctgtccttcaccgatttggggctcccgccaactgatcacttgcaggcatcatttggcttccagacatttcaaccttccggaattcttttggatcatcagacatggacgaggaatctgcaggtcaccctggaagacggctacattgaactgagcacatccgattctggctcccccattttcaaatctccacagacttatatggacggcctcttgcactatgtcagcgtgatcagtgacaattcaggtctgcggctgctaatcgatgatcaactcttgaggaattccaagcggctgaagcacatctcgtcgagtcggcagtcactgaggctcgggggttcaaactttgaggggtgcatttccaacgtcttcgtgcaaaggctgagtttgagcccggaggtcctggacctgacttccaactctttgaagcgcgacgtatcactcgggggatgctccttaaataaaccaccattcctgatgctactgaagggctccacccggttcaataaaacgaaaaccttccgcataaaccaacttctccaggatacccccgtagcttccccaaggtcagtgaaagtctggcaagatgcctgctccccccttcctaaaacccaagccaaccatggagcactgcagttcggagatatccccaccagccacctcctgttcaagctgccccaagaattgctgaagccacgatctcagtttgccgtcgatatgcagaccaccagctccaggggcctcgttttccatacaggcacaaagaatagctttatggctttgtacctctctaaagggcgtcttgtttttgcccttggcaccgatggcaagaaattgaggatcaagtcaaaggagaagtgcaatgacgggaagtggcacacggtagttttcggacacgacggcgagaaagggcgtctggtggtcgatggcctgcgcgctcgggagggctccttgcccggaaacagcactatatcaattcgtgccccagtgtacctaggaagccctccctccggcaagcctaaatccctgcctacaaactctttcgtaggctgcttgaagaactttcagttggatagtaagcccctatacacacccagtagttcattcggagtctcctcctgtctgggcggtccgttggagaaaggaatatatttctctgaagagggcggtcacgtcgtcttggcccatagtgtgcttcttggcccagagttcaagttggtcttctcaatcaggccacggagcctgactggcattctcattcacattggttcccagccaggaaagcacctttgtgtgtatctagaagcaggcaaagtcaccgcatctatggattctggtgccggagggacatccacaagcgtaactcctaagcaatctttgtgtgacggacaatggcatagtgtagcggtaacaattaagcagcatatattacatctggaactcgataccgatagttcctatacggccggtcaaattccgtttccccctgcatcaacccaggagcccctacacctcgggggagccccagcgaatttgacaacccttagaatcccagtgtggaagtcctttttcggatgcctcagaaatattcatgtgaatcacatcccagtgcctgtgacagaggccctggaagtgcagggacccgtgtctctgaatggatgcccagaccagtag

SEQ ID NO: 45758 - DNA, 5007 bp, Artificial Sequence
  derived and/or modified sequence
atgccccccgccgtgagaagaagcgcctgcagcatgggctggctgtggatcttcggcgccgccctgggccagtgcctgggctacagcagccagcagcagagagtgcccttcctgcagccccccggccagagccagctgcaggccagctacgtggagttcagacccagccagggctgcagccccggctactacagagaccacaagggcctgtacaccggcagatgcgtgccctgcaactgcaacggccacagcaaccagtgccaggacggcagcggcatctgcgtgaactgccagcacaacaccgccggcgagcactgcgagagatgccaggagggctactacggcaacgccgtgcacggcagctgcagagcctgcccctgcccccacaccaacagcttcgccaccggctgcgtggtgaacggcggcgacgtgagatgcagctgcaaggccggctacaccggcacccagtgcgagagatgcgcccccggctacttcggcaacccccagaagttcggcggcagctgccagccctgcagctgcaacagcaacggccagctgggcagctgccaccccctgaccggcgactgcatcaaccaggagcccaaggacagcagccccgccgaggagtgcgacgactgcgacagctgcgtgatgaccctgctgaacgacctggccaccatgggcgagcagctgagactggtgaagagccagctgcagggcctgagcgccagcgccggcctgctggagcagatgagacacatggagacccaggccaaggacctgagaaaccagctgctgaactacagaagcgccatcagcaaccacggcagcaagatcgagggcctggagagagagctgaccgacctgaaccaggagttcgagaccctgcaggagaaggcccaggtgaacagcagaaaggcccagaccctgaacaacaacgtgaacagagccacccagagcgccaaggagctggacgtgaagatcaagaacgtgatcagaaacgtgcacatgctgaacagaatcagaacctggcagaagacccaccagggcgagaacaacggcctggccaacagcatcagagacagcctgaacgagtacgaggccaagctgagcgacctgagagccagactgcaggaggccgccgcccaggccaagcaggccaacggcctgaaccaggagaacgagagagccctgggcgccatccagagacaggtgaaggagatcaacagcctgcagagcgacttcaccaagtacctgaccaccgccgacagcagcctgctgcagaccaacatcgccctgcagctgatggagaagagccagaaggagtacgagaagctggccgccagcctgaacgaggccagacaggagctgagcgacaaggtgagagagctgagcagaagcgccggcaagaccagcctggtggaggaggccgagaagcacgccagaagcctgcaggagctggccaagcagctggaggagatcaagagaaacgccagcggcgacgagctggtgagatgcgccgtggacgccgccaccgcctacgagaacatcctgaacgccatcaaggccgccgaggacgccgccaacagagccgccagcgccagcgagagcgccctgcagaccgtgatcaaggaggacctgcccagaaaggccaagaccctgagcagcaacagcgacaagctgctgaacgaggccaagatgacccagaagaagctgaagcaggaggtgagccccgccctgaacaacctgcagcagaccctgaacatcgtgaccgtgcagaaggaggtgatcgacaccaacctgaccaccctgagagacggcctgcacggcatccagagaggcgacatcgacgccatgatcagcagcgccaagagcatggtgagaaaggccaacgacatcaccgacgaggtgctggacggcctgaaccccatccagaccgacgtggagagaatcaaggacacctacggcagaacccagaacgaggacttcaagaaggccctgaccgacgccgacaacagcgtgaacaagctgaccaacaagctgcccgacctgtggagaaagatcgagagcatcaaccagcagctgctgcccctgggcaacatcagcgacaacatggacagaatcagagagctgatccagcaggccagagacgccgccagcaaggtggccgtgcccatgagattcaacggcaagagcggcgtggaggtgagactgcccaacgacctggaggacctgaagggctacaccagcctgagcctgttcctgcagagacccaacagcagagagaacggcggcaccgagaacatgttcgtgatgtacctgggcaacaaggacgccagcagagactacatcggcatggccgtggtggacggccagctgacctgcgtgtacaacctgggcgacagagaggccgagctgcaggtggaccagatcctgaccaagagcgagaccaaggaggccgtgatggacagagtgaagttccagagaatctaccagttcgccagactgaactacaccaagggcgccaccagcagcaagcccgagacccccggcgtgtacgacatggacggcagaaacagcaacaccctgctgaacctggaccccgagaacgtggtgttctacgtgggcggctacccccccgacttcaagctgcccagcagactgagcttccccccctacaagggctgcatcgagctggacgacctgaacgagaacgtgctgagcctgtacaacttcaagaagaccttcaacctgaacaccaccgaggtggagccctgcagaagaagaaaggaggagagcgacaagaactacttcgagggcaccggctacgccagagtgcccacccagccccacgcccccatccccaccttcggccagaccatccagaccaccgtggacagaggcctgctgttcttcgccgagaacggcgacagattcatcagcctgaacatcgaggacggcaagctgatggtgagatacaagctgaacagcgagctgcccaaggagagaggcgtgggcgacgccatcaacaacggcagagaccacagcatccagatcaagatcggcaagctgcagaagagaatgtggatcaacgtggacgtgcagaacaccatcatcgacggcgaggtgttcgacttcagcacctactacctgggcggcatccccatcgccatcagagagagattcaacatcagcacccccgccttcagaggctgcatgaagaacctgaagaagaccagcggcgtggtgagactgaacgacaccgtgggcgtgaccaagaagtgcagcgaggactggaagctggtgagaagcgccagcttcagcagaggcggccagctgagcttcaccgacctgggcctgccccccaccgaccacctgcaggccagcttcggcttccagaccttccagcccagcggcatcctgctggaccaccagacctggaccagaaacctgcaggtgaccctggaggacggctacatcgagctgagcaccagcgacagcggcagccccatcttcaagagcccccagacctacatggacggcctgctgcactacgtgagcgtgatcagcgacaacagcggcctgagactgctgatcgacgaccagctgctgagaaacagcaagagactgaagcacatcagcagcagcagacagagcctgagactgggcggcagcaacttcgagggctgcatcagcaacgtgttcgtgcagagactgagcctgagccccgaggtgctggacctgaccagcaacagcctgaagagagacgtgagcctgggcggctgcagcctgaacaagccccccttcctgatgctgctgaagggcagcaccagattcaacaagaccaagaccttcagaatcaaccagctgctgcaggacacccccgtggccagccccagaagcgtgaaggtgtggcaggacgcctgcagccccctgcccaagacccaggccaaccacggcgccctgcagttcggcgacatccccaccagccacctgctgttcaagctgccccaggagctgctgaagcccagaagccagttcgccgtggacatgcagaccaccagcagcagaggcctggtgttccacaccggcaccaagaacagcttcatggccctgtacctgagcaagggcagactggtgttcgccctgggcaccgacggcaagaagctgagaatcaagagcaaggagaagtgcaacgacggcaagtggcacaccgtggtgttcggccacgacggcgagaagggcagactggtggtggacggcctgagagccagagagggcagcctgcccggcaacagcaccatcagcatcagagcccccgtgtacctgggcagcccccccagcggcaagcccaagagcctgcccaccaacagcttcgtgggctgcctgaagaacttccagctggacagcaagcccctgtacacccccagcagcagcttcggcgtgagcagctgcctgggcggccccctggagaagggcatctacttcagcgaggagggcggccacgtggtgctggcccacagcgtgctgctgggccccgagttcaagctggtgttcagcatcagacccagaagcctgaccggcatcctgatccacatcggcagccagcccggcaagcacctgtgcgtgtacctggaggccggcaaggtgaccgccagcatggacagcggcgccggcggcaccagcaccagcgtgacccccaagcagagcctgtgcgacggccagtggcacagcgtggccgtgaccatcaagcagcacatcctgcacctggagctggacaccgacagcagctacaccgccggccagatccccttcccccccgccagcacccaggagcccctgcacctgggcggcgcccccgccaacctgaccaccctgagaatccccgtgtggaagagcttcttcggctgcctgagaaacatccacgtgaaccacatccccgtgcccgtgaccgaggccctggaggtgcagggccccgtgagcctgaacggctgccccgaccagtag

SEQ ID NO: 45759 - protein, 281 aa, Artificial Sequence
  derived and/or modified sequence
MGEIKVSPDYNWFRGTVPLKKIIVDDDDSKIWSLYDAGPRSIRCPLIFLPPVSGTADVFFRQILALTGWGYRVIAVHLFGASLGGFLAQKFAEYTHKSPRVHSLILCNSFSDTSIFNQTWTANSFWLMPAFMLKKIVLGNFSSGPVDPMMADAIDFMVDRLESLGQSELASRLTLNCQNSYVEPHKIRDIPVTIMDVFDQSALSTEAKEEMYKLYPNARRAHLKTGGNFPYLCRSAEVNLYVQIHLLQFHGTKYAAIDPSMVSAEELEVQKGSLGISQEEQ

SEQ ID NO: 45760 - DNA, 846 bp, Artificial Sequence
  derived and/or modified sequence
atgggcgagatcaaggtgagccccgactacaactggttcagaggcaccgtgcccctgaagaagatcatcgtggacgacgacgacagcaagatctggagcctgtacgacgccggccccagaagcatcagatgccccctgatcttcctgccccccgtgagcggcaccgccgacgtgttcttcagacagatcctggccctgaccggctggggctacagagtgatcgccgtgcacctgttcggcgccagcctgggcggcttcctggcccagaagttcgccgagtacacccacaagagccccagagtgcacagcctgatcctgtgcaacagcttcagcgacaccagcatcttcaaccagacctggaccgccaacagcttctggctgatgcccgccttcatgctgaagaagatcgtgctgggcaacttcagcagcggccccgtggaccccatgatggccgacgccatcgacttcatggtggacagactggagagcctgggccagagcgagctggccagcagactgaccctgaactgccagaacagctacgtggagccccacaagatcagagacatccccgtgaccatcatggacgtgttcgaccagagcgccctgagcaccgaggccaaggaggagatgtacaagctgtaccccaacgccagaagagcccacctgaagaccggcggcaacttcccctacctgtgcagaagcgccgaggtgaacctgtacgtgcagatccacctgctgcagttccacggcaccaagtacgccgccatcgaccccagcatggtgagcgccgaggagctggaggtgcagaagggcagcctgggcatcagccaggaggagcagtag

SEQ ID NO: 45761 - DNA, 846 bp, Artificial Sequence
  derived and/or modified sequence
atgggggagatcaaagtgtccccggattacaattggtttaggggcacagttccgctgaaaaagatcatcgttgacgatgacgattccaagatctggagtctttatgatgcaggcccacgttccattcgatgtccgctcattttcttgcctcccgtgagtggcaccgcggacgtcttttttagacagattctggctctgactggttggggatatagggttattgccgtgcacctgttcggcgcgtcactcggaggcttcctggcccagaaattcgctgaatatactcataaaagcccccgtgttcactctctcattctgtgtaattccttctctgacacaagcatttttaaccagacctggaccgcaaacagcttctggttgatgcccgctttcatgctcaagaaaattgtattgggcaatttttcatctggcccagtggatcccatgatggcggatgcgatagacttcatggtggatcgtttggaatcgttagggcaatcagagttagctagcaggctgaccttgaactgccagaattcctacgttgaaccgcacaagatccgagacataccagttaccataatggatgtgttcgaccagtccgctctgtctacagaggctaaggaggagatgtataaactgtatccaaacgcgagacgggctcacctgaagacaggagggaatttcccctatctgtgcaggtcagcagaggtgaatctttacgtgcaaatacatctgctgcagtttcacggaacaaaatacgcagctatcgacccatcaatggtgagcgccgaggagctcgaagttcagaagggatcactggggataagccaggaggaacagtag

SEQ ID NO: 45762 - DNA, 846 bp, Artificial Sequence
  derived and/or modified sequence
atgggagagatcaaggtgtccccagactacaactggttccggggcaccgtgcccctgaagaagatcatcgtggatgatgatgacagcaagatctggagcctgtatgatgctggccccaggagcatccgctgccccctcatcttcctgccccctgtgtctggaacagcagatgtgttcttccggcagatcctggccctgaccggctggggctacagagtgattgctgtgcacctgtttggagccagcctgggcggcttcctggcccagaagtttgctgagtacacccacaagagcccccgggtgcacagcctcatcctgtgcaacagcttcagtgacaccagcatcttcaaccagacctggacagccaacagcttctggctgatgcctgccttcatgctgaagaagatcgtgctgggcaacttcagcagcggccctgtggaccccatgatggctgatgccatcgacttcatggtggaccggctggagagcctgggccagagcgagctggccagccggctgaccctgaactgccagaacagctatgtggagccccacaagatccgggacatccctgtgaccatcatggatgtgtttgaccagagcgccctgagcacagaggccaaggaggagatgtacaagctgtacccaaatgcccggcgggcccacctgaagacaggaggcaacttcccctacctgtgccgctctgctgaggtgaacctgtatgtgcagatccacctgctgcagttccacggcaccaagtatgctgccatcgaccccagcatggtgtctgctgaggagctggaggtgcagaagggcagcctgggcatcagccaggaggagcagtag

SEQ ID NO: 45763 - DNA, 846 bp, Artificial Sequence
  derived and/or modified sequence
atgggcgagatcaaggtgagccccgactacaactggttccggggcactgtgccccttaaaaagataatagttgacgatgatgactctaaaatctggtccctatatgacgccgggcccaggagcatcaggtgcccacttatttttctgccccccgtctctggtaccgctgacgtgtttttcaggcagatcttagcactcacaggctggggataccgcgtgattgcagtccatctgtttggagcctctttgggcggattcctggctcagaagttcgctgagtacacccacaagtctccgagagtgcactcgctgatattatgtaacagtttctcagacacctccatatttaaccagacgtggaccgctaacagcttttggctcatgcctgcattcatgttgaagaagatagtgctaggaaactttagcagtggtccagtcgaccccatgatggctgacgctattgactttatggtggataggttggagtctcttggccagtccgaactcgcttctaggctgactctgaactgtcagaatagctatgttgagccccacaagatcagggatataccagtgactatcatggacgtcttcgaccagtcagccctgtctactgaggccaaggaggaaatgtataaactctacccaaacgcacgcagagcccacttgaagacgggagggaattttccctatctgtgtcggagcgccgaggtgaacctgtatgtccagattcatctgctgcagtttcacggcacaaagtatgcagctatagatcccagcatggtatccgccgaggagctggaggtccagaaagggagtctgggcatatcccaggaggaacagtag

SEQ ID NO: 45764 - DNA, 846 bp, Artificial Sequence
  derived and/or modified sequence
atgggagagatcaaggtgtcccctgattacaactggttccggggtactgttccgctcaaaaaaatcatcgtggatgatgatgacagcaagatctggtctctttacgatgctgggcctagatctataagatgtcctctgatttttctgcctcctgtgtctggcaccgcggacgtcttcttcaggcagatcctggcactcaccggttgggggtatcgcgtcatagccgtccacttgttcggggctagcttggggggatttctcgctcagaagttcgcagaatacactcacaagagtcccagagtacattcactcatcttgtgtaatagtttctctgatacgagcatctttaatcagacgtggactgcgaacagcttctggctcatgccagcttttatgctgaagaaaatcgtcttaggcaattttagctccggcccagtggatcctatgatggccgatgccatcgactttatggttgacagactggagtcgctggggcagtctgaactcgcttctaggttaaccctgaattgtcagaactcatatgtagaaccacataagatccgggatattcccgtcactatcatggatgtgttcgatcagtccgccttgtccacggaagccaaggaggagatgtacaagctgtaccctaacgcacgcagggcgcatctcaagacaggcggtaacttcccttatttgtgtcggtcagctgaagtgaacttatacgtgcaaatccatcttctgcagtttcatggtacaaaatacgcagcaatcgatccatctatggttagtgccgaagaacttgaggtgcagaaaggatccctgggaatcagccaagaggagcaatag

SEQ ID NO: 45765 - DNA, 1533 bp, Artificial Sequence
  derived and/or modified sequence
agtctcgcgccagctgagcggcggtcgggcggggggagcgcggcggcccaagctcgctcggccacgcgccccgccccctcagaggccggcctcccgcacgcaccgcgcagcctgctgtgcccgtgggtcccgagtgctccgccgcccgccccgacccgggcccagccgcctccacggcccgcgctcgtactggagcgaagagcggcctcctgaaggaggggaagggacgtgggggcggccacggcaggattaacctccatttcagctaatcatgggagagattaaagtctctcctgattataactggtttagaggtacagttccccttaaaaagattattgtggatgatgatgacagtaagatatggtcgctctatgacgcgggcccccgaagtatcaggtgtcctctcatattcctgccccctgtcagtggaactgcagatgtctttttccggcagattttggctctgactggatggggttaccgggttatcgctgttcatctttttggcgcttctttgggaggctttttggcccagaaatttgctgaatacactcacaaatctcctagagtccattccctaatcctctgcaattccttcagtgacacctctatcttcaaccaaacttggactgcaaacagcttttggctgatgcctgcatttatgctcaaaaaaatagttcttggaaatttttcatctggcccggtggaccctatgatggctgatgccattgatttcatggtagacaggctagaaagtttgggtcagagtgaactggcttcaagacttaccttgaattgtcaaaattcttatgtggaacctcataaaattcgggacatacctgtaactattatggatgtgtttgatcagagtgcgctttcaactgaagctaaagaagaaatgtacaagctgtatcctaatgcccgaagagctcatctgaaaacaggaggcaatttcccatacctgtgcagaagtgcagaggtcaatctttatgtacagatacatttgctgcaattccatggaaccaaatacgcggccattgacccatcaatggtcagtgccgaggagcttgaggtgcagaaaggcagccttggcatcagccaggaggagcagtagtgtgtctctcgctgtcaatgatgagttgacccggtgtgttcttgtatagtcagtggcatcagcacccgtcagccggccttttccttcaggttcgtcaggctcaccggttctcactgtgtctgggaagtaggactgatggtcatcttcatgacaggcggcatctccactaagcctgtgtaactgttccctctttggttttcttagcttttgaatttgaagaagtacttttgaagactcccattttaagaaccgtgcagattttgctaccaaaagtcttcaccactgtgttcttaagtgaatgttaatttctgaggtttgggactttgtggtggtttttttcttcttttcttttccattcttctttctttctttttatgttgtttgctgtaaatgctgcacatccagattgcatatca

SEQ ID NO: 45766 - DNA, 3377 bp, Artificial Sequence
  derived and/or modified sequence
atgcctgccctcctgggaatgaagcacagcaggtctcagcctcatcttacccagccccccactcaagatggaggtgcctggtttgaacacctctgacaaatggaagtctgtgttgtccagaggcaatgcagtgggggcttaagaagataactctggacttagaccgcttggcttcaaatcaaagagtgcatgaaccaaccagctggcctagtgatgatgttaggcaagtgacttctcagtttcttcatctgcaaactgggaaatttcctatctcagggttaaaagagaggtaatcttaggtgcttacctagcacatgcaatacctgaacaccttctatggctgccccaaggagagctgcaacctgtttgtgctgaaggacacactaaagaagatgcagaagttctttggactgccccagacaggtgatcttgaccagaataccatcgagaccatgcggaagccacgctgcggcaacccagatgtggccaactacaacttcttccctcgcaagcccaagtgggacaagaaccagatcacatacaggatcattggctacacacctgatctggacccagagacagtggatgatgcctttgctcgtgccttccaagtctggagcgatgtgaccccactgcggttttctcgaatccatgatggagaggcagacatcatgatcaactttggccgctgggagcatggcgatggatacccctttgacggtaaggacggactcctggctcatgccttcgccccaggcactggtgttgggggagactcccattttgatgacgatgagctatggaccttgggagaaggccaagtggtccgtgtgaagtatgggaacgccgatggggagtactgcaagttccccttcttgttcaatggcaaggagtacaacagctgcactgataccggccgcagcgatggcttcctctggtgctccaccacctacaactttgagaaggatggcaagtacggcttctgtccccatgaagccctgttcaccatgggcggcaacgctgaaggacagccctgcaagtttccattccgcttccagggcacatcctatgacagctgcaccactgagggccgcacggatggctaccgctggtgcggcaccactgaggactacgaccgcgacaagaagtatggcttctgccctgagaccgccatgtccactgttggtgggaactcagaaggtgccccctgtgtcttccccttcactttcctgggcaacaaatatgagagctgcaccagcgccggccgcagtgacggaaagatgtggtgtgcgaccacagccaactacgatgatgaccgcaagtggggcttctgccctgaccaagggtacagcctgttcctcgtggcagcccacgagtttggccacgccatggggctggagcactcccaagaccctggggccctgatggcacccatttacacctacaccaagaacttccgtctgtcccaggatgacatcaagggcattcaggagctctatggggcctctcctgacattgaccttggcaccggccccacccccacgctgggccctgtcactcctgagatctgcaaacaggacattgtatttgatggcatcgctcagatccgtggtgagatcttcttcttcaaggaccggttcatttggcggactgtgacgccacgtgacaagcccatggggcccctgctggtggccacattctggcctgagctcccggaaaagattgatgcggtatacgaggccccacaggaggagaaggctgtgttctttgcagggaatgaatactggatctactcagccagcaccctggagcgagggtaccccaagccactgaccagcctgggactgccccctgatgtccagcgagtggatgccgcctttaactggagcaaaaacaagaagacatacatctttgctggagacaaattctggagatacaatgaggtgaagaagaaaatggatcctggcttccccaagctcatcgcagatgcctggaatgccatccccgataacctggatgccgtcgtggacctgcagggcggcggtcacagctacttcttcaagggtgcctattacctgaagctggagaaccaaagtctgaagagcgtgaagtttggaagcatcaaatccgactggctaggctgctgagctggccctggctcccacaggcccttcctctccactgccttcgatacaccgggcctggagaactagagaaggacccggaggggcctggcagccgtgccttcagctctacagctaatcagcattctcactcctacctggtaatttaagattccagagagtggctcctcccggtgcccaagaatagatgctgactgtactcctcccaggcgccccttccccctccaatcccaccaaccctcagagccacccctaaagagatactttgatattttcaacgcagccctgctttgggctgccctggtgctgccacacttcaggctcttctcctttcacaaccttctgtggctcacagaacccttggagccaatggagactgtctcaagagggcactggtggcccgacagcctggcacagggcagtgggacagggcatggccaggtggccactccagacccctggcttttcactgctggctgccttagaacctttcttacattagcagtttgctttgtatgcactttgtttttttctttgggtcttgttttttttttccacttagaaattgcatttcctgacagaaggactcaggttgtctgaagtcactgcacagtgcatctcagcccacatagtgatggttcccctgttcactctacttagcatgtccctaccgagtctcttctccactggatggaggaaaaccaagccgtggcttcccgctcagccctccctgcccctcccttcaaccattccccatgggaaatgtcaacaagtatgaataaagacacctactgagtggccgtgtttgccatctgttttagcagagcctagacaagggccacagacccagccagaagcggaaacttaaaaagtccgaatctctgctccctgcagggcacaggtgatggtgtctgctggaaaggtcagagcttccaaagtaaacagcaagagaacctcagggagagtaagctctagtccctctgtcctgtagaaagagccctgaagaatcagcaattttgttgctttattgtggcatctgttcgaggtttgcttcctctttaagtctgtttcttcattagcaatcatatcagttttaatgctactactaacaatgaacagtaacaataatatccccctcaattaatagagtgctttctatgtgcaaggcacttttcacgtgtcacctattttaacctttccaaccacataaataaaaaaggccattattagttg

SEQ ID NO: 45767 - DNA, 1978 bp, Artificial Sequence
  derived and/or modified sequence
agatgttgtcttgtgagcgtgcgcgcgcctggctggaggggcactgagcctggccgcagtgttgccaatacctgaacaccttctatggctgccccaaggagagctgcaacctgtttgtgctgaaggacacactaaagaagatgcagaagttctttggactgccccagacaggtgatcttgaccagaataccatcgagaccatgcggaagccacgctgcggcaacccagatgtggccaactacaacttcttccctcgcaagcccaagtgggacaagaaccagatcacatacaggatcattggctacacacctgatctggacccagagacagtggatgatgcctttgctcgtgccttccaagtctggagcgatgtgaccccactgcggttttctcgaatccatgatggagaggcagacatcatgatcaactttggccgctgggagcatggcgatggatacccctttgacggtaaggacggactcctggctcatgccttcgccccaggcactggtgttgggggagactcccattttgatgacgatgagctatggaccttgggagaaggccaagtggtccgtgtgaagtatgggaacgccgatggggagtactgcaagttccccttcttgttcaatggcaaggagtacaacagctgcactgataccggccgcagcgatggcttcctctggtgctccaccacctacaactttgagaaggatggcaagtacggcttctgtccccatgaagccctgttcaccatgggcggcaacgctgaaggacagccctgcaagtttccattccgcttccagggcacatcctatgacagctgcaccactgagggccgcacggatggctaccgctggtgcggcaccactgaggactacgaccgcgacaagaagtatggcttctgccctgagaccgccatgtccactgttggtgggaactcagaaggtgccccctgtgtcttccccttcactttcctgggcaacaaatatgagagctgcaccagcgccggccgcagtgacggaaagatgtggtgtgcgaccacagccaactacgatgatgaccgcaagtggggcttctgccctgaccaagggtacagcctgttcctcgtggcagcccacgagtttggccacgccatggggctggagcactcccaagaccctggggccctgatggcacccatttacacctacaccaagaacttccgtctgtcccaggatgacatcaagggcattcaggagctctatggggcctctcctgacattgaccttggcaccggccccacccccacgctgggccctgtcactcctgagatctgcaaacaggacattgtatttgatggcatcgctcagatccgtggtgagatcttcttcttcaaggaccggttcatttggcggactgtgacgccacgtgacaagcccatggggcccctgctggtggccacattctggcctgagctcccggaaaagattgatgcggtatacgaggccccacaggaggagaaggctgtgttctttgcagggaatgaatactggatctactcagccagcaccctggagcgagggtaccccaagccactgaccagcctgggactgccccctgatgtccagcgagtggatgccgcctttaactggagcaaaaacaagaagacatacatctttgctggagacaaattctggagatacaatgaggtgaagaagaaaatggatcctggcttccccaagctcatcgcagatgcctggaatgccatccccgataacctggatgccgtcgtggacctgcagggcggcggtcacagctacttcttcaagggtgcctattacctgaagctggagaaccaaagtctgaagagcgtgaagtttggaagcatcaaatccgactggctaggctgctgagctggccctggctcccacaggcccttcctctccactgccttcgatacaccgggcctggagaactagagaaggacccggagggg

SEQ ID NO: 45768 - protein, 1227 aa, Artificial Sequence
  derived and/or modified sequence
MNDTVNKTDQVDCSDLSEHNGLDREESMEVEAPVANKSGSGTSSGSHSSTAPSSSSSSSSSSGGGGSSSTGTSAITTSLPQLGDLTTLGNFSVINSNVIIENLQSTKVAVAQFSQEARCGGASGGKLAVPALMEQLLALQQQQIHQLQLIEQIRHQILLLASQNADLPTSSSPSQGTLRTSANPLSTLSSHLSQQLAAAAGLAQSLASQSASISGVKQLPPIQLPQSSSGNTIIPSNSGSSPNMNILAAAVTTPSSEKVASSAGASHVSNPAVSSSSSPAFAISSLLSPASNPLLPQQASANSVFPSPLPNIGTTAEDLNSLSALAQQRKSKPPNVTAFEAKSTSDEAFFKHKCRFCAKVFGSDSALQIHLRSHTGERPFKCNICGNRFSTKGNLKVHFQRHKEKYPHIQMNPYPVPEHLDNIPTSTGIPYGMSIPPEKPVTSWLDTKPVLPTLTTSVGLPLPPTLPSLIPFIKTEEPAPIPISHSATSPPGSVKSDSGGPESATRNLGGLPEEAEGSTLPPSGGKSEESGMVTNSVPTASSSVLSSPAADCGPAGSATTFTNPLLPLMSEQFKAKFPFGGLLDSAQASETSKLQQLVENIDKKATDPNECIICHRVLSCQSALKMHYRTHTGERPFKCKICGRAFTTKGNLKTHYSVHRAMPPLRVQHSCPICQKKFTNAVVLQQHIRMHMGGQIPNTPVPDSYSESMESDTGSFDEKNFDDLDNFSDENMEDCPEGSIPDTPKSADASQDSLSSSPLPLEMSSIAALENQMKMINAGLAEQLQASLKSVENGSIEGDVLTNDSSSVGGDMESQSAGSPAISESTSSMQALSPSNSTQEFHKSPSIEEKPQRAVPSEFANGLSPTPVNGGALDLTSSHAEKIIKEDSLGILFPFRDRGKFKNTACDICGKTFACQSALDIHYRSHTKERPFICTVCNRGFSTKGNLKQHMLTHQMRDLPSQLFEPSSNLGPNQNSAVIPANSLSSLIKTEVNGFVHVSPQDSKDTPTSHVPSGPLSSSATSPVLLPALPRRTPKQHYCNTCGKTFSSSSALQIHERTHTGEKPFACTICGRAFTTKGNLKVHMGTHMWNSTPARRGRRLSVDGPMTFLGGNPVKFPEMFQKDLAARSGSGDPSSFWNQYAAALSNGLAMKANEISVIQNGGIPPIPGSLGSGNSSPVSGLTGNLERLQNSEPNAPLAGLEKMASSENGTNFRFTRFVEDSKEIVTS

SEQ ID NO: 45769 - protein, 1288 aa, Artificial Sequence
  derived and/or modified sequence
MSRRKQAKPQHFQSDPEVASLPRRDGDTEKGQPSRPTKSKDAHVCGRCCAEFFELSDLLLHKKNCTKNQLVLIVNENPASPPETFSPSPPPDNPDEQMNDTVNKTGSHSSTAPSSSSSSSSSSGGGGSSSTGTSAITTSLPQLGDLTTLGNFSVINSNVIIENLQSTKVAVAQFSQEARCGGASGGKLAVPALMEQLLALQQQQIHQLQLIEQIRHQILLLASQNADLPTSSSPSQGTLRTSANPLSTLSSHLSQQLAAAAGLAQSLASQSASISGVKQLPPIQLPQSSSGNTIIPSNSGSSPNMNILAAAVTTPSSEKVASSAGASHVSNPAVSSSSSPAFAISSLLSPASNPLLPQQASANSVFPSPLPNIGTTAEDLNSLSALAQQRKSKPPNVTAFEAKSTSDEAFFKHKCRFCAKVFGSDSALQIHLRSHTGERPFKCNICGNRFSTKGNLKVHFQRHKEKYPHIQMNPYPVPEHLDNIPTSTGIPYGMSIPPEKPVTSWLDTKPVLPTLTTSVGLPLPPTLPSLIPFIKTEEPAPIPISHSATSPPGSVKSDSGGPESATRNLGGLPEEAEGSTLPPSGGKSEESGMVTNSVPTASSSVLSSPAADCGPAGSATTFTNPLLPLMSEQFKAKFPFGGLLDSAQASETSKLQQLVENIDKKATDPNECIICHRVLSCQSALKMHYRTHTGERPFKCKICGRAFTTKGNLKTHYSVHRAMPPLRVQHSCPICQKKFTNAVVLQQHIRMHMGGQIPNTPVPDSYSESMESDTGSFDEKNFDDLDNFSDENMEDCPEGSIPDTPKSADASQDSLSSSPLPLEMSSIAALENQMKMINAGLAEQLQASLKSVENGSIEGDVLTNDSSSVGGDMESQSAGSPAISESTSSMQALSPSNSTQEFHKSPSIEEKPQRAVPSEFANGLSPTPVNGGALDLTSSHAEKIIKEDSLGILFPFRDRGKFKNTACDICGKTFACQSALDIHYRSHTKERPFICTVCNRGFSTKGNLKQHMLTHQMRDLPSQLFEPSSNLGPNQNSAVIPANSLSSLIKTEVNGFVHVSPQDSKDTPTSHVPSGPLSSSATSPVLLPALPRRTPKQHYCNTCGKTFSSSSALQIHERTHTGEKPFACTICGRAFTTKGNLKVHMGTHMWNSTPARRGRRLSVDGPMTFLGGNPVKFPEMFQKDLAARSGSGDPSSFWNQYAAALSNGLAMKANEISVIQNGGIPPIPGSLGSGNSSPVSGLTGNLERLQNSEPNAPLAGLEKMASSENGTNFRFTRFVEDSKEIVTS

SEQ ID NO: 45770 - protein, 147 aa, Artificial Sequence
  derived and/or modified sequence
MVHMGTHMWNSTPARRGRRLSVDGPMTFLGGNPVKFPEMFQKDLAARSGSGDPSSFWNQYAAALSNGLAMKANEISVIQNGGIPPIPGSLGSGNSSPVSGLTGNLERLQNSEPNAPLAGLEKMASSENGTNFRFTRFVEDSKEIVTS

SEQ ID NO: 45771 - DNA, 444 bp, Artificial Sequence
  derived and/or modified sequence
atggtgcacatggggacccacatgtggaattccaccccagcgagaaggggcagacgcctgtctgtggatgggcccatgaccttcctcggtggaaaccccgtgaaattccctgagatgttccagaaagatcttgcagcacgctccggatcaggcgatccaagttcattttggaaccaatacgctgctgctcttagcaatgggttagctatgaaggcgaatgagatatccgtcattcagaacggtggtatccccccaatccctggtagccttggctcgggaaacagctcccccgtttcaggcctgacaggaaatttggagcggctgcagaactcagagcccaatgcacctctggccggtctggagaagatggcctcatctgagaacggaactaatttcagattcacgcgatttgttgaggactcaaaagaaatcgtgacaagttag

SEQ ID NO: 45772 - DNA, 444 bp, Artificial Sequence
  derived and/or modified sequence
atggtgcacatgggcacccacatgtggaacagcaccccagcccggcggggccggcggctgtctgtggatggccccatgaccttcctgggcggcaaccctgtgaagtttcctgagatgttccagaaggacctggccgcccggagcggcagcggggaccccagcagcttctggaaccagtatgctgctgccctgagcaatggcctggccatgaaggccaatgagatcagcgtcatccagaatggaggcatcccccccatccctggcagcctgggcagcggcaacagcagccctgtgtctggcctgaccggcaacctggagcggctgcagaacagcgagcccaatgcccccctggccggcctggagaagatggccagcagtgaaaatggcaccaacttccgcttcaccaggtttgtggaggacagcaaggagatcgtgaccagctag

SEQ ID NO: 45773 - DNA, 444 bp, Artificial Sequence
  derived and/or modified sequence
atggtgcacatgggcacccacatgtggaacagcacccccgcccggcgggggagaaggcttagcgtcgatggcccaatgacttttctcggggggaacccagtcaaatttccagagatgttccagaaagaccttgctgccaggagcggcagtggcgacccgtcctctttttggaatcagtacgcagcggcattgtctaacgggctcgcgatgaaagccaacgagatcagtgtcatccagaacggcggaatccctccaattcctgggtctctcggctccgggaatagcagccccgttagcggcctgaccggtaacttggagagactgcaaaactcagagcccaatgcaccactcgctggcttggagaagatggcctcaagtgaaaacggaacaaattttcgttttaccagattcgtggaggattctaaggagatcgtgacctcatag

SEQ ID NO: 45774 - DNA, 444 bp, Artificial Sequence
  derived and/or modified sequence
atggttcacatgggcacgcacatgtggaacagtacccctgccaggagaggccgaagactgtccgtagatggaccaatgacattcttgggcggtaatccggttaagtttccagagatgttccagaaagacctggccgcacgaagtggcagcggggatcctagttcattttggaaccagtatgccgctgccttaagtaatggtttggccatgaaagcaaatgaaataagcgtcatacagaatgggggaattcccccaatacctggctctctcggatcaggcaacagtagtcccgtatcaggcctaactggcaatctggaacggctccaaaattcggagcccaacgcgccattggccggtcttgaaaagatggcctccagcgagaatggcaccaactttaggtttacgagatttgtcgaggacagcaaagagatagtgacttcatag

SEQ ID NO: 45775 - DNA, 565 bp, Artificial Sequence
  derived and/or modified sequence
atgtcgcggaggaagcaagcgaagcctcaacatttccaatccgaccccgaagtggcctcgctcccccggcgagatggtacacatgggcactcacatgtggaatagcacccctgcacgacggggtcggcggctctctgtggatggccccatgacatttctaggaggcaatcccgtcaagttcccagaaatgttccagaaggatttggcggcaagatcaggaagtggggatccttccagcttctggaatcagtatgcagcagcgctctccaacgggctggcgatgaaggccaacgagatctccgtcattcagaacggtggcatccctccaattcctggaagcctcggcagtgggaacagctcacctgttagtgggctgacgggaaacctggagaggctccagaactcagagcccaatgctcccctggccggcctggagaaaatggcaagcagtgagaacggaaccaacttccgcttcacccgcttcgtggaggacagcaaggagatcgtcacgagttaaagcagctcgggctggagacatagcattcattcctgttcagaatgcgac

SEQ ID NO: 45776 - DNA, 444 bp, Artificial Sequence
  derived and/or modified sequence
atggtgcacatgggcacccacatgtggaacagcacccccgccagaagaggcagaagactgagcgtggacggccccatgaccttcctgggcggcaaccccgtgaagttccccgagatgttccagaaggacctggccgccagaagcggcagcggcgaccccagcagcttctggaaccagtacgccgccgccctgagcaacggcctggccatgaaggccaacgagatcagcgtgatccagaacggcggcatcccccccatccccggcagcctgggcagcggcaacagcagccccgtgagcggcctgaccggcaacctggagagactgcagaacagcgagcccaacgcccccctggccggcctggagaagatggccagcagcgagaacggcaccaacttcagattcaccagattcgtggaggacagcaaggagatcgtgaccagctag

SEQ ID NO: 45777 - protein, 299 aa, Artificial Sequence
  derived and/or modified sequence
MEIPMGTQGCFSKSLLLSASILVLWMLQGSQAALYIQKIPEQPQKNQDLLLSVQGVPDTFQDFNWYLGEETYGGTRLFTYIPGIQRPQRDGSAMGQRDIVGFPNGSMLLRRAQPTDSGTYQVAITINSEWTMKAKTEVQVAEKNKELPSTHLPTNAGILAATIIGSLAAGALLISCIAYLLVTRNWRGQSHRLPAPRGQGSLSILCSAVSPVPSVTPSTWMATTEKPELGPAHDAGDNNIYEVMPSPVLLVSPISDTRSINPARPLPTPPHLQAEPENHQYQDLLNPDPAPYCQLVPTS

SEQ ID NO: 45778 - DNA, 900 bp, Artificial Sequence
  derived and/or modified sequence
atggagatccccatgggcacccagggctgcttcagcaagagcctgctgctgagcgccagcatcctggtgctgtggatgctgcagggcagccaggccgccctgtacatccagaagatccccgagcagccccagaagaaccaggacctgctgctgagcgtgcagggcgtgcccgacaccttccaggacttcaactggtacctgggcgaggagacctacggcggcaccagactgttcacctacatccccggcatccagagaccccagagagacggcagcgccatgggccagagagacatcgtgggcttccccaacggcagcatgctgctgagaagagcccagcccaccgacagcggcacctaccaggtggccatcaccatcaacagcgagtggaccatgaaggccaagaccgaggtgcaggtggccgagaagaacaaggagctgcccagcacccacctgcccaccaacgccggcatcctggccgccaccatcatcggcagcctggccgccggcgccctgctgatcagctgcatcgcctacctgctggtgaccagaaactggagaggccagagccacagactgcccgcccccagaggccagggcagcctgagcatcctgtgcagcgccgtgagccccgtgcccagcgtgacccccagcacctggatggccaccaccgagaagcccgagctgggccccgcccacgacgccggcgacaacaacatctacgaggtgatgcccagccccgtgctgctggtgagccccatcagcgacaccagaagcatcaaccccgccagacccctgcccacccccccccacctgcaggccgagcccgagaaccaccagtaccaggacctgctgaaccccgaccccgccccctactgccagctggtgcccaccagctag

SEQ ID NO: 45779 - DNA, 900 bp, Artificial Sequence
  derived and/or modified sequence
atggaaatccccatgggcactcaaggttgtttttcaaaaagccttctgctgagcgcgagtatcctggtgctctggatgctccaaggcagtcaggcagctctctatatccaaaaaatccccgaacagcctcagaaaaaccaggacctgctgctctctgtgcagggagtgcccgacaccttccaggacttcaactggtacctgggcgaggagacttacggtgggacgcgcctattcacctacattcccggcatccaacggccccagagggacggatccgcgatggggcagagagacattgtcgggtttccgaatggaagcatgctcttgaggagagcccagcctacagatagcggcacataccaggttgccatcactattaactctgagtggaccatgaaagccaagaccgaggtccaggtcgcagagaaaaacaaggaattacccagtacacacctgccgacaaacgcgggtatattggccgcaacgatcatcggctcattggccgctggcgctctgctgatctcttgcattgcttatctcctggtcactcgcaattggcgggggcagtcccacaggctccccgctccaagaggccagggcagtctctcaatcctttgttccgccgtctcacctgtaccatctgtcacacccagcacttggatggcaacaaccgaaaagcctgagctaggccccgcgcatgatgccggagataataatatttacgaggtgatgccttcaccagtgctccttgtctcacctatttctgatacgagatcgataaaccccgccagacccctgccgacgcctccacacctccaagccgagcctgagaaccatcagtatcaggacctcttaaatccagatcctgcaccttattgtcagcttgttcctacctcctag

SEQ ID NO: 45780 - DNA, 900 bp, Artificial Sequence
  derived and/or modified sequence
atggagatccccatgggcacccagggctgcttcagcaagagcctgctgctgagcgccagcatcctggtgctgtggatgctgcagggcagccaggccgccctgtacatccagaagatccctgagcagccccagaagaaccaggacctgctgctgtctgtgcagggcgtgcctgacaccttccaggacttcaactggtacctgggggaggagacctacggcggcaccaggctcttcacctacatccctggcatccagaggccccagagagatggcagcgccatgggccagagggacatcgtgggcttccccaacggctccatgctgctgcggcgggcccagcccacagattctggcacctaccaggtggccatcaccatcaacagcgagtggaccatgaaggccaagacagaggtgcaggtggccgagaagaacaaggagctgcccagcacccacctgcccaccaatgccggcatcctggccgccaccatcatcggcagcctggccgccggggccctgctgatcagctgcatcgcctacctgctggtgaccaggaactggaggggccagagccaccggctgcctgccccccggggccagggcagcctgagcatcctgtgcagcgctgtgtcccctgtgcccagcgtgacccccagcacctggatggccaccacagagaagccagagctgggccctgcccatgatgctggggacaacaacatctatgaggtgatgcccagccctgtgctgctggtgagccccatcagtgacaccaggagcatcaacccagcccggcccctgcccaccccaccccacctgcaggccgagcctgagaaccaccagtaccaggacctgctgaacccagaccctgccccctactgccagctggtgcccaccagctag

SEQ ID NO: 45781 - DNA, 900 bp, Artificial Sequence
  derived and/or modified sequence
atggagatccccatgggcacccagggctgcttcagcaagagcctgcttctgtcagcgagtatactggtgttgtggatgcttcagggcagccaggcagcgctgtatatccagaaaattccggagcagccccagaaaaaccaggacttattattgagtgtgcagggagttcctgacacattccaagacttcaactggtacctaggagaagaaacttacggcggaactcgcctcttcacctacatccccgggatccagagaccgcaacgcgatggatctgccatgggacagcgcgatattgtaggatttccaaatggaagcatgctgctccgaagagcacaacccacagactccggcacctatcaggtggctatcactataaacagtgaatggacaatgaaggccaaaaccgaggtccaggtggctgagaagaacaaggagctcccatccacccatttgcctacgaacgcagggattcttgctgctaccatcatcggcagtctggccgctggcgcactgctcatttcatgcatcgcctatcttcttgtcacaagaaactggcgcggacagagtcatcggctcccggcacccagagggcaggggtctctgtcaattctgtgcagcgcagtgtcccccgtcccatccgtgaccccttcgacttggatggcaaccactgaaaagcctgaacttggtcctgcccacgacgcaggcgataacaatatctatgaggtgatgccctcccccgttctgctggtgtccccgatttcggatacgcgcagcattaacccagcacgccctctgccaactcccccacacctccaggccgagccggagaaccatcagtaccaggatttgctaaatcctgaccctgccccctactgccagttggtgcccacaagttag

SEQ ID NO: 45782 - DNA, 900 bp, Artificial Sequence
  derived and/or modified sequence
atggaaattccaatgggaacccaggggtgcttcagcaaatcactgctcctgtctgcctccatcttggttttatggatgttacagggctcccaggccgctctgtatatccagaagattccagaacaaccccaaaaaaaccaggacctgttgctgtccgtacagggcgtgccagatactttccaagattttaattggtacttgggagaagagacctatggcggaactagactgtttacatacatcccaggcattcaaagaccacaacgcgatgggtccgccatgggtcagcgggacatcgttggattccccaatggaagtatgctcctgcggcgagctcagccaacagacagtgggacctaccaggtggcgattactattaacagcgagtggaccatgaaagccaagaccgaggttcaagtcgcagagaaaaacaaggaactgccctccactcatctccctacgaacgcgggtatcttggcagctacgattataggatccttggcagcaggagcacttctcattagctgcatcgcctaccttcttgtgaccagaaactggcgaggacagagccaccggttacccgcaccacgcggacagggatccctgagcatcctctgttccgctgtgtctccggtgccatccgtgacgcctagtacatggatggccaccactgagaagccagaacttggacccgctcacgacgccggtgacaataatatctatgaggtgatgccttctccggtcctcctagtgtctcccatctccgacaccaggtccataaatcctgctcgacctctgcctacccccccacatcttcaagcagagccggagaatcaccagtaccaagatctgcttaacccggatccagctccatattgccaattagtgcctacaagctag

SEQ ID NO: 45783 - DNA, 2249 bp, Artificial Sequence
  derived and/or modified sequence
gtgaaatcccacctctgtctattggcagacttgcctcttttcctgggcctctgtttccacatctgtgcaatgggaacagttatttatggtggctgctgaatgaggcagtgtgtgtttgaacaaacccaggggaattgttcaaacagaggctgttatgactattgctacagtgactgctgttgtagtcacgctgagtgagaaaaagaggttgaagagggtcaggggaggagtcctgggaagttccccagtcaccctgaaaaactggttcaacctctgtctgtgctcccatcccagggagtataggtggagcctccagagcccatggacagggcatgctggggctgggccagccccagcggtgtctctaaggcacccctgggatccccactgagctggcctacttcagacagccagggcccacccctctggcccccttagtgtccagctcgtggccccttggcatttccacaagacgccaagatggagattcccatggggacccagggctgcttctcaaagagcctcctgctctcagcctcaatcctggtcctctggatgctccaaggctcccaggcagctctctacatccagaagattccagagcagcctcaaaagaaccaggaccttctcctgtcagtccagggtgtcccagacaccttccaggacttcaactggtacctgggggaggagacgtacggaggcacgaggctatttacctacatccctgggatacaacggcctcagagggatggcagtgccatgggacagcgagacatcgtgggcttccccaatggttccatgctgctgcgccgcgcccagcctacagacagtggcacctaccaagtagccattaccatcaactctgaatggactatgaaggccaagactgaggtccaggtagctgaaaagaataaggagctgcccagtacacacctgcccaccaacgctgggatcctggcggccaccatcattggatctcttgctgccggggcccttctcatcagctgcattgcctatctcctggtgacaaggaactggaggggccagagccacagactgcctgctccgaggggccagggatctctgtccatcttgtgctcggctgtatccccagtgccttcagtgacgcccagcacatggatggcgaccacagagaagccagaattgggccctgctcatgatgctggtgacaacaacatctatgaagtgatgccctctccagtcctcctggtgtcccccatcagtgacacaaggtccataaacccagcccggcccctgcccacacccccacacctgcaggcggagccagagaaccaccagtaccaggacctgctaaaccccgaccctgccccctactgccagctggtgccaacttcctgatgggtcctgggccaggccagccagggagaagacaaggccccagccctcctctgggagcctcacacctgagaccagcaggacaaggccattgggggctgtggggccgatgaggtggactcagccaaagactcagcagcacatggggcaggtgtcctggcagggggacaggagactgtaacaggcccaggtccttgtgcagcccgtgaatgcacgcccgccttcggtctgttccttcaagcaagctggcctgggccatgtgcctgtgaaaggcaggctctggcccctttccatgccaaagtcccccaagatctggatatctggggacaagatggtggcctcaggcctgcctcccaggcagttggctgggctcccaactgtctgtcctcaatgccctaccccaactccactagtgaccctcagagtcttctccccttaggacaaggcagacaccccaccatgcgggcctcaggtggcagagaggcccagcctcacaggcctgtggccccacacaccagtcccagcaaggtgaccacggctgctggaccccttccctgttcaggcaggcccagcccctctcagaacctgctgccagctgctggtcttggcccccaccctgaatcttactgagtccctctgggcagcagctcccttctccaccccaccccagcacccgtcccaaatgtggcctcagcttgtcctccccttccccaaactatgcattcattcagcaataaatgagcctttgctgtatgccagacccagttctaggctcttgcagccctggtagaaagcaaaacaaaaactcccgctttcccagagggtcacttggcaggggaaagaatcaggaaataaaataaataatgaacatg

SEQ ID NO: 45784 - protein, 1235 aa, Artificial Sequence
  derived and/or modified sequence
MSGPTDETAGDLPVKDTGLNLFGMGGLQETSTTRTMKSRQAVSRVSREELEDRFLRLHDENILLKQHARKQEDKIKRMATKLIRLVNDKKRYERVGGGPKRLGRDVEMEEMIEQLQEKVHELEKQNETLKNRLISAKQQLQTQGYRQTPYNNVQSRINTGRRKANENAGLQECPRKGIKFQDADVAETPHPMFTKYGNSLLEEARGEIRNLENVIQSQRGQIEELEHLAEILKTQLRRKENEIELSLLQLREQQATDQRSNIRDNVEMIKLHKQLVEKSNALSAMEGKFIQLQEKQRTLRISHDALMANGDELNMQLKEQRLKCCSLEKQLHSMKFSERRIEELQDRINDLEKERELLKENYDKLYDSAFSAAHEEQWKLKEQQLKVQIAQLETALKSDLTDKTEILDRLKTERDQNEKLVQENRELQLQYLEQKQQLDELKKRIKLYNQENDINADELSEALLLIKAQKEQKNGDLSFLVKVDSEINKDLERSMRELQATHAETVQELEKTRNMLIMQHKINKDYQMEVEAVTRKMENLQQDYELKVEQYVHLLDIRAARIHKLEAQLKDIAYGTKQYKFKPEIMPDDSVDEFDETIHLERGENLFEIHINKVTFSSEVLQASGDKEPVTFCTYAFYDFELQTTPVVRGLHPEYNFTSQYLVHVNDLFLQYIQKNTITLEVHQAYSTEYETIAACQLKFHEILEKSGRIFCTASLIGTKGDIPNFGTVEYWFRLRVPMDQAIRLYRERAKALGYITSNFKGPEHMQSLSQQAPKTAQLSSTDSTDGNLNELHITIRCCNHLQSRASHLQPHPYVVYKFFDFADHDTAIIPSSNDPQFDDHMYFPVPMNMDLDRYLKSESLSFYVFDDSDTQENIYIGKVNVPLISLAHDRCISGIFELTDHQKHPAGTIHVILKWKFAYLPPSGSITTEDLGNFIRSEEPEVVQRLPPASSVSTLVLAPRPKPRQRLTPVDKKVSFVDIMPHQSDVSQEGSVDEVKENTEKMQQGKDDVSLLSEGQLAEQSLASSEDETEITEDLEPEVEEDMSASDSDDCIIPGPISKNIKQPSEKIRIEIIALSLNDSQVTMDDTIQRLFVECRFYSLPAEETPVSLPKPKSGQWVYYNYSNVIYVDKENNKAKRDILKAILQKQEMPNRSLRFTVVSDPPEDEQDLECEDIGVAHVDLADMFQEGRDLIEQNIDVFDARADGEGIGKLRVTVEALHALQSVYKQYRDDLEA

SEQ ID NO: 45785 - DNA, 3708 bp, Artificial Sequence
  derived and/or modified sequence
atgtctgggccaactgacgagactgccggagatctgccagtgaaggacaccggactaaatttgtttggcatggggggattacaggaaacctctaccacacggacaatgaaatctcggcaggcagtatcccgggtctcgcgcgaggaactcgaagatagattcctgagactgcacgatgaaaatatcctccttaagcagcatgcccgtaaacaggaagacaagatcaagcgaatggcaacaaagctgattcgtcttgtgaatgacaagaagcgctacgaaagagtaggaggaggtccgaagcgtctggggagagatgtggaaatggaggagatgattgagcaacttcaagagaaggtccatgagctggaaaagcagaatgagacactgaagaaccgcctcatctcggctaaacagcagctgcagactcaagggtaccgccagactccttacaataacgtgcagtctagaattaatacaggtcggaggaaggctaacgaaaatgctggtcttcaagagtgcccacggaaagggattaaattccaagacgctgatgtggccgaaactcctcaccccatgttcacaaaatacgggaacagtctcctggaggaggcaagaggcgaaatccgcaacctggagaacgtgatccaatctcagagaggtcaaatcgaagaattggagcatcttgccgaaatactcaagacccagttgcggaggaaggaaaatgaaatagaactgtccctgctacagctaagggaacagcaggcaactgatcaaagatccaacatcagagacaacgtggaaatgatcaaactgcacaagcagctggttgagaagagcaatgcactctccgccatggaggggaagttcatccagctgcaggagaagcaacgaaccttacgaatcagccatgacgcactgatggccaacggtgacgaactcaacatgcagctgaaggagcagaggttgaagtgttgtagtctcgagaagcagctgcactccatgaaatttagcgagcgacgcattgaagaactacaggaccgcatcaacgatctcgagaaggagcgcgagttactcaaagagaactacgacaagttatacgatagcgcgttttcggcagctcacgaggagcagtggaaactgaaggagcagcaacttaaagtgcagatcgcccagctagaaactgccctaaagtctgatctgaccgacaaaacagagattttagatcgcctaaaaaccgagcgcgatcagaatgagaagcttgtccaggagaaccgcgagctgcagctccagtacctggagcagaaacagcagctcgatgagttgaagaaacgtatcaagctgtacaaccaggaaaatgatataaatgcggacgagctcagtgaagccctgctcctgatcaaagcccaaaaggaacagaaaaatggcgacctttctttcttggtgaaagtggattctgaaataaacaaggatcttgaacgatccatgcgagagctacaagcgacacatgccgagacagtccaggaacttgagaaaacccgcaacatgctgatcatgcagcataaaatcaacaaggattaccagatggaagtcgaagctgtaacccgaaagatggaaaacttgcagcaggactatgagttaaaggtagaacagtatgtgcatcttctggatattcgcgcggctcggatccacaagctggaagcccaattgaaggacattgcttacggaaccaagcagtataagttcaagcctgagataatgcctgacgactccgtggacgagtttgacgagactatccatctagagcgcggcgagaacctgttcgaaatccacatcaacaaggtcactttctctagcgaggtgcttcaggcatcaggagacaaggagcccgtgaccttctgcacctacgccttttacgactttgagctgcaaacgactcctgtcgtccggggattgcatccagagtataattttacgtcccagtacctagtgcacgttaatgacttgttcctccagtacattcaaaagaatacaataactctggaggtgcatcaggcttatagtaccgagtacgagactattgccgcttgccaactcaagttccacgagatcttggagaaaagcggccgcattttttgcacagcgtctctaattggcacaaaaggtgatatcccgaatttcgggacggtagagtactggtttcggctgcgggtgcctatggaccaagcaatacgattgtacagagaaagggcaaaggcgctcggatacattacatccaatttcaaaggacccgagcacatgcagtctctgtcccaacaggcccccaagaccgcacagctcagcagtaccgattctaccgatggcaacctgaacgaacttcatatcacaataagatgctgcaatcacttacaatcccgcgcctcacatttgcagccccacccttatgtcgtttataagttctttgatttcgcagatcacgataccgctattataccctccagcaacgatccccagttcgatgaccacatgtacttccctgtccctatgaacatggacttagatagataccttaagagcgagtccctcagcttctacgtgttcgatgactctgacacccaggagaatatatacatcggaaaagtgaatgttcccctgatcagcctggcccacgacaggtgcatttccggaatcttcgagctgaccgatcatcaaaaacacccagctggcacaattcacgtcattctgaagtggaaatttgcctacctcccaccatcaggcagcatcactacagaggacctggggaacttcatcaggtcggaggagcccgaggtggtacaaaggctgcctcctgcgtcatccgtctctactttagtactggccccgaggcccaagccacggcagagactgacccccgttgacaaaaaggtttcttttgttgatatcatgccccaccagagcgatgtatctcaagaggggagcgttgatgaagtgaaagaaaatacggagaagatgcaacaaggaaaggacgatgtgagcctactgtccgaaggacagttggcagagcagagcctggcctcgagtgaggacgaaacagaaataaccgaagacttagagccagaagtggaggaggatatgagtgccagtgattctgacgattgcataatccctgggccgatctcaaagaacattaaacagccttctgaaaaaatcaggatagaaatcattgccctgagcctgaatgactcccaggtaacgatggacgatacaatacaaaggctatttgtggaatgccggttttactctttgcctgccgaagagacacccgtaagtttgcctaagccaaagtcagggcaatgggtgtattataattattccaatgtgatttatgtggataaagagaacaacaaggcaaagcgtgatattctaaaggccatcctgcagaaacaggaaatgcccaacagatctcttcgtttcacggtcgtgagtgacccaccagaggacgagcaggatttggaatgtgaggacatcggagtggcacacgtcgatctcgccgatatgttccaggaaggcagggatctgattgagcaaaacattgatgtgtttgacgcacgcgccgatggtgaagggatcggcaaactgagagttaccgtagaggcactccatgcgctgcagtcagtgtataagcaatatcgggatgatctcgaggcctag

SEQ ID NO: 45786 - DNA, 3708 bp, Artificial Sequence
  derived and/or modified sequence
atgagcggccccacagatgaaacagctggggacctgcctgtgaaggacaccggcctgaacctgtttggcatgggcggcctgcaggagaccagcaccaccaggaccatgaagagccggcaggccgtgtcccgggtgtcccgggaggagctggaggaccgcttcctgcggctgcatgatgagaacatcctgctgaagcagcacgccaggaagcaggaggacaagatcaagaggatggccaccaagctgatccggctggtgaatgacaagaagagatatgaaagagtgggcggcggccccaagaggctgggcagagatgtggagatggaggagatgattgagcagctgcaggagaaggtgcatgagctggagaagcagaatgagaccctgaagaacagactcatcagcgccaagcagcagctgcagacccagggctaccggcagaccccctacaacaacgtgcagagccgcatcaacacaggaagaaggaaggccaatgaaaatgccggcctgcaggagtgccccaggaagggcatcaagttccaggatgctgatgtggccgagaccccccaccccatgttcaccaagtatggcaacagcctgctggaggaggcccggggggagatccggaacctggagaatgtcatccagagccagaggggccagatcgaggagctggagcacctggccgagatcctgaagacccagctgcggaggaaagaaaatgaaattgagctgagcctgctgcagctgcgggagcagcaggccacagaccagaggagcaacatccgggacaacgtggagatgatcaagctgcacaagcagctggtggagaagagcaatgccctgagcgccatggagggcaagttcatccagctgcaggagaagcagaggaccctgcgcatcagccatgatgccctgatggccaatggagatgagctgaacatgcagctgaaggagcagaggctgaagtgctgcagcctggagaagcagctgcacagcatgaagttcagcgagaggagaattgaggagctgcaggaccgcatcaatgacctggagaaggagcgggagctgctgaaggagaactatgacaagctgtatgacagcgccttctctgctgcccacgaggagcagtggaagctgaaggagcagcagctgaaggtgcagatcgcccagctggagacagccctgaagagtgacctgacagacaagacagagatcctggaccggctgaagacagagcgggaccagaatgagaagctggtgcaggagaaccgggagctgcagctgcagtacctggagcagaagcagcagctggatgagctgaagaagaggatcaagctgtacaaccaggagaatgacatcaatgctgatgagctgtctgaggccctgctgctgatcaaggcccagaaggagcagaagaatggagacctgtccttcctggtgaaggtggacagcgagatcaacaaggacctggagaggtccatgagggagctgcaggccacccatgctgagaccgtgcaggagctggagaagaccaggaacatgctgatcatgcagcacaagatcaacaaggactaccagatggaggtggaggccgtgaccaggaagatggagaacctgcagcaggactatgagctgaaggtggagcagtatgtgcacctgctggacatccgggccgcccgcatccacaagctggaggcccagctgaaggacatcgcctacggcaccaagcagtacaagttcaagccagagatcatgccagatgacagcgtggatgaatttgatgagaccatccacctggagcggggggagaacctgtttgagatccacatcaacaaggtgaccttcagcagcgaggtgctgcaggccagcggggacaaggagcctgtgaccttctgcacctacgccttctatgactttgagctgcagaccacccctgtggtgcggggcctgcaccctgagtacaacttcaccagccagtacctggtgcacgtgaatgacctcttcctgcagtacatccagaagaacaccatcaccctggaggtgcaccaggcctacagcacagaatatgagaccatcgccgcctgccagctgaagttccacgagatcctggagaagagcggccgcatcttctgcacagccagcctgattggcaccaagggggacatccccaactttggcaccgtggagtactggttccggctgcgggtgcccatggaccaggccatccggctgtaccgggagcgggccaaggccctgggctacatcaccagcaacttcaagggccctgagcacatgcagagcctgagccagcaggcccccaagacagcccagctgagcagcacagacagcacagatggcaacctgaatgagctgcacatcaccatccgctgctgcaaccacctgcagagccgggccagccacctgcagccccacccctacgtggtgtacaagttctttgattttgctgaccatgacacagccatcatccccagcagcaatgacccccagtttgatgaccacatgtacttccctgtgcccatgaacatggacctggaccgctacctgaagtctgagagcctgtccttctacgtgtttgatgacagcgacacccaggagaacatctacatcggcaaggtgaatgtgcccctcatcagcctggcccatgaccgctgcatcagcggcatctttgagctgacagaccaccagaagcaccctgctggcaccatccacgtgatcctgaagtggaagtttgcctacctgccccccagcggcagcatcaccacagaggacctgggcaacttcatccgctctgaggagcctgaggtggtgcagaggctgcccccagccagctctgtgtccaccctggtgctggccccccggcccaagccccggcagaggctgacccctgtggacaagaaggtgtcctttgtggacatcatgccccaccagagtgatgtgtcccaggagggctctgtggatgaggtgaaggagaacacagagaagatgcagcagggcaaggatgatgtgtccctgctgtctgagggccagctggccgagcagagcctggccagcagtgaagatgaaacagagatcacagaggacctggagcctgaggtggaggaggacatgtctgccagtgacagtgatgactgcatcatccctggccccatcagcaagaacatcaagcagcccagcgagaagatcagaattgagatcatcgccctgagcctgaatgacagccaggtgaccatggatgacaccatccagaggctgtttgtggagtgccgcttctacagcctgcctgctgaggagacccctgtgtccctgcccaagcccaagagcggccagtgggtgtactacaactacagcaatgtcatctacgtggacaaggagaacaacaaggccaagagggacatcctgaaggccatcctgcagaagcaggagatgcccaacagaagcctgcgcttcaccgtggtgtctgaccccccagaagatgagcaggacctggagtgtgaagatattggagtggcccacgtggacctggccgacatgttccaggagggccgggacctgattgagcagaacattgatgtgtttgatgcccgggcagatggagagggcatcggcaagctgcgggtgacagtggaggccctgcacgccctgcagagcgtgtacaagcagtacagagatgacctggaggcctag

SEQ ID NO: 45787 - DNA, 3708 bp, Artificial Sequence
  derived and/or modified sequence
atgagcggccccaccgacgagaccgccggcgacctgcccgtgaaggacacaggactgaatctttttggaatgggaggcttgcaggagacttccactaccaggacaatgaaaagtcgtcaggccgttagtagggtgtcccgtgaggagttggaagaccgatttttacgcctacacgatgaaaacatcttgctgaaacagcacgccaggaagcaggaagacaaaatcaagaggatggccacaaagctcataaggctcgttaacgataaaaagaggtacgagcgagttggaggaggcccaaaaaggctgggtcgagacgttgaaatggaggagatgatcgagcagctacaggagaaggtgcatgaactcgagaaacagaacgagactcttaaaaaccgcttaatctcagccaaacagcaactgcagacccaaggctaccggcagactccatataacaacgtacagtcaaggattaatacaggaagacgcaaagctaatgaaaatgctggtctgcaggagtgtcccaggaagggaataaagtttcaggacgctgatgtcgccgaaacgccacacccaatgtttaccaagtatggaaattctcttctggaagaggccaggggagagattcgtaatctcgaaaatgtgatccagtctcaacgggggcagattgaggaattggagcatttggctgagattctgaaaacccaactgcgtagaaaggagaacgagatcgagctctcactgctgcagcttagggagcagcaggcaaccgatcagcggagcaatattcgtgacaacgttgaaatgatcaagctgcataaacaactcgtggaaaaatcaaatgccttaagcgctatggaaggaaaattcatccagctacaagagaaacagcgaacacttagaatcagccatgacgctctgatggccaacggcgatgaactgaatatgcagttgaaagagcagaggctcaaatgttgcagccttgagaagcagctgcattccatgaagttctcagaaaggcggatcgaagagttgcaggatcgcatcaacgaccttgagaaagaacgcgaactcctcaaggagaactacgataagctgtatgactcagccttctctgccgctcatgaagagcaatggaagctcaaagagcaacaactgaaagttcagatcgcgcagctggagaccgcgctgaaatccgatcttaccgacaagactgaaatcctggaccggcttaagacagagagggaccagaatgagaaattagttcaggaaaacagggagcttcagctgcaatacctcgagcagaaacagcagctggatgagctgaaaaaacgaatcaagctatacaaccaggaaaacgatattaatgccgatgaactgtctgaagctctcctccttatcaaagcccagaaagagcagaaaaatggagacctgtcctttctggtgaaagtggattccgaaataaacaaagatctggagcgatccatgagggaactccaagctactcacgcagaaaccgtccaggagctggagaaaacacggaacatgttgattatgcagcacaagataaataaggattatcagatggaagttgaagccgtgactcggaagatggagaatctgcagcaggactacgaacttaaggtggaacaatatgtgcatctcctggacatcagagccgcacgaattcacaagctagaggcgcagctcaaagatattgcttatgggacgaaacagtacaagtttaaacccgaaattatgcccgacgacagtgttgacgagttcgacgagaccatacacctggaaagaggcgagaatctttttgaaattcatattaataaggtgacattctcttccgaggtgctgcaggcaagtggcgacaaagaacccgtcacattttgtacgtacgcattctacgacttcgagctgcaaaccacaccagtcgttcgcggcttgcaccctgagtataactttacgagccagtatctggtgcatgtgaatgacctgttccttcagtatatccagaagaacaccattacgctggaggtgcatcaagcatactccactgaatacgagacaattgccgcctgccagctgaagtttcatgagattctggagaagagtggtaggattttctgcactgcttctctcattgggactaaaggagatatacctaattttggcaccgtggaatattggttccggctgcgcgtgcctatggatcaggccatcagactgtatcgagaacgggccaaagctctcggatacattaccagtaacttcaagggaccagaacacatgcagtccctgagtcaacaggcgccaaaaactgcgcaacttagtagcactgactccacagacggtaacttaaatgagttacacatcacaatccgatgctgcaaccatctgcagagcagggcttcccacctacagcctcacccatacgttgtttataagtttttcgattttgcggaccacgataccgccattattccctcatcgaacgaccctcagtttgatgatcacatgtatttccctgtcccaatgaacatggacctggatcgctacctgaagagtgaatccctgagcttctatgtgttcgacgacagtgacactcaggagaacatttatataggcaaagttaacgtgcctttaatctctctggcccacgatcgttgtattagcggtatttttgaactgacagatcaccagaagcatcccgctggtaccatccatgtaattctcaaatggaaatttgcttacctacctccaagcgggtcaattacaacagaggacctgggcaacttcattcgctctgaggagccggaagtggtacagcgactccctcccgcctcttccgtttccaccctagtcttggccccgcgcccgaaacctagacaaaggctgacgcccgtcgataagaaagtgagcttcgtcgacataatgccccatcagtcagacgtctcccaggagggttccgtggatgaggttaaggagaacaccgagaagatgcagcagggaaaggacgacgtctccctgctcagtgaaggccagctggcagagcagtctcttgcgtcttccgaagacgagacggagattactgaagacctggaacccgaagtcgaggaagatatgagcgcttccgactcagatgactgcataatccccggtccaatctcaaagaacataaagcagccttccgaaaaaatcaggattgagattatagctttaagcttgaatgactctcaagtcaccatggatgacactatccagagactgtttgtcgaatgcaggttttatagtttgcctgctgaggagacacctgtcagcctacccaaacccaaaagcgggcagtgggtttattacaattactcaaacgtgatatacgtggataaggagaacaataaagccaagcgcgacatactgaaagctatactgcaaaagcaggagatgccgaatagaagcttacgcttcactgtcgtctccgatccccctgaggatgagcaagatttagaatgcgaagacatcggggtggctcacgtggacctggcagatatgtttcaagagggcagagacttaatcgagcagaatattgacgtgttcgacgcacgggcagatggcgaaggcatcggtaagctgagagtgactgttgaggcactccacgcacttcaaagcgtttacaagcagtacagggacgacctggaggcatag

SEQ ID NO: 45788 - DNA, 3708 bp, Artificial Sequence
  derived and/or modified sequence
atgtccggccctactgacgagaccgccggagacctgcccgtgaaggacacagggcttaatctgtttggcatgggaggcctgcaggaaacaagcacgactcgcaccatgaaatccagacaggcagtttcacgtgtgtcccgcgaggaactggaagaccgattcctgagactgcacgatgagaacattctgctcaaacagcatgccagaaaacaggaagataaaatcaagcggatggctaccaagctcatccgcctggtaaacgataaaaagaggtatgagcgcgtggggggaggacctaaaaggctcggccgtgatgtggagatggaggagatgattgaacagttgcaggaaaaggttcacgagctcgagaagcaaaatgagaccttaaaaaaccgtcttatctccgctaagcagcagctgcaaacccagggctatagacaaaccccctataacaatgtgcagtcaaggatcaataccggcagacgtaaggctaacgagaacgcaggactacaggagtgccctaggaagggtataaaatttcaagacgccgacgttgccgaaacaccccatcccatgttcactaaatatggaaactccctcttagaagaggcccgtggcgaaatcagaaacctggaaaatgtgatccagtctcagagggggcaaatcgaggaactggagcacctggctgaaatattgaaaacgcagctaaggagaaaagagaatgaaatagagctttcactcctgcaactacgggagcagcaggcaaccgaccaacggagcaatatcagggacaacgttgaaatgataaaactgcataagcagctagttgaaaaatcaaacgcgctgtctgctatggagggaaagttcatccagctgcaggagaagcaacgaacattacgaatatcacatgatgcactgatggcaaacggagacgagctgaatatgcaattgaaggaacagagacttaagtgctgctctctagagaaacagctgcacagcatgaaattttccgaacgcagaatagaggagctgcaggataggattaacgacctggagaaagaaagggaactgctaaaggagaactacgacaagctttacgacagtgcattctcagccgcacatgaagagcaatggaagctcaaggagcagcagcttaaagtgcaaattgcacaattagagaccgcccttaagagcgacctgactgacaagaccgaaattttggatcgactaaagacagaacgcgaccaaaacgagaagttggtccaagagaaccgcgaattgcagctccagtatttagaacagaaacagcagctggatgagcttaaaaaacgaatcaaattgtataatcaagagaatgacattaatgctgacgagctttcggaggcgctgctgctgatcaaagcgcagaaagaacagaaaaatggtgaccttagttttttagtgaaggtcgatagcgaaataaataaagacttggagcggtccatgagggagctacaggcaactcacgccgaaacagtgcaggaactggagaagaccaggaacatgctcatcatgcaacacaaaatcaataaggattatcagatggaggttgaagcagtaacaagaaaaatggagaatcttcagcaggactatgagctaaaggtggagcagtacgtccacttgcttgatattcgcgcagcacggatccacaaattggaggcccagttgaaagatatcgcttacgggacaaaacagtacaaatttaaaccagagatcatgcctgatgatagcgttgacgagttcgatgagactatacacctggagaggggcgagaatttgttcgagatccacatcaataaggtgaccttcagctccgaagtgctgcaagcctccggagacaaagagccggtaaccttctgtacatacgccttttatgacttcgagctccagacaactccagtggtacgtggtctacatcctgaatacaacttcacgtcacagtatctggtgcacgttaatgacctgttcctgcaatacattcaaaaaaacaccatcacccttgaggtccaccaagcctactccaccgaatatgaaaccattgccgcatgtcaacttaagttccacgaaattcttgagaagtcaggacgaattttctgtacagcgtcattgatcggcacaaaaggtgatatcccaaacttcgggactgtagagtactggtttcgactgcgagtccccatggaccaggcaattagattatacagggagagggctaaggccttagggtatattacgtctaattttaagggccctgaacatatgcagagtctgtcccagcaggctccaaagaccgctcagctctcatcgactgatagtacggacggaaacttaaacgaattgcacattaccatccgatgctgtaatcatctgcagagtcgggctagccacctccaaccccacccatacgtggtgtacaagttcttcgactttgccgaccacgacacagccatcatcccgtccagtaatgatcctcaatttgatgaccacatgtatttccccgtccccatgaacatggatttggaccgctacctcaaaagtgagtctctgtctttctatgtctttgatgactctgacacccaggagaacatttatattggaaaagtaaacgttccactcatatctctggcccacgacaggtgtattagcgggatttttgagctgaccgaccaccaaaaacaccctgcgggaactattcatgttatcctgaagtggaagttcgcttacctccccccatcgggtagcattacaactgaggatctcgggaatttcatccgctccgaagaaccagaagttgttcagcgcctccctcccgcatccagcgtgtcaaccttggtgctggcacctcggccaaagcccaggcagcgactcacccctgtagataagaaagtctctttcgtggacattatgccgcaccagtccgatgtttcacaggagggttcggtagacgaggtgaaagagaataccgagaagatgcaacagggaaaagacgacgtgtctctgctatcagaaggacaactggccgaacagagtttggcaagcagtgaagacgaaactgagattaccgaagacttggaacctgaggttgaggaagacatgtctgcttccgattcagacgattgcattatccccggtcctatctctaagaacataaagcaaccatccgagaagattaggatcgaaatcatcgccttgagtcttaatgactcacaggtgacgatggatgacaccattcagcgcctctttgtagagtgccggttctatagcttgcccgctgaagagacccccgtgagtctgccaaaacctaaaagcggccagtgggtctactacaactattctaatgtgatttatgtcgacaaggaaaataacaaggccaagcgggacatcctaaaagcaatattacaaaagcaggaaatgccaaaccgttctctgaggttcacagtggtttcagacccgccagaagatgagcaagacctggaatgcgaagacataggagtggcccacgtggacctggctgacatgtttcaggaaggaagggatctcattgagcagaacatcgacgttttcgatgcaagggcagacggagagggcataggaaaactgagggtgacggtggaggccctgcacgccctccagtccgtgtacaaacagtatcgcgacgatttagaagcttag

SEQ ID NO: 45789 - DNA, 5936 bp, Artificial Sequence
  derived and/or modified sequence
gcccgccacgctgtcggcgctatagcaacggtagctagctgcagggccagtggcacgctaggccatgtctggtccaactgatgagactgcaggagacttgcctgtgaaagatacaggtctaaacctctttggaatgggagggttacaagaaacttcaacaacacggacaatgaagtctcgccaggcagtgtcacgtgtcagtcgtgaggaactggaagacagatttttgcgtttgcatgatgagaacattttacttaaacagcatgcccgcaagcaggaggataaaattaaaagaatggccaccaagttaatacggctagttaatgacaagaaaagatatgagcgggttggtggcggccccaagcggctgggacgagatgtggaaatggaagaaatgattgagcagctgcaagagaaagttcatgagcttgaaaaacaaaatgaaaccctcaaaaacagactgatttcagccaaacagcaacttcaaacccagggttacaggcaaactccatacaataatgtacaatctcgtattaacactgggcgtagaaaagcaaatgaaaatgctggtttacaggaatgccccaggaaaggtataaaattccaagatgcagatgtagcagaaactccacatcccatgtttacaaaatatggcaacagtttacttgaagaagccagaggagaaataagaaatttagaaaacgttattcagtcacaaagaggccagatagaggagttagagcacttggctgagatcctgaaaactcagttgaggagaaaagaaaatgaaattgagttatctcttcttcagcttcgagaacagcaagctacagatcaaaggtcaaatattcgggacaatgtagaaatgattaagcttcataaacagctagtagagaaaagcaatgctctttcagcaatggaaggaaaatttattcagcttcaagagaagcaaagaactctcagaatcagccacgatgctttgatggcaaatggggatgaattaaacatgcaacttaaagagcagcgtttaaaatgctgcagtcttgagaaacaattacattctatgaagttttctgaaagaagaatagaagagctgcaggatagaattaatgatttagaaaaggaacgggaacttttaaaggaaaactatgataaactttatgacagtgccttcagtgctgcccatgaagagcaatggaagttaaaggagcaacagctgaaagtgcagattgctcagctcgagactgccttgaagtctgacttaacagacaaaactgaaatccttgacagattaaaaactgaaagagatcaaaatgaaaaactcgttcaagagaatagagaactacagttacagtatctggaacaaaagcaacaacttgatgaacttaaaaaacgcataaaattgtacaaccaggagaatgatattaatgctgatgaattgagtgaagctctcctacttataaaggctcaaaaagaacaaaaaaatggagacctttcctttttagtgaaagtagatagtgaaattaataaagatctagaacgctctatgagagagctgcaagcaactcatgcagaaacggtgcaagagctggaaaagacaagaaacatgctaattatgcaacacaaaattaataaagattatcagatggaggttgaggcagtgacccgtaagatggaaaatttgcagcaagattatgaactcaaagtggaacagtatgttcatcttcttgatatcagggctgcacgtatccataaactagaagcccaattaaaggatattgcctatggcaccaagcagtacaaatttaaaccagaaatcatgccagatgactctgttgatgaatttgatgaaaccatccacttagaacgaggcgaaaatctatttgaaatccatatcaacaaagtaaccttttcttctgaagttttacaggcatctggagataaagagcctgtcactttctgtacctatgctttctatgattttgaactacagacaactcccgtagtgcgaggccttcatcccgaatataacttcacttctcaatatcttgttcatgttaatgacttatttttgcaatatattcagaagaatactatcacccttgaggtccaccaggcttatagcacagaatatgaaacaattgcagcatgtcaattaaaatttcacgaaattcttgaaaaaagcggccgaatattttgtacagcaagtttgattggaacaaaaggagacatcccaaattttggcacagtggaatactggttccgattaagagttcccatggatcaagcaattcgactttatcgagaaagggcaaaggctttggggtatataacatcaaattttaaggggccagagcatatgcagtcgttaagtcagcaagcacccaaaactgctcaactcagttctacagattccacagatggcaacttaaatgaacttcacattacaataagatgttgcaaccacctgcagtcccgagcaagccacctgcagccacacccatatgttgtgtacaagttttttgattttgcagaccatgatacagctatcattcccagtagcaatgatccacagtttgatgatcatatgtatttcccagtgccaatgaatatggacttggatcgataccttaagtcagagtctctgagtttttatgtttttgatgatagtgatacccaggagaatatttacataggaaaagtcaatgtgcctctgatttcgttggcacatgacaggtgtatctcaggaatatttgagttaacagaccatcaaaagcatcctgctggcaccatccatgttatattgaaatggaaatttgcttaccttccaccaagtggatcaataacaactgaagacttaggaaatttcattcgcagcgaagagccagaagttgttcaaagacttcctccagcatcctctgttagcacactagttttagcaccaagacctaaaccaagacaacgtttaacacctgtagataagaaggtatctttcgtggatatcatgccacatcagagtgatgtttcacaagaaggcagtgtagatgaggtaaaagagaatactgagaaaatgcagcaaggaaaagatgatgtgtctttactatctgaaggtcagcttgcagaacaaagcttggcatcttctgaagatgaaacagaaataacagaggacttggaaccagaagttgaagaggacatgtcagcttctgacagtgatgactgtattattccaggtcctatctccaagaatatcaaacagccatcagaaaaaattcggattgagatcatagctctaagccttaatgattctcaagtaaccatggatgacactatccaacggctgtttgttgagtgtcgattctacagtcttcctgctgaagagacacccgtgtcacttccaaaacccaagagtgggcagtgggtctactataactatagcaatgtgatctacgtggataaagaaaacaacaaagcaaagagagacatcttaaaagctatactacaaaaacaagagatgcctaatagaagccttcgcttcaccgtggtcagtgaccctccagaggacgagcaggacctggagtgtgaggacattggcgtggctcacgtcgaccttgccgacatgtttcaggaagggagggacctcattgagcaaaatatcgatgtttttgatgcacgagcagatggtgaaggtattggcaagctcagggtaacagtcgaagctctccatgccctccagtctgtctacaagcaatacagagatgacttggaggcttgaaagcaaatgctccagaggcatctcctactcctcagtaaatgctcacatgaaagttcctacatgagatttttgtaattactctggtgtatataatctataattcatgggaagctgggagcggggagacctgggtttgaagtgttgaagttttgtatactttttcatttgtttatttctctattccctccttctcataactgccacccctcaggacttaagttctccataatgggcagtaccttctcaataatttatacctacgtgatagcgtgagaaagtctatttgcattttcaacattttcttaggaagaaccgaaatgcaattcccatttttatttttaataagcaaaagcataaatcttagaaaacctatgaaaaagaaatacttttatgttatccctaatcgtcccactaaatggaatgcctatgattagcttcattaagagttttatactgtgaagattttattagaagcaatatatgaaaattacttggattaatgtgttaatcttcctctttaaaatgctaatatccattttatgcacattaaagctcagtatgcattttctttgatgcatgcagtttctatcaattaaatataaagaatgaaacttagcaccaacttattcaatgactgcaagttttttgtctttctttcttaaaagttcattctatttgtattattttcatacatttgtaatggtgacccagggatgtatatataaaaaggagatagttatatagatagatgtgaaatttacacgttgaaaacttagtatatgacacagaaagaaattatgaaaagtataactcaaattctgatatgcttagttagacgtgaaaggagtatctttttatcattttttaaatttacatcaagccagtacagtgccagggtgtatctgggtaaccagatcctcgaaaagcagctctgaaagttaattttctagcttttacccaatctcactgaaggatttaattgatatttttaatggagctgtgaatcaatgctgcaaaggaattgtctctagaggtctaggatataatgcatttcattttttaatttacttttttatttgtcattttcttcaaaggatttttataggctgtgggttttcactgtttgcaaacaggctatgttccttcttaagcatatgtaaagtattcagggagataagtaatttattaaaatctacctaatttgccgtgatatattaaatctctgcttcagtgatcacagaccatttcatttagagaattaggcattccctctttgtgtgattaaagctctggaaaatgagttctttgctcctatttgtgaacattcaaagcctgctaatggcaagaagatggaatagattatgagacaattcattacagttcaatagaaaaaaaaagcagctataatgcaaaaatgcaagtatgaatatctgcatatagtttgaaccatctgtgctctaatggcttcaataatgactctcgtctttagaaggctttgaaatgacatccgtacaatattaatttgttgatgtacattgtgggaccagtagagtatgatctgaccacagaaatctataaattctgtctataccactgggcctccctgtcctggggcctgccatctccgagaagaatcttgctctcatccaactctgcaaatcttcataacaactcgttcctctggaaccttctggagaccacaaacatctgcagactaaacctctccagtcctagtaaacaaccacatgtttgttgtcacttcggctggctctgagctcatttttttggcccctttttctagctttctttggctttatgcagttacagtgtcattaaggcccataatattccctgcagtaatttaaaacagccagattataccctgggattaactgagtggtttttgagacatttattgtggtattctcccaggaggtttgtattattgttgtaaaatgttacatcccaaactaaataacccttctgcagggagaagaaccagattgcactgacttcttaggatcattaagtggaaaggaaaagtttttcttagaaaacttatgggacccagtcacctgtatggaatgtatatctcagacaagatgagagaaacagccatgtttctgtcacattgtttactgtcatattaaagatatctagtttt

SEQ ID NO: 45790 - DNA, 3708 bp, Artificial Sequence
  derived and/or modified sequence
atgagcggccccaccgacgagaccgccggcgacctgcccgtgaaggacaccggcctgaacctgttcggcatgggcggcctgcaggagaccagcaccaccagaaccatgaagagcagacaggccgtgagcagagtgagcagagaggagctggaggacagattcctgagactgcacgacgagaacatcctgctgaagcagcacgccagaaagcaggaggacaagatcaagagaatggccaccaagctgatcagactggtgaacgacaagaagagatacgagagagtgggcggcggccccaagagactgggcagagacgtggagatggaggagatgatcgagcagctgcaggagaaggtgcacgagctggagaagcagaacgagaccctgaagaacagactgatcagcgccaagcagcagctgcagacccagggctacagacagaccccctacaacaacgtgcagagcagaatcaacaccggcagaagaaaggccaacgagaacgccggcctgcaggagtgccccagaaagggcatcaagttccaggacgccgacgtggccgagaccccccaccccatgttcaccaagtacggcaacagcctgctggaggaggccagaggcgagatcagaaacctggagaacgtgatccagagccagagaggccagatcgaggagctggagcacctggccgagatcctgaagacccagctgagaagaaaggagaacgagatcgagctgagcctgctgcagctgagagagcagcaggccaccgaccagagaagcaacatcagagacaacgtggagatgatcaagctgcacaagcagctggtggagaagagcaacgccctgagcgccatggagggcaagttcatccagctgcaggagaagcagagaaccctgagaatcagccacgacgccctgatggccaacggcgacgagctgaacatgcagctgaaggagcagagactgaagtgctgcagcctggagaagcagctgcacagcatgaagttcagcgagagaagaatcgaggagctgcaggacagaatcaacgacctggagaaggagagagagctgctgaaggagaactacgacaagctgtacgacagcgccttcagcgccgcccacgaggagcagtggaagctgaaggagcagcagctgaaggtgcagatcgcccagctggagaccgccctgaagagcgacctgaccgacaagaccgagatcctggacagactgaagaccgagagagaccagaacgagaagctggtgcaggagaacagagagctgcagctgcagtacctggagcagaagcagcagctggacgagctgaagaagagaatcaagctgtacaaccaggagaacgacatcaacgccgacgagctgagcgaggccctgctgctgatcaaggcccagaaggagcagaagaacggcgacctgagcttcctggtgaaggtggacagcgagatcaacaaggacctggagagaagcatgagagagctgcaggccacccacgccgagaccgtgcaggagctggagaagaccagaaacatgctgatcatgcagcacaagatcaacaaggactaccagatggaggtggaggccgtgaccagaaagatggagaacctgcagcaggactacgagctgaaggtggagcagtacgtgcacctgctggacatcagagccgccagaatccacaagctggaggcccagctgaaggacatcgcctacggcaccaagcagtacaagttcaagcccgagatcatgcccgacgacagcgtggacgagttcgacgagaccatccacctggagagaggcgagaacctgttcgagatccacatcaacaaggtgaccttcagcagcgaggtgctgcaggccagcggcgacaaggagcccgtgaccttctgcacctacgccttctacgacttcgagctgcagaccacccccgtggtgagaggcctgcaccccgagtacaacttcaccagccagtacctggtgcacgtgaacgacctgttcctgcagtacatccagaagaacaccatcaccctggaggtgcaccaggcctacagcaccgagtacgagaccatcgccgcctgccagctgaagttccacgagatcctggagaagagcggcagaatcttctgcaccgccagcctgatcggcaccaagggcgacatccccaacttcggcaccgtggagtactggttcagactgagagtgcccatggaccaggccatcagactgtacagagagagagccaaggccctgggctacatcaccagcaacttcaagggccccgagcacatgcagagcctgagccagcaggcccccaagaccgcccagctgagcagcaccgacagcaccgacggcaacctgaacgagctgcacatcaccatcagatgctgcaaccacctgcagagcagagccagccacctgcagccccacccctacgtggtgtacaagttcttcgacttcgccgaccacgacaccgccatcatccccagcagcaacgacccccagttcgacgaccacatgtacttccccgtgcccatgaacatggacctggacagatacctgaagagcgagagcctgagcttctacgtgttcgacgacagcgacacccaggagaacatctacatcggcaaggtgaacgtgcccctgatcagcctggcccacgacagatgcatcagcggcatcttcgagctgaccgaccaccagaagcaccccgccggcaccatccacgtgatcctgaagtggaagttcgcctacctgccccccagcggcagcatcaccaccgaggacctgggcaacttcatcagaagcgaggagcccgaggtggtgcagagactgccccccgccagcagcgtgagcaccctggtgctggcccccagacccaagcccagacagagactgacccccgtggacaagaaggtgagcttcgtggacatcatgccccaccagagcgacgtgagccaggagggcagcgtggacgaggtgaaggagaacaccgagaagatgcagcagggcaaggacgacgtgagcctgctgagcgagggccagctggccgagcagagcctggccagcagcgaggacgagaccgagatcaccgaggacctggagcccgaggtggaggaggacatgagcgccagcgacagcgacgactgcatcatccccggccccatcagcaagaacatcaagcagcccagcgagaagatcagaatcgagatcatcgccctgagcctgaacgacagccaggtgaccatggacgacaccatccagagactgttcgtggagtgcagattctacagcctgcccgccgaggagacccccgtgagcctgcccaagcccaagagcggccagtgggtgtactacaactacagcaacgtgatctacgtggacaaggagaacaacaaggccaagagagacatcctgaaggccatcctgcagaagcaggagatgcccaacagaagcctgagattcaccgtggtgagcgacccccccgaggacgagcaggacctggagtgcgaggacatcggcgtggcccacgtggacctggccgacatgttccaggagggcagagacctgatcgagcagaacatcgacgtgttcgacgccagagccgacggcgagggcatcggcaagctgagagtgaccgtggaggccctgcacgccctgcagagcgtgtacaagcagtacagagacgacctggaggcctag

SEQ ID NO: 45791 - protein, 746 aa, Artificial Sequence
  derived and/or modified sequence
MDFLEEPIPGVGTYDDFNTIDWVREKSRDRDRHREITNKSKESTWALIHSVSDAFSGWLLMLLIGLLSGSLAGLIDISAHWMTDLKEGICTGGFWFNHEHCCWNSEHVTFEERDKCPEWNSWSQLIISTDEGAFAYIVNYFMYVLWALLFAFLAVSLVKVFAPYACGSGIPEIKTILSGFIIRGYLGKWTLVIKTITLVLAVSSGLSLGKEGPLVHVACCCGNILCHCFNKYRKNEAKRREVLSAAAAAGVSVAFGAPIGGVLFSLEEVSYYFPLKTLWRSFFAALVAAFTLRSINPFGNSRLVLFYVEFHTPWHLFELVPFILLGIFGGLWGALFIRTNIAWCRKRKTTQLGKYPVIEVLVVTAITAILAFPNEYTRMSTSELISELFNDCGLLDSSKLCDYENRFNTSKGGELPDRPAGVGVYSAMWQLALTLILKIVITIFTFGMKIPSGLFIPSMAVGAIAGRLLGVGMEQLAYYHQEWTVFNSWCSQGADCITPGLYAMVGAAACLGGVTRMTVSLVVIMFELTGGLEYIVPLMAAAMTSKWVADALGREGIYDAHIRLNGYPFLEAKEEFAHKTLAMDVMKPRRNDPLLTVLTQDSMTVEDVETIISETTYSGFPVVVSRESQRLVGFVLRRDLIISIENARKKQDGVVSTSIIYFTEHSPPLPPYTPPTLKLRNILDLSPFTVTDLTPMEIVVDIFRKLGLRQCLVTHNGRLLGIITKKDVLKHIAQMANQDPDSILFN

SEQ ID NO: 45792 - protein, 816 aa, Artificial Sequence
  derived and/or modified sequence
MAMWQGAMDNRGFQQGSFSSFQNSSSDEDLMDIPATAMDFSMRDDVPPLDREVGEDKSYNGGGIGSSNRIMDFLEEPIPGVGTYDDFNTIDWVREKSRDRDRHREITNKSKESTWALIHSVSDAFSGWLLMLLIGLLSGSLAGLIDISAHWMTDLKEGICTGGFWFNHEHCCWNSEHVTFEERDKCPEWNSWSQLIISTDEGAFAYIVNYFMYVLWALLFAFLAVSLVKVFAPYACGSGIPEIKTILSGFIIRGYLGKWTLVIKTITLVLAVSSGLSLGKEGPLVHVACCCGNILCHCFNKYRKNEAKRREVLSAAAAAGVSVAFGAPIGGVLFSLEEVSYYFPLKTLWRSFFAALVAAFTLRSINPFGNSRLVLFYVEFHTPWHLFELVPFILLGIFGGLWGALFIRTNIAWCRKRKTTQLGKYPVIEVLVVTAITAILAFPNEYTRMSTSELISELFNDCGLLDSSKLCDYENRFNTSKGGELPDRPAGVGVYSAMWQLALTLILKIVITIFTFGMKIPSGLFIPSMAVGAIAGRLLGVGMEQLAYYHQEWTVFNSWCSQGADCITPGLYAMVGAAACLGGVTRMTVSLVVIMFELTGGLEYIVPLMAAAMTSKWVADALGREGIYDAHIRLNGYPFLEAKEEFAHKTLAMDVMKPRRNDPLLTVLTQDSMTVEDVETIISETTYSGFPVVVSRESQRLVGFVLRRDLIISIENARKKQDGVVSTSIIYFTEHSPPLPPYTPPTLKLRNILDLSPFTVTDLTPMEIVVDIFRKLGLRQCLVTHNGRLLGIITKKDVLKHIAQMANQDPDSILFN

SEQ ID NO: 45793 - protein, 648 aa, Artificial Sequence
  derived and/or modified sequence
MNIVAGTLSMSPLKRDKCPEWNSWSQLIISTDEGAFAYIVNYFMYVLWALLFAFLAVSLVKVFAPYACGSGIPEIKTILSGFIIRGYLGKWTLVIKTITLVLAVSSGLSLGKEGPLVHVACCCGNILCHCFNKYRKNEAKRREVLSAAAAAGVSVAFGAPIGGVLFSLEEVSYYFPLKTLWRSFFAALVAAFTLRSINPFGNSRLVLFYVEFHTPWHLFELVPFILLGIFGGLWGALFIRTNIAWCRKRKTTQLGKYPVIEVLVVTAITAILAFPNEYTRMSTSELISELFNDCGLLDSSKLCDYENRFNTSKGGELPDRPAGVGVYSAMWQLALTLILKIVITIFTFGMKIPSGLFIPSMAVGAIAGRLLGVGMEQLAYYHQEWTVFNSWCSQGADCITPGLYAMVGAAACLGGVTRMTVSLVVIMFELTGGLEYIVPLMAAAMTSKWVADALGREGIYDAHIRLNGYPFLEAKEEFAHKTLAMDVMKPRRNDPLLTVLTQDSMTVEDVETIISETTYSGFPVVVSRESQRLVGFVLRRDLIISIENARKKQDGVVSTSIIYFTEHSPPLPPYTPPTLKLRNILDLSPFTVTDLTPMEIVVDIFRKLGLRQCLVTHNGRLLGIITKKDVLKHIAQMANQDPDSILFN

SEQ ID NO: 45794 - DNA, 2451 bp, Artificial Sequence
  derived and/or modified sequence
atggctatgtggcaaggagcaatggacaataggggtttccagcaggggtccttcagtagcttccagaacagcagtagcgatgaagacctgatggatattccagctaccgctatggatttttcaatgcgagatgatgtaccccccttagaccgcgaggtgggcgaagacaagtcatacaacgggggtgggatcgggtcaagtaataggattatggattttctcgaagagccgattcctggcgtggggacctatgacgactttaatactattgattgggtgagagagaagtcgcgggatagggatcgccaccgcgaaattactaacaaaagcaaggaaagcacttgggcactgatccatagtgttagtgacgcgttctcaggttggctgttgatgctcctcattggcctcctgtcaggctcgttggcaggtctgatcgacatcagcgcacactggatgaccgacttgaaggaggggatttgcaccggaggtttctggtttaatcacgagcattgctgttggaacagcgaacacgtcactttcgaagagagggacaaatgtccagagtggaattcgtggtcccagctgataattagtacagatgagggtgcatttgcctacatcgtgaattattttatgtatgtgctgtgggctcttctattcgcttttttagccgtctccctggtgaaggtgttcgccccgtatgcttgtgggtctggcattccggaaataaagacgattctgtcaggattcattatccgcggttacctgggcaagtggaccttggtcataaagacaattacactagtattggcagtgtcgagcggcctgagcctcggaaaggaggggcccctcgtccatgtcgcctgttgttgtgggaacatcctgtgccactgcttcaacaagtatcgaaaaaatgaagctaagcggcgcgaggttctgtctgccgccgcggccgccggcgtgtcggtcgcctttggcgcacccatcggtggtgtactgttctccctggaagaggtgtcctattactttcctctgaagaccctttggcgctcattttttgctgcccttgttgccgcctttacccttagatctatcaacccgttcggaaactcccgccttgtcctattctacgtggaatttcataccccttggcacctctttgagctggtaccatttattctgctcgggatcttcggcggtctatggggcgctcttttcatccggacaaatatcgcatggtgtagaaagcggaaaaccactcagttagggaagtaccctgtgatcgaagttctggtagtgacggctatcactgcgattttggccttccccaacgaatacacccgtatgagcacatccgagctcatttccgagctctttaacgattgcggtctacttgactcgagtaaattgtgcgactatgagaatcgtttcaacacatccaaagggggagagctccctgataggccagcgggtgttggggtgtattctgcaatgtggcagctcgcacttaccctgatcctgaaaattgtgataaccatttttacattcggaatgaaaatcccgtcaggtcttttcatacccagtatggctgttggggccatcgctggccgccttttaggcgtggggatggagcagttggcatattatcaccaagaatggacagtcttcaattcttggtgtagtcagggggcggattgcatcacacctggtctctatgcaatggtgggtgcagcagcttgtctggggggcgtgacaagaatgaccgtcagtctggtggtgataatgttcgaattaacaggcggactggaatatatcgtgccactgatggcggccgccatgacaagtaaatgggtggctgatgctctgggacgggagggtatctatgacgcgcacatacgcctgaatgggtatccatttctggaggccaaggaggagtttgcccacaagactctggcgatggatgtcatgaaacctcgacgtaacgacccactattgacagtgctgacccaggatagtatgaccgttgaagacgtggagacgattatctctgagactacttacagcggctttcccgtggtcgtgtcccgtgagtctcagaggctcgtggggttcgtactcaggagggatctcatcatttcgatcgagaatgctaggaagaaacaggacggtgttgtgtccacctcaatcatatattttaccgagcactcgccccctctgccgccctatacccccccaacgctgaaactcaggaacatcctggacctgtccccgtttaccgtgactgatttgacacccatggagattgtggtggacattttcagaaaactagggttacgccagtgtctagtgacccataatggtaggctgctgggcattattaccaagaaggatgtgttaaaacatatcgcgcagatggctaaccaggatcccgactctatcttattcaattag

SEQ ID NO: 45795 - DNA, 2451 bp, Artificial Sequence
  derived and/or modified sequence
atggccatgtggcagggcgccatggataaccgcggctttcagcagggcagtttctctagctttcagaacagctctagcgacgaagacttaatggacattcctgcaacagcgatggatttctccatgcgcgatgatgtgccccccctggatcgcgaagtgggggaggataagtcctacaatggcggaggtatcggttctagtaatagaattatggattttctagaggaaccgattccaggggtgggtacatacgacgactttaacacaattgattgggtgcgtgaaaaaagtcgggatagagatagacatcgcgagattaccaataaaagcaaagagtccacatgggccctcattcattcagtgtctgacgctttttcgggatggcttctgatgcttctcatcgggttgctgagtggttccctggccgggctcatagatatttcagcacactggatgacagacttaaaagagggcatctgcaccggcggcttctggtttaaccatgagcattgttgctggaactccgaacacgtaaccttcgaggaaagagataaatgtccagagtggaactcttggtcgcagctgatcattagcaccgatgaaggtgcctttgcctatattgtcaattattttatgtacgtcctgtgggccctgctattcgcattcttggcagtttccctcgtcaaggtgttcgcgccctatgcctgcgggtcaggtattcctgaaattaaaactattttgtccggattcataataagggggtatctcgggaagtggactctggtcattaagacaatcaccctggtgctcgcagtgtcctccgggctgtcgttgggcaaggaggggcccctggtccacgtggcatgttgttgtggtaacatcctctgccattgctttaataagtatagaaagaacgaggccaagaggcgggaagtgctcagtgcagcagccgctgctggagttagcgtggcattcggagccccaattggcggagtgcttttttccttggaggaggtgagctactatttcccactgaaaactttatggcgatccttcttcgcagcactcgttgccgctttcacattgcgatccatcaatccattcggaaattcacgcttagttctcttctacgtggaatttcatacaccttggcacctgttcgaactggtgcctttcatactgctggggatcttcgggggcttatggggcgccctcttcatcaggacgaacatagcatggtgccgaaaacggaagaccacacaattgggaaagtatcctgtcatcgaagttctagtggtaaccgctattactgctattcttgccttccccaacgaatatactcgtatgtctacaagcgagctcatctccgagctgtttaacgactgtggcctgctggacagcagcaagctgtgcgactacgaaaaccgcttcaatacctcgaagggcggagaactgccggacaggcccgcaggagtgggagtatactcggcaatgtggcagcttgccctgacccttatcctgaagattgtcatcacaatttttacatttggcatgaaaatcccttccggcctctttattcccagtatggccgtgggtgccattgccggccgcttgctcggggtaggcatggaacagctagcgtactaccatcaggagtggactgttttcaattcatggtgcagccagggagctgattgcattacccccggactttacgctatggtcggggccgccgcatgtctaggaggggtaaccaggatgactgtgtctttggtggtgattatgtttgaactaactgggggactcgagtacatcgttccgctcatggccgccgcgatgacttccaaatgggtggctgatgcgttgggaagagagggaatttatgacgcacacataaggcttaacggctatccgtttttggaggcaaaagaggaattcgcccacaagacactggcaatggacgtcatgaagccgcgaaggaacgatcccctgctgacagtcttgacacaggatagtatgactgttgaagatgtggagacaatcatcagcgagaccacctattccggcttcccggtggtggtgagccgagaaagtcagaggctcgttgggtttgttttacggcgcgacttaattatcagcatcgagaatgctcggaagaagcaagacggcgttgtgtccaccagcatcatttactttacggaacactcccccccactacctccttatacacctccaacactcaaacttaggaacatactcgatctctccccatttaccgtgacggacctgacacccatggaaattgtcgttgatattttcagaaagctcggactgaggcagtgtctggtgacacataacggtcggctgttgggtattattaccaagaaggatgtgctgaaacacattgcccagatggcaaaccaggacccagattcgatactctttaactag

SEQ ID NO: 45796 - DNA, 2451 bp, Artificial Sequence
  derived and/or modified sequence
atggccatgtggcagggcgccatggacaacagaggcttccagcagggcagcttcagcagcttccagaacagcagcagtgatgaggacctgatggacatcccagccacagccatggacttctccatgagagatgatgtgccccccctggaccgggaggtgggggaggacaagagctacaacggcggcggcatcggcagcagcaaccgcatcatggacttcctggaggagcccatccctggggtgggcacctatgatgacttcaacaccatcgactgggtgcgggagaagagccgggaccgggacagacaccgggagatcaccaacaagagcaaggagagcacctgggccctgatccacagcgtgtctgatgccttcagcggctggctgctgatgctgctgattggcctgctgagcggcagcctggccggcctgattgacatcagcgcccactggatgacagacctgaaggagggcatctgcacaggaggcttctggttcaaccacgagcactgctgctggaacagcgagcacgtgacctttgaggagcgggacaagtgcccagagtggaacagctggagccagctgatcatcagcacagatgagggcgcctttgcctacatcgtgaactacttcatgtatgtgctgtgggccctgctgtttgccttcctggccgtgtccctggtgaaggtgtttgccccctatgcctgtggcagcggcatccctgagatcaagaccatcctgagcggcttcatcatccggggctacctgggcaagtggaccctggtgatcaagaccatcaccctggtgctggccgtgagcagcggcctgagcctgggcaaggagggccccctggtgcacgtggcctgctgctgcggcaacatcctgtgccactgcttcaacaagtacaggaagaatgaggccaagagaagagaggtgctgtctgctgctgctgctgctggggtgtctgtggcctttggagcccccatcggcggcgtgctcttcagcctggaggaggtgtcctactacttccccctgaagaccctgtggaggagcttctttgctgccctggtggccgccttcaccctgcggagcatcaaccccttcggcaacagccggctggtgctcttctacgtggagttccacaccccctggcacctgtttgagctggtgcccttcatcctgctgggcatctttggaggcctgtggggcgccctcttcatccgcaccaacatcgcctggtgcaggaagaggaagaccacccagctgggcaagtaccctgtgattgaggtgctggtggtgacagccatcacagccatcctggccttccccaatgagtacaccaggatgagcaccagcgagctgatcagcgagctgttcaatgactgtggcctgctggacagcagcaagctgtgtgactatgagaaccgcttcaacaccagcaaaggaggagagctgcctgacaggcctgctggggtgggcgtgtacagcgccatgtggcagctggccctgaccctcatcctgaagatcgtcatcaccatcttcaccttcggcatgaagatccccagcggcctcttcatccccagcatggctgtgggcgccatcgccggccgcctgctgggcgtgggcatggagcagctggcctactaccaccaggagtggacagtgttcaacagctggtgcagccagggcgctgactgcatcaccccaggcctgtatgccatggtgggcgccgccgcctgcctgggcggcgtgaccaggatgacagtgtccctggtggtgatcatgtttgagctgactggaggcctggagtacatcgtgcccctgatggctgctgccatgaccagcaagtgggtggctgatgccctgggccgggagggcatctatgatgcccacatccggctgaatggctaccccttcctggaggccaaggaggagtttgcccacaagaccctggccatggatgtgatgaagcccaggagaaatgaccccctgctgactgtgctgacccaggacagcatgacagtggaggatgtggagaccatcatcagcgagaccacctacagcggcttccctgtggtggtgtcccgggagagccagaggctggtgggctttgtgctgcggcgggacctgatcatcagcattgaaaatgccaggaagaagcaggatggagtggtgtccaccagcatcatctacttcacagagcacagcccccccctgcccccctacaccccacccaccctgaagctgaggaacatcctggacctgagccccttcaccgtgacagacctgacccccatggagatcgtggtggacatcttcaggaagctgggcctgcggcagtgcctggtgacccacaacggccgcctgctgggcatcatcaccaagaaggatgtgctgaagcacatcgcccagatggccaaccaggaccctgacagcatcctcttcaactag

SEQ ID NO: 45797 - DNA, 2451 bp, Artificial Sequence
  derived and/or modified sequence
atggccatgtggcagggcgccatggacaaccggggcttccagcagggatctttttcaagcttccaaaactctagcagcgatgaagacttgatggacatacccgcgactgccatggatttcagcatgcgggacgatgtgcccccattagaccgggaggtgggggaagataaatcatataatgggggtggtattggaagttccaatcgaattatggatttcttggaggagccaatcccgggtgtgggcacatatgatgactttaacaccatcgattgggtccgggaaaagtcccgtgaccgtgatcgacatagagaaattactaataagtccaaagagtcaacgtgggcattgatccacagtgtgagtgacgctttctccggctggctgttaatgctgctcataggtctccttagtgggagcctcgctggcttgatcgacatttccgcccattggatgactgacttgaaagagggcatttgtacgggcggtttctggtttaaccacgaacactgctgttggaattccgagcacgtcacattcgaggagagggataagtgtcctgaatggaactcttggtcccaactgataatctctaccgacgagggagccttcgcatatattgtgaattattttatgtatgtcctgtgggctctgctgtttgctttcctggccgtctcgttggtcaaggtgttcgcgccatacgcatgcggatctggtataccagaaatcaaaacaatcctttctggttttatcattcgaggatacctgggcaagtggaccctggtgattaaaaccatcaccctcgtgctggccgtctcctccggtttgtcactgggaaaagagggcccattagtccacgttgcgtgctgctgcggaaacattctgtgtcattgcttcaacaagtacaggaagaacgaagcaaaaaggagagaggttctatctgcagctgccgccgccggtgtgagcgtggccttcggggcaccgatcggcggggtgctcttctcattggaagaagtgagctattattttcctctcaagacattgtggagatcttttttcgcggcattggtcgccgcttttaccttgagaagcatcaatccattcggaaatagcagactggtactgttttatgtggaattccacacaccctggcatctattcgaattggttccattcatcttgcttggaatttttggtggcctgtggggagcattgtttatcaggacaaacattgcttggtgccgcaaacgaaaaactacacagctcgggaagtaccctgtgattgaagtactggtggtcaccgcaataacagctattctagctttccctaatgaatatacgcggatgagcacatctgagctcatctcagagctgttcaacgactgcggactcctggatagctccaagctttgcgattacgaaaataggtttaacacaagtaaaggcggtgagttacctgacagacctgccggagttggcgtgtacagtgccatgtggcagctggccctgaccctgattttaaaaatcgtgatcacaatcttcaccttcggcatgaaaatcccgtctgggctcttcatcccatcaatggcggtcggagctatcgctgggcgcctgctcggcgtggggatggagcaactggcctattatcaccaggagtggacggtgtttaatagctggtgctcacaaggagccgactgtatcacaccagggctctacgcaatggttggggccgctgcctgccttgggggcgtgactaggatgaccgtatcactcgtagtgatcatgttcgagctaaccggcgggctggagtatatcgtgccactcatggccgccgcgatgacaagcaagtgggtcgcagacgctcttggccgagaaggaatatatgatgctcacattcgactaaacggttacccgttcctcgaggccaaggaggaatttgctcacaagaccctcgctatggatgtaatgaaacctagaagaaacgaccccctcctgacggtccttacccaagattccatgaccgtagaagacgtggagacgatcatttcagagactacatacagcgggttcccagtggtcgtctccagggaaagtcaacggctggtgggctttgtgttaaggcgcgacttgattatttcgattgagaacgctagaaagaagcaggacggggtggtgtccacatccattatctacttcaccgagcattctcctccactcccaccttatactcctccaacgctaaagcttcgtaacatcctggatctgtctccgtttaccgtgacagatttgaccccaatggagatagtggtcgacattttccggaagctgggtctgcgtcagtgtttggtcacccataacggcaggctactgggcatcatcaccaagaaagatgtccttaaacatatcgcgcagatggcaaatcaggacccagacagtatcctgttcaattag

SEQ ID NO: 45798 - DNA, 2451 bp, Artificial Sequence
  derived and/or modified sequence
atggccatgtggcagggcgccatggacaaccggggcttccagcagggatcattcagcagctttcaaaattcgtcttcagacgaggatcttatggacattccagctacagcaatggatttttctatgcgggatgacgtcccaccactcgatcgggaagtaggagaggacaaatcttacaatggcggaggcatcggtagctcaaaccgcattatggatttcctggaagaacccatcccaggagtcggaacatatgacgatttcaatacaatcgattgggtgcgggaaaaaagcagagaccgcgataggcatcgcgaaataactaataaatctaaggagtcaacttgggctcttatccactcagtttctgatgcttttagcggctggttactcatgctgttgataggactgctgagtggcagcctggccggcttgatcgatatcagcgcccactggatgaccgatctgaaagagggaatatgtacaggggggttctggtttaatcacgagcactgctgctggaactccgaacacgtgacttttgaagagcgagataaatgccctgagtggaactcatggtctcagttgattattagcacagatgagggcgcatttgcctacatcgttaactattttatgtacgtactgtgggctctgctcttcgccttcctcgccgtgtcgctggtcaaggtttttgccccctacgcctgcggctcagggatccccgagattaagaccatactttcaggttttattatcagaggttatttgggtaaatggactctcgtcatcaagacgataaccctggtgctggccgtttcatccggtctgtctctgggcaaggaaggacctctggtacacgttgcctgctgctgcggaaatattctttgccattgctttaataagtaccgtaagaatgaggctaaaagacgcgaagtgttatccgctgcagccgccgccggggtgtcggttgctttcggcgccccaattggcggtgtcctgtttagtttggaggaggtgagttattatttccctcttaaaacactttggcggtcatttttcgccgccctggttgcggctttcaccttgcgaagcattaaccccttcggcaacagcaggttggtcttattctacgtggagtttcatacaccctggcacttgtttgaactggtgcccttcatcctgctgggaattttcggtggcctctggggtgcactgttcatccgcacaaacatagcctggtgccgcaaaagaaaaactacacagcttggcaagtatcctgtgatcgaggtactggtggtgaccgctattaccgcaatcctggccttcccaaacgaatacacacgcatgagcacttctgagttgatatcagaactgtttaacgactgcggcctgctcgattccagcaaattgtgcgactacgagaaccggttcaacacttccaaaggaggtgaactgccagatcgcccagcgggagtcggggtctatagcgccatgtggcagctggccctgaccctgattttgaagatcgtaattaccatttttacttttggcatgaagatcccatccggcctgtttattcccagcatggcagtgggcgccatcgctggccgtctcctgggcgtgggcatggaacagttggcctactaccaccaggaatggactgtgttcaattcctggtgcagccagggcgcagactgtataaccccaggtctttacgcaatggttggcgcggctgcctgtctgggcggagtgacccgcatgaccgtaagccttgtcgtaattatgtttgagctcacaggtggcctggagtatatcgtaccattgatggccgctgcaatgacctcgaaatgggttgctgacgcacttgggcgggaggggatatatgacgctcatatcaggctcaacggatacccctttctggaggcaaaggaagaatttgctcacaaaaccctggcaatggacgtgatgaaaccgcgccggaatgatcccctgttgactgtgctgacccaggactctatgaccgtcgaagatgtcgagactattatcagtgagactacatatagtgggttccccgtagtcgttagcagggagtctcaaagactggtcggttttgttctgcggcgggacctcataatctccattgaaaatgctagaaaaaagcaagacggagtcgtgtccacgtctatcatttacttcacagagcactcacctcctctcccaccttacactccccccacactgaagctcaggaacattttagacctgtccccctttacagtgactgatctgacccccatggaaattgttgttgatatatttcgcaagcttgggttgcgacaatgcctggtgacacacaacgggcgattactgggcataattactaagaaagacgtgttgaagcacatagctcaaatggctaaccaggatcccgactctatcctatttaactag

SEQ ID NO: 45799 - DNA, 2451 bp, Artificial Sequence
  derived and/or modified sequence
atggcaatgtggcagggcgcaatggacaataggggatttcagcagggtagtttttctagctttcagaattctagctccgatgaggatctcatggatatccctgccactgcgatggacttttcaatgcgagatgacgtgccacccctggaccgcgaggtaggagaagataaaagttacaatgggggaggcatcggctccagcaaccggattatggactttctagaagaacccatacccggagtgggtacttatgatgacttcaataccattgactgggtcagggaaaagagcagggacagagacagacaccgggaaattacaaataagtcaaaggaaagtacatgggccctcatccactccgtgtctgatgccttctccgggtggcttctaatgctcctcatcggattgctgtcaggatcccttgccggactcattgatatatcggctcactggatgactgatctgaaagaagggatttgtaccggaggtttctggttcaaccatgagcactgttgttggaactccgaacacgtgacttttgaggaacgcgataagtgccctgagtggaacagctggtcccagctcataatctcgacggacgaaggcgctttcgcttatatcgtgaactacttcatgtacgtgttatgggctctcttgttcgcatttctcgccgtgtcacttgtcaaggtatttgcgccatatgcttgcggctcaggaatccccgaaatcaaaacaatcctctccggttttatcattagaggttatctgggcaaatggaccttggtgattaaaacaattactttggtgctggcagtgtcatccggcctttccctcggcaaggagggccctttagtgcatgtggcttgctgctgtgggaatattctatgccactgcttcaataagtatcggaagaacgaggccaagagacgcgaggtgctgagcgcagccgctgcggcaggcgtctccgtggcttttggagcccctatcggaggggtattgttttccctggaggaggtttcttactactttcctcttaagaccctctggagatcattcttcgccgctctcgttgcagcatttacattgcgctctatcaaccccttcggcaacagtagactggtgctgttctacgtggaattccacaccccatggcacctctttgagctggtgccattcatattactgggtattttcggaggcttgtggggagccctttttatccgtaccaacatcgcctggtgtcgtaagagaaagacaactcagctgggcaagtatccagtgatcgaagttctcgtggtgacagctatcacagccattctggcgttccctaacgagtataccaggatgagcacttccgagctgattagcgagttgttcaacgactgcggtctgctggacagttcaaagttatgtgactacgagaacaggttcaatacttcaaagggtggagagctacctgatcgccctgctggcgtgggagtctatagtgcaatgtggcaactggccttgacccttatcctcaaaatagtcatcaccatcttcacatttggtatgaaaatcccttcgggtttgtttattccctctatggcagtaggggctatagctggcaggctgttgggcgtcggtatggaacagcttgcctactaccaccaggagtggactgtcttcaattcttggtgcagccagggggcagactgtatcacacccggattgtatgctatggtgggagctgccgcatgcctggggggtgtgacacgcatgacagttagcctggtggtgatcatgtttgaactaacaggagggcttgagtacatcgtgccactcatggcagccgcaatgacctccaagtgggtagccgacgcgctgggtagggaaggaatctatgatgcacacatccgactgaatggctaccctttcctggaagccaaggaggaattcgcccacaagacactcgcaatggacgtcatgaaacctcggaggaatgacccacttctaacagtattaactcaagacagtatgacagttgaagacgtagagaccatcataagtgagactacctactcaggcttccctgtcgtggtgagtagggaaagtcaaagactagtagggttcgtgctgaggcgcgacctgatcattagcatagaaaatgcgagaaagaaacaggacggcgtggtgagcacatcaatcatttatttcacagagcacagtccgccactgcccccatataccccccctactctcaaactgcggaatattctggacttgagcccctttaccgtcacagacttgactcctatggagatcgttgtggacatttttaggaagctgggcctaaggcagtgtctggtgacacataatggccgactcctgggaatcatcacgaagaaggatgtcctgaaacacatcgcccagatggcaaatcaagatccagattcaatcctcttcaattag

SEQ ID NO: 45800 - DNA, 2451 bp, Artificial Sequence
  derived and/or modified sequence
atggcaatgtggcaaggtgccatggacaatagaggctttcaacagggttcgttctcttctttccagaatagctcatcagacgaggaccttatggacatacccgctacagcaatggatttctccatgcgcgatgacgtccccccactagaccgagaggtgggcgaagacaagtcttataacggtggcggaattggctctagtaatcggataatggatttccttgaggagccaatccccggagtggggacttatgatgattttaataccatcgactgggtgagggaaaaaagccgggatagagataggcatagagaaatcactaataaatctaaggaatcaacatgggccctaatccacagtgtctccgacgcctttagcggctggttactgatgttgctcatcggactgctgtctggaagcctggcaggactgatcgatatatctgcacattggatgaccgacctgaaggaaggcatatgtacaggcggtttttggtttaaccacgagcattgctgttggaactcagaacatgtgacgttcgaggagagggacaaatgcccagagtggaattcatggagccagttaattatatcaaccgacgaaggcgcttttgcttacatcgttaattactttatgtacgtcctctgggctctcctctttgctttcttagccgttagtctcgtaaaggtattcgccccatatgcatgcgggtcgggcattcccgaaattaaaacaatcctgtctgggttcatcatccgtggatacctgggaaaatggacgttggttatcaagaccataaccctggtcctcgccgtatcttccggactatctcttggcaaggagggccctctggtgcacgttgcctgttgttgtggcaacattctgtgccattgcttcaacaaatacaggaaaaacgaggccaaacgcagggaagttctgagcgctgcagcagccgcaggtgtatctgtggcattcggcgctcctataggaggcgtgttgttcagtctcgaagaggtctcgtactacttcccgctgaagaccctatggcgctccttcttcgccgctctcgtcgcggcattcaccctgcgaagcatcaatcccttcgggaactcaaggttagtgctgttctacgttgaatttcatactccttggcaccttttcgaattagtgccctttatccttcttggcattttcggcggactgtggggcgctttgttcattcggactaacatagcttggtgtagaaagagaaagacgactcagttgggcaaatatcccgtaatcgaagtgctggttgtgacagccatcaccgctatcctggcctttcctaacgaatacacccggatgtccacgtccgaactcatcagcgagctgtttaatgactgtggcttgctcgactccagcaaactgtgtgattatgaaaataggtttaacacttccaaagggggagagctacccgatcgccctgcaggtgtgggggtctattcagcaatgtggcaattagcgctgacgctgatcctgaaaatcgttattaccatattcacttttggcatgaagatccccagtgggctgttcatcccatctatggccgtgggcgctattgcagggagacttctcggtgtcggtatggagcagctggcatattaccatcaagagtggacagtgtttaattcctggtgttcccagggagccgattgcattactcccggactgtacgctatggtgggggcagctgcttgtctgggtggcgtgactaggatgacagtgtccctagtggtaattatgtttgagcttactggtggcctggaatatattgttcctttgatggcagctgctatgacgtcaaaatgggtcgcagacgcactgggcagagaagggatttacgatgcccacatacgcttaaatggttacccgttcctcgaagcaaaggaagagtttgcacataagaccctggccatggatgtgatgaagccgagaaggaacgaccctctactgacagtcctgacccaggattccatgactgtggaagacgtggagacaattatatccgaaaccacttactcagggtttccagtggtcgtgtcaagagagtctcaaagactggtgggatttgtgttacgcagagatctcatcattagtattgagaacgctaggaagaaacaggacggggtggtgtccaccagcattatctacttcaccgaacacagcccacccttgcctccctacaccccaccgacactcaagctgcgtaacatcctggatctctctccatttaccgttacggacctaacacccatggaaattgttgtggatatatttcggaaactggggctgcgccaatgtctggtgactcacaatggaagactgctggggattattacaaagaaagacgtcctaaagcacatcgctcagatggcaaaccaggatcccgactctattctctttaattag

SEQ ID NO: 45801 - DNA, 10108 bp, Artificial Sequence
  derived and/or modified sequence
gtcacatgagccgcgcgcccgcttcgctccccctcctccccggctgggctgtgtgaatgaagctctgccggctacgtggggcgctcactcaacttggtgtcctggacgccagagccgaccgagcgcgctgcccaccggcggcggacacgggctccgccgctccggacctcggcgacagagcaaatcagttgcctggagttcccagtgaagttgtacctgtgcccgtgcgataacgtcagtggaagctgccccgagtaagtgagggaaatctagaagtttggagcataaaaaaccagcacgaatcaactttacataaacttcatacatttattagcaactgctcgggtttaacttcagggatgttaaatttcgcctagtcccacgggacgatgatcattacttcttaactgcacgcgaaataggagaagaaaaaaggcaaatcaaaacagactgtcccaggtctcagagaagtcatcggagcgctttttcctgctgaattcaccctaggagtttgtttggggctttagccccttggagaaaacagggccacatagctgcctttctatcaagtctccctacaaaactgagaggctctgggaaactcagcctgtgaccccagcgtgggtgaagataggatcaagatggccatgtggcagggtgccatggataacagaggctttcagcaggggagttttagtagcttccagaacagctccagtgatgaagacctgatggacattccagcaaccgctatggatttctccatgagagatgatgttcctcccttagaccgagaagtaggagaggacaagtcgtacaatggtggaggaataggttcttcaaataggatcatggacttcttggaggagccaatccctggtgtagggacctatgatgatttcaatacaattgattgggtgagagagaagtctcgagaccgggataggcaccgagagattaccaataaaagcaaagagtcaacatgggccttaattcacagtgtgagtgatgctttttccggctggttgttgatgctccttattgggcttttatcaggttcgttagctggtttgatagacatctctgctcattggatgacagacttaaaagaaggtatatgcacagggggattctggtttaaccatgaacattgttgctggaactctgagcatgtcacctttgaagagagagacaaatgtccagagtggaatagttggtcccagcttatcatcagcacagatgagggagcctttgcctacatagtcaattatttcatgtacgtcctctgggctctcctatttgccttccttgccgtatctcttgtcaaggtgtttgcgccttatgcctgtggctctggaatccctgagataaaaactatcttgagtggtttcattattaggggctatttgggtaagtggactctggttatcaaaaccatcaccttggtgctggcagtgtcgtctggcttgagcctgggcaaagagggccctctagtgcacgtggcttgctgctgtgggaacatcctgtgccactgcttcaacaaatacaggaagaatgaagccaagcgcagagaggtcttgtcggctgcagcagcagctggtgtatctgtagcctttggagcacctataggtggagtattattcagccttgaagaggtcagctactattttcccctcaaaacattgtggcgttcattctttgctgccttggtggcagcattcactctacgctccatcaatccatttgggaacagccgcctggtactattttatgtggagtttcacaccccatggcatctctttgagctcgtgccattcattctgctgggcatatttggtggtctgtggggagcactgtttatccgcacaaacattgcctggtgtcggaagcgaaagaccacccagttgggcaagtatcctgttatagaggtactcgtcgtgacagccatcactgccatcctggctttccccaatgaatacactcggatgagcacaagtgagctcatttctgagctgtttaatgactgtggccttctggactcctccaagctctgtgattatgagaaccgtttcaacacaagcaaagggggtgaactgcctgacagaccggctggcgtgggagtctacagtgcaatgtggcagctggctttaacactcatactgaaaattgtcattactatattcacctttggcatgaagatcccttctggcctctttatccctagcatggctgttggtgctatagcaggtcgacttctaggagtaggaatggaacagctggcttattaccaccaggaatggaccgtcttcaatagctggtgtagtcagggagctgattgcatcacccccggcctttatgcaatggttggggctgcagcctgcttaggtggggtgactcggatgactgtttctcttgttgtcataatgtttgaactgactggtggcttagaatacatcgtgcctctgatggctgcagccatgacaagcaagtgggtggcagatgctcttgggcgggagggcatctatgatgcccacatccgtctcaatggatacccctttcttgaagccaaagaagagtttgctcataagaccctggcaatggatgtgatgaaaccccggagaaatgatcctttgttgactgtccttactcaggacagtatgactgtggaagatgtagagaccataatcagtgaaaccacttacagtggcttcccagtggtggtatcccgggagtcccaaagacttgtgggctttgtcctccgaagagatctcattatttcaattgaaaatgctcgaaagaaacaggatggggttgttagcacttccatcatttatttcacggagcattctcctccattgccaccatacactccacccactctaaagcttcggaacatcctcgatctcagccccttcactgtgactgaccttacacccatggagatcgtagtggatattttccgaaagctgggactgcggcagtgcctggttacacacaacgggcgattgcttggaatcattaccaaaaaggatgtgttaaagcatatagcacagatggcgaaccaagatcctgattccattctcttcaactagaatcatagagttctggatgtaaagcgggaaggacattacagaccatggatatgttgtattaactgggtacccaaaacacattttccatatttggatggtgaagtcacattagtgtgttgtctctttcctacaagttaaccagttgcactacataatctctggaaattaattttctctttaggagaaattatagttaggcttccatgatgttacattaggaagatatcatgaaagaataaataagattgctatggtttaattatatttgctttttaaaagatttttttaacttaaaaagtagttagccaatatgcaatcactgaaaactatgcaagagaaattccaaccgtcctgacctataacctgtaggaaaccgacgaaaaagtcactcttttgggatctaactgttgttactggaagacgaagtgtaaactaaggggctttgcttttcaaaccagagaaaggaaagccagaaggaaaagagtaatggtattttctagactgtgaagattcagttcaaatgttatccttgttcctgttacaatatttagcattattagtttgttatgtgtgtatgtttatgttaattttaatttctgattataagacaatgctgctttggttaatctcttctaaatgaatttagagagattgacttttatagcttgcttgttgctggtactcttttgaagtgcacaaagataagttatagagctttctccttgtctgcaaaaacggtaattttccaggtggcatttgttagctggtagacaaggactttgccgtgaatttgttagtagcaaggaatgatttcttccagcttccttgaaatgaataattagtaaacttctaagcaaagtcaatgactaggagtttcacatgtttgtgaggtcctaactaattctcttacccagatgccacctccatgaatgatggtgctttaggcttctggaatatgtaaaaacagcaaagggaaccaagtctagactgcatactggtaaaccagggaagactcagaactgcatatgcatcctcatgcattcctttgtaaagaccaccagtactaaaataactggacactcattgtacctcccagcgataagtatgtgtaacaggccagtgtgttgtccccatgatcatgaattaggcttgggatgcttccaaatatattcaaggtgttggaacaggataggcagctgtgactccctcaagagtccttagaattctaaataaaatgcagagccatcctaagacacaggggtatggacaaggcctggtgacaccaaaggtgcttgtatccaattgaaaaggtgcctgtctcaatttcataccacctttattgcagttaaaaaaaaatcacactctggggacacttggtggaattacagagccaccatcatcattccaaccactatttcattttctgtagttttacctgtgtgcaattactccccctccattctgttccacttcttactccttagtaccaaatcctctgtttgggattgagcgctgctcctggttaatcattcctactacaaaaaaaaataactcccagggctagttaaattgtaaaccaaggctcagcagtctcacaacacatggaccagaggtgacacacagccatttcctttgccatgtggcccagttgctgctgccatgcctccatttccacactggatgcctacggcagtgagatttcactgccggggtaagagttcagcctggatgattttatagctctgttcctagcacttctcatcatccttccagcccagaatcagcggtcattctgcatattcccaccaaccctctacccccaaacacttcagtgtacctcattttaagagttgctgatccctgattctaggacgtttttacccatagttcttgtctttccaaaatctgaaattcttttttttgctcagaactgggtagccaagggttattttatttttatctttaaaataatcaaggcagtcgctagagtttctccttgtgaatagatcactctagcattttaatgaaaaagaaaaaaatctttctggggtatgttgtatcatagtaatggctcagtaaccacatattttgtcctttccatgtcactgattccttcatatgagactatttggcttgactaccctgtatattgtgtagaaatcaaagttcttatctgtacatttctggtccaatacctgtcttattagttgtccttccccactaaagtttgcaaaacagaaaatgttactatttctggtatttaatgacaatgaaaggtttggtcatatttcatagtgcagtagcgataaggagggtgtctcaagtttgcttttgtgtttcttctaggctttgttcttgattttagacagatgagccagtgttaaggtgctacttcagagaataaattagagaaatcagataacactgtgccaaggtatactttgtagatgctaagcaccgattggccctccagagaatgacaatatccctttgatacctcactcctgatcaatctcattcattaacctcagcttctcaggaatccttgtagcttgtatgctagaagtagctatggtatatggtatccactatatgtccagtcctatggtttggctcaaaggttggctaattgcagctagagctctcaactgctagctcagcaccttgacatttgaagtttcttgtcttgaggagaaggaaaatgttctttctgccattgccactttaacagttggacatgcttaagcaacaaatacagccagtatagggaggactgtcagtagcatcaaatggccacatacctcaatggcaaaagactagatggtttgtgatttaaaaattaatgagtcgagatgagactattttggtattaaatgagaaaattgcctaacacaagggaagggtttacaaaagaatgccaattagtgtttcaacagagttaggattttccaagtaagagtagctggtagccatccagccataaaaggaacgagagtctatagatttgtaaaagtaaaactgctatattttgtatcttcaaatcttcaatataaagaatttaaagaacctgaaacagttaatgcatgattcgttatattggagggaaaaagcaggggactgataatacaaaataatggcaactttaaagatcatttctacgtggatgtttggttagaaacatattccaatgctctcctctttctctggccacagcatcctggctcagcccagctgtggagtagaggtggtaagatccacagaacagatatcctctggtagataagctgacattgatgatactttgaatttaccagctggtgaagcaaacgattaatttgtgattgaactgaaaagcagttgaattgttttgacaccagaggctgaatctaaaccctttacaggaagagcagagcatactatacatttcttagcagatcttcaattctgtttgaacatgatgaagtaaccagggtttagtgagatctaaggccgtgaagtaattcacaaccaagatcttatgaacgcattcagatgtgaggggggcaaatatgttttcaaaaacttagtgtgcaatagagtccattatagaaattaaccactgctatatgttttaagtagttcaatcacctgttgtggttcagtcttgattattgtttattttgttaggtgataagtaggaagatgcacttgttatcccacactatctcttgttttgttttgttttgtttttaaataatgaacagtgcaatctttgaacttgagtttttaataatgatagcaaagacaatggtgagaacttgaaacagccagcatattttatattgccaaagtacttactgatgactgaccacactgtcttgtgaggaactgggtcccctgcactggatcagagccaaatgcaagccacccatcagttcagaggaagcaggaaaacatcttttgggtggtgcatagaacattgagctcttaaaaacccggagaaaaattaggaatttagaaagtaagtgggaggtagaatattgagtccttttttaaaaaaaagaattgatgtctaaatatgtagtctgaacttaagtgtcctaaaaccttgttttttgtttttttgttttttgaggagtcgtcttgctctatcaccaggtgggagtgcagtggcacaatctcggctcactgtaacctctgcctcctgcctcccgggtccaagcaattcccctgcctcagtctcccaagtaggtgggactacaggcgcacaccaccatgcccagctaacttttgtatttttagtagagacggggtttcaccatgttggccaggatggtctcgatctcttgacctcgtgatccacccatctcggcctcccaaagtgctgggattataggtgtgagccaccgcacccagccaaaccttgatttttttagccacctctgggattgcctgggttccctttggagaagaaactaaaagttatggccatagaaaaagccctggtaagaaaatatttgaatggtgtaagatggtggaaggaaagccatcccacacccctacaacatatgttctggcatttataaactgcttgattgtgtgcctcaaggggagaaaaagtcaagcaatgcttcaaaggccaggctttctaagcaaatgagtggttcaaagcagtgtttggctcaagggcagtctggttttatggatagggccgacccaagacatctgctcatgaagaaatgtggcatctgttgccatttcctaaactataaggtttagatagattgtcttgaattttgatagcaaatttttttaaatttatatttctgcctcctcgtacatccttatatatggaaaaaaaagtaagagttcctcagatcagagctcagtagctgtgtcaatttgaagttcaatcagtgtagttgtcctggggtgatcgctgactctgctctgtttcatatttcagttgcttgctccaaggagagaatttctgagaacaatgggtgttagcaactttaagttactccccaaacgtttgctggccacattctcatttctaaacatctggatctgggtaaaggtttgaatagatgtagggaacaaaattggtttttccatggtgtagtctaattttgccaaatcacccaagaaagaaagtatatgacgtgtggagtttgcatttcttggatgggacctatcgggtcacccagcccagtcttacagtcataaattcctacctcttagttcctgccaaagggccttcagcctctgtgtgcacacttattgaatgaatgctttgcctaaagtttggccttttgaagaaaaacagcatgtgataatataaaaatatgagagtttaaaaaaaaaaaagatctctgcctctcttctctctgcctcgtcccaccttgctgtctgtctcattgtctttctctcccctcaccatgcgctgaattcagatttctctttcttttattataggcatgttgttttgaatgtggactttgtgggagggagaggattgttctgagaacagaaactggaagatacgtctgagttgatgggaccaacagggctttgctcctctgtgagggccaaagccattgatacttgtcgggggtgatgagggctttagcatctcaaggcagacatatgaagtatttactgctaaactatattacttactagtacaaatctgttggaattcaggggcagtctaagatttggtgagtgaaatgccatctggcaaaatcgagaagagagtgtggcctgagaggggaatgttcagcctcactgtcacattaagggtacctcaaaatacatggtccttccagtgtgttccttttccttcctccatttcactttgtcccctcttcttcctttctctcccattttcctggctttttagcactcagcttttttttataagtatgtatttactttttattatatatttggtcctttgggactttgtgatgattaagaatttattccattcaggattttaaaatgatgtgtttaatattttgttctcttaaactcttttgaagctatgctgctaaccaggtataggccagaaaggaggtggcccagtcagtaccttgctcacgtcagctaagggggacagtgatgtcatgtgggtgactcttcttcatttgaccaaggccagcctcctgttcttacctctgcccattcatttctggctatgggaaaactaccacctgttgagtgagccaatgaggccaggaagatcagaggggctgggttccggcccatgggccactatttgaatttctctgtagtaagctctttgtagggctggctccaactgcagtagccaaagaaaacctgtctgactcgacattttaatgcctgagagttggtgaaagttcagctgaagctaatgtctagacatcagcagtaactaggcatccagaaagtagcttcaaccaaagctaatagagcccaagtttccgcaggaagtttggtgctgagctgtccagagcagttgtttatctgagtgttgctagcccttagccatgctttcttagctttattctcgcctgttcctaggcatagcctgaaccagagctatggctcactgctcgctttattctactccctagtcatgcggaacaacatagtctaaaaaggaagatgtggactggggagttaggagacctgatttctattccctatgcttctactaactagcctcgagatcttaaccgctctgtgcctcagtgttcccatctgcaaaatggggatagtgttaattgccctacctacctcacagggttgttgtgaggataaactgagacaatgaattcaaagcaagttgacaagtaagtgctatgcaaattgtaagaaatggaaacaatcatgttaaaagcaatggaatggacattggcagaagggttaatggattgtccagccctttctctgtgtggcttaaacccaggtcgccattgctttatacattttcacttagcacagatttgtaattatgcatgtaataaagcacagccttatccaccctg

SEQ ID NO: 45802 - DNA, 3046 bp, Artificial Sequence
  derived and/or modified sequence
gtgtgaatgaagctctgccggctacgtggggcgctcactcaacttggtgtcctggacgccagagccgaccgagcgcgctgcccaccggcggcggacacgggctccgccgctccggacctcggcgacagagcaaatcagttgcctggagttcccagtgaagttgtacctgtgcccgtgcgataacgtcagtggaagctgccccgagtttggggctttagccccttggagaaaacagggccacatagctgcctttctatcaagtctccctacaaaactgagaggctctgggaaactcagcctgtgaccccagcgtgggtgaagataggatcaagatggccatgtggcagggtgccatggataacagaggctttcagcaggggagttttagtagcttccagaacagctccagtgatgaagacctgatggacattccagcaaccgctatggatttctccatgagagatgatgttcctcccttagaccgagaagtaggagaggacaagtcgtacaatggtggaggaataggttcttcaaataggatcatggacttcttggaggagccaatccctggtgtagggacctatgatgatttcaatacaattgattgggtgagagagaagtctcgagaccgggataggcaccgagagattaccaataaaagcaaagagtcaacatgggccttaattcacagtgtgagtgatgctttttccggctggttgttgatgctccttattgggcttttatcaggttcgttagctggtttgatagacatctctgctcattggatgacagacttaaaagaaggtatatgcacagggggattctggtttaaccatgaacattgttgctggaactctgagcatgtcacctttgaagagagagacaaatgtccagagtggaatagttggtcccagcttatcatcagcacagatgagggagcctttgcctacatagtcaattatttcatgtacgtcctctgggctctcctatttgccttccttgccgtatctcttgtcaaggtgtttgcgccttatgcctgtggctctggaatccctgagataaaaactatcttgagtggtttcattattaggggctatttgggtaagtggactctggttatcaaaaccatcaccttggtgctggcagtgtcgtctggcttgagcctgggcaaagagggccctctagtgcacgtggcttgctgctgtgggaacatcctgtgccactgcttcaacaaatacaggaagaatgaagccaagcgcagagaggtcttgtcggctgcagcagcagctggtgtatctgtagcctttggagcacctataggtggagtattattcagccttgaagaggtcagctactattttcccctcaaaacattgtggcgttcattctttgctgccttggtggcagcattcactctacgctccatcaatccatttgggaacagccgcctggtactattttatgtggagtttcacaccccatggcatctctttgagctcgtgccattcattctgctgggcatatttggtggtctgtggggagcactgtttatccgcacaaacattgcctggtgtcggaagcgaaagaccacccagttgggcaagtatcctgttatagaggtactcgtcgtgacagccatcactgccatcctggctttccccaatgaatacactcggatgagcacaagtgagctcatttctgagctgtttaatgactgtggccttctggactcctccaagctctgtgattatgagaaccgtttcaacacaagcaaagggggtgaactgcctgacagaccggctggcgtgggagtctacagtgcaatgtggcagctggctttaacactcatactgaaaattgtcattactatattcacctttggcatgaagatcccttctggcctctttatccctagcatggctgttggtgctatagcaggtcgacttctaggagtaggaatggaacagctggcttattaccaccaggaatggaccgtcttcaatagctggtgtagtcagggagctgattgcatcacccccggcctttatgcaatggttggggctgcagcctgcttaggtggggtgactcggatgactgtttctcttgttgtcataatgtttgaactgactggtggcttagaatacatcgtgcctctgatggctgcagccatgacaagcaagtgggtggcagatgctcttgggcgggagggcatctatgatgcccacatccgtctcaatggatacccctttcttgaagccaaagaagagtttgctcataagaccctggcaatggatgtgatgaaaccccggagaaatgatcctttgttgactgtccttactcaggacagtatgactgtggaagatgtagagaccataatcagtgaaaccacttacagtggcttcccagtggtggtatcccgggagtcccaaagacttgtgggctttgtcctccgaagagatctcattatttcaattgaaaatgctcgaaagaaacaggatggggttgttagcacttccatcatttatttcacggagcattctcctccattgccaccatacactccacccactctaaagcttcggaacatcctcgatctcagccccttcactgtgactgaccttacacccatggagatcgtagtggatattttccgaaagctgggactgcggcagtgcctggttacacacaacgggcgattgcttggaatcattaccaaaaaggatgtgttaaagcatatagcacagatggcgaaccaagatcctgattccattctcttcaactagaatcatagagttctggatgtaaagcgggaaggacattacagaccatggatatgttgtattaactgggtacccaaaacacattttccatatttggatggtgaagtcacattagtgtgttgtctctttcctacaagttaaccagttgcactacataatctctggaaattaattttctctttaggagaaattatagttaggcttccatgatgttacattaggaagatatcatgaaagaataaataagattgctatggtttaattat

SEQ ID NO: 45803 - DNA, 2451 bp, Artificial Sequence
  derived and/or modified sequence
atggccatgtggcagggcgccatggacaacagaggcttccagcagggcagcttcagcagcttccagaacagcagcagcgacgaggacctgatggacatccccgccaccgccatggacttcagcatgagagacgacgtgccccccctggacagagaggtgggcgaggacaagagctacaacggcggcggcatcggcagcagcaacagaatcatggacttcctggaggagcccatccccggcgtgggcacctacgacgacttcaacaccatcgactgggtgagagagaagagcagagacagagacagacacagagagatcaccaacaagagcaaggagagcacctgggccctgatccacagcgtgagcgacgccttcagcggctggctgctgatgctgctgatcggcctgctgagcggcagcctggccggcctgatcgacatcagcgcccactggatgaccgacctgaaggagggcatctgcaccggcggcttctggttcaaccacgagcactgctgctggaacagcgagcacgtgaccttcgaggagagagacaagtgccccgagtggaacagctggagccagctgatcatcagcaccgacgagggcgccttcgcctacatcgtgaactacttcatgtacgtgctgtgggccctgctgttcgccttcctggccgtgagcctggtgaaggtgttcgccccctacgcctgcggcagcggcatccccgagatcaagaccatcctgagcggcttcatcatcagaggctacctgggcaagtggaccctggtgatcaagaccatcaccctggtgctggccgtgagcagcggcctgagcctgggcaaggagggccccctggtgcacgtggcctgctgctgcggcaacatcctgtgccactgcttcaacaagtacagaaagaacgaggccaagagaagagaggtgctgagcgccgccgccgccgccggcgtgagcgtggccttcggcgcccccatcggcggcgtgctgttcagcctggaggaggtgagctactacttccccctgaagaccctgtggagaagcttcttcgccgccctggtggccgccttcaccctgagaagcatcaaccccttcggcaacagcagactggtgctgttctacgtggagttccacaccccctggcacctgttcgagctggtgcccttcatcctgctgggcatcttcggcggcctgtggggcgccctgttcatcagaaccaacatcgcctggtgcagaaagagaaagaccacccagctgggcaagtaccccgtgatcgaggtgctggtggtgaccgccatcaccgccatcctggccttccccaacgagtacaccagaatgagcaccagcgagctgatcagcgagctgttcaacgactgcggcctgctggacagcagcaagctgtgcgactacgagaacagattcaacaccagcaagggcggcgagctgcccgacagacccgccggcgtgggcgtgtacagcgccatgtggcagctggccctgaccctgatcctgaagatcgtgatcaccatcttcaccttcggcatgaagatccccagcggcctgttcatccccagcatggccgtgggcgccatcgccggcagactgctgggcgtgggcatggagcagctggcctactaccaccaggagtggaccgtgttcaacagctggtgcagccagggcgccgactgcatcacccccggcctgtacgccatggtgggcgccgccgcctgcctgggcggcgtgaccagaatgaccgtgagcctggtggtgatcatgttcgagctgaccggcggcctggagtacatcgtgcccctgatggccgccgccatgaccagcaagtgggtggccgacgccctgggcagagagggcatctacgacgcccacatcagactgaacggctaccccttcctggaggccaaggaggagttcgcccacaagaccctggccatggacgtgatgaagcccagaagaaacgaccccctgctgaccgtgctgacccaggacagcatgaccgtggaggacgtggagaccatcatcagcgagaccacctacagcggcttccccgtggtggtgagcagagagagccagagactggtgggcttcgtgctgagaagagacctgatcatcagcatcgagaacgccagaaagaagcaggacggcgtggtgagcaccagcatcatctacttcaccgagcacagcccccccctgcccccctacaccccccccaccctgaagctgagaaacatcctggacctgagccccttcaccgtgaccgacctgacccccatggagatcgtggtggacatcttcagaaagctgggcctgagacagtgcctggtgacccacaacggcagactgctgggcatcatcaccaagaaggacgtgctgaagcacatcgcccagatggccaaccaggaccccgacagcatcctgttcaactag

SEQ ID NO: 45804 - protein, 144 aa, Artificial Sequence
  derived and/or modified sequence
MIKFFLMVNKQGQTRLSKYYEHVDINKRTLLETEVIKSCLSRSNEQCSFIEYKDFKLIYRQYAALFIVVGVNDTENEMAIYEFIHNFVEVLDEYFSRVVKGHIMFNLDKVHIILDEMVLNGCIVETNRARILAPLLILDKMSES

SEQ ID NO: 45805 - protein, 144 aa, Artificial Sequence
  derived and/or modified sequence
MIKFFLMVNKQGQTRLSKYYEHVDINKRTLLETEVIKSCLSRSNEQCSFIEYKDFKLIYRQYAALFIVVGVNDTENEMAIYEFIHNFVEVLDEYFSRVSELDIMFNLDKVHIILDEMVLNGCIVETNRARILAPLLILDKMSES

SEQ ID NO: 45806 - protein, 133 aa, Artificial Sequence
  derived and/or modified sequence
MIKFFLMVNKQGQTRLSKYYEHVDINKRTLLETEVIKSCLSRSNEQCSFIEYKDFKLIYRQYAALFIVVGVNDTENEMAIYEFIHNFVEVLDEYFSRVSELDIMFNLDKVHIILDEMVLNGCIVETNRARILA

SEQ ID NO: 45807 - DNA, 435 bp, Artificial Sequence
  derived and/or modified sequence
atgataaaatttttcctgatggtcaataaacagggccagacacgtctgtcgaagtactacgaacatgttgatattaacaaaaggacgctactggagactgaagttattaaatcttgcctgagcaggtctaacgagcaatgcagcttcattgagtacaaagacttcaagttgatctacagacagtacgcagccctgtttatcgtggtgggcgtgaatgacactgagaacgaaatggcaatctatgagttcatccacaacttcgtcgaggtgctggatgagtatttcagcagggtggttaagggacacatcatgtttaatttggacaaagtgcacatcatcctggacgaaatggttctcaatggttgcatcgtcgaaactaatcgggcaagaatcctggctccattgctgattctggacaagatgtctgaatcatag

SEQ ID NO: 45808 - DNA, 435 bp, Artificial Sequence
  derived and/or modified sequence
atgatcaaattttttttaatggtgaataagcaggggcagaccagactgtcaaagtattacgagcacgtagatatcaataaaagaacactgctcgaaaccgaagttattaagagctgtcttagtcggtccaacgaacagtgcagttttatcgaatataaggatttcaagctcatctacaggcagtatgcagcactgtttattgtggtgggcgtcaacgatacggaaaatgaaatggccatttatgaatttatccacaatttcgtggaggtcctcgacgaatattttagccgggtttctgaactggatatcatgttcaatctggacaaagtacacattattctagatgagatggtcttaaacggttgcattgtggagactaatcgggcacgaattctcgctccactcttgattcttgataaaatgtctgagagctag

SEQ ID NO: 45809 - DNA, 402 bp, Artificial Sequence
  derived and/or modified sequence
atgattaagttcttcctgatggtcaacaagcagggtcagactcggctgtccaaatattatgaacacgtcgatattaacaagaggactcttttagagactgaagtgataaagagctgcctgagccgttcgaatgagcagtgcagttttatcgagtacaaagatttcaagctcatctacaggcagtatgccgcgctgtttattgtggtgggcgtcaacgacacagagaacgagatggccatctatgaatttatccacaatttcgtggaagtgttggacgaatatttttctcgcgtgagcgagctggacatcatgttcaacctggacaaggtgcatataattctggacgaaatggtcttgaatggttgtattgtggagaccaatagggcccgcatcctcgcctag

SEQ ID NO: 45810 - DNA, 817 bp, Artificial Sequence
  derived and/or modified sequence
gtaagatgcctatcctagtccctctcttcgggctcttcatctcaagaggaacaaacaagagcaaactcagtgttgagaggccccaaaccggactctcccacagagaggtgctcggtcccaagccccggaggcccgggaaggccgcctccggaggagcccccgcagacgccatactaaaagccaaaatggctgccccgaggaggcccgcaccgcgtagccagtgaaggttggggagcaagcttatgcgggaaagagggagggggactccaggaaaagccgttgagaggaccatcacaacctgagcagcacaggttccagttacagccatcccttgtcataacttttgaactgtatttggaaaaatactggccaggaaagaaaaatgataaaatttttcctcatggtgaataaacaagggcagactcgactttctaagtactatgaacatgtggatattaataagcgtacacttctggaaacagaagtcataaagagctgtctctctcgatccaatgaacaatgctctttcattgaatataaggattttaagctgatatatcggcagtatgcagctctcttcattgtggttggagttaatgacactgagaacgagatggctatttatgaattcattcataactttgtggaagttttagatgagtatttcagccgagtggtaaaagggcatataatgtttaatttggataaagtacacatcattttggatgagatggtgttaaatggctgcattgtggaaactaacagggcaagaattcttgcccctctactaattcttgataagatgtcagaaagctga

SEQ ID NO: 45811 - DNA, 1405 bp, Artificial Sequence
  derived and/or modified sequence
ggaaaaggggggtaagatgcctatcctagtccctctcttcgggctcttcatctcaagaggaacaaacaagagcaaactcagtgttgagaggccccaaaccggactctcccacagagaggtgctcggtcccaagccccggaggcccgggaaggccgcctccggaggagcccccgcagacgccatactaaaagccaaaatggctgccccgaggaggcccgcaccgcgtagccagtgaaggttggggagcaagcttatgcgggaaagagggagggggactccaggaaaagccgttgagaggaccatcacaacctgagcagcacaggttccagttacagccatcccttgtcataacttttgaactgtatttggaaaaatactggccaggaaagaaaaatgataaaatttttcctcatggtgaataaacaagggcagactcgactttctaagtactatgaacatgtggatattaataagcgtacacttctggaaacagaagtcataaagagctgtctctctcgatccaatgaacaatgctctttcattgaatataaggattttaagctgatatatcggcagtatgcagctctcttcattgtggttggagttaatgacactgagaacgagatggctatttatgaattcattcataactttgtggaagttttagatgagtatttcagccgagtgagtgaattagatataatgtttaatttggataaagtacacatcattttggatgagatggtgttaaatggctgcattgtggaaactaacagggcaagaattcttgcccctctactaattcttgataagatgtcagaaagctgaaaggaagtctcttcgagacaatatggatttatcagaaatgcgagtaccgtggaatacatctcaacatgttaacccagaagaatctggaagaccacaattacaaaatggggtatccttccaaagacattataaataggcattttccacagttcctaaaaagaaaacacaactgtactttaaaatatgtacaaagaaaaaaatttctttaaactgagagagaagttttattttctaattgtaaacatatctgtcgcactttaaattctgttgagcacctaaggaacccttcttggtctatgcttcttttgcaaattgaattcaggaatagcaggatggtagtgggaagaaagtatggcagttttccgtcagccaataaagttttaaaatttaaacacaaggcattttgagtaacgctgttttctgaaagctatttttttttttttgagacggagtctagtctagctgtgtcacctggcacattctcggctcactgcaacctccacttccggggttcaagcgattctcctgcctcagcctccgagctgggactacaggcatgcaccaccacacctggcta

SEQ ID NO: 45812 - DNA, 663 bp, Artificial Sequence
  derived and/or modified sequence
aaatctcttcagtcgtttcataaatacagcatcgatcgtctggtttggtttttttatagataaagaaacggatgggggaaaggagatctagtggagagtactgtaaaaagaaaaattcagtgctgaaagcgttgatgagtcactaagtaaggaataactacagagaatccaagtgagtaaggcagcatctcaggttccagttacagccatcccttgtcataacttttgaactgtatttggaaaaatactggccaggaaagaaaaatgataaaatttttcctcatggtgaataaacaagggcagactcgactttctaagtactatgaacatgtggatattaataagcgtacacttctggaaacagaagtcataaagagctgtctctctcgatccaatgaacaatgctctttcattgaatataaggattttaagctgatatatcggcagtatgcagctctcttcattgtggttggagttaatgacactgagaacgagatggctatttatgaattcattcataactttgtggaagttttagatgagtatttcagccgagtgagtgaattagatataatgtttaatttggataaagtacacatcattttggatgagatggtgttaaatggctgcattgtggaaactaacagggcaagaattcttgcc

SEQ ID NO: 45813 - DNA, 435 bp, Artificial Sequence
  derived and/or modified sequence
atgatcaagttcttcctgatggtgaacaagcagggccagacccggctgagcaagtactatgagcacgtggacatcaacaagaggaccctgctggagacagaggtgatcaagagctgcctgagccgcagcaatgagcagtgcagcttcatcgagtacaaggacttcaagctgatctaccggcagtatgctgccctcttcatcgtggtgggcgtgaatgacacagaaaatgagatggccatctatgagttcatccacaactttgtggaggtgctggatgagtacttcagccgggtggtgaagggccacatcatgttcaacctggacaaggtgcacatcatcctggatgagatggtgctgaatggctgcatcgtggagaccaacagagcccgcatcctggcccccctgctgatcctggacaagatgtctgagagctag

SEQ ID NO: 45814 - DNA, 435 bp, Artificial Sequence
  derived and/or modified sequence
atgatcaagttcttcctgatggtgaacaagcagggccagacccggctgagcaagtactatgagcacgtggacatcaacaagaggaccctgctggagacagaggtgatcaagagctgcctgagccgcagcaatgagcagtgcagcttcatcgagtacaaggacttcaagctgatctaccggcagtatgctgccctcttcatcgtggtgggcgtgaatgacacagaaaatgagatggccatctatgagttcatccacaactttgtggaggtgctggatgagtacttcagccgggtgtctgagctggacatcatgttcaacctggacaaggtgcacatcatcctggatgagatggtgctgaatggctgcatcgtggagaccaacagagcccgcatcctggcccccctgctgatcctggacaagatgtctgagagctag

SEQ ID NO: 45815 - DNA, 402 bp, Artificial Sequence
  derived and/or modified sequence
atgatcaagttcttcctgatggtgaacaagcagggccagacccggctgagcaagtactatgagcacgtggacatcaacaagaggaccctgctggagacagaggtgatcaagagctgcctgagccgcagcaatgagcagtgcagcttcatcgagtacaaggacttcaagctgatctaccggcagtatgctgccctcttcatcgtggtgggcgtgaatgacacagaaaatgagatggccatctatgagttcatccacaactttgtggaggtgctggatgagtacttcagccgggtgtctgagctggacatcatgttcaacctggacaaggtgcacatcatcctggatgagatggtgctgaatggctgcatcgtggagaccaacagagcccgcatcctggcctag

SEQ ID NO: 45816 - DNA, 435 bp, Artificial Sequence
  derived and/or modified sequence
atgatcaagttcttcctgatggtgaacaagcagggccagacccggctttctaagtactacgagcatgttgatatcaacaagcgaacattactagagactgaggtgatcaaaagttgtctgtccagatcgaatgaacagtgttcatttattgaatacaaggacttcaaacttatataccgccagtatgccgccctcttcattgtggtgggcgttaacgatacagagaacgagatggctatttacgagttcatccacaattttgtggaggttctggacgaatacttctcccgggtcgttaaaggacacattatgttcaatcttgacaaagtacatattattctggatgaaatggtgctcaacggctgcatcgtggagacaaaccgggccaggatcctcgctcctctcctaattttagataagatgagcgagagttag

SEQ ID NO: 45817 - DNA, 435 bp, Artificial Sequence
  derived and/or modified sequence
atgatcaagttcttcctgatggtgaacaagcagggccagacccggctgtctaaatactatgaacacgtggatattaacaagaggactcttctcgaaaccgaggtgattaaatcctgcctgtccaggtccaatgagcagtgttcctttatcgagtataaggattttaagttgatttacagacagtacgccgcactattcatagtggtcggcgttaatgatacagaaaatgagatggccatttacgagttcatccacaactttgtggaggtgctggatgagtactttagtagagtctctgaactggatataatgtttaatttggacaaagtgcacatcattctagacgagatggttctcaatggctgtattgtcgagacgaaccgggccagaattctcgcccctctactcatactggataaaatgtctgagagttag

SEQ ID NO: 45818 - DNA, 402 bp, Artificial Sequence
  derived and/or modified sequence
atgatcaagttcttcctgatggtgaacaagcagggccagacccggctgtcaaagtactatgaacacgtcgatatcaacaagcggaccttgctcgaaaccgaggttatcaaatcctgtttgtctcggtcaaatgagcagtgcagcttcattgaatacaaggatttcaaactcatatatagacagtatgcagcattgtttattgtggtgggcgtcaacgatactgagaacgaaatggctatttatgagttcatacataacttcgtggaggtgctcgacgaatacttcagtagggtttcagaactggacattatgttcaatctcgataaagtgcacattatcctagatgaaatggtgcttaacgggtgtatcgttgagaccaatagagccagaatactggcgtag

SEQ ID NO: 45819 - DNA, 435 bp, Artificial Sequence
  derived and/or modified sequence
atgattaagttcttcctaatggtcaataagcagggacagaccaggttgtctaaatactacgaacacgttgatatcaacaagagaaccttgctggaaaccgaagtcattaagtcttgtctttcacgctcaaacgagcagtgcagctttatcgagtacaaagattttaaactgatataccgacagtatgctgccctgttcatcgtggtcggcgtgaatgacacagagaacgagatggccatttacgaattcatacacaactttgtggaggttcttgatgagtacttttcccgggttgtaaagggccacatcatgtttaacttggacaaagtgcatatcatcctggatgagatggttctgaacggatgcattgtggagactaatagggcccgtatactggctcctctgctcatattagacaagatgagtgagagctag

SEQ ID NO: 45820 - DNA, 435 bp, Artificial Sequence
  derived and/or modified sequence
atgataaaatttttcctgatggttaataaacagggtcagaccaggcttagtaaatattacgaacacgtggacattaataagcggaccctgctggaaactgaggtgattaagtcgtgcctatctcgaagtaacgagcaatgctccttcatcgagtataaagatttcaagctcatttaccggcagtatgccgctctttttattgtcgttggcgtgaatgacacagaaaacgagatggccatctacgaattcattcataatttcgtggaagttcttgacgagtattttagccgggtgagtgagctggacattatgttcaacttggataaagtgcatatcattttggacgaaatggtgctcaatgggtgtatcgtcgagaccaaccgagcaaggatcttggctcccctgcttatcttagacaagatgagcgagtcttag

SEQ ID NO: 45821 - DNA, 402 bp, Artificial Sequence
  derived and/or modified sequence
atgatcaaatttttcctgatggtcaacaaacagggacaaaccaggctgagcaagtattacgagcatgtggacattaacaagcgaactctgctggagactgaggtgatcaaatcctgcctgagtcgatctaacgagcagtgctcattcatcgagtataaagatttcaagctcatttatcggcagtatgccgcactgttcattgttgtgggggtgaacgataccgaaaatgaaatggccatctacgagtttatccacaacttcgtagaggtgctcgatgaatacttctctcgagtcagcgaactcgacattatgttcaatctggataaagtgcacattattttagatgagatggtgttgaacgggtgtattgtcgaaaccaaccgcgcacgcattcttgcatag

SEQ ID NO: 45822 - DNA, 435 bp, Artificial Sequence
  derived and/or modified sequence
atgatcaagttcttcctgatggtgaacaagcagggccagaccagactgagcaagtactacgagcacgtggacatcaacaagagaaccctgctggagaccgaggtgatcaagagctgcctgagcagaagcaacgagcagtgcagcttcatcgagtacaaggacttcaagctgatctacagacagtacgccgccctgttcatcgtggtgggcgtgaacgacaccgagaacgagatggccatctacgagttcatccacaacttcgtggaggtgctggacgagtacttcagcagagtggtgaagggccacatcatgttcaacctggacaaggtgcacatcatcctggacgagatggtgctgaacggctgcatcgtggagaccaacagagccagaatcctggcccccctgctgatcctggacaagatgagcgagagctag

SEQ ID NO: 45823 - DNA, 435 bp, Artificial Sequence
  derived and/or modified sequence
atgatcaagttcttcctgatggtgaacaagcagggccagaccagactgagcaagtactacgagcacgtggacatcaacaagagaaccctgctggagaccgaggtgatcaagagctgcctgagcagaagcaacgagcagtgcagcttcatcgagtacaaggacttcaagctgatctacagacagtacgccgccctgttcatcgtggtgggcgtgaacgacaccgagaacgagatggccatctacgagttcatccacaacttcgtggaggtgctggacgagtacttcagcagagtgagcgagctggacatcatgttcaacctggacaaggtgcacatcatcctggacgagatggtgctgaacggctgcatcgtggagaccaacagagccagaatcctggcccccctgctgatcctggacaagatgagcgagagctag

SEQ ID NO: 45824 - DNA, 402 bp, Artificial Sequence
  derived and/or modified sequence
atgatcaagttcttcctgatggtgaacaagcagggccagaccagactgagcaagtactacgagcacgtggacatcaacaagagaaccctgctggagaccgaggtgatcaagagctgcctgagcagaagcaacgagcagtgcagcttcatcgagtacaaggacttcaagctgatctacagacagtacgccgccctgttcatcgtggtgggcgtgaacgacaccgagaacgagatggccatctacgagttcatccacaacttcgtggaggtgctggacgagtacttcagcagagtgagcgagctggacatcatgttcaacctggacaaggtgcacatcatcctggacgagatggtgctgaacggctgcatcgtggagaccaacagagccagaatcctggcctag

SEQ ID NO: 45825 - protein, 553 aa, Artificial Sequence
  derived and/or modified sequence
MAASKKAVLGPLVGAVDQGTSSTRFLVFNSKTAELLSHHQVEIKQEFPREGWVEQDPKEILHSVYECIEKTCEKLGQLNIDISNIKAIGVSNQRETTVVWDKITGEPLYNAVVWLDLRTQSTVESLSKRIPGNNNFVKSKTGLPLSTYFSAVKLRWLLDNVRKVQKAVEEKRALFGTIDSWLIWSLTGGVNGGVHCTDVTNASRTMLFNIHSLEWDKQLCEFFGIPMEILPNVRSSSEIYGLMKAGALEGVPISGCLGDQSAALVGQMCFQIGQAKNTYGTGCFLLCNTGHKCVFSDHGLLTTVAYKLGRDKPVYYALEGSVAIAGAVIRWLRDNLGIIKTSEEIEKLAKEVGTSYGCYFVPAFSGLYAPYWEPSARGIICGLTQFTNKCHIAFAALEAVCFQTREILDAMNRDCGIPLSHLQVDGGMTSNKILMQLQADILYIPVVKPSMPETTALGAAMAAGAAEGVGVWSLEPEDLSAVTMERFEPQINAEESEIRYSTWKKAVMKSMGWVTTQSPESGDPSIFCSLPLGFFIVSSMVMLIGARYISGIP

SEQ ID NO: 45826 - DNA, 1662 bp, Artificial Sequence
  derived and/or modified sequence
atggcagcttctaaaaaggccgtcctggggccactggtaggcgctgtcgatcaggggactagttccacaaggttcctggtgtttaacagcaagacggcagaactgctgagccatcaccaggtcgagatcaaacaggagtttcccagggaaggctgggtggaacaagatcctaaagaaatcctccatagcgtctatgaatgcattgagaaaacttgcgagaagctcgggcagctaaacattgacatcagcaacattaaagctatcggcgttagcaatcagcgcgagaccacggttgtatgggacaagataacaggcgaacccttgtacaacgcagtcgtatggctggatctgaggacccaatcaaccgtcgagtcactttccaagcgcattccaggaaacaataactttgtgaagagtaagactggcttacccctcagtacatatttctctgcagttaagctacgatggctgttggacaacgtaagaaaagtccagaaggccgtggaggagaagagggcactattcgggaccatcgattcgtggcttatatggagtctcactgggggtgtgaacgggggagtccattgcaccgacgtcacgaatgccagtaggacaatgctatttaacattcattcgcttgagtgggacaaacagctgtgcgagttttttggcatccctatggagatacttccaaatgtccgcagctctagcgagatctatgggctaatgaaggccggcgctctggagggcgttccgatttccgggtgcctgggagatcagagcgcagccttggtcgggcagatgtgctttcagatcgggcaagcaaaaaatacttatggaacaggctgttttttgttgtgtaatacaggccacaaatgcgtcttctcagatcacggacttctgaccactgtcgcttacaagctgggtagagacaaacccgtttactacgctctcgagggctctgtagcaatagcaggtgccgtaatcaggtggctgagggacaaccttggcattattaaaacatccgaagaaatagaaaaactcgctaaggaggtggggacttcctacggatgctacttcgtgcctgcctttagcggactctacgcaccttactgggagcccagcgcacgcggcataatctgtggtttgacgcagttcaccaataagtgccatattgcctttgctgcactggaagccgtctgttttcaaactcgcgagattcttgatgccatgaatcgggactgcggcattcccctctcccacctgcaagttgatggcggaatgacttccaacaagatccttatgcagctgcaggctgacatcctttatatcccagtcgtaaaaccttcaatgccagaaacaactgctctcggtgccgctatggctgccggagccgccgagggagtcggcgtgtggtccctggagcctgaggacctgagcgcagttactatggaaaggttcgagccacagattaacgctgaggagtctgaaattcgttacagtacgtggaaaaaagctgtcatgaagagcatgggttgggtgacaacccagtccccggagtccggagatcccagtattttttgctccctacccttgggcttctttatcgtgagttcgatggtgatgctaataggcgcgcggtacatatctggaattccatag

SEQ ID NO: 45827 - DNA, 3707 bp, Artificial Sequence
  derived and/or modified sequence
gggccggaggggcggggtgagaaggctgcgcgcgggtaaaggggccgcctcgagcgcggtccgagcgttcagcggacgcgcgcggcctcgatctctggactcgtcacctgcccctccccctcccgccgccgtcacccaggaaaccggccgcaatcgccggccgacctgaagctggtttcatggcagcctcaaagaaggcagttttggggccattggtgggggcggtggaccagggcaccagttcgacgcgctttttggttttcaattcaaaaacagctgaactacttagtcatcatcaagtagaaataaaacaagagttcccaagagaaggatgggtggaacaggaccctaaggaaattctacattctgtctatgagtgtatagagaaaacatgtgagaaacttggacagctcaatattgatatttccaacataaaagctattggtgtcagcaaccagagggaaaccactgtagtctgggacaagataactggagagcctctctacaatgctgtggtgtggcttgatctaagaacccagtctaccgttgagagtcttagtaaaagaattccaggaaataataactttgtcaagtccaagacaggccttccacttagcacttacttcagtgcagtgaaacttcgttggctccttgacaatgtgagaaaagttcaaaaggccgttgaagaaaaacgagctctttttgggactattgattcatggcttatttggagtttgacaggaggagtcaatggaggtgtccactgtacagatgtaacaaatgcaagtaggactatgcttttcaacattcattctttggaatgggataaacaactctgcgaattttttggaattccaatggaaattcttccaaatgtccggagttcttctgagatctatggcctaatgaaagctggggccttggaaggtgtgccaatatctgggtgtttaggggaccagtctgctgcattggtgggacaaatgtgcttccagattggacaagccaaaaatacgtatggaacaggatgtttcttactatgtaatacaggccataagtgtgtattttctgatcatggccttctcaccacagtggcttacaaacttggcagagacaaaccagtatattatgctttggaaggttctgtagctatagctggtgctgttattcgctggctaagagacaatcttggaattataaagacctcagaagaaattgaaaaacttgctaaagaagtaggtacttcttatggctgctacttcgtcccagcattttcggggttatatgcaccttattgggagcccagcgcaagagggataatctgtggactcactcagttcaccaataaatgccatattgcttttgctgcattagaagctgtttgtttccaaactcgagagattttggatgccatgaatcgagactgtggaattccactcagtcatttgcaggtagatggaggaatgaccagcaacaaaattcttatgcagctacaagcagacattctgtatataccagtagtgaagccctcaatgcccgaaaccactgcactgggtgcggctatggcggcaggggctgcagaaggagtcggcgtatggagtctcgaacccgaggatttgtctgccgtcacgatggagcggtttgaacctcagattaatgcggaggaaagtgaaattcgttattctacatggaagaaagctgtgatgaagtcaatgggttgggttacaactcaatctccagaaagtggtgaccctagtatcttctgtagtctgcccttgggcttttttatagtgagtagcatggtaatgttaatcggagcaaggtacatctcaggtattccataaaacctaccaactcatggattcccaagatgtgagctttttacataatgaaagaacccagcaattctgtctcttaatgcaatgacactattcatagactttgattttatttataagccacttgctgcatgaccctccaagtagacctgtggcttaaaataaagaaaatgcagcaaaaagaatgctatagaaatatttggtggttttttttttttttaaacatccacagttaaggttgggccagctacctttggggctgaccccctccattgccataacatcctgctccattccctctaagatgtaggaagaattcggatccttaccattggaatcttccatcgaacatactcaaacacttttggaccaggatttgagtctctgcatgacatatacttgattaaaaggttattactaacctgttaaaaatcagcagctctttgcttttaacagacaccctaaaagtcttcttttctacatagttgaagacagcaacatcttcactgaatgtttgaatagaaacctctactaaattattaaaatagacatttagtgttctcacagcttggatatttttctgaaaagttatttgccaaaactgaaatccttcagatgttttccatggtcccactaattataatgactttctgtctggatcttataggaaaagatactttcttttttcttccatctttcctttttatattttttactttgtatgtataacatacatgcctatatattttatacactgagggtagcccatttataaattaagagcacattatattcagaaggttctaacagggctggtcttaagtgaaccactgtgtatataaatatgttggaaaacagctgtatacatttttgggcaacggttatgcataatatttaccaggagaatttttttcttaacaagccaacatttaaaatttatgttttatgtcaataaaagaaaatatactttattgtgacttcaactatatttcttatcccttacatttttatttaattgtcttagcttaaaaaaagaagaaactgtggaatactacagtaaatattgttttcaaacacaagcaataattcaaatagttatttttcttttgaattaattttagacatattttggatcctattgaggggataagaggatgtcaaaaaagttaaatacctaagtagaaaaaaatatagaaataaagccaagaatctctttcagttcaaatgttatcaattgttaataagaaattgctatctgggatgacagaattacctctgcttagtatctcattataactgaaagaaggtttatcattacaaataccttccaatgaaaccaagaatttctcaaaatatttaatgtcacatattataagaagttacctaatcctgcttcttaacatcaatttttaaaaatatcttaaaattactttgttttgtagtaaacagtgaagaaaagattgcctcctaattatttttttcaatgagtgctgaatgggaaaacatttatatcttactataaaaggttctgttttgtttggaatcaatggtagctttattgactgttctgattgtgctgtttctaatttattgaatctgctaggttttattgatgcagccaccacttaagtgacataaatattatagaaaggtactgtgaaatgatcactttgtggcaggggtacttttaaacataaatgtttctacaaaagtaggttgagttcattgtaaataattgtgaaagccactgttcaaataattttaagattacattaatttttctataaattggaagatttataaatgtttgaaattgtacacattgatatttaatgacaaatttacttaaaataaattgaccccttgttctta

SEQ ID NO: 45828 - DNA, 1662 bp, Artificial Sequence
  derived and/or modified sequence
atggccgccagcaagaaggctgtgctgggccccctggtgggcgctgtggaccagggcaccagcagcacccgcttcctggtgttcaacagcaagacagctgagctgctgagccaccaccaggtggagatcaagcaggagttcccccgggagggctgggtggagcaggaccccaaggagatcctgcacagcgtgtatgagtgcatcgagaagacctgtgagaagctgggccagctgaacatcgacatcagcaacatcaaggccatcggcgtgagcaaccagcgggagaccaccgtggtgtgggacaagatcaccggggagcccctgtacaatgctgtggtgtggctggacctgcggacccagagcacagtggagagcctgagcaagagaattcctggcaacaacaactttgtgaagagcaagacaggcctgcccctgagcacctacttctctgctgtgaagctgcgctggctgctggacaacgtgaggaaggtgcagaaggctgtggaggagaagagggccctgtttggcaccatcgacagctggctgatctggagcctgactggaggagtgaatggaggagtgcactgcacagatgtgaccaatgccagcaggaccatgctgttcaacatccacagcctggagtgggacaagcagctgtgtgagttcttcggcatccccatggagatcctgcccaacgtgcgcagcagcagcgagatctacggcctgatgaaggccggggccctggagggcgtgcccatcagcggctgcctgggggaccagagcgctgccctggtgggccagatgtgcttccagatcggccaggccaagaacacctatggaacaggctgcttcctgctgtgcaacacaggccacaagtgtgtgttcagtgaccacggcctgctgaccaccgtggcctacaagctgggccgggacaagcctgtgtactatgccctggagggctctgtggccatcgccggggctgtgatccgctggctgcgggacaacctgggcatcatcaagaccagcgaggagattgagaagctggccaaggaggtgggcaccagctatggctgctactttgtgcctgccttcagcggcctgtatgccccctactgggagcccagcgcccggggcatcatctgtggcctgacccagttcaccaacaagtgccacatcgcctttgctgccctggaggccgtgtgcttccagacccgggagatcctggatgccatgaacagagactgtggcatccccctgagccacctgcaggtggatggcggcatgaccagcaacaagatcctgatgcagctgcaggccgacatcctgtacatccctgtggtgaagcccagcatgcctgagaccacagccctgggcgccgccatggctgctggagctgctgagggcgtgggcgtgtggagcctggagcctgaggacctgtctgctgtgaccatggagagatttgagccccagatcaatgctgaggagagcgagatccgctacagcacctggaagaaggctgtgatgaagtccatgggctgggtgaccacccagagccctgagagcggggaccccagcatcttctgcagcctgcccctgggcttcttcatcgtgtcctccatggtgatgctgattggagcccgctacatcagcggcatcccctag

SEQ ID NO: 45829 - DNA, 1662 bp, Artificial Sequence
  derived and/or modified sequence
atggccgccagcaagaaggccgtgctgggccccctggtgggcgccgtcgaccaggggacaagtagcacaagatttttagtttttaattccaaaactgcagaactgctgtcccatcaccaagtggagattaagcaggagtttcctcgtgaaggctgggtggagcaagaccccaaggaaatactgcatagcgtgtacgagtgtattgagaaaacctgcgagaaactggggcagctgaatattgatatttccaacatcaaggcaataggagtgtccaatcagcgggaaacaacagttgtctgggacaaaattactggcgaaccgctatataatgcagtggtctggcttgacctaaggactcagtccacagtggagagcctatcaaagcgaatcccaggcaacaataactttgtgaaatccaaaactggtttgcctctttcaacatacttctcagcagtgaaactgcgatggctgctggataatgtacgtaaagtgcagaaagctgtcgaagagaaacgggcgctttttgggacaattgactcatggttaatctggagcctcaccggcggcgtcaacggaggcgtgcactgtactgacgtcactaacgctagtcgtactatgctgttcaacatccacagtctggaatgggataagcaactatgcgagttttttggcatccccatggagatccttccaaatgtgcgaagctcctccgaaatatatggattaatgaaagctggggccctagaaggcgtgccaatcagcggctgcttaggggaccagagcgccgcactggtgggccagatgtgcttccagatcggacaagctaaaaatacatatggaaccggctgtttcctgttgtgtaacaccggccataaatgtgttttttccgaccatggcttgttaacaaccgtggcttacaagctcgggcgggacaagccagtctactacgcgctcgagggcagtgtggctatcgcaggtgccgtgatcagatggctgcgcgacaacctcggcatcatcaaaacaagcgaagagatagaaaagctggcaaaagaggtgggcacatcttatggctgctactttgtaccagcttttagtggcctttacgctccctactgggaaccctcagctcgcggcattatttgcggccttactcaatttactaataagtgtcacattgccttcgccgcactggaagcggtgtgcttccagactagggagattcttgatgccatgaatcgcgattgtggaattccactgagtcacctgcaggtggatgggggcatgaccagtaataaaatcctgatgcagctccaggctgacatactgtacattccagtagttaaaccatccatgcctgagactaccgctttgggtgcagccatggctgccggcgcagccgagggagtcggagtatggtccctggagccagaggacctaagtgcagttaccatggagcgttttgaaccgcaaatcaacgcagaggagtccgaaattcgatacagcacctggaagaaggccgtcatgaagtctatgggctgggtgactactcagtcccctgaaagcggagacccttccatattctgtagtctccccctcgggttcttcattgtctccagcatggtcatgttgatcggcgcaagatacatctcggggatcccctag

SEQ ID NO: 45830 - DNA, 1662 bp, Artificial Sequence
  derived and/or modified sequence
atggccgcatctaagaaggctgtgctgggcccactcgttggggctgtggaccaaggaacctcctccacgcggttcctggtgttcaactcaaagaccgccgaattgctctcacatcatcaggtggagataaagcaggaattcccacgggagggatgggtggaacaggaccctaaagaaatcctacacagcgtgtacgagtgcatcgagaaaacatgcgaaaaacttgggcagttaaatatcgacatctccaacatcaaagcgatcggggtctctaaccagcgagaaaccaccgtggtttgggacaaaatcactggagagcccttatacaacgccgtcgtttggctggatctcagaacccagtcaaccgtggagtcactgtctaagaggatcccgggaaataataactttgtaaagagcaaaacgggccttccccttagcacttatttctcggcggtaaaattgcgctggctcctggacaatgtgcgtaaagtgcaaaaggccgtggaagagaaaagagccctatttggcacgatcgatagttggttgatctggagcctgactggtggagtcaacggcggagtgcactgcactgatgtaacaaacgcgtctcggacgatgctgttcaatattcattctctggagtgggacaaacagctgtgtgaattcttcggcattcctatggagattctccctaacgtcaggtccagttcagaaatctatgggctgatgaaggctggcgctctggagggcgttcctattagtggatgcctgggggatcagagtgcggcactagttggccagatgtgctttcagatcggccaagccaaaaacacctacgggacgggctgcttcctgctgtgtaacacgggacataagtgtgtgttcagcgaccacggcctactaacaaccgtggcttataaacttggcagggataagccagtctactacgctttagagggatcagtcgctattgccggagccgtgatcagatggctgcgcgacaatctgggcatcataaaaacatctgaagagatcgagaagctggcaaaagaagtcgggaccagttatggctgctacttcgtgcctgcgttcagcggtctgtacgccccatattgggaaccttcagccagaggtatcatctgcggactgacccagttcaccaataagtgccatatcgcttttgccgcattggaggctgtctgtttccaaacacgagaaatcttggacgccatgaatcgggactgtggcattcccctgagccacctgcaggtggacggcggtatgacttccaacaaaatactgatgcagctgcaggccgacattctgtacattccggttgtgaaaccaagcatgcccgaaacaacagcgttaggtgctgccatggctgctggggcagcagaaggagtcggtgtatggagtctggaacccgaggacctgtccgcggtgactatggaaagatttgagccacagattaatgctgaggaatcagagataagatatagcacttggaagaaggctgtgatgaagagcatgggctgggtaaccacccagtctcccgaaagcggtgatccttctatcttctgcagtttgccactgggattcttcattgtctcttctatggtgatgctcataggtgcacgttacatcagtggtatcccttag

SEQ ID NO: 45831 - DNA, 1662 bp, Artificial Sequence
  derived and/or modified sequence
atggccgccagcaagaaggccgtgctgggccccctggtgggcgccgtggaccagggcaccagcagcaccagattcctggtgttcaacagcaagaccgccgagctgctgagccaccaccaggtggagatcaagcaggagttccccagagagggctgggtggagcaggaccccaaggagatcctgcacagcgtgtacgagtgcatcgagaagacctgcgagaagctgggccagctgaacatcgacatcagcaacatcaaggccatcggcgtgagcaaccagagagagaccaccgtggtgtgggacaagatcaccggcgagcccctgtacaacgccgtggtgtggctggacctgagaacccagagcaccgtggagagcctgagcaagagaatccccggcaacaacaacttcgtgaagagcaagaccggcctgcccctgagcacctacttcagcgccgtgaagctgagatggctgctggacaacgtgagaaaggtgcagaaggccgtggaggagaagagagccctgttcggcaccatcgacagctggctgatctggagcctgaccggcggcgtgaacggcggcgtgcactgcaccgacgtgaccaacgccagcagaaccatgctgttcaacatccacagcctggagtgggacaagcagctgtgcgagttcttcggcatccccatggagatcctgcccaacgtgagaagcagcagcgagatctacggcctgatgaaggccggcgccctggagggcgtgcccatcagcggctgcctgggcgaccagagcgccgccctggtgggccagatgtgcttccagatcggccaggccaagaacacctacggcaccggctgcttcctgctgtgcaacaccggccacaagtgcgtgttcagcgaccacggcctgctgaccaccgtggcctacaagctgggcagagacaagcccgtgtactacgccctggagggcagcgtggccatcgccggcgccgtgatcagatggctgagagacaacctgggcatcatcaagaccagcgaggagatcgagaagctggccaaggaggtgggcaccagctacggctgctacttcgtgcccgccttcagcggcctgtacgccccctactgggagcccagcgccagaggcatcatctgcggcctgacccagttcaccaacaagtgccacatcgccttcgccgccctggaggccgtgtgcttccagaccagagagatcctggacgccatgaacagagactgcggcatccccctgagccacctgcaggtggacggcggcatgaccagcaacaagatcctgatgcagctgcaggccgacatcctgtacatccccgtggtgaagcccagcatgcccgagaccaccgccctgggcgccgccatggccgccggcgccgccgagggcgtgggcgtgtggagcctggagcccgaggacctgagcgccgtgaccatggagagattcgagccccagatcaacgccgaggagagcgagatcagatacagcacctggaagaaggccgtgatgaagagcatgggctgggtgaccacccagagccccgagagcggcgaccccagcatcttctgcagcctgcccctgggcttcttcatcgtgagcagcatggtgatgctgatcggcgccagatacatcagcggcatcccctag

SEQ ID NO: 45832 - protein, 1108 aa, Artificial Sequence
  derived and/or modified sequence
MKVTNYNTVVETNSDSDDEDKLHIVEEESVTDAADCEGVPEDDLPTDQTVLPGRSSEREGNAKNCWEDDTGKEGQEILGPEAQADEAGCTVKDDECESDAENEQNHDPNVEEFLQQQDTAVIFPEAPEEDQRQGTPEASGHDENGTPDAFSQLLTCPYCDRGYKRFTSLKEHIKYRHEKNEDNFSCSLCSYTFAYRTQLERHMTSHKSGRDQRHVTQSGCNRKFKCTECGKAFKYKHHLKEHLRIHSGEKPYECPNCKKRFSHSGSYSSHISSKKCISLIPVNGRPRTGLKTSQCSSPSLSASPGSPTRPQIRQKIENKPLQEQLSVNQIKTEPVDYEFKPIVVASGINCSTPLQNGVFTGGGPLQATSSPQGMVQAVVLPTVGLVSPISINLSDIQNVLKVAVDGNVIRQVLENNQANLASKEQETINASPIQQGGHSVISAISLPLVDQDGTTKIIINYSLEQPSQLQVVPQNLKKENPVATNSCKSEKLPEDLTVKSEKDKSFEGGVNDSTCLLCDDCPGDINALPELKHYDLKQPTQPPPLPAAEAEKPESSVSSATGDGNLSPSQPPLKNLLSLLKAYYALNAQPSAEELSKIADSVNLPLDVVKKWFEKMQAGQISVQSSEPSSPEPGKVNIPAKNNDQPQSANANEPQDSTVNLQSPLKMTNSPVLPVGSTTNGSRSSTPSPSPLNLSSSRNTQGYLYTAEGAQEEPQVEPLDLSLPKQQGELLERSTITSVYQNSVYSVQEEPLNLSCAKKEPQKDSCVTDSEPVVNVIPPSANPINIAIPTVTAQLPTIVAIADQNSVPCLRALAANKQTILIPQVAYTYSTTVSPAVQEPPLKVIQPNGNQDERQDTSSEGVSNVEDQNDSDSTPPKKKMRKTENGMYACDLCDKIFQKSSSLLRHKYEHTGKRPHECGICKKAFKHKHHLIEHMRLHSGEKPYQCDKCGKRFSHSGSYSQHMNHRYSYCKREAEERDSTEQEEAGPEILSNEHVGARASPSQGDSDERESLTREEDEDSEKEEEEEDKEMEELQEEKECEKPQGDEEEEEEEEEVEEEEVEEAENEGEEAKTEGLMKDDRAESQASSLGQKVGESSEQVSEEKTNEA

SEQ ID NO: 45833 - protein, 643 aa, Artificial Sequence
  derived and/or modified sequence
MADGPRCKRRKQANPRRNNGTPDAFSQLLTCPYCDRGYKRFTSLKEHIKYRHEKNEDNFSCSLCSYTFAYRTQLERHMTSHKSGRDQRHVTQSGCNRKFKCTECGKAFKYKHHLKEHLRIHSGEKPYECPNCKKRFSHSGSYSSHISSKKCISLIPVNGRPRTGLKTSQCSSPSLSASPGSPTRPQIRQKIENKPLQEQLSVNQIKTEPVDYEFKPIVVASGINCSTPLQNGVFTGGGPLQATSSPQGMVQAVVLPTVGLVSPISINLSDIQNVLKVAVDGNVIRQVLENNQANLASKEQETINASPIQQGGHSVISAISLPLVDQDGTTKIIINYSLEQPSQLQVVPQNLKKENPVATNSCKSEKLPEDLTVKSEKDKSFEGGVNDSTCLLCDDCPGDINALPELKHYDLKQPTQPPPLPAAEAEKPESSVSSATGDGNLSPSQPPLKNLLSLLKAYYALNAQPSAEELSKIADSVNLPLDVVKKWFEKMQAGQISVQSSEPSSPEPGKVNIPAKNNDQPQSANANEPQDSTVNLQSPLKMTNSPVLPVGSTTNGSRSSTPSPSPLNLSSSRNTQGYLYTAEGAQEEPQVEPLDLSLPKQQGEEAKTEGLMKDDRAESQASSLGQKVGESSEQVSEEKTNEA

SEQ ID NO: 45834 - protein, 277 aa, Artificial Sequence
  derived and/or modified sequence
MKVTNYNTVVETNSDSDDEDKLHIVEEESVTDAADCEGVPEDDLPTDQTVLPGRSSEREGNAKNCWEDDTGKEGQEILGPEAQADEAGCTVKDDECESDAENEQNHDPNVEEFLQQQDTAVIFPEAPEEDQRQGTPEASGHDENGTPDAFSQLLTCPYCDRGYKRFTSLKEHIKYRHEKNEDNFSCSLCSYTFAYRTQLERHMTSHKSGRDQRHVTQSGCNRKFKCTECGKAFKYKHHLKEHLRIHSGEKPYECPNCKKRFSHSGSYSSHISSKKCI

SEQ ID NO: 45835 - DNA, 3327 bp, Artificial Sequence
  derived and/or modified sequence
atgaaggtgaccaactacaacaccgtggtggagaccaacagcgacagcgacgacgaggacaagctgcacatcgtggaggaggagagcgtgaccgacgccgccgactgcgagggcgtgcccgaggacgacctgcccaccgaccagaccgtgctgcccggcagaagcagcgagagagagggcaacgccaagaactgctgggaggacgacaccggcaaggagggccaggagatcctgggccccgaggcccaggccgacgaggccggctgcaccgtgaaggacgacgagtgcgagagcgacgccgagaacgagcagaaccacgaccccaacgtggaggagttcctgcagcagcaggacaccgccgtgatcttccccgaggcccccgaggaggaccagagacagggcacccccgaggccagcggccacgacgagaacggcacccccgacgccttcagccagctgctgacctgcccctactgcgacagaggctacaagagattcaccagcctgaaggagcacatcaagtacagacacgagaagaacgaggacaacttcagctgcagcctgtgcagctacaccttcgcctacagaacccagctggagagacacatgaccagccacaagagcggcagagaccagagacacgtgacccagagcggctgcaacagaaagttcaagtgcaccgagtgcggcaaggccttcaagtacaagcaccacctgaaggagcacctgagaatccacagcggcgagaagccctacgagtgccccaactgcaagaagagattcagccacagcggcagctacagcagccacatcagcagcaagaagtgcatcagcctgatccccgtgaacggcagacccagaaccggcctgaagaccagccagtgcagcagccccagcctgagcgccagccccggcagccccaccagaccccagatcagacagaagatcgagaacaagcccctgcaggagcagctgagcgtgaaccagatcaagaccgagcccgtggactacgagttcaagcccatcgtggtggccagcggcatcaactgcagcacccccctgcagaacggcgtgttcaccggcggcggccccctgcaggccaccagcagcccccagggcatggtgcaggccgtggtgctgcccaccgtgggcctggtgagccccatcagcatcaacctgagcgacatccagaacgtgctgaaggtggccgtggacggcaacgtgatcagacaggtgctggagaacaaccaggccaacctggccagcaaggagcaggagaccatcaacgccagccccatccagcagggcggccacagcgtgatcagcgccatcagcctgcccctggtggaccaggacggcaccaccaagatcatcatcaactacagcctggagcagcccagccagctgcaggtggtgccccagaacctgaagaaggagaaccccgtggccaccaacagctgcaagagcgagaagctgcccgaggacctgaccgtgaagagcgagaaggacaagagcttcgagggcggcgtgaacgacagcacctgcctgctgtgcgacgactgccccggcgacatcaacgccctgcccgagctgaagcactacgacctgaagcagcccacccagcccccccccctgcccgccgccgaggccgagaagcccgagagcagcgtgagcagcgccaccggcgacggcaacctgagccccagccagccccccctgaagaacctgctgagcctgctgaaggcctactacgccctgaacgcccagcccagcgccgaggagctgagcaagatcgccgacagcgtgaacctgcccctggacgtggtgaagaagtggttcgagaagatgcaggccggccagatcagcgtgcagagcagcgagcccagcagccccgagcccggcaaggtgaacatccccgccaagaacaacgaccagccccagagcgccaacgccaacgagccccaggacagcaccgtgaacctgcagagccccctgaagatgaccaacagccccgtgctgcccgtgggcagcaccaccaacggcagcagaagcagcacccccagccccagccccctgaacctgagcagcagcagaaacacccagggctacctgtacaccgccgagggcgcccaggaggagccccaggtggagcccctggacctgagcctgcccaagcagcagggcgagctgctggagagaagcaccatcaccagcgtgtaccagaacagcgtgtacagcgtgcaggaggagcccctgaacctgagctgcgccaagaaggagccccagaaggacagctgcgtgaccgacagcgagcccgtggtgaacgtgatcccccccagcgccaaccccatcaacatcgccatccccaccgtgaccgcccagctgcccaccatcgtggccatcgccgaccagaacagcgtgccctgcctgagagccctggccgccaacaagcagaccatcctgatcccccaggtggcctacacctacagcaccaccgtgagccccgccgtgcaggagccccccctgaaggtgatccagcccaacggcaaccaggacgagagacaggacaccagcagcgagggcgtgagcaacgtggaggaccagaacgacagcgacagcaccccccccaagaagaagatgagaaagaccgagaacggcatgtacgcctgcgacctgtgcgacaagatcttccagaagagcagcagcctgctgagacacaagtacgagcacaccggcaagagaccccacgagtgcggcatctgcaagaaggccttcaagcacaagcaccacctgatcgagcacatgagactgcacagcggcgagaagccctaccagtgcgacaagtgcggcaagagattcagccacagcggcagctacagccagcacatgaaccacagatacagctactgcaagagagaggccgaggagagagacagcaccgagcaggaggaggccggccccgagatcctgagcaacgagcacgtgggcgccagagccagccccagccagggcgacagcgacgagagagagagcctgaccagagaggaggacgaggacagcgagaaggaggaggaggaggaggacaaggagatggaggagctgcaggaggagaaggagtgcgagaagccccagggcgacgaggaggaggaggaggaggaggaggaggtggaggaggaggaggtggaggaggccgagaacgagggcgaggaggccaagaccgagggcctgatgaaggacgacagagccgagagccaggccagcagcctgggccagaaggtgggcgagagcagcgagcaggtgagcgaggagaagaccaacgaggcctag

SEQ ID NO: 45836 - DNA, 834 bp, Artificial Sequence
  derived and/or modified sequence
atgaaggtgaccaactacaacaccgtggtggagaccaacagcgacagcgacgacgaggacaagctgcacatcgtggaggaggagagcgtgaccgacgccgccgactgcgagggcgtgcccgaggacgacctgcccaccgaccagaccgtgctgcccggcagaagcagcgagagagagggcaacgccaagaactgctgggaggacgacaccggcaaggagggccaggagatcctgggccccgaggcccaggccgacgaggccggctgcaccgtgaaggacgacgagtgcgagagcgacgccgagaacgagcagaaccacgaccccaacgtggaggagttcctgcagcagcaggacaccgccgtgatcttccccgaggcccccgaggaggaccagagacagggcacccccgaggccagcggccacgacgagaacggcacccccgacgccttcagccagctgctgacctgcccctactgcgacagaggctacaagagattcaccagcctgaaggagcacatcaagtacagacacgagaagaacgaggacaacttcagctgcagcctgtgcagctacaccttcgcctacagaacccagctggagagacacatgaccagccacaagagcggcagagaccagagacacgtgacccagagcggctgcaacagaaagttcaagtgcaccgagtgcggcaaggccttcaagtacaagcaccacctgaaggagcacctgagaatccacagcggcgagaagccctacgagtgccccaactgcaagaagagattcagccacagcggcagctacagcagccacatcagcagcaagaagtgcatctag

SEQ ID NO: 45837 - DNA, 3327 bp, Artificial Sequence
  derived and/or modified sequence
atgaaggtgaccaactacaataccgtggtggagacaaacagtgactccgatgatgaagacaaactgcacatagtggaggaagaatctgtgacagatgcagccgattgcgaaggcgtccccgaagacgacctgcccacagaccagaccgtcctgcctggccgatcttccgaaagagaaggcaacgcgaaaaattgctgggaagacgatactgggaaagaagggcaggagatcctcgggcctgaggcgcaggccgacgaggcgggctgtactgtgaaggatgatgagtgcgagagcgatgccgagaatgaacaaaatcatgatcccaatgtagaggaatttcttcaacagcaagataccgctgtcattttccccgaagctccggaagaggatcagagacaaggtacaccggaggcctcaggacacgacgagaatggcacccccgacgccttctctcagctgctgacttgtccttattgcgaccggggttacaagcgtttcacttccctgaaagagcacattaaatatagacacgagaagaacgaagacaacttttcatgcagtctgtgcagttatacatttgcctaccgtacccagcttgagagacacatgaccagccataaaagtggcagagaccaaagacatgtaacccagtctggctgtaaccggaagttcaagtgcacggagtgcggcaaggcttttaaatataagcatcacctgaaagagcatctgagaattcattccggggaaaagccctatgagtgtccaaattgcaagaaacgcttctcacatagtgggtcatattccagtcacattagctccaagaagtgtattagccttattccagtgaacggcagaccacgcacaggcttgaagaccagtcagtgctccagtcccagcctcagtgctagccccggctctcccacacgcccccagattaggcaaaaaatcgaaaacaagcctctacaggaacaactctccgtgaaccagatcaagacggaaccagtagactacgaattcaagcccatagtcgttgcttctggaattaactgcagcaccccactccagaacggtgtcttcacaggcgggggacccctccaggcgacttcatcgccacaaggtatggtccaggccgttgtgctgcctacagtggggctggtctctccgatttcaatcaacctcagtgacatccagaatgtcctgaaggtggccgttgacggaaatgtcattagacaagtgttagaaaataatcaggccaacttagcttctaaagaacaggaaactatcaacgcaagcccgattcagcaagggggacactccgtgatctctgctatctcattaccactagtggaccaggatgggactacaaagattattatcaactatagtttagaacagccaagccagctgcaggtggtcccccagaacctgaaaaaggaaaatcctgtcgcaaccaactcttgtaagagcgagaaattgcctgaggatttgaccgtgaagagcgaaaaagataaaagtttcgaggggggtgttaatgactccacgtgtctgctgtgcgatgattgtccaggcgatattaatgctctcccggagttgaagcactatgacttgaaacagcccacccagcctccccccctccctgctgctgaagctgaaaagccagagtccagtgtctcaagcgcgactggcgacgggaatctctctccgtcccagcctccgctgaagaacttgttgagcttgctaaaggcttattatgcactcaacgcccagcctagtgccgaagagctgagcaagattgccgactctgtgaacctccctctggatgttgtcaaaaaatggtttgaaaaaatgcaagctggccaaatttccgtacaaagttctgaaccttcttccccggaacctgggaaagttaacattcctgctaaaaataacgatcagccacaatcagctaatgcgaacgaaccgcaggattccactgtgaacttacagagcccccttaagatgacaaactcacctgtcctgccagtcggctccaccacaaatggctcccggtcttccacgccctcaccttcaccacttaatctctcttctagccgtaacactcagggttatctctacaccgcagagggcgcgcaggaggagcctcaggtcgagccactcgacctaagcctgccaaagcagcagggcgagttgcttgaaagatctacaattacaagtgtataccagaatagcgtatatagcgttcaggaggaaccgctcaatctttcatgcgctaaaaaagaacctcagaaggattcttgtgtaactgattcggagccagtggtcaacgtcatccctcctagcgccaaccctattaacatcgccattccaactgtgactgcccaactccccactatcgtggctattgcagaccagaacagcgtgccatgtttgagggccctggccgccaataaacagactattctgatcccccaggtggcctatacttactcaacaactgtcagtcccgccgttcaggagcctcctctgaaggtgatccagcctaacggcaaccaggatgaacggcaggacaccagttcagagggcgtgtcaaatgtggaagatcagaacgacagcgacagcacgcctcccaagaagaaaatgcggaaaaccgaaaacggcatgtacgcctgcgatctgtgcgacaaaatttttcagaagtctagttctttgctacggcacaaatacgaacataccggtaaacggcctcacgagtgcggtatttgtaagaaggcttttaagcacaagcatcacctaatcgagcacatgcgtttgcacagtggggagaaaccatatcagtgcgataagtgtggcaaacggttttcgcactccggctcctactcccaacatatgaaccatcgctattcgtattgtaagcgggaggccgaggaacgtgattccacagagcaggaagaagccggacccgagattctgtcgaacgagcacgtgggcgcccgagcctcgccctcacagggtgattcggatgagagggagtctttgacccgagaggaggacgaggactctgagaaggaagaggaagaggaagataaggagatggaagagttgcaggaggagaaggagtgtgagaagcctcaaggggacgaggaggaggaggaggaagaagaagaagtggaagaggaggaggtggaagaagcagagaacgagggcgaggaagccaagaccgagggactcatgaaagatgacagggcggagtctcaggccagctccctgggtcagaaagtgggggagagtagcgagcaagtttctgaggagaaaaccaatgaagcttag

SEQ ID NO: 45838 - DNA, 834 bp, Artificial Sequence
  derived and/or modified sequence
atgaaggtcactaactacaacaccgtggtggagacaaatagtgattccgacgacgaggataagttacatatcgtcgaagaggaaagtgtgaccgacgcagccgactgtgagggcgtgccagaagatgatctgcccacagaccaaacggttctgccaggtcgaagttccgaacgcgagggcaacgctaaaaactgctgggaagacgatactggtaaggagggacaggagatccttggccccgaggcacaagccgacgaagccggatgtaccgtaaaagatgatgaatgtgaatctgatgccgaaaatgagcagaatcacgaccctaacgtggaggaattcctgcagcagcaggacaccgcagtcatctttcctgaggcacctgaagaggaccagagacaaggtacacctgaggcatcgggccacgatgaaaacggcacgcccgatgctttttcacagctgttgacatgtccctattgtgaccgagggtataagcgcttcacctcactcaaagagcacataaagtacaggcatgagaagaatgaggacaattttagctgctctctctgctcttataccttcgcctataggactcagctggaacggcacatgacatcacacaagtcaggccgcgaccaacgacacgtcactcaatcaggttgcaaccgcaagtttaaatgcacagagtgtgggaaagccttcaaatacaaacaccatcttaaggagcacctgcggattcactctggagagaaaccctatgaatgccccaattgtaagaagcgtttttctcactccggctcatactcctctcatatctcatccaagaagtgtatatag

SEQ ID NO: 45839 - DNA, 3327 bp, Artificial Sequence
  derived and/or modified sequence
atgaaggtgaccaactacaacacagtggtggagaccaacagcgacagtgatgatgaggacaagctgcacatcgtggaggaggagagcgtgacagatgctgctgactgtgagggcgtgcctgaagatgacctgcccacagaccagacagtgctgcccggccgcagcagcgagcgggagggcaatgccaagaactgctgggaggatgacaccgggaaggagggccaggagatcctgggccctgaggcccaggctgatgaagctggctgcaccgtgaaggatgatgaatgtgagagtgatgctgaaaatgagcagaaccacgaccccaacgtggaggagttcctgcagcagcaggacacagctgtgatcttccctgaggcccctgaggaggaccagaggcagggcaccccagaggccagcggccatgatgaaaatggcaccccagatgccttcagccagctgctgacctgcccctactgtgaccggggctacaagcgcttcaccagcctgaaggagcacatcaagtacagacatgagaagaatgaagacaacttcagctgcagcctgtgcagctacacctttgcctaccgcacccagctggagcggcacatgaccagccacaagagcggccgggaccagagacatgtgacccagagcggctgcaacaggaagttcaagtgcacagaatgtgggaaggccttcaagtacaagcaccacctgaaggagcacctgcgcatccacagcggggagaagccctatgaatgtcccaactgcaagaagcgcttcagccacagcggcagctacagcagccacatcagcagcaagaagtgcatcagcctcatccctgtgaatggccggcccaggacaggcctgaagaccagccagtgcagcagccccagcctgagcgccagccctggcagccccacccggccccagatccggcagaagattgagaacaagcccctgcaggagcagctgtctgtgaaccagatcaagacagagcctgtggactatgagttcaagcccatcgtggtggccagcggcatcaactgcagcacccccctgcagaatggagtcttcaccggcggcggccccctgcaggccaccagcagcccccagggcatggtgcaggccgtggtgctgcccaccgtgggcctggtgagccccatcagcatcaacctgagtgacatccagaatgtgctgaaggtggccgtggatggaaatgtcatccggcaggtgctggagaacaaccaggccaacctggccagcaaggagcaggagaccatcaatgccagccccatccagcagggcggccacagcgtcatcagcgccatcagcctgcccctggtggaccaggacggcaccaccaagatcatcatcaactacagcctggagcagcccagccagctgcaggtggtgccccagaacctgaagaaggaaaatcctgtggccaccaacagctgcaagtctgagaagctgcctgaggacctgactgtgaagtctgagaaggacaagagctttgagggcggcgtgaatgacagcacctgcctgctgtgtgatgactgccctggggacatcaatgccctgcctgagctgaagcactatgacctgaagcagcccacccagcccccacccctgcctgctgctgaggccgagaagccagagagctctgtgtcctctgccactggagatggcaacctgagccccagccagccccccctgaagaacctgctgagcctgctgaaggcctactatgccctgaatgcccagcccagcgctgaggagctgagcaagattgctgacagcgtgaacctgcccctggatgtggtgaagaagtggtttgagaagatgcaggccggccagatctctgtgcagagcagcgagcccagcagccctgagcccgggaaggtgaacatcccagccaagaacaatgaccagccccagagcgccaatgccaatgagccccaggacagcacagtgaacctgcagagccccctgaagatgaccaacagccctgtgctgcctgtgggcagcaccaccaacggcagccgcagcagcacccccagccccagccccctgaacctgagcagcagcaggaacacccagggctacctgtacacagctgagggcgcccaggaggagccccaggtggagcccctggacctgagcctgcccaagcagcagggcgagctgctggagaggagcaccatcacctctgtgtaccagaacagcgtgtacagcgtgcaggaggagcccctgaacctgagctgtgccaagaaggagccccagaaggacagctgtgtgacagacagcgagcctgtggtgaatgtcatcccccccagcgccaaccccatcaacatcgccatccccaccgtgacagcccagctgcccaccatcgtggccatcgctgaccagaacagcgtgccctgcctgcgggccctggccgccaacaagcagaccatcctgatcccccaggtggcctacacctacagcaccaccgtgtccccagctgtgcaggagccccccctgaaggtgatccagcccaacggcaaccaggatgagcggcaggacaccagcagcgagggcgtgtccaatgtggaggaccagaatgacagcgacagcaccccacccaagaagaagatgaggaagacagaaaatggcatgtatgcctgtgacctgtgtgacaagatcttccagaagagcagcagcctgctgcggcacaagtatgagcacacaggcaagaggcctcatgaatgtggcatctgcaagaaggccttcaagcacaagcaccacctgattgagcacatgaggctgcacagcggggagaagccctaccagtgtgacaagtgtgggaagcgcttcagccacagcggcagctacagccagcacatgaaccaccgctacagctactgcaagcgggaggccgaggagcgggacagcacagagcaggaggaggccggccctgagatcctgagcaatgagcacgtgggcgcccgggccagccccagccagggcgacagtgatgagcgggagagcctgacccgggaggaggatgaggacagcgagaaggaggaggaggaggaggacaaggagatggaggagctgcaggaggagaaggaatgtgagaagccccagggagatgaggaggaggaggaggaggaggaggaggtggaggaggaggaggtggaggaggctgaaaatgaaggagaggaggccaagacagagggcctgatgaaggatgacagagctgagagccaggccagcagcctgggccagaaggtgggggagagcagcgagcaggtgtctgaggagaagaccaatgaggcctag

SEQ ID NO: 45840 - DNA, 834 bp, Artificial Sequence
  derived and/or modified sequence
atgaaggtgaccaactacaacacagtggtggagaccaacagcgacagtgatgatgaggacaagctgcacatcgtggaggaggagagcgtgacagatgctgctgactgtgagggcgtgcctgaagatgacctgcccacagaccagacagtgctgcccggccgcagcagcgagcgggagggcaatgccaagaactgctgggaggatgacaccgggaaggagggccaggagatcctgggccctgaggcccaggctgatgaagctggctgcaccgtgaaggatgatgaatgtgagagtgatgctgaaaatgagcagaaccacgaccccaacgtggaggagttcctgcagcagcaggacacagctgtgatcttccctgaggcccctgaggaggaccagaggcagggcaccccagaggccagcggccatgatgaaaatggcaccccagatgccttcagccagctgctgacctgcccctactgtgaccggggctacaagcgcttcaccagcctgaaggagcacatcaagtacagacatgagaagaatgaagacaacttcagctgcagcctgtgcagctacacctttgcctaccgcacccagctggagcggcacatgaccagccacaagagcggccgggaccagagacatgtgacccagagcggctgcaacaggaagttcaagtgcacagaatgtgggaaggccttcaagtacaagcaccacctgaaggagcacctgcgcatccacagcggggagaagccctatgaatgtcccaactgcaagaagcgcttcagccacagcggcagctacagcagccacatcagcagcaagaagtgcatctag

SEQ ID NO: 45841 - DNA, 3327 bp, Artificial Sequence
  derived and/or modified sequence
atgaaggtgaccaactacaacaccgtggtggagaccaacagcgacagcgacgacgaagataagcttcatatcgtggaggaggaaagcgtgaccgacgccgcagactgtgaaggtgtgcctgaggatgaccttcctacagaccagaccgttctcccaggtaggtcctccgaaagggagggaaatgccaagaactgttgggaggatgatactggcaaggagggccaggagattttggggcctgaggctcaggccgacgaagccggttgtaccgtgaaggacgacgagtgtgagagcgatgctgagaatgaacaaaatcacgaccccaacgttgaggagttcctccaacaacaggacacagccgtgatatttcccgaggccccggaggaagaccagagacaagggacaccggaagcaagcggccatgacgaaaacgggacaccggacgcatttagtcagttacttacgtgtccatactgcgatcgcggatacaagcgatttacttctctgaaagagcacattaaatataggcacgaaaaaaacgaggataacttctcctgcagcctttgctcatatacattcgcttataggacccagctggaacgacatatgacatcccataagtccgggagggaccagcgtcacgtcacccaaagcggatgtaataggaagttcaagtgcactgagtgcggcaaagcgtttaagtataaacaccatctcaaggagcatctccgcatccatagtggtgagaagccctatgagtgccccaactgtaaaaagaggttctctcatagcggctcctatagttcccatatctcttccaaaaagtgcattagtttaatccccgtcaatggtagaccgcggacaggcctgaagacaagtcaatgcagttcaccttcccttagcgcgtctcccggcagccccacgagaccccagatccgccagaaaatcgagaacaagccactccaggaacagctatccgtgaatcaaataaaaacagaacctgtcgattacgagtttaaacctattgtggttgcctccggaataaattgtagcactcctctgcagaatggagtgtttaccgggggcggccctctccaagctacatcgagcccacagggaatggtgcaggctgtggttctcccaacagttggtctggtctcgccaatatccattaatttgagcgatattcagaatgtgctcaaggtggctgtggatggcaacgtgatacgccaggtactcgaaaacaatcaggctaacctggcctctaaggagcaagagactattaatgctagcccgattcaacagggcgggcactccgttatttccgctatcagcctgcccctggttgatcaggacggcacgacgaagattattatcaattacagtcttgagcaaccaagtcagctgcaggtggtgcctcagaatttgaagaaggagaatccggtagccacaaattcgtgtaaatccgagaaattaccggaggacttgacagttaagagtgaaaaggacaaatctttcgaggggggtgtgaacgacagtacctgcctgctctgtgacgactgccctggtgacataaatgctcttccagagctgaagcactatgacttgaaacaacccactcagcctccaccactcccggcagcggaagcagagaagccggaatcctccgtttcctcagccaccggggatggcaacctgagtccatcccagcccccattgaagaacttactttcgctgctgaaagcatattacgcactaaatgcacaaccatcagccgaagagctgtcaaagatcgctgacagcgtgaatctgcctttggatgtagtgaaaaaatggtttgagaagatgcaggcagggcaaatttcggtccagtctagtgaaccatcttcccccgagcctggtaaagttaatattccagctaaaaacaacgaccagccccagtctgccaatgccaacgagccacaggactcgacagttaacctccaatcccccctgaagatgacgaatagcccggttctgccggtaggaagtacaacaaacggctccaggtcttctacaccctccccttctccgcttaatctttcatcctccagaaacacccaggggtacctgtataccgccgaaggagctcaggaagagccgcaagtggaacctctcgatttaagcctcccaaagcagcagggcgagctcttagagcgcagcaccataaccagcgtttatcaaaactctgtctactccgtccaggaggagccactcaatctgagctgcgctaaaaaagagccacaaaaagacagttgtgtgacggattctgagcccgtggtgaatgtgataccgccttcagccaaccccatcaatatcgccattcctaccgttacggctcagctccccacaattgtcgcaattgccgatcagaactccgtaccctgcttacgcgctctcgcagctaacaaacagaccatcctaatcccccaggtggcgtacacttactccaccaccgtctctccagctgtccaggaaccccccctgaaggtgatccaacccaacgggaaccaggatgaacggcaagacacttctagtgagggggtaagcaatgtggaggaccagaacgatagcgacagcaccccccctaaaaaaaaaatgcgcaagaccgaaaacgggatgtatgcttgcgacctctgcgacaagattttccagaaatcatcttccctgctgaggcacaaatatgagcacaccgggaaaaggccccacgagtgcggcatttgcaaaaaggccttcaaacacaagcaccacctgatagagcacatgcggctgcactccggcgagaagccctaccaatgcgacaagtgcgggaaacgcttctcccattccgggagttatagtcagcatatgaaccatagatacagctactgcaagcgggaggcggaggaacgggacagtactgaacaggaggaggcaggccctgaaatactcagcaatgaacacgttggcgctagagcatctccaagccagggcgactctgacgaacgggaaagcctgactagggaagaggatgaagattcggaaaaagaggaggaggaggaggacaaagagatggaggaattgcaggaggaaaaagagtgcgaaaagccacagggcgatgaggaagaggaggaggaggaagaggaagtggaagaggaagaagtggaggaagcggagaatgagggtgaagaagctaagacagagggtctgatgaaggacgacagggccgaaagccaggcttcatctctcggtcagaaggtcggggagtcctcagagcaggttagtgaggaaaaaacaaacgaggcttag

SEQ ID NO: 45842 - DNA, 834 bp, Artificial Sequence
  derived and/or modified sequence
atgaaggtgaccaactacaacaccgtggtggagaccaacagcgacagtgatgatgaagacaaacttcacattgtggaagaggaatctgttacagacgcggccgattgtgagggtgtccctgaggatgacctgcctaccgaccagacagtccttcctgggcgatcttccgagagagaggggaatgctaaaaactgctgggaggatgacaccgggaaagaaggccaggagattttgggccccgaagcccaggccgacgaagcgggatgcacagttaaggacgatgagtgtgagtctgacgctgaaaacgaacaaaatcatgaccctaacgtggaagaattcctgcagcagcaggacacagctgttatttttcccgaggccccagaagaggaccagaggcagggcacacccgaagcttctgggcacgatgagaatgggacgcctgatgccttttcgcagctcctcacatgcccatactgtgatagggggtataaacgattcacctcacttaaggaacacatcaaatatcggcacgagaagaatgaagataacttttcatgctctctctgttcctataccttcgcctaccgcacacagctagaaaggcatatgacgtctcacaaatcagggcgcgaccaacgccatgtgacacaatctggttgtaaccgcaaatttaagtgcaccgaatgcgggaaagcgttcaagtataaacaccacctgaaggagcatttaagaatccactcgggtgagaaaccttatgagtgccctaactgtaaaaagagattctcgcattctggcagttactcctcccacatcagttctaagaagtgtatctag

SEQ ID NO: 45843 - DNA, 3327 bp, Artificial Sequence
  derived and/or modified sequence
atgaaggtgaccaattacaacactgtcgtggaaactaactcagatagtgacgacgaggacaagcttcacattgtcgaggaggagtctgtaaccgatgcagctgattgcgagggagtacccgaggatgacctcccaaccgaccagactgtccttccaggaagatccagcgagagagaggggaacgcgaagaattgctgggaggacgacacaggcaaggaagggcaggagatcctggggcctgaggcccaagcagacgaggccggttgtactgtgaaagacgacgaatgcgagagtgatgcggagaatgagcagaaccatgatcctaacgtggaggagtttctccagcagcaggacacggctgtcatcttccctgaggcacctgaggaggatcaacgccagggaacgccagaggcatcagggcacgatgaaaacggcactcctgatgcattcagccaactcctgacatgcccctactgtgaccgtgggtacaagcgttttacaagcctgaaggagcacatcaagtacaggcacgagaagaacgaagacaatttctcctgcagcctgtgttcttacacattcgcctacaggacccagttagagcgtcacatgacctcccataagagtggcagagaccagcggcacgtgacgcagagtggttgcaacagaaagttcaagtgcacagagtgtgggaaggctttcaaatataaacaccatctgaaggaacacctgagaatacatagcggcgagaagccttacgaatgtcccaactgcaaaaagcgcttctcccactccggttcttatagctcacacatctctagcaagaagtgcatttccttaattccagtgaacggacggccaagaaccggtctgaagacatcccaatgctctagcccgtcactgagtgcttctcctgggtcgcctactaggccccaaattcggcagaaaatagagaataagccacttcaggaacagctctccgtgaaccagatcaagacagagccagtcgattacgagtttaagccaattgtggtggcctccgggatcaattgctctactcctttgcaaaacggcgtgttcacaggtgggggaccccttcaggcaacctcctcacctcagggcatggtgcaggcagtagtgctccccaccgtggggctggtgtcacctatcagcattaacctgtcggatatccaaaacgtgctaaaggtggccgtggatggcaatgtgattagacaggtgctggagaataatcaggcaaatctcgcttcgaaagagcaggaaactatcaacgccagccccatacagcaggggggacattccgtgatttcagcgatatctctgccgctggtcgaccaggatggaaccacaaaaataatcattaattactccctggagcaaccctcacaattacaggtcgtcccgcagaacctaaagaaagaaaatccagtagccacaaattcttgtaagagcgagaaactaccagaggatctgacagttaaatcagagaaagataagtcatttgaaggaggagtcaacgattctacttgcttactctgcgacgactgccctggggacataaacgcactgcccgaactcaagcattatgacctgaaacagcccacgcaaccacccccactgcccgcagccgaggctgagaagccagaatctagtgtgagcagtgcaacaggggacgggaacctgtccccgtctcagccccctttgaagaaccttctaagtttgctcaaagcatactatgctctcaacgcccagccaagtgccgaagagctctctaagattgccgacagcgtcaacttacctctcgacgtggttaaaaagtggttcgaaaaaatgcaagccggacagatatccgttcagtcttctgagccctcaagtcccgaacccggaaaggtcaacattccagctaagaacaatgaccaaccccagagcgccaatgcaaacgaaccccaggactcgacggttaatttgcaaagtcctctgaaaatgaccaatagtccggtgttgcccgtcgggtccaccaccaacggctctcgctccagcacaccaagccccagcccactgaacctttccagcagcagaaacacacagggctacctatacaccgccgagggggctcaggaggagccacaggtggaaccgctggatctgagcctgcctaaacagcaaggggagctcctagagcggagcaccattaccagcgtgtaccaaaattccgtctacagcgtgcaggaggaaccgctgaacttgagctgcgcaaagaaggagcctcaaaaagatagctgtgtgaccgactccgagcccgtggtaaacgtgatccccccttctgcaaacccaatcaacattgccatcccgaccgtaactgcccagctaccaaccatcgtggctatcgccgaccaaaattcagtaccatgtcttagggcgcttgccgcaaataagcaaaccatcctgataccccaggtagcatacacgtactcgacaacggtatcacctgccgtgcaggagccgcctctgaaggtgattcaaccaaatgggaatcaagacgaacgacaggataccagttccgaaggagtttcaaatgtagaggatcagaacgactctgactccacacccccaaagaaaaagatgagaaagactgagaatggtatgtatgcctgcgatctgtgcgataagatctttcagaagtccagttccctgctgcgccataagtacgagcacacaggcaagaggcctcacgagtgcggcatttgcaaaaaggccttcaagcacaaacaccatcttattgagcacatgcgccttcacagcggggagaaaccctatcagtgcgacaaatgcggaaagcggttttcgcacagtggcagttactcccagcacatgaaccatagatatagctattgcaagagggaggcagaggaacgcgacagtaccgagcaagaggaagccggtcctgaaatcctctccaacgagcatgtgggtgcacgggctagcccaagccagggggactccgatgagcgggagtctttaacgcgcgaagaagacgaggactctgagaaagaggaagaggaggaagacaaagagatggaggaactgcaggaagaaaaagagtgtgaaaagcctcagggcgatgaagaagaggaagaggaggaggaggaggtggaggaggaggaagttgaggaagctgaaaatgagggagaggaggcaaagaccgagggccttatgaaggacgatcgcgctgagtctcaagccagcagtcttggacagaaagtgggcgagagcagcgagcaggtaagtgaagagaagacaaatgaagcctag

SEQ ID NO: 45844 - DNA, 834 bp, Artificial Sequence
  derived and/or modified sequence
atgaaagtcaccaactataatacagtagtggaaactaactctgattcggacgacgaagacaaattgcacattgtagaagaggagagtgttacagacgccgcagactgtgagggcgtgcctgaagacgacctcccaaccgaccagactgtcctaccaggacgcagctccgagagggagggcaatgctaaaaactgttgggaagatgatactggcaaagagggtcaggagattttgggcccagaggcccaggctgacgaagccggttgcactgtaaaagacgacgagtgtgagtccgacgccgagaatgaacaaaatcatgatccaaatgtcgaagaattcttgcagcagcaggacaccgccgtcattttccctgaagccccagaggaggaccagaggcagggcaccccagaagcaagtggtcatgatgagaacgggacacccgacgccttctcccagctgcttacatgcccctactgcgacagggggtataaacgtttcacgtctctgaaggaacatattaaataccggcacgaaaagaacgaagataacttctcctgctccttgtgctcttacaccttcgcgtataggacacaacttgaaagacacatgaccagccacaaaagcggaagggaccagcgacatgtgactcagtccggctgtaatcggaagttcaaatgcaccgagtgtggaaaagcattcaaatataagcatcatcttaaggagcacctccggatccattccggagaaaagccttacgagtgccctaactgtaagaagaggttcagccactccggaagctattcttcccatatctcatccaaaaagtgcatctag

SEQ ID NO: 45845 - DNA, 6246 bp, Artificial Sequence
  derived and/or modified sequence
agacacaagcgagaggatcatggcggatggccccaggtgtaagcgcagaaagcaggcgaacccgcggcgcaataacgttttcagtttaaattctcaactggcaattggccgaaaactcccatctgaagacatgatcatccaaatgtcattttgtgatttggctactgtctgcttgacataggaaagcactatcaagaaagactaatggagtgactatcaaaaggaagtcaatggacaaccttaaacttccaccacaagaggaatataaagaggtccctcctgcaccaagaaagatctgcagatctttttcagtgttcttggaggtgtggggtgtgagaacttgatcagtttgtgtcagccaccttgttctctaaagttacaaattataatactgtggtagaaacaaattcagattcagatgatgaagacaaactgcatattgtggaagaagaaagtgttacagatgcagctgactgtgaaggtgtaccagaggatgacctgccaacagaccagacagtgttaccagggaggagcagtgaaagagaagggaatgctaagaactgctgggaggatgacacaggaaaggaagggcaagaaatcctggggcctgaagctcaggcagatgaagcaggatgtacagtaaaagatgatgaatgcgagtcagatgcagaaaatgagcaaaaccatgatcctaatgttgaagagtttctacaacaacaagacactgctgtcatttttcctgaggcacctgaagaggaccagaggcagggcacaccagaagccagtggtcatgatgaaaatggaacaccagatgcattttcacaattactcacctgtccatattgtgatagaggctataaacgctttacctctctgaaagaacacattaaatatcgtcatgaaaagaatgaagataactttagttgctccctgtgcagttacacctttgcatacagaacccaacttgaacgtcacatgacatcacataaatcaggaagagatcaaagacatgtgacgcagtctgggtgtaatcgtaaattcaaatgcactgagtgtggaaaagctttcaaatacaaacatcacctaaaagagcacttaagaattcacagtggagagaagccatatgaatgcccaaactgcaagaaacgcttttcccattctggctcctatagctcacacataagcagtaagaaatgtatcagcttgatacctgtgaatgggcgaccaagaacaggactcaagacatctcagtgttcttcaccgtctctttcagcatcaccaggcagtcccacacgaccacagatacggcaaaagatagagaataaaccccttcaagaacaactttctgttaaccaaattaaaactgaacctgtggattatgaattcaaacccatagtggttgcttcaggaatcaactgttcaacccctttacaaaatggggttttcactggtggtggcccattacaggcaaccagttctcctcagggcatggtgcaagctgttgttctgccaacagttggtttggtgtctcccataagtatcaatttaagtgatattcagaatgtacttaaagtggcggtagatggtaatgtaataaggcaagtgttggagaataatcaagccaatcttgcatccaaagaacaagaaacaatcaatgcttcacccatacaacaaggtggccattctgttatttcagccatcagtcttcctttggttgatcaagatggaacaaccaaaattatcatcaactacagtcttgagcagcctagccaacttcaagttgttcctcaaaatttaaaaaaagaaaatccagtcgctacaaacagttgtaaaagtgaaaagttaccagaagatcttactgttaagtctgagaaggacaaaagctttgaagggggggtgaatgatagcacttgtcttctgtgtgatgattgtccaggagatattaatgcacttccagaattaaagcactatgacctaaagcagcctactcagcctcctccactccctgcagcagaagctgagaagcctgagtcctctgtttcatcagctactggagatggcaatttgtctcctagtcagccacctttaaagaacctcttgtctctcctaaaagcatattatgctttgaatgcacaaccaagtgcagaagagctctcaaaaattgctgattcagtaaacctaccactggatgtagtaaaaaagtggtttgaaaagatgcaagctggacagatttcagtgcagtcttctgaaccatcttctcctgaaccaggcaaagtaaatatccctgccaagaacaatgatcagcctcaatctgcaaatgcaaatgaaccccaggacagcacagtaaatctacaaagtcctttgaagatgactaactccccagttttaccagtgggatcaaccaccaatggttccagaagtagtacaccatccccatcacctctaaacctttcctcatccagaaatacacagggttacttgtacacagctgagggtgcacaagaagagccacaagtagaacctcttgatctttcactaccaaagcaacagggagaattattagaaaggtcaactatcactagtgtttaccagaacagtgtttattctgtccaggaagaacccttgaacttgtcttgcgcaaaaaaggagccacaaaaggacagttgtgttacagactcagaaccagttgtaaatgtaatcccaccaagtgccaaccccataaatatcgctatacctacagtcactgcccagttacccacaatcgtggccattgctgaccagaacagtgttccatgcttaagagcgctagctgccaataagcaaacgattctgattccccaggtggcatacacctactcaactacggtcagccctgcagtccaagaaccacccttgaaagtgatccagccaaatggaaatcaggatgaaagacaagatactagctcagaaggagtatcaaatgtagaggatcagaatgactctgattctacaccgcccaaaaagaaaatgcggaagacagaaaatggaatgtatgcttgtgatttgtgtgacaagatattccaaaagagtagttcattattgagacataaatatgaacacacaggtaaaagacctcatgagtgtggaatctgtaaaaaggcatttaaacacaaacatcatttgattgaacacatgcgattacattctggagaaaagccctatcaatgtgacaaatgtggaaagcgcttctcacactctgggtcttattctcaacacatgaatcatcgctactcctactgtaagagagaagcggaagaacgtgacagcacagagcaggaagaggcagggcctgaaatcctctcgaatgagcacgtgggtgccagggcgtctccctcacagggcgactcggacgagagagagagtttgacaagggaagaggatgaagacagtgaaaaagaggaagaggaggaggataaagagatggaagaattgcaggaagaaaaagaatgtgaaaaaccacaaggggatgaggaagaggaggaggaggaggaagaagtggaagaagaagaggtagaagaggcagagaatgagggagaagaagcaaaaactgaaggtctgatgaaggatgacagggctgaaagtcaagcaagcagcttaggacaaaaagtaggcgagagtagtgagcaagtgtctgaagaaaagacaaatgaagcctaatcgtttttctagaaggaaaataaattctaattgataatgaatttcgttcaatattatccttgcttttcatggaaacacagtaacctgtatgctgtgattcctgttcactactgtgtaaagtaaaaactaaaaaaatacaaaatacaaaacacacacacacacacacacacacacacacacacacacacaaaataaatccgggtgtgcctgaacctcagacctagtaatttttcatgcagttttcaaagttaggaacaagtttgtaacatgcagcagattagaaaaccttaatgactcagagagcaacaatacaagaggttaaaggaagctgattaattagatatgcatctggcattgttttatcttatcagtattatcactcttatgttggtttattcttaagctgtacaattgggagaaattttataattttttattggtaaacatatgctaaatccgcttcagtattttattatgttttttaaaatgtgagaacttctgcactacaaaattcccttcacagagaagtataatgtagttccaacccgtgctaactaccttttataaattcagtctagaaggtagtaatttctaatatttagatgtcttagtagagcgtattatcatttaaagtgtattgttagccttaagaaagcagctgatagaagaactgaagtttcttactcacgtggtttaaaatggagttcaaaagattgccattgagttctgattgcagggactaacaatgttaatctgataaggacagcaaaatcatcagaatcagtgtttgtgattgtgtttgaatatgtggtaacatatgaaggatatgacatgaagctttgtatctcctttggccttaagcaagacctgtgtgctgtaagtgccatttctcagtattttcaaggctctaacccgccttcatccaatgtgtggcctacaataactagcatttgttgatttgtctcttgtatcaaaattcccaaataaaacttaaaaccactgactctgtcagagaaactgaaacactgggacatttcatccttcaattcctcggtattgattttatgttgattgattttcagaatttctctacagaaacgaaagggaaattttctaatctgctttatccatgtacttgcatttcagacatggacatgctattgttatttggctcataactgtttccaaatgttagttattatggacccaatttattaacaacattagctgatttttacctatcagtattattttatttcttttagtttatagatctgtgcaacatttttgtactgtatgtcttcaaacctggcagtattaatacccttcttactgacatatgtacttttagttttagaaaacttttatatttatgtgtcttatttttatatttctttatttattacacagtgtagtgtataatactgtagtttgtattaatacaataatatattttagtatgaaaatttggaaagttgataagatttaaagtagagatgcaattggttctcctgcattgagatttgatttaacagtgttatgttaacatttatacttgccttggactgtagaacagaacttaaatgggaatgtattagttttacaactacaatcaagtcattttacctttacccagtttttaatataaaacttaaattttgaaattcactgtgtgactaatagcatgatgctctgcagttttattaagaaatcagcctaaccatacaactctcatttccttagtaagccaaattaggattaacttctataaacagtgttgggaacaatgtttaacattttgtgccaatttgttcctgtattcatgtatgtaagttacagatctgactcttcatttttaagttccttgttacatcatggtcattttctagttttttaccagactcccatctcacaataaaatgcatcaacaagcctgaactgctgtcattcttttcatcattatcagtattttctttggaaaactgtgaaatggggtacattgtcatcctgcatttgattcatcttgagctgaatttgggtaacactaaatgttttagacattctccactaaattatggattttcttgtggctaaatgtttctggagaggtcagagttgacaaaacctcttcacaggttgctccttcttcctgaaatccttaatcctccgcatttcatgcttcaggtcatttcagggaagcctgggtttagatgcctttctgactctcagctcctgcacttctgtcatcatacctctgatactattatttatattccttccccactaggaacaggaaccacatttgtcatagtcactctcacattcctcactgcctaacagggtgcctggcataagttgggacaacagatatttgttgaataaaaatataatttgcatgtttatggagctcagctatgttctcactttttttgcttctaattccagaatatatgttaaatgatctaataatttgattattttcttataagtcttattaaacactagtcataatagacacaataaattatgccttctttttctattgcctta

SEQ ID NO: 45846 - DNA, 6267 bp, Artificial Sequence
  derived and/or modified sequence
tttctccctcccctctgggatgcgaaacgcgaggttttgtaacctttcctggcaattttagattttgtgtgggatttcctgtctagaagcagatacgaagatttttaagctgtttcaagatgtttccttccaatccataattatatttttaatatattcgagccatcattaaaatcactgctttcgtgattttaattattcaaataaacacttgcattttaaagacgtctgttgattataaacgaaaggtattttggtattctcattgtggagagatgacttgttatagcaaggagtggagcataggctattgcaattttaatttcctgttttagcgtcaaatagtgtgtgttccatattgagctgttgccgctgttgctgatgtggctttatgaaagttacaaattataatactgtggtagaaacaaattcagattcagatgatgaagacaaactgcatattgtggaagaagaaagtgttacagatgcagctgactgtgaaggtgtaccagaggatgacctgccaacagaccagacagtgttaccagggaggagcagtgaaagagaagggaatgctaagaactgctgggaggatgacacaggaaaggaagggcaagaaatcctggggcctgaagctcaggcagatgaagcaggatgtacagtaaaagatgatgaatgcgagtcagatgcagaaaatgagcaaaaccatgatcctaatgttgaagagtttctacaacaacaagacactgctgtcatttttcctgaggcacctgaagaggaccagaggcagggcacaccagaagccagtggtcatgatgaaaatggaacaccagatgcattttcacaattactcacctgtccatattgtgatagaggctataaacgctttacctctctgaaagaacacattaaatatcgtcatgaaaagaatgaagataactttagttgctccctgtgcagttacacctttgcatacagaacccaacttgaacgtcacatgacatcacataaatcaggaagagatcaaagacatgtgacgcagtctgggtgtaatcgtaaattcaaatgcactgagtgtggaaaagctttcaaatacaaacatcacctaaaagagcacttaagaattcacagtggagagaagccatatgaatgcccaaactgcaagaaacgcttttcccattctggctcctatagctcacacataagcagtaagaaatgtatcagcttgatacctgtgaatgggcgaccaagaacaggactcaagacatctcagtgttcttcaccgtctctttcagcatcaccaggcagtcccacacgaccacagatacggcaaaagatagagaataaaccccttcaagaacaactttctgttaaccaaattaaaactgaacctgtggattatgaattcaaacccatagtggttgcttcaggaatcaactgttcaacccctttacaaaatggggttttcactggtggtggcccattacaggcaaccagttctcctcagggcatggtgcaagctgttgttctgccaacagttggtttggtgtctcccataagtatcaatttaagtgatattcagaatgtacttaaagtggcggtagatggtaatgtaataaggcaagtgttggagaataatcaagccaatcttgcatccaaagaacaagaaacaatcaatgcttcacccatacaacaaggtggccattctgttatttcagccatcagtcttcctttggttgatcaagatggaacaaccaaaattatcatcaactacagtcttgagcagcctagccaacttcaagttgttcctcaaaatttaaaaaaagaaaatccagtcgctacaaacagttgtaaaagtgaaaagttaccagaagatcttactgttaagtctgagaaggacaaaagctttgaagggggggtgaatgatagcacttgtcttctgtgtgatgattgtccaggagatattaatgcacttccagaattaaagcactatgacctaaagcagcctactcagcctcctccactccctgcagcagaagctgagaagcctgagtcctctgtttcatcagctactggagatggcaatttgtctcctagtcagccacctttaaagaacctcttgtctctcctaaaagcatattatgctttgaatgcacaaccaagtgcagaagagctctcaaaaattgctgattcagtaaacctaccactggatgtagtaaaaaagtggtttgaaaagatgcaagctggacagatttcagtgcagtcttctgaaccatcttctcctgaaccaggcaaagtaaatatccctgccaagaacaatgatcagcctcaatctgcaaatgcaaatgaaccccaggacagcacagtaaatctacaaagtcctttgaagatgactaactccccagttttaccagtgggatcaaccaccaatggttccagaagtagtacaccatccccatcacctctaaacctttcctcatccagaaatacacagggttacttgtacacagctgagggtgcacaagaagagccacaagtagaacctcttgatctttcactaccaaagcaacagggagaattattagaaaggtcaactatcactagtgtttaccagaacagtgtttattctgtccaggaagaacccttgaacttgtcttgcgcaaaaaaggagccacaaaaggacagttgtgttacagactcagaaccagttgtaaatgtaatcccaccaagtgccaaccccataaatatcgctatacctacagtcactgcccagttacccacaatcgtggccattgctgaccagaacagtgttccatgcttaagagcgctagctgccaataagcaaacgattctgattccccaggtggcatacacctactcaactacggtcagccctgcagtccaagaaccacccttgaaagtgatccagccaaatggaaatcaggatgaaagacaagatactagctcagaaggagtatcaaatgtagaggatcagaatgactctgattctacaccgcccaaaaagaaaatgcggaagacagaaaatggaatgtatgcttgtgatttgtgtgacaagatattccaaaagagtagttcattattgagacataaatatgaacacacaggtaaaagacctcatgagtgtggaatctgtaaaaaggcatttaaacacaaacatcatttgattgaacacatgcgattacattctggagaaaagccctatcaatgtgacaaatgtggaaagcgcttctcacactctgggtcttattctcaacacatgaatcatcgctactcctactgtaagagagaagcggaagaacgtgacagcacagagcaggaagaggcagggcctgaaatcctctcgaatgagcacgtgggtgccagggcgtctccctcacagggcgactcggacgagagagagagtttgacaagggaagaggatgaagacagtgaaaaagaggaagaggaggaggataaagagatggaagaattgcaggaagaaaaagaatgtgaaaaaccacaaggggatgaggaagaggaggaggaggaggaagaagtggaagaagaagaggtagaagaggcagagaatgagggagaagaagcaaaaactgaaggtctgatgaaggatgacagggctgaaagtcaagcaagcagcttaggacaaaaagtaggcgagagtagtgagcaagtgtctgaagaaaagacaaatgaagcctaatcgtttttctagaaggaaaataaattctaattgataatgaatttcgttcaatattatccttgcttttcatggaaacacagtaacctgtatgctgtgattcctgttcactactgtgtaaagtaaaaactaaaaaaatacaaaatacaaaacacacacacacacacacacacacacacacacacacacacaaaataaatccgggtgtgcctgaacctcagacctagtaatttttcatgcagttttcaaagttaggaacaagtttgtaacatgcagcagattagaaaaccttaatgactcagagagcaacaatacaagaggttaaaggaagctgattaattagatatgcatctggcattgttttatcttatcagtattatcactcttatgttggtttattcttaagctgtacaattgggagaaattttataattttttattggtaaacatatgctaaatccgcttcagtattttattatgttttttaaaatgtgagaacttctgcactacaaaattcccttcacagagaagtataatgtagttccaacccgtgctaactaccttttataaattcagtctagaaggtagtaatttctaatatttagatgtcttagtagagcgtattatcatttaaagtgtattgttagccttaagaaagcagctgatagaagaactgaagtttcttactcacgtggtttaaaatggagttcaaaagattgccattgagttctgattgcagggactaacaatgttaatctgataaggacagcaaaatcatcagaatcagtgtttgtgattgtgtttgaatatgtggtaacatatgaaggatatgacatgaagctttgtatctcctttggccttaagcaagacctgtgtgctgtaagtgccatttctcagtattttcaaggctctaacccgccttcatccaatgtgtggcctacaataactagcatttgttgatttgtctcttgtatcaaaattcccaaataaaacttaaaaccactgactctgtcagagaaactgaaacactgggacatttcatccttcaattcctcggtattgattttatgttgattgattttcagaatttctctacagaaacgaaagggaaattttctaatctgctttatccatgtacttgcatttcagacatggacatgctattgttatttggctcataactgtttccaaatgttagttattatggacccaatttattaacaacattagctgatttttacctatcagtattattttatttcttttagtttatagatctgtgcaacatttttgtactgtatgtcttcaaacctggcagtattaatacccttcttactgacatatgtacttttagttttagaaaacttttatatttatgtgtcttatttttatatttctttatttattacacagtgtagtgtataatactgtagtttgtattaatacaataatatattttagtatgaaaatttggaaagttgataagatttaaagtagagatgcaattggttctcctgcattgagatttgatttaacagtgttatgttaacatttatacttgccttggactgtagaacagaacttaaatgggaatgtattagttttacaactacaatcaagtcattttacctttacccagtttttaatataaaacttaaattttgaaattcactgtgtgactaatagcatgatgctctgcagttttattaagaaatcagcctaaccatacaactctcatttccttagtaagccaaattaggattaacttctataaacagtgttgggaacaatgtttaacattttgtgccaatttgttcctgtattcatgtatgtaagttacagatctgactcttcatttttaagttccttgttacatcatggtcattttctagttttttaccagactcccatctcacaataaaatgcatcaacaagcctgaactgctgtcattcttttcatcattatcagtattttctttggaaaactgtgaaatggggtacattgtcatcctgcatttgattcatcttgagctgaatttgggtaacactaaatgttttagacattctccactaaattatggattttcttgtggctaaatgtttctggagaggtcagagttgacaaaacctcttcacaggttgctccttcttcctgaaatccttaatcctccgcatttcatgcttcaggtcatttcagggaagcctgggtttagatgcctttctgactctcagctcctgcacttctgtcatcatacctctgatactattatttatattccttccccactaggaacaggaaccacatttgtcatagtcactctcacattcctcactgcctaacagggtgcctggcataagttgggacaacagatatttgttgaataaaaatataatttgcatgtttatggagctcagctatgttctcactttttttgcttctaattccagaatatatgttaaatgatctaataatttgattattttcttataagtcttattaaacactagtcataatagacacaataaattatgccttctttttctattgcctt

SEQ ID NO: 45847 - DNA, 1205 bp, Artificial Sequence
  derived and/or modified sequence
ggatgcgaaacgcgaggttttgtaacctttcctggcaattttagattttgtgtgggatttcctgtctagaagcagatacgaagatttttaagctgtttcaagatgtttccttccaatccataattatatttttaatatattcgagccatcattaaaatcactgctttcgtgattttaattattcaaataaacacttgcattttaaagacgtctgttgattataaacgaaaggtattttggtattctcattgtggagagatgacttgttatagcaaggagtggagcataggctattgcaattttaatttcctgttttagcgtcaaatagtgtgtgttccatattgagctgttgccgctgttgctgatgtggctttatgaaagttacaaattataatactgtggtagaaacaaattcagattcagatgatgaagacaaactgcatattgtggaagaagaaagtgttacagatgcagctgactgtgaaggtgtaccagaggatgacctgccaacagaccagacagtgttaccagggaggagcagtgaaagagaagggaatgctaagaactgctgggaggatgacacaggaaaggaagggcaagaaatcctggggcctgaagctcaggcagatgaagcaggatgtacagtaaaagatgatgaatgcgagtcagatgcagaaaatgagcaaaaccatgatcctaatgttgaagagtttctacaacaacaagacactgctgtcatttttcctgaggcacctgaagaggaccagaggcagggcacaccagaagccagtggtcatgatgaaaatggaacaccagatgcattttcacaattactcacctgtccatattgtgatagaggctataaacgctttacctctctgaaagaacacattaaatatcgtcatgaaaagaatgaagataactttagttgctccctgtgcagttacacctttgcatacagaacccaacttgaacgtcacatgacatcacataaatcaggaagagatcaaagacatgtgacgcagtctgggtgtaatcgtaaattcaaatgcactgagtgtggaaaagctttcaaatacaaacatcacctaaaagagcacttaagaattcacagtggagagaagccatatgaatgcccaaactgcaagaaacgcttttcccattctggctcctatagctcacacataagcagtaagaaatgtatc

SEQ ID NO: 45848 - protein, 411 aa, Artificial Sequence
  derived and/or modified sequence
MWSGWWLWPLVAVCTADFFRDEAERIMRDSPVIDGHNDLPWQLLDMFNNRLQDERANLTTLAGTHTNIPKLRAGFVGGQFWSVYTPCDTQNKDAVRRTLEQMDVVHRMCRMYPETFLYVTSSAGIRQAFREGKVASLIGVEGGHSIDSSLGVLRALYQLGMRYLTLTHSCNTPWADNWLVDTGDSEPQSQGLSPFGQRVVKELNRLGVLIDLAHVSVATMKATLQLSRAPVIFSHSSAYSVCASRRNVPDDVLRLVKQTDSLVMVNFYNNYISCTNKANLSQVADHLDHIKEVAGARAVGFGGDFDGVPRVPEGLEDVSKYPDLIAELLRRNWTEAEVKGALADNLLRVFEAVEQASNLTQAPEEEPIPLDQLGGSCRTHYGYSSGASSLHRHWGLLLASLAPLVLCLSLL

SEQ ID NO: 45849 - DNA, 1236 bp, Artificial Sequence
  derived and/or modified sequence
atgtggtcaggttggtggctgtggcctttggtggccgtttgcactgccgatttcttccgtgatgaggctgagcgcattatgagagattcaccggtgatagacgggcacaacgacctgccctggcagctgctggatatgtttaacaatcgactccaggacgaaagagccaacctcaccacactggccggcacacataccaatatccctaaactccgggcaggtttcgtaggaggacagttctggtcagtctacaccccctgtgacacgcaaaacaaagacgccgtcagacggacattggagcagatggatgtggtccaccggatgtgccggatgtatccggagacttttctctacgttacctcttcggccggcatcaggcaggccttcagggaaggaaaggttgcctccctgatcggcgttgaaggaggccactcaatagactcttccctgggagtgctgcgagcactgtatcagctcgggatgagatacctgacactgacccattcatgtaataccccttgggcagacaattggcttgttgacaccggggactcagaaccccagtctcagggcttatctcccttcggtcaacgggttgtcaaggaattgaacaggctgggagtccttattgacctcgcccacgtaagcgtcgctactatgaaggcgactcttcagctatcgcgagctccagtgattttttcacactcctcagcttattccgtttgcgcaagcagaagaaacgtccctgacgacgtgctgaggctcgtcaagcagaccgatagcctggtcatggtgaatttctataacaactacatctcctgtactaataaagccaatctgagccaggtggctgaccacctggatcatataaaagaggtggctggcgcacgcgccgtgggattcggcggtgacttcgatggagtcccgcgcgttccagaaggcctcgaggacgtgagtaaataccccgatctgattgcagagctcctgcggcgtaactggactgaggccgaagtcaaaggggctctcgctgacaacttgttgcgggtttttgaagcagttgagcaggcttccaatttgacccaagcgcccgaagaagaacctatccctcttgatcaactgggaggctcttgcagaacccattatgggtattcgtcaggggcctccagcctgcaccggcattggggactgctgttggcaagcctggccccgctcgttctgtgcctgagccttttatag

SEQ ID NO: 45850 - DNA, 1236 bp, Artificial Sequence
  derived and/or modified sequence
atgtggtctgggtggtggttgtggcctttagttgctgtctgcacggctgacttctttagggatgaggccgagaggatcatgcgcgattctccagtcatcgacggtcacaatgaccttccgtggcagttgctcgacatgtttaacaaccgcctgcaggatgaacgtgctaacttaacaaccctggccggaactcacacgaatatccctaagctgagagctggctttgtcggaggacaattctggtccgtctacacgccatgcgacacccagaataaagacgctgtccgtcgcaccctggaacagatggacgtcgtgcatcggatgtgtaggatgtaccccgagacattcttgtatgttacatcatctgcaggtatccggcaggcatttagagaaggtaaggtagcctcccttattggagttgaaggcggtcactcaatagattcttcactaggggtgctacgggccctatatcaacttggcatgcgttatctcacactgacacattcttgcaatacaccatgggcggacaattggctcgtggacactggcgactcagagccacagtcccaggggctctcccctttcggccagcgtgtggttaaggaattgaatcgcctcggcgtgctcattgacctggctcacgtatccgtggcaacaatgaaagccactctgcagttgtcgcgagcccccgtaatattctctcacagctcagcttatagcgtatgcgcatctcggagaaatgtgcccgatgatgtcctcaggctagtcaagcagacagatagtttggtgatggttaatttctacaataactacatcagctgtactaacaaggccaatctgtctcaggtggcagaccacctcgaccatatcaaagaagtggcgggggcccgggccgtggggtttggaggggacttcgatggtgtgcctagggtgcccgagggcctggaagatgtctcgaagtatcctgatctcatcgcggaactcctcagacgaaattggactgaggccgaagtgaagggggcccttgccgataacttactccgagtttttgaggcagttgaacaggcttccaacctaactcaagccccagaagaagaacccattcccctagaccaactcggagggtcttgcagaacccactacggatactcttccggggccagctcgctgcaccgccattggggcctgttgctagcgagtctggccccgctcgtcctctgtttgtcgctgctgtag

SEQ ID NO: 45851 - DNA, 1236 bp, Artificial Sequence
  derived and/or modified sequence
atgtggagtgggtggtggctctggcccctggtcgcagtgtgtacagcagacttctttcgggacgaagcagagagaattatgagggattcccctgtgatcgatgggcacaacgatctcccttggcagctactcgacatgttcaataaccggttgcaggatgagcgggcaaatctgaccacgcttgccggtacccacactaatatccccaagctaagggccgggtttgtcggcggacagttctggtcggtctacactccttgcgacacccaaaataaggacgccgtcagaaggacgctggagcagatggacgtggttcacaggatgtgcaggatgtatccggagactttcctgtatgttacctcttcagctggcatccgtcaggccttcagagaaggtaaagtggccagtctgattggtgtggagggcggacactctattgacagttcattaggcgttctccgcgcattataccagttgggtatgaggtatctcaccctaacacatagttgcaacactccatgggcagacaactggttagtggacactggggactccgaacctcagtcccagggactcagtccgttcggccaacgggtcgtgaaggagctgaatagactgggggtcctgattgatcttgcccacgtgtcagtggctacaatgaaggccacgctgcaactgtcccgggctccggtgatcttttctcattcttccgcttattccgtgtgcgccagccggcgcaacgttcctgacgatgtgctccgacttgtgaaacaaaccgactctctagtgatggttaacttctataataactatataagctgcacaaacaaggctaacctttcccaggtggcggaccatctggatcacatcaaggaagtcgcgggtgcgagagccgttggctttggaggcgacttcgatggagtgccccgggtccccgaaggcttggaggatgtctcaaagtacccagatctgattgccgaactcctccgaagaaactggaccgaagccgaggtgaagggtgctctcgcagacaacctgctccgggtgtttgaggcagtggaacaggcctctaatctgacgcaggctcctgaggaagaacctatccctctggaccagcttgggggaagctgcaggacccattatgggtatagtagcggggcttcatccctgcatagacattgggggctactgctcgctagtctggcaccactggtcctttgcctcagcctgctctag

SEQ ID NO: 45852 - DNA, 1236 bp, Artificial Sequence
  derived and/or modified sequence
atgtggagcggctggtggctgtggcccctggtggccgtgtgcacagctgacttcttcagagatgaagctgagcgcatcatgagggacagccctgtgattgatggccacaatgacctgccctggcagctgctggacatgttcaacaaccggctgcaggatgagcgggccaacctgaccaccctggccggcacccacaccaacatccccaagctgcgggccggctttgtgggcggccagttctggagcgtgtacaccccctgtgacacccagaacaaggatgctgtgcggaggaccctggagcagatggatgtggtgcacaggatgtgcaggatgtacccagagaccttcctgtatgtgaccagcagcgctggcatccggcaggccttccgggagggcaaggtggccagcctcatcggcgtggagggcggccacagcattgacagcagcctgggcgtgctgcgggccctgtaccagctgggcatgagatacctgaccctgacccacagctgcaacaccccctgggccgacaactggctggtggacaccggggacagcgagccccagagccagggcctgagccccttcggccagagggtggtgaaggagctgaaccggctgggcgtgctgattgacctggcccacgtgtctgtggccaccatgaaggccaccctgcagctgagccgggcccctgtgatcttcagccacagcagcgcctacagcgtgtgtgccagcagaagaaatgtgcctgatgatgtgctgcggctggtgaagcagacagacagcctggtgatggtgaacttctacaacaactacatcagctgcaccaacaaggccaacctgagccaggtggccgaccacctggaccacatcaaggaggtggccggggcccgggctgtgggctttggaggagactttgatggagtgccccgggtgcctgagggcctggaggatgtgtccaagtacccagacctgattgctgagctgctgcggaggaactggacagaggccgaggtgaagggggccctggccgacaacctgctgcgggtgtttgaggccgtggagcaggccagcaacctgacccaggcccctgaggaggagcccatccccctggaccagctgggcggcagctgcaggacccactacggctacagcagcggggccagcagcctgcaccgccactggggcctgctgctggccagcctggcccccctggtgctgtgcctgagcctgctgtag

SEQ ID NO: 45853 - DNA, 1236 bp, Artificial Sequence
  derived and/or modified sequence
atgtggagcggctggtggctgtggcccctggtggccgtgtgcaccgcggatttctttagagatgaagccgaaaggataatgagggacagtcccgtgatcgatggccacaacgatctgccatggcagctgttggacatgttcaacaacaggctgcaggacgaacgtgctaatctaacaactctggcaggaacccacacgaatatcccgaaactgagagccggatttgtgggaggacagttttggtcagtgtatactccctgtgacactcagaataaggacgccgtgcggcggacacttgagcagatggatgtggtgcaccgtatgtgcaggatgtatccggagacttttctatatgtgactagctccgcaggcattcggcaggccttcagggaagggaaggtcgcttcactcataggggtggagggcggacactccattgatagttccctgggcgttctaagagccctgtaccagttggggatgcgctatctgaccctgacccattcttgcaacaccccttgggccgacaactggctcgtagacaccggtgactcggagcctcagtctcagggcttgagcccattcggacaacgcgtggtgaaagaattaaaccgattgggcgtgttgatcgacctggcccatgtcagcgtggccaccatgaaagcgaccttgcagctgagcagggctccagtcatattcagtcactcctctgcatacagcgtttgtgcttcccgccgaaacgtgcctgacgatgtccttcgcctagtgaaacagaccgacagtttggttatggtcaacttctacaacaactatatctcatgtacgaataaggccaacctctctcaagtagcagatcacttggatcacatcaaagaagtggccggggcaagagctgtcggttttgggggcgattttgacggggttcctagagtgcccgaaggtctggaggatgtcagcaaatatcctgacctaatcgctgagctgctccgccgaaactggacagaagcggaggtcaaaggggcgctggccgacaacctgctgcgcgttttcgaggcagtggagcaggcctcaaacctcacacaggcccctgaggaggaaccgatcccattggaccagctcggtggatcctgccggactcattacgggtatagtagcggcgcaagctcgcttcacagacattggggtttactgctcgcgagtcttgcccctctcgtcctatgtttatcattgctctag

SEQ ID NO: 45854 - DNA, 1236 bp, Artificial Sequence
  derived and/or modified sequence
atgtggagcggctggtggctgtggcccctggtggccgtgtgcaccgccgacttttttagggatgaggcagagcggataatgagagactctccggtgatagacggccataacgatctcccatggcagttgctagatatgtttaacaaccggctgcaggacgaacgggccaacctaaccacgctggccgggacccatactaacatacctaagttacgcgctggttttgtcggtggccaattctggagtgtgtacaccccatgcgatacacaaaataaggacgctgtgcgcagaactcttgagcagatggatgtggtccatagaatgtgccgcatgtaccccgagactttcctctacgtgacctccagcgctggtatcagacaggcattccgggagggcaaggtggcctcactgatcggcgttgagggcggtcattccatcgacagcagcctgggcgtcttgcgggctttataccagcttggcatgcggtatctaacacttactcactcttgtaatactccctgggcagataactggcttgtcgacaccggtgactccgaaccacagtcacaggggctgtctccatttggccagagagtggtcaaagagctgaatagattgggtgtgctgattgatctggcccacgtcagtgtagctaccatgaaagcaactctccagctgagccgcgcccccgtgatcttctctcactcatcagcctactcagtgtgcgccagccggagaaacgtcccggatgatgtgcttcgtctggtgaagcaaaccgactcccttgtaatggtgaatttctataacaactacatctcttgcactaataaagccaatctgagccaggtggccgatcacctcgatcacattaaggaggtcgcgggggcacgggcggttggcttcggtggggatttcgatggcgtgccaagagttcccgaagggctcgaagacgtcagcaaatacccggacttgatcgccgagctgctacgaaggaactggacggaggcagaggtcaagggcgccctggccgacaatctgctgcgggtttttgaggctgtggagcaggccagtaatctcacacaagcccctgaagaggagcccatacctttagatcagctcggaggctcgtgcagaacacactatggttacagttctggcgccagttcacttcaccgccactggggtctgttgctagccagtctcgccccactcgtattatgcttgagcttactatag

SEQ ID NO: 45855 - DNA, 1236 bp, Artificial Sequence
  derived and/or modified sequence
atgtggagcggctggtggctgtggcccctggtggccgtgtgcaccgctgacttttttagagatgaggccgaaaggatcatgcgcgatagtccagtaattgacggacataacgatcttccgtggcaattgctcgatatgtttaataatagactccaggatgagcgagctaacctgacaaccttggctggtactcacacaaacattcccaagctcagagctggattcgtcggcgggcagttctggtcagtgtataccccttgcgatacgcagaataaggacgcagttaggagaaccctggagcagatggatgtggtgcaccggatgtgccgcatgtacccagaaacgtttctttacgtcacctctagcgccggcatcagacaggcttttcgggaaggtaaggtggcatctctgatcggagtagagggcgggcactcaattgactcctccttaggggttcttagggccttatatcaactaggcatgcggtacttgacactcactcactcctgtaacaccccctgggcggataactggctcgtagatacaggggactccgagccccagagccagggactctcaccattcgggcagcgcgtggtgaaggaactcaacagactcggcgtgctgatcgacctggcacatgtgtctgtggctacgatgaaggccaccctccaactcagtagggcaccagttatcttctcccattcctctgcatatagcgtttgcgcctcccggcgtaatgtccctgacgacgtactgcgcttggttaaacaaacagatagcctcgtgatggtgaacttttataacaattacatatcctgtacgaacaaggcgaacctttcccaggtagccgatcacttagatcacatcaaggaggttgcgggcgctagggccgtgggcttcgggggagactttgacggggtgcctagagtgcctgaggggctggaggacgtgagcaagtaccctgatttgattgccgaacttctgcgccggaattggactgaagcagaggtgaagggtgccctcgctgataatttactcagggtttttgaagctgtggagcaggcctctaatttaactcaggccccagaagaggagccaatcccgctggatcagctgggagggtcttgcaggacccactacggctatagcagcggggcaagcagccttcaccgtcattgggggctcctgctggccagcctggccccactcgtgctgtgtctctcccttctgtag

SEQ ID NO: 45856 - DNA, 1236 bp, Artificial Sequence
  derived and/or modified sequence
atgtggtcaggctggtggctgtggcccctcgtggcagtttgtaccgccgacttcttccgtgatgaggcagaacgcattatgagagattcccccgtgattgacggccacaacgatctgccttggcaattgctcgacatgtttaacaaccgtttacaagatgagagagcgaatctcactactctcgccggaacccatacaaatataccgaaactgagagccggtttcgtgggtggccagttttggagcgtgtatactccctgcgatacacagaataaggatgctgtgcgtcggacattagagcaaatggatgtggtacataggatgtgccgcatgtacccagagacgttcctgtatgtcacttcaagcgccggaattaggcaggcctttagagaggggaaggttgcttcactgatcggagtcgaagggggacactcaatcgatagctccctaggcgtgctgcgcgcactgtaccagctcggcatgcgatacctcacgctgacccactcctgcaacaccccctgggcggataattggctggtggacacgggagatagtgaacctcagagccagggcctgtcgccattcggacaaagagttgtcaaagagctgaaccgcctaggtgtgttgatcgacctggctcacgtttctgttgccaccatgaaggctactttgcaactctctcgggctccagtaatattctcacactcaagtgcctactccgtctgtgcctctcgtaggaatgttccagacgatgttcttaggctggtcaaacagacagattctctggtgatggtcaatttctacaataactacatttcctgtactaataaggccaatctctcacaggtggctgaccatcttgaccacatcaaggaggttgctggtgcccgtgccgtgggcttcggaggcgatttcgatggggtaccgcgagtgcccgagggactggaggacgtaagtaagtaccctgacttgatagctgagctgctgaggaggaactggacggaagccgaagtcaagggggctctcgcagataatctcctgcgtgtatttgaggcagttgagcaggcgtctaacttgacgcaggcccctgaagaggaacctatacctctcgaccagctcggagggtcctgcagaacccactacgggtactcctcgggagcatcttctcttcatcgccattgggggctgctactcgccagcctggcgccacttgtgctgtgcttgtccttgctctag

SEQ ID NO: 45857 - DNA, 1236 bp, Artificial Sequence
  derived and/or modified sequence
atgtggtcgggctggtggctctggcccctagtggccgtctgtaccgctgatttcttcagggacgaggccgagagaatcatgagggattctcctgtgatcgatgggcacaatgatcttccatggcagctgctggacatgttcaacaatcgactgcaggacgagagggccaacctcacaacactggcaggcacccacaccaacattcccaaactgagagcgggttttgtgggagggcagttctggtcagtgtatactccatgtgatactcaaaataaagatgcagtgcggagaacgctggagcagatggatgtcgtgcatcggatgtgtcggatgtatccagagacgttcctttatgttaccagctccgccggtatccgtcaagcttttcgcgaaggaaaggtggcctctctcatcggcgtcgaagggggacattcaatcgacagctctttgggggttctgagggccctctatcaactaggaatgcggtacctgacattgactcacagttgcaacacaccttgggctgacaactggttagtggacactggcgattcagagccacagtcacaaggtctgtcccccttcggacagagggtagtcaaggaactgaaccggctgggggtgctgattgacttggctcacgtttccgtggctacaatgaaagcgacactccagctgtccagagctcctgtgattttctctcatagctctgcatactccgtgtgcgcttcaagacgcaacgtacctgatgacgtcctgagactggtcaagcaaacggattcattggtcatggtgaatttttacaataactatatttcatgtaccaataaggcaaatctgtcacaggtggccgatcacctggatcacataaaggaggtagcgggagccagggccgtaggttttgggggagatttcgacggggtgcctcgggttcccgaagggcttgaagatgtgtctaaataccctgacctgatcgccgaacttctgagacgaaactggactgaggctgaggtcaaaggcgctctggccgacaacctgctccgtgtgtttgaggctgtcgaacaggcaagtaacctcactcaggcgcctgaggaggaacccatcccccttgaccagttgggcggaagttgcaggacacattacgggtacagtagcggggcatcttctctgcaccgccattggggactgttgttggcctctctggcaccgctggtgctttgcctctcactactctag

SEQ ID NO: 45858 - DNA, 1236 bp, Artificial Sequence
  derived and/or modified sequence
atgtggagcggatggtggttatggcctttggtcgctgtgtgtacagccgacttctttcgcgatgaggccgagcgcattatgagagactccccagtgatagatggtcataacgacctgccttggcagctgctcgatatgttcaataatagactgcaggatgagcgggctaatctgactactctggcgggtacccacactaacatccccaaattaagggccggtttcgtgggcggtcagttctggtctgtgtacactccatgtgacactcaaaacaaggacgcggttcgcaggacactcgaacagatggatgtcgttcacaggatgtgtcgcatgtaccccgagacctttctgtatgtcacatcatctgccggtattaggcaggctttccgggaaggcaaggtggctagtctgataggagttgaaggcggacacagtatcgattcctccctgggcgtcctccgcgcactgtaccaactggggatgcgttacctcaccctgactcactcctgcaataccccgtgggccgataactggctggttgacactggcgactccgagccgcagtcccaaggactgagcccctttgggcaacgcgtcgtcaaggagctgaaccggttgggcgttctgatcgatctggcccatgtcagcgtagctactatgaaggctaccttacaactttccagggccccagtgattttctctcatagttcagcctactcagtgtgcgcttctcgcaggaatgtgccagatgatgtcctgaggctagtcaagcagacagacagcctcgtgatggtgaacttctataataactatatttcctgcacaaataaagccaacctcagccaggtcgcagatcacctcgaccatatcaaggaagtggctggggcaagggccgtcggattcggcggtgactttgatggtgtgcctcgcgtgcctgaaggcttagaggacgtatcaaaataccctgatcttatagccgagctgttgcgaagaaactggaccgaggccgaggtgaagggcgctttggccgacaatctattgagagttttcgaagctgttgagcaagcaagtaacctaacacaggccccagaggaggagccaatccccctggaccaattaggaggctcctgccggactcattacggatatagctcaggggcttcctcgcttcatagacattggggattgctgctggccagcttagccccattggtgttgtgccttagtctgctctag

SEQ ID NO: 45859 - DNA, 1236 bp, Artificial Sequence
  derived and/or modified sequence
atgtggagcggctggtggctgtggcccctggtggccgtgtgcaccgccgacttcttcagagacgaggccgagagaatcatgagagacagccccgtgatcgacggccacaacgacctgccctggcagctgctggacatgttcaacaacagactgcaggacgagagagccaacctgaccaccctggccggcacccacaccaacatccccaagctgagagccggcttcgtgggcggccagttctggagcgtgtacaccccctgcgacacccagaacaaggacgccgtgagaagaaccctggagcagatggacgtggtgcacagaatgtgcagaatgtaccccgagaccttcctgtacgtgaccagcagcgccggcatcagacaggccttcagagagggcaaggtggccagcctgatcggcgtggagggcggccacagcatcgacagcagcctgggcgtgctgagagccctgtaccagctgggcatgagatacctgaccctgacccacagctgcaacaccccctgggccgacaactggctggtggacaccggcgacagcgagccccagagccagggcctgagccccttcggccagagagtggtgaaggagctgaacagactgggcgtgctgatcgacctggcccacgtgagcgtggccaccatgaaggccaccctgcagctgagcagagcccccgtgatcttcagccacagcagcgcctacagcgtgtgcgccagcagaagaaacgtgcccgacgacgtgctgagactggtgaagcagaccgacagcctggtgatggtgaacttctacaacaactacatcagctgcaccaacaaggccaacctgagccaggtggccgaccacctggaccacatcaaggaggtggccggcgccagagccgtgggcttcggcggcgacttcgacggcgtgcccagagtgcccgagggcctggaggacgtgagcaagtaccccgacctgatcgccgagctgctgagaagaaactggaccgaggccgaggtgaagggcgccctggccgacaacctgctgagagtgttcgaggccgtggagcaggccagcaacctgacccaggcccccgaggaggagcccatccccctggaccagctgggcggcagctgcagaacccactacggctacagcagcggcgccagcagcctgcacagacactggggcctgctgctggccagcctggcccccctggtgctgtgcctgagcctgctgtag

SEQ ID NO: 45860 - DNA, 1598 bp, Artificial Sequence
  derived and/or modified sequence
cctctggtgcctctcctggcaggcagagtggctcctcacagcctgaagctcatccttctgcacgggccagccaggccagcacagaggcaccagggcagcagtgcacacaggtccccggggaccccaccatgtggagcggatggtggctgtggccccttgtggccgtctgcactgcagacttctttcgggacgaggcagagaggatcatgagggactcccctgtcattgatgggcacaatgacctcccctggcagctgctggatatgttcaacaaccggctgcaggacgagagggccaacctgaccaccttggccggcacacacaccaacatccccaagctgagggccggctttgtgggaggccagttctggtccgtgtacacgccctgcgacacccagaacaaagacgccgtgcggaggacgctggagcagatggacgtggtccaccgcatgtgccggatgtacccggagaccttcctgtatgtcaccagcagtgcaggcattcggcaggccttccgggaagggaaggtggccagcctgatcggcgtggagggcggccactccattgacagcagtttgggcgtcctgcgggcactctatcagctgggcatgcggtacctgaccctcacccacagctgcaacacgccctgggctgacaactggctggtggacacgggagacagcgagccccagagccaaggcttgtcaccctttgggcagcgtgtggtgaaggagctgaaccgtctgggggtcctcatcgacttggctcacgtgtctgtggccaccatgaaggccaccctgcagctgtccagagccccggtcatcttcagccactcctcggcctacagcgtgtgcgcaagccggcgcaacgtgcctgacgacgtcctgaggctggtgaaacagacagacagcctggtgatggtgaacttctacaacaattacatttcctgcaccaacaaggccaacctgtcccaagtggccgaccatctggatcacatcaaggaggtggcaggagccagagccgtgggttttggtggggactttgatggtgttccaagggtccctgaggggctggaggacgtctccaagtatccagacctgatcgctgagctgctcaggaggaactggacggaggcggaggtcaagggcgcactggctgacaacctgctgagggtcttcgaggctgtggaacaggccagcaacctcacacaggctcccgaggaggagcccatcccgctggaccagctgggtggctcctgcaggacccattacggctactcctctggggcttccagcctccatcgccactgggggctcctgctggcctccctcgctcccctggtcctctgtctgtctctcctgtgaaacctgggagaccagagtcccctttagggttcccggagctccgggaagacccgcccatcccaggactccagatgccaggagccctgctgcccacatgcaaggaccagcatctcctgagaggacgcctgggcttacctggggggcaggatgcctggggacagttcaggacacacacacagtaggcccgcaataaaagcaacaccccttcacatcctggggtacgtgtcatcggca

SEQ ID NO: 45861 - DNA, 1735 bp, Artificial Sequence
  derived and/or modified sequence
ggggtactgtgcgagccctcaaggaggtggctgttctgtagctggagagctccgtgggtggcaggactgaacttgaacaccagaaacaacccccaagccttgtgacctgggaggcaggaggcgggtctgtctccctgggacttgggtggctgagccgaggtactcgggaccctgtcccgcgcatggcagagtggctcctcacagcctgaagctcatccttctgcacgggccagccaggccagcacagaggcaccagggcagcagtgcacacaggtccccggggaccccaccatgtggagcggatggtggctgtggccccttgtggccgtctgcactgcagacttctttcgggacgaggcagagaggatcatgagggactcccctgtcattgatgggcacaatgacctcccctggcagctgctggatatgttcaacaaccggctgcaggacgagagggccaacctgaccaccttggccggcacacacaccaacatccccaagctgagggccggctttgtgggaggccagttctggtccgtgtacacgccctgcgacacccagaacaaagacgccgtgcggaggacgctggagcagatggacgtggtccaccgcatgtgccggatgtacccggagaccttcctgtatgtcaccagcagtgcaggcattcggcaggccttccgggaagggaaggtggccagcctgatcggcgtggagggcggccactccattgacagcagtttgggcgtcctgcgggcactctatcagctgggcatgcggtacctgaccctcacccacagctgcaacacgccctgggctgacaactggctggtggacacgggagacagcgagccccagagccaaggcttgtcaccctttgggcagcgtgtggtgaaggagctgaaccgtctgggggtcctcatcgacttggctcacgtgtctgtggccaccatgaaggccaccctgcagctgtccagagccccggtcatcttcagccactcctcggcctacagcgtgtgcgcaagccggcgcaacgtgcctgacgacgtcctgaggctggtgaaacagacagacagcctggtgatggtgaacttctacaacaattacatttcctgcaccaacaaggccaacctgtcccaagtggccgaccatctggatcacatcaaggaggtggcaggagccagagccgtgggttttggtggggactttgatggtgttccaagggtccctgaggggctggaggacgtctccaagtatccagacctgatcgctgagctgctcaggaggaactggacggaggcggaggtcaagggcgcactggctgacaacctgctgagggtcttcgaggctgtggaacaggccagcaacctcacacaggctcccgaggaggagcccatcccgctggaccagctgggtggctcctgcaggacccattacggctactcctctggggcttccagcctccatcgccactgggggctcctgctggcctccctcgctcccctggtcctctgtctgtctctcctgtgaaacctgggagaccagagtcccctttagggttcccggagctccgggaagacccgcccatcccaggactccagatgccaggagccctgctgcccacatgcaaggaccagcatctcctgagaggacgcctgggcttacctggggggcaggatgcctggggacagttcaggacacacacacagtaggcccgcaataaaagcaacaccccttc

SEQ ID NO: 45862 - DNA, 1647 bp, Artificial Sequence
  derived and/or modified sequence
ggcacatccacacatgagggaaaaacactgccaggacatctcagggcactctcaggaaatgaggaagctgctggagaagtttctagccttgggggaggcagagtggctcctcacagcctgaagctcatccttctgcacgggccagccaggccagcacagaggcaccagggcagcagtgcacacaggtccccggggaccccaccatgtggagcggatggtggctgtggccccttgtggccgtctgcactgcagacttctttcgggacgaggcagagaggatcatgagggactcccctgtcattgatgggcacaatgacctcccctggcagctgctggatatgttcaacaaccggctgcaggacgagagggccaacctgaccaccttggccggcacacacaccaacatccccaagctgagggccggctttgtgggaggccagttctggtccgtgtacacgccctgcgacacccagaacaaagacgccgtgcggaggacgctggagcagatggacgtggtccaccgcatgtgccggatgtacccggagaccttcctgtatgtcaccagcagtgcaggcattcggcaggccttccgggaagggaaggtggccagcctgatcggcgtggagggcggccactccattgacagcagtttgggcgtcctgcgggcactctatcagctgggcatgcggtacctgaccctcacccacagctgcaacacgccctgggctgacaactggctggtggacacgggagacagcgagccccagagccaaggcttgtcaccctttgggcagcgtgtggtgaaggagctgaaccgtctgggggtcctcatcgacttggctcacgtgtctgtggccaccatgaaggccaccctgcagctgtccagagccccggtcatcttcagccactcctcggcctacagcgtgtgcgcaagccggcgcaacgtgcctgacgacgtcctgaggctggtgaaacagacagacagcctggtgatggtgaacttctacaacaattacatttcctgcaccaacaaggccaacctgtcccaagtggccgaccatctggatcacatcaaggaggtggcaggagccagagccgtgggttttggtggggactttgatggtgttccaagggtccctgaggggctggaggacgtctccaagtatccagacctgatcgctgagctgctcaggaggaactggacggaggcggaggtcaagggcgcactggctgacaacctgctgagggtcttcgaggctgtggaacaggccagcaacctcacacaggctcccgaggaggagcccatcccgctggaccagctgggtggctcctgcaggacccattacggctactcctctggggcttccagcctccatcgccactgggggctcctgctggcctccctcgctcccctggtcctctgtctgtctctcctgtgaaacctgggagaccagagtcccctttagggttcccggagctccgggaagacccgcccatcccaggactccagatgccaggagccctgctgcccacatgcaaggaccagcatctcctgagaggacgcctgggcttacctggggggcaggatgcctggggacagttcaggacacacacacagtaggcccgcaataaaagcaacaccccttc

SEQ ID NO: 45863 - protein, 893 aa, Artificial Sequence
  derived and/or modified sequence
MKQLPAATVRLLSSSQIITSVVSVVKELIENSLDAGATSVDVKLENYGFDKIEVRDNGEGIKAVDAPVMAMKYYTSKINSHEDLENLTTYGFRGEALGSICCIAEVLITTRTAADNFSTQYVLDGSGHILSQKPSHLGQGTTVTALRLFKNLPVRKQFYSTAKKCKDEIKKIQDLLMSFGILKPDLRIVFVHNKIYLSGFLPKCDADHSFTSLSTPERSFIFINSRPVHQKDILKLIRHHYNLKCLKESTRLYPVFFLKIDVPTADVDVNLTPDKSQVLLQNKESVLIALENLMTTCYGPLPSTNSYENNKTDVSAADIVLSKTAETDVLFNKVESSGKNYSNVDTSVIPFQNDMHNDESGKNTDDCLNHQISIGDFGYGHCSSEISNIDKNTKNAFQDISMSNVSWENSQTEYSKTCFISSVKHTQSENGNKDHIDESGENEEEAGLENSSEISADEWSRGNILKNSVGENIEPVKILVPEKSLPCKVSNNNYPIPEQMNLNEDSCNKKSNVIDNKSGKVTAYDLLSNRVIKKPMSASALFVQDHRPQFLIENPKTSLEDATLQIEELWKTLSEEEKLKYEEKATKDLERYNSQMKRAIEQESQMSLKDGRKKIKPTSAWNLAQKHKLKTSLSNQPKLDELLQSQIEKRRSQNIKMVQIPFSMKNLKINFKKQNKVDLEEKDEPCLIHNLRFPDAWLMTSKTEVMLLNPYRVEEALLFKRLLENHKLPAEPLEKPIMLTESLFNGSHYLDVLYKMTADDQRYSGSTYLSDPRLTANGFKIKLIPGVSITENYLEIEGMANCLPFYGVADLKEILNAILNRNAKEVYECRPRKVISYLEGEAVRLSRQLPMYLSKEDIQDIIYRMKHQFGNEIKECVHGRPFFHHLTYLPETT

SEQ ID NO: 45864 - DNA, 2682 bp, Artificial Sequence
  derived and/or modified sequence
atgaagcagctgcccgccgccaccgtgagactgctgagcagcagccagatcatcaccagcgtggtgagcgtggtgaaggagctgatcgagaacagcctggacgccggcgccaccagcgtggacgtgaagctggagaactacggcttcgacaagatcgaggtgagagacaacggcgagggcatcaaggccgtggacgcccccgtgatggccatgaagtactacaccagcaagatcaacagccacgaggacctggagaacctgaccacctacggcttcagaggcgaggccctgggcagcatctgctgcatcgccgaggtgctgatcaccaccagaaccgccgccgacaacttcagcacccagtacgtgctggacggcagcggccacatcctgagccagaagcccagccacctgggccagggcaccaccgtgaccgccctgagactgttcaagaacctgcccgtgagaaagcagttctacagcaccgccaagaagtgcaaggacgagatcaagaagatccaggacctgctgatgagcttcggcatcctgaagcccgacctgagaatcgtgttcgtgcacaacaagatctacctgagcggcttcctgcccaagtgcgacgccgaccacagcttcaccagcctgagcacccccgagagaagcttcatcttcatcaacagcagacccgtgcaccagaaggacatcctgaagctgatcagacaccactacaacctgaagtgcctgaaggagagcaccagactgtaccccgtgttcttcctgaagatcgacgtgcccaccgccgacgtggacgtgaacctgacccccgacaagagccaggtgctgctgcagaacaaggagagcgtgctgatcgccctggagaacctgatgaccacctgctacggccccctgcccagcaccaacagctacgagaacaacaagaccgacgtgagcgccgccgacatcgtgctgagcaagaccgccgagaccgacgtgctgttcaacaaggtggagagcagcggcaagaactacagcaacgtggacaccagcgtgatccccttccagaacgacatgcacaacgacgagagcggcaagaacaccgacgactgcctgaaccaccagatcagcatcggcgacttcggctacggccactgcagcagcgagatcagcaacatcgacaagaacaccaagaacgccttccaggacatcagcatgagcaacgtgagctgggagaacagccagaccgagtacagcaagacctgcttcatcagcagcgtgaagcacacccagagcgagaacggcaacaaggaccacatcgacgagagcggcgagaacgaggaggaggccggcctggagaacagcagcgagatcagcgccgacgagtggagcagaggcaacatcctgaagaacagcgtgggcgagaacatcgagcccgtgaagatcctggtgcccgagaagagcctgccctgcaaggtgagcaacaacaactaccccatccccgagcagatgaacctgaacgaggacagctgcaacaagaagagcaacgtgatcgacaacaagagcggcaaggtgaccgcctacgacctgctgagcaacagagtgatcaagaagcccatgagcgccagcgccctgttcgtgcaggaccacagaccccagttcctgatcgagaaccccaagaccagcctggaggacgccaccctgcagatcgaggagctgtggaagaccctgagcgaggaggagaagctgaagtacgaggagaaggccaccaaggacctggagagatacaacagccagatgaagagagccatcgagcaggagagccagatgagcctgaaggacggcagaaagaagatcaagcccaccagcgcctggaacctggcccagaagcacaagctgaagaccagcctgagcaaccagcccaagctggacgagctgctgcagagccagatcgagaagagaagaagccagaacatcaagatggtgcagatccccttcagcatgaagaacctgaagatcaacttcaagaagcagaacaaggtggacctggaggagaaggacgagccctgcctgatccacaacctgagattccccgacgcctggctgatgaccagcaagaccgaggtgatgctgctgaacccctacagagtggaggaggccctgctgttcaagagactgctggagaaccacaagctgcccgccgagcccctggagaagcccatcatgctgaccgagagcctgttcaacggcagccactacctggacgtgctgtacaagatgaccgccgacgaccagagatacagcggcagcacctacctgagcgaccccagactgaccgccaacggcttcaagatcaagctgatccccggcgtgagcatcaccgagaactacctggagatcgagggcatggccaactgcctgcccttctacggcgtggccgacctgaaggagatcctgaacgccatcctgaacagaaacgccaaggaggtgtacgagtgcagacccagaaaggtgatcagctacctggagggcgaggccgtgagactgagcagacagctgcccatgtacctgagcaaggaggacatccaggacatcatctacagaatgaagcaccagttcggcaacgagatcaaggagtgcgtgcacggcagacccttcttccaccacctgacctacctgcccgagaccacctag

SEQ ID NO: 45865 - DNA, 2682 bp, Artificial Sequence
  derived and/or modified sequence
atgaaacagttaccagccgctacagtgagactcttgtcatcatcccagataatcacctcagtcgtgtcagtggtgaaggagctgattgagaactctctcgatgccggggccaccagcgttgacgtgaagctcgagaactatgggtttgacaaaattgaagttcgcgacaacggtgaaggaattaaagcagtcgatgcaccagtgatggctatgaaatactatacgagtaagatcaatagccacgaggatttggaaaacctgaccacttacgggttccgcggggaagccctgggctccatctgctgcattgctgaagtactgattactacgaggaccgccgcagataatttttctacacagtacgtgctggacggctccggccatattcttagtcagaaacccagccacttagggcaaggtaccaccgtgacagctttacgactgttcaagaacctccccgtgcgcaagcagttctattcaacggcaaagaagtgtaaagacgagatcaagaagattcaagacctgcttatgagttttggcatactaaaacctgatttgcgaattgtgtttgtccataacaagatttacctgagtggctttcttccgaaatgtgatgcagaccactcgttcacctccttatctacccccgagcggagtttcatctttattaactcaaggccagttcaccagaaagacatccttaagctgattcgacaccactacaacttaaaatgtctgaaggagtctacacgactatatccagtgttcttcttgaagattgacgtcccgactgccgatgtggacgtaaacctgacccctgataaatcccaggtcctgttgcaaaacaaggagagtgtgctgatcgcccttgagaatctcatgactacttgttacgggcccctaccctctactaattcatatgagaacaacaagaccgatgttagtgccgcggatattgtgctgtctaagacagccgaaactgacgtgctcttcaataaagtggaaagctccggaaagaattactccaacgtggatacatcagtcattccttttcagaatgatatgcacaacgacgagagtggcaaaaacaccgacgactgtctcaaccatcagattagcattggggactttgggtacgggcattgttcatctgagatatcaaatatcgacaagaatactaagaacgcattccaggacatttccatgtctaacgtctcctgggagaatagccagactgaatactcaaaaacgtgcttcatatcctccgtcaaacatactcagtccgagaatgggaataaggaccatatcgatgagagcggagaaaatgaagaagaagcaggattagagaactcgagcgagatctcggctgatgaatggtcacgtggcaacattctcaagaactcagtcggagagaacatcgaacctgtgaaaattctggtcccagaaaaaagcttgccatgtaaggtatccaacaataactacccaatacccgagcagatgaacttaaatgaggactcctgtaacaaaaaaagcaacgtgattgacaataagtcaggcaaagtcactgcctacgacctgctcagcaaccgtgtgatcaaaaaacctatgagcgccagtgcgctgtttgtgcaggatcaccggccacagtttctgattgagaatcccaagacaagcctggaggatgcaacactgcagattgaggaactgtggaaaaccttgtccgaggaggagaagctgaaatacgaagagaaagcaactaaggacttggaacgatataattcccagatgaaaagagccattgagcaggagtcgcagatgtctctgaaggatggcaggaagaagatcaagccaactagcgcttggaaccttgctcagaaacacaagcttaagacctccctctctaatcagcccaagctggacgaactgctgcaatcgcagattgagaaacggagatctcagaatatcaaaatggtccagatccccttcagcatgaaaaatctcaagatcaattttaagaagcaaaacaaggttgacctggaagaaaaggacgaaccgtgcttgattcacaacctacgattcccagacgcatggctcatgacatctaagactgaggtgatgttgcttaacccataccgcgttgaggaagctctcctgttcaagcgtctgctcgagaaccacaaactaccagcagagcctctggagaagcctatcatgcttaccgaaagtctttttaacgggagtcactatcttgatgtcctgtataaaatgacagcagatgatcagcgctatagtgggtccacttaccttagcgaccctcgcttaacagccaacggattcaaaatcaagttaatccctggcgtaagcataaccgaaaattacctggagatcgagggcatggcaaactgcctgcccttctacggagtagctgacctgaaagaaatcctgaacgcaatcctgaatcggaatgccaaagaggtgtacgagtgccgtccaagaaaagtgattagttacctcgagggtgaagcagtgagactgagccgccaactcccaatgtatctcagtaaggaggatattcaagacatcatatatcgtatgaaacaccaatttggcaatgagattaaggaatgcgtgcatggcaggcccttctttcaccacctgacgtacctccccgaaaccacctag

SEQ ID NO: 45866 - DNA, 2682 bp, Artificial Sequence
  derived and/or modified sequence
atgaagcagctgcctgctgccaccgtgcggctgctgagcagcagccagatcatcacctctgtggtgtctgtggtgaaggagctgattgagaacagcctggatgctggggccacctctgtggatgtgaagctggagaactacggctttgacaagattgaggtgcgggacaatggagagggcatcaaggctgtggatgcccctgtgatggccatgaagtactacaccagcaagatcaacagccatgaggacctggagaacctgaccacctacggcttccggggggaggccctgggcagcatctgctgcatcgccgaggtgctgatcaccaccaggacagctgctgacaacttcagcacccagtatgtgctggatggcagcggccacatcctgagccagaagcccagccacctgggccagggcaccaccgtgacagccctgcggctcttcaagaacctgcctgtgaggaagcagttctacagcacagccaagaagtgcaaggatgagatcaagaagatccaggacctgctgatgagctttggcatcctgaagccagacctgcgcatcgtgtttgtgcacaacaagatctacctgagcggcttcctgcccaagtgtgatgctgaccacagcttcaccagcctgagcaccccagagaggagcttcatcttcatcaacagcaggcctgtgcaccagaaggacatcctgaagctgatccgccaccactacaacctgaagtgcctgaaggagagcacccggctgtaccctgtgttcttcctgaagattgatgtgcccacagcagatgtggatgtgaacctgaccccagacaagagccaggtgctgctgcagaacaaggagagcgtgctgattgccctggagaacctgatgaccacctgctacggccccctgcccagcaccaacagctatgagaacaacaagacagatgtgtctgctgctgacatcgtgctgagcaagacagctgagacagatgtgctcttcaacaaggtggagagcagcggcaagaactacagcaatgtggacaccagcgtcatccccttccagaatgacatgcacaatgatgagagcggcaagaacacagatgactgcctgaaccaccagatcagcatcggggactttggctacggccactgcagcagcgagatcagcaacatcgacaagaacaccaagaatgccttccaggacatctccatgagcaatgtgtcctgggagaacagccagacagagtacagcaagacctgcttcatcagctctgtgaagcacacccagagtgaaaatggaaacaaggaccacattgatgaaagtggagaaaatgaggaggaggccggcctggagaacagcagcgagatctctgcagatgagtggagccggggcaacatcctgaagaacagcgtgggagaaaatattgagcctgtgaagatcctggtgcctgagaagagcctgccctgcaaggtgagcaacaacaactaccccatccctgagcagatgaacctgaatgaagacagctgcaacaagaagagcaatgtcatcgacaacaagagcggcaaggtgacagcctatgacctgctgagcaacagagtcatcaagaagcccatgtctgccagcgccctgtttgtgcaggaccaccggccccagttcctgattgagaaccccaagaccagcctggaggatgccaccctgcagatcgaggagctgtggaagaccctgtctgaggaggagaagctgaagtatgaggagaaggccaccaaggacctggagcgctacaacagccagatgaagagggccatcgagcaggagagccagatgagcctgaaggatggcaggaagaagatcaagcccaccagcgcctggaacctggcccagaagcacaagctgaagaccagcctgagcaaccagcccaagctggatgagctgctgcagagccagatcgagaagaggaggagccagaacatcaagatggtgcagatccccttctccatgaagaacctgaagatcaacttcaagaagcagaacaaggtggacctggaggagaaggatgagccctgcctgatccacaacctgcgcttcccagatgcctggctgatgaccagcaagacagaggtgatgctgctgaacccctacagagtggaggaggccctgctcttcaagaggctgctggagaaccacaagctgcctgctgagcccctggagaagcccatcatgctgacagagagcctcttcaacggcagccactacctggatgtgctgtacaagatgacagcagatgaccagcgctacagcggcagcacctacctgagtgacccccggctgacagccaacggcttcaagatcaagctgatccctggggtgtccatcacagagaactacctggagattgagggcatggccaactgcctgcccttctacggcgtggccgacctgaaggagatcctgaatgccatcctgaacagaaatgccaaggaggtgtatgagtgccggcccaggaaggtgatctcctacctggagggggaggccgtgcggctgagccggcagctgcccatgtacctgagcaaggaggacatccaggacatcatctacaggatgaagcaccagtttggaaatgagatcaaggaatgtgtgcacggccggcccttcttccaccacctgacctacctgcctgagaccacctag

SEQ ID NO: 45867 - DNA, 2682 bp, Artificial Sequence
  derived and/or modified sequence
atgaagcagctgcccgccgccaccgtgcggctgctgagcagcagccaaataatcactagtgtcgtgtcagtggtgaaagagctcattgaaaactctcttgacgccggggccacaagcgtggatgtgaagctagaaaattacggtttcgataagattgaagtgcgcgacaatggagagggaatcaaagcggtagatgcccctgtgatggctatgaaatattacacaagcaaaattaacagccatgaggatctcgagaacctgactacctatgggttccgcggagaggcgctgggatcgatttgctgtattgcagaggtactgatcaccacaaggacggccgcagacaacttttctacgcagtacgtattggatgggtcggggcacatcctcagccagaagccatctcatctggggcaaggtaccaccgtcactgccctgagactgttcaagaacctaccggtcagaaagcaattctacagcacagcgaaaaagtgtaaggatgagatcaaaaagattcaagatctcctgatgtcatttgggatcttgaaacctgacctaagaattgtgttcgttcataataaaatctacctcagtgggtttctccctaaatgtgacgccgaccactcttttacatccttgtctactcctgagcgttcttttatattcatcaatagccgccctgtgcatcagaaagatatcttgaagcttatccgtcatcattataacctgaagtgtctcaaggagagcacacggctgtacccagttttctttttaaaaattgatgtccctaccgcggatgtggacgtcaatcttacacctgataaatcgcaggtgctcctgcagaataaagagtctgtgttgattgctctggagaacctgatgactacatgctacggacctctgccatcaacaaacagctacgaaaacaacaagacagatgtatccgctgctgacatagtgctgagcaaaacagccgaaacagacgttctttttaacaaggtcgagtcatctggaaaaaactattcaaatgtcgacacgtcagttattcctttccagaatgatatgcataacgacgagtccggtaaaaacaccgatgactgtctgaaccaccagatatccataggcgattttggctacgggcattgctccagcgagatttctaacattgataaaaacacaaaaaatgcctttcaggatatctccatgagcaacgtaagttgggaaaattcacagacggagtattcaaagacctgcttcatctcaagcgtgaagcacacccagagtgaaaacggtaataaagatcatattgatgagagcggcgaaaacgaagaagaagctgggttggagaacagttctgaaatcagtgccgatgaatggtctcggggtaacatattgaaaaattctgtgggcgaaaatattgagcccgttaaaatcctagttcccgagaaatcgctgccctgcaaggtgtctaataacaactatcctatacccgagcaaatgaatttgaacgaagatagttgtaataagaaatcaaacgtgatcgataataagagtgggaaggtcacggcgtacgatttactgagcaatagggtcattaagaagcccatgagtgcctcagccttgtttgtgcaagaccacagaccacagttcctgatcgagaatcctaagacatccttagaagacgctacccttcagatcgaggaactttggaaaacactatccgaggaggaaaaactcaaatacgaagaaaaagcgaccaaagatctggagcgttacaacagtcagatgaaacgggccattgaacaggagtcacagatgagcctgaaggatggacggaaaaaaataaagccaaccagcgcttggaacctggcccagaagcataagctcaaaacctctctctctaaccaacctaaactagatgaactgcttcagtcacaaatagaaaagcgacgctctcaaaacattaaaatggtccagatccccttctccatgaagaacctgaagattaactttaagaaacaaaataaggtggacttggaagaaaaggatgagccttgcctgatccacaacctccgcttccctgacgcctggctgatgacctcaaaaaccgaggtgatgctactgaacccatatcgcgttgaggaggccctgcttttcaaacggcttctcgaaaaccacaagctccccgctgagcctctcgaaaagcctatcatgcttaccgaaagcctttttaatggctctcactaccttgatgtgctttacaagatgactgctgacgaccaacgttactctggatccacatacctctctgaccctaggctgactgctaacggtttcaagatcaaactgatccctggagtgtcaataacagaaaactatctggaaatagagggtatggcaaattgtttgcccttctatggagtagcagatctgaaagaaatcctgaacgccattttgaaccgcaacgcaaaggaggtctatgagtgccgcccacgaaaagtcatctcgtatctagagggagaggccgtgaggttaagccgccagctgcccatgtatctcagtaaagaggatattcaagatatcatctatcgtatgaaacatcagtttggcaatgagatcaaagaatgtgttcatgggagaccttttttccaccacttgacctacctgccagagacaacatag

SEQ ID NO: 45868 - DNA, 2682 bp, Artificial Sequence
  derived and/or modified sequence
atgaagcagttgcctgccgcaaccgtgcggctgctctcatctagccagataataacatctgtggtctccgttgtgaaagagctgatcgaaaactcactggacgctggcgctacctccgtcgacgtcaagctggagaactatggattcgacaagattgaggtaagagacaatggtgaggggatcaaggcagtcgacgctcccgtcatggctatgaagtactatacatcaaagataaactctcatgaggacctcgagaatcttacaacctacggatttagaggcgaggcactgggatccatctgttgtatcgcagaagtcttgatcacgacgagaacagcggcagataacttctccacacagtacgtgctggacggatccggccatattctgtcccagaagccatctcaccttgggcagggaactaccgtcactgccctcaggctgttcaaaaatctgccagttagaaaacagttctattcgacagctaagaagtgcaaggatgaaattaaaaaaattcaagacctgctgatgtccttcggaatattgaagcccgatctgaggattgtgttcgtacacaacaaaatatatctgagtggcttcctgcctaagtgcgatgccgatcatagcttcacatctctgtctactcccgagcgtagttttatttttattaactccaggcccgtacatcagaaagatatcctgaaactaattaggcaccattataacctgaagtgtctcaaggaatcaactcgactgtatcccgtgttcttcctgaagattgatgtccccactgcagatgtggatgttaatctgacacccgacaagagccaggtgctgctgcagaataaggagagcgtgttgatcgccctggagaacctgatgaccacctgttacggacccttaccatcaaccaacagttacgaaaacaacaagacagacgtcagtgccgctgatattgtgctgtcaaagacagccgaaacggatgtactgtttaacaaggtcgaaagcagcggtaaaaactactccaacgtggacacttcagtgataccattccagaatgacatgcacaatgatgagtccggcaagaataccgacgattgcctgaatcaccagataagcattggggactttggatatggccactgctccagcgaaatcagcaacatcgacaaaaatacaaagaatgcctttcaggatattagcatgtcaaacgtgtcgtgggaaaatagccagacagagtactccaagacatgttttataagctctgtgaagcacacccagtccgagaacgggaataaggatcacattgatgaatccggtgagaatgaagaagaggccggactggagaactcttcagagatctccgctgatgaatggtctagaggtaatatattgaagaactcagtcggggagaacatagagccagtaaaaatcctcgtgccagaaaagtcattaccttgcaaggtgtctaataataattatcctatacccgaacagatgaacctaaacgaagactcttgcaataagaagagtaatgtgatcgataacaagtctgggaaagtgaccgcctacgacctgctgtctaatcgcgtgataaagaaacccatgtctgcctcagctttattcgtccaggaccatcggcctcagttcttaattgaaaacccgaagaccagcctggaggacgccacgctccagatcgaggagctctggaagaccctctctgaagaggaaaaacttaagtacgaggagaaagccaccaaggacctggagagatacaactcccagatgaagcgggcaatcgagcaagaatcacaaatgagcctcaaggatggccgtaagaaaatcaagcctacgagtgcttggaatctcgcacagaaacataagctgaagacaagcttatctaatcagccaaaattggatgaattactgcagtcgcaaatagaaaagcggagaagtcagaacatcaagatggtgcagattcccttttctatgaagaatctgaaaattaatttcaagaagcagaacaaggttgacctcgaggaaaaggatgaaccctgcctgatccataacttgcgattcccagacgcttggttaatgacaagcaaaacagaggtgatgttgctgaatccctatagagtggaggaagctctcctttttaaacgccttctggagaaccataaactccctgccgaacctctggagaagcccattatgttgacagagtctctgtttaacgggtcccactatctggatgtgttgtacaagatgacagctgacgatcagcgctactcaggttccacctatctgtctgaccccaggctcaccgccaatggcttcaagatcaagctgatccctggcgtgtctatcaccgaaaactacttagagatcgaagggatggccaattgtctcccgttctacggcgtcgctgatctgaaagagattcttaacgccatattgaacagaaacgccaaagaggtgtacgagtgccggccacgcaaagtgatttcctatctagaaggggaggccgtgcggctcagcaggcaactgcccatgtacttatcaaaagaagatatccaagatatcatctacaggatgaagcaccagttcggaaacgagataaaggaatgtgtgcatggcaggccattctttcaccatttaacctatctgccagagactacctag

SEQ ID NO: 45869 - DNA, 2795 bp, Artificial Sequence
  derived and/or modified sequence
ggtgcgggtgcggggttgggcctgcgcatcgggtgagacgctggctgcttgcggctagtggatggtaattgcctgcctcgcgctagcaggaagctgctctgttaaaagcgaaaatgaaacaattgcctgcggcaacagttcgactcctttcaagttctcagatcatcacttcggtggtcagtgttgtaaaagagcttattgaaaactccttggatgctggtgccacaagcgtagatgttaaactggagaactatggatttgataaaattgaggtgcgagataacggggagggtatcaaggctgttgatgcacctgtaatggcaatgaagtactacacctcaaaaataaatagtcatgaagatcttgaaaatttgacaacttacggttttcgtggagaagccttggggtcaatttgttgtatagctgaggttttaattacaacaagaacggctgctgataattttagcacccagtatgttttagatggcagtggccacatactttctcagaaaccttcacatcttggtcaaggtacaactgtaactgctttaagattatttaagaatctacctgtaagaaagcagttttactcaactgcaaaaaaatgtaaagatgaaataaaaaagatccaagatctcctcatgagctttggtatccttaaacctgacttaaggattgtctttgtacataacaagatttatctcagtggatttcttccaaagtgtgatgcagaccactctttcactagtctttcaacaccagaaagaagtttcatcttcataaacagtcgaccagtacatcaaaaagatatcttaaagttaatccgacatcattacaatctgaaatgcctaaaggaatctactcgtttgtatcctgttttctttctgaaaatcgatgttcctacagctgatgttgatgtaaatttaacaccagataaaagccaagtattattacaaaataaggaatctgttttaattgctcttgaaaatctgatgacgacttgttatggaccattacctagtacaaattcttatgaaaataataaaacagatgtttccgcagctgacatcgttcttagtaaaacagcagaaacagatgtgctttttaataaagtggaatcatctggaaagaattattcaaatgttgatacttcagtcattccattccaaaatgatatgcataatgatgaatctggaaaaaacactgatgattgtttaaatcaccagataagtattggtgactttggttatggtcattgtagtagtgaaatttctaacattgataaaaacactaagaatgcatttcaggacatttcaatgagtaatgtatcatgggagaactctcagacggaatatagtaaaacttgttttataagttccgttaagcacacccagtcagaaaatggcaataaagaccatatagatgagagtggggaaaatgaggaagaagcaggtcttgaaaactcttcggaaatttctgcagatgagtggagcaggggaaatatacttaaaaattcagtgggagagaatattgaacctgtgaaaattttagtgcctgaaaaaagtttaccatgtaaagtaagtaataataattatccaatccctgaacaaatgaatcttaatgaagattcatgtaacaaaaaatcaaatgtaatagataataaatctggaaaagttacagcttatgatttacttagcaatcgagtaatcaagaaacccatgtcagcaagtgctctttttgttcaagatcatcgtcctcagtttctcatagaaaatcctaagactagtttagaggatgcaacactacaaattgaagaactgtggaagacattgagtgaagaggaaaaactgaaatatgaagagaaggctactaaagacttggaacgatacaatagtcaaatgaagagagccattgaacaggagtcacaaatgtcactaaaagatggcagaaaaaagataaaacccaccagcgcatggaatttggcccagaagcacaagttaaaaacctcattatctaatcaaccaaaacttgatgaactccttcagtcccaaattgaaaaaagaaggagtcaaaatattaaaatggtacagatccccttttctatgaaaaacttaaaaataaattttaagaaacaaaacaaagttgacttagaagagaaggatgaaccttgcttgatccacaatctcaggtttcctgatgcatggctaatgacatccaaaacagaggtaatgttattaaatccatatagagtagaagaagccctgctatttaaaagacttcttgagaatcataaacttcctgcagagccactggaaaagccaattatgttaacagagagtctttttaatggatctcattatttagacgttttatataaaatgacagcagatgaccaaagatacagtggatcaacttacctgtctgatcctcgtcttacagcgaatggtttcaagataaaattgataccaggagtttcaattactgaaaattacttggaaatagaaggaatggctaattgtctcccattctatggagtagcagatttaaaagaaattcttaatgctatattaaacagaaatgcaaaggaagtttatgaatgtagacctcgcaaagtgataagttatttagagggagaagcagtgcgtctatccagacaattacccatgtacttatcaaaagaggacatccaagacattatctacagaatgaagcaccagtttggaaatgaaattaaagagtgtgttcatggtcgcccattttttcatcatttaacctatcttccagaaactacatga

SEQ ID NO: 45870 - protein, 44 aa, Artificial Sequence
  derived and/or modified sequence
MKQLPAATVRLLSSSQIITSVVSVVKELIENSLDAGATSVDVKL

SEQ ID NO: 45871 - protein, 770 aa, Artificial Sequence
  derived and/or modified sequence
MKQLPAATVRLLSSSQIITSVVSVVKELIENSLDAGATSVDVKLENYGFDKIEVRDNGEGIKAVDAPVMAMKYYTSKINSHEDLENLTTYGFRGEALGSICCIAEVLITTRTAADNFSTQYVLDGSGHILSQKPSHLGQGTTVTALRLFKNLPVRKQFYSTAKKCKDEIKKIQDLLMSFGILKPDLRIVFVHNKAVIWQKSRVSDHKMALMSVLGTAVMNNMESFQYHSEESQIYLSGFLPKCDADHSFTSLSTPERSFIFINSRPVHQKDILKLIRHHYNLKCLKESTRLYPVFFLKIDVPTADVDVNLTPDKSQVLLQNKESVLIALENLMTTCYGPLPSTNSYENNKTDVSAADIVLSKTAETDVLFNKVESSGKNYSNVDTSVIPFQNDMHNDESGKNTDDCLNHQISIGDFGYGHCSSEISNIDKNTKNAFQDISMSNVSWENSQTEYSKTCFISSVKHTQSENGNKDHIDESGENEEEAGLENSSEISADEWSRGNILKNSVGENIEPVKILVPEKSLPCKVSNNNYPIPEQMNLNEDSCNKKSNVIDNKSGKVTAYDLLSNRVIKKPMSASALFVQDHRPQFLIENPKTSLEDATLQIEELWKTLSEEEKLNLFNGSHYLDVLYKMTADDQRYSGSTYLSDPRLTANGFKIKLIPGVSITENYLEIEGMANCLPFYGVADLKEILNAILNRNAKEVYECRPRKVISYLEGEAVRLSRQLPMYLSKEDIQDIIYRMKHQFGNEIKECVHGRPFFHHLTYLPETT

SEQ ID NO: 45872 - DNA, 2313 bp, Artificial Sequence
  derived and/or modified sequence
atgaagcagctgcccgccgccaccgtgagactgctgagcagcagccagatcatcaccagcgtggtgagcgtggtgaaggagctgatcgagaacagcctggacgccggcgccaccagcgtggacgtgaagctggagaactacggcttcgacaagatcgaggtgagagacaacggcgagggcatcaaggccgtggacgcccccgtgatggccatgaagtactacaccagcaagatcaacagccacgaggacctggagaacctgaccacctacggcttcagaggcgaggccctgggcagcatctgctgcatcgccgaggtgctgatcaccaccagaaccgccgccgacaacttcagcacccagtacgtgctggacggcagcggccacatcctgagccagaagcccagccacctgggccagggcaccaccgtgaccgccctgagactgttcaagaacctgcccgtgagaaagcagttctacagcaccgccaagaagtgcaaggacgagatcaagaagatccaggacctgctgatgagcttcggcatcctgaagcccgacctgagaatcgtgttcgtgcacaacaaggccgtgatctggcagaagagcagagtgagcgaccacaagatggccctgatgagcgtgctgggcaccgccgtgatgaacaacatggagagcttccagtaccacagcgaggagagccagatctacctgagcggcttcctgcccaagtgcgacgccgaccacagcttcaccagcctgagcacccccgagagaagcttcatcttcatcaacagcagacccgtgcaccagaaggacatcctgaagctgatcagacaccactacaacctgaagtgcctgaaggagagcaccagactgtaccccgtgttcttcctgaagatcgacgtgcccaccgccgacgtggacgtgaacctgacccccgacaagagccaggtgctgctgcagaacaaggagagcgtgctgatcgccctggagaacctgatgaccacctgctacggccccctgcccagcaccaacagctacgagaacaacaagaccgacgtgagcgccgccgacatcgtgctgagcaagaccgccgagaccgacgtgctgttcaacaaggtggagagcagcggcaagaactacagcaacgtggacaccagcgtgatccccttccagaacgacatgcacaacgacgagagcggcaagaacaccgacgactgcctgaaccaccagatcagcatcggcgacttcggctacggccactgcagcagcgagatcagcaacatcgacaagaacaccaagaacgccttccaggacatcagcatgagcaacgtgagctgggagaacagccagaccgagtacagcaagacctgcttcatcagcagcgtgaagcacacccagagcgagaacggcaacaaggaccacatcgacgagagcggcgagaacgaggaggaggccggcctggagaacagcagcgagatcagcgccgacgagtggagcagaggcaacatcctgaagaacagcgtgggcgagaacatcgagcccgtgaagatcctggtgcccgagaagagcctgccctgcaaggtgagcaacaacaactaccccatccccgagcagatgaacctgaacgaggacagctgcaacaagaagagcaacgtgatcgacaacaagagcggcaaggtgaccgcctacgacctgctgagcaacagagtgatcaagaagcccatgagcgccagcgccctgttcgtgcaggaccacagaccccagttcctgatcgagaaccccaagaccagcctggaggacgccaccctgcagatcgaggagctgtggaagaccctgagcgaggaggagaagctgaacctgttcaacggcagccactacctggacgtgctgtacaagatgaccgccgacgaccagagatacagcggcagcacctacctgagcgaccccagactgaccgccaacggcttcaagatcaagctgatccccggcgtgagcatcaccgagaactacctggagatcgagggcatggccaactgcctgcccttctacggcgtggccgacctgaaggagatcctgaacgccatcctgaacagaaacgccaaggaggtgtacgagtgcagacccagaaaggtgatcagctacctggagggcgaggccgtgagactgagcagacagctgcccatgtacctgagcaaggaggacatccaggacatcatctacagaatgaagcaccagttcggcaacgagatcaaggagtgcgtgcacggcagacccttcttccaccacctgacctacctgcccgagaccacctag

SEQ ID NO: 45873 - DNA, 2313 bp, Artificial Sequence
  derived and/or modified sequence
atgaaacagcttccagccgctaccgtgcggctcctgagttcttctcagataatcacatctgtcgtctcggtggtgaaagaactgattgagaactctctggacgctggagccaccagcgtagacgttaaactcgaaaactatggattcgataaaatagaggtcagggataacggtgaaggtatcaaggcagtggatgctcctgtgatggcaatgaaatattacaccagtaagatcaactctcacgaagatctggagaacctgacgacctatggcttccgcggagaggctctcgggtccatttgttgcattgcagaggtgttaataacgaccagaaccgccgccgataacttctcgactcagtacgtgctcgatgggtcgggccacatcctgagccagaagccgtctcacttagggcagggcactactgtcactgcgctccggcttttcaagaacctgccggtccgcaaacagttctacagcaccgcaaagaagtgcaaggacgaaattaagaagatccaggatctcctcatgagcttcggcatactaaaaccagacctgaggatcgtgtttgttcataacaaagcagtgatctggcagaaaagtagggtaagcgaccacaagatggccctgatgtctgtgctcgggacagccgtgatgaataatatggaatcgtttcagtaccattcggaggagagtcagatttacctctctggattcttgcccaaatgcgacgcagaccacagcttcaccagcctaagtactcccgaacgatcattcatttttattaatagcaggccggtccatcagaaggatattctaaagctgattagacatcactacaatctgaagtgtctgaaagaatctactagactgtaccctgtgttctttttgaaaattgacgtccccacagcagatgtggacgtgaacctcactcccgataagtctcaggtgcttctgcagaataaggagtctgtcctgatcgcgctagagaatcttatgaccacgtgttatggcccgctgccttctactaactcttacgagaacaacaaaaccgacgtgagcgccgctgacatcgtcttgagcaaaactgcagaaacagacgtgctgtttaataaagtcgaatctagcggcaaaaattactccaatgtggatacttctgtgatcccgttccagaacgatatgcataacgacgaatccggtaagaacaccgatgattgcctgaatcaccagatctccataggcgatttcgggtatgggcattgcagctcagagatcagcaacatcgacaagaacactaagaacgcctttcaggatattagcatgtctaacgtgagctgggaaaatagtcagacagagtacagcaaaacttgctttatttctagcgtcaaacacacacagagtgaaaatgggaataaggaccacattgacgagtctggcgaaaacgaggaggaagccggactcgaaaattcctcggagatatctgcagatgaatggagccgcggtaatatcctgaaaaactcagtgggagagaatatcgaaccagtgaagatccttgtgcccgagaaaagcctgccgtgcaaggtgtccaataataactacccgattccggagcagatgaacctgaacgaagattcctgtaacaagaagtccaacgtcattgataataagagtgggaaagtcacggcctacgaccttttgtcaaaccgtgtgatcaaaaaacctatgtcggcttctgcgttgtttgtgcaggatcaccggccccagttcttaattgagaatccaaagacatccctcgaggacgccactctccagattgaggagttgtggaagaccctgagtgaggaggagaaactcaacctgtttaacggcagccactatctcgatgtcctgtataaaatgacggcggacgaccagcggtattctggaagtacttatctgtctgacccccgcctgaccgccaacggctttaagataaaactgattcctggtgtgtcaataacagagaactacctagaaatcgaggggatggcaaactgcctcccgttctatggagtggccgatctaaaagagatcttgaacgccattctgaaccggaacgccaaagaagtgtacgagtgccgccccagaaaagtgatctcttacctggagggagaggccgtccgactgagtagacaattacctatgtatctatccaaggaggatatccaggatatcatctaccgaatgaaacatcagtttggtaatgagatcaaggagtgcgtccacggtcggccattctttcatcacctgacgtacctccctgaaacaacatag

SEQ ID NO: 45874 - DNA, 2313 bp, Artificial Sequence
  derived and/or modified sequence
atgaagcagctgcctgctgccaccgtgcggctgctgagcagcagccagatcatcacctctgtggtgtctgtggtgaaggagctgattgagaacagcctggatgctggggccacctctgtggatgtgaagctggagaactacggctttgacaagattgaggtgcgggacaatggagagggcatcaaggctgtggatgcccctgtgatggccatgaagtactacaccagcaagatcaacagccatgaggacctggagaacctgaccacctacggcttccggggggaggccctgggcagcatctgctgcatcgccgaggtgctgatcaccaccaggacagctgctgacaacttcagcacccagtatgtgctggatggcagcggccacatcctgagccagaagcccagccacctgggccagggcaccaccgtgacagccctgcggctcttcaagaacctgcctgtgaggaagcagttctacagcacagccaagaagtgcaaggatgagatcaagaagatccaggacctgctgatgagctttggcatcctgaagccagacctgcgcatcgtgtttgtgcacaacaaggctgtgatctggcagaagagccgggtgtctgaccacaagatggccctgatgtctgtgctgggcacagctgtgatgaacaacatggagagcttccagtaccacagcgaggagagccagatctacctgagcggcttcctgcccaagtgtgatgctgaccacagcttcaccagcctgagcaccccagagaggagcttcatcttcatcaacagcaggcctgtgcaccagaaggacatcctgaagctgatccgccaccactacaacctgaagtgcctgaaggagagcacccggctgtaccctgtgttcttcctgaagattgatgtgcccacagcagatgtggatgtgaacctgaccccagacaagagccaggtgctgctgcagaacaaggagagcgtgctgattgccctggagaacctgatgaccacctgctacggccccctgcccagcaccaacagctatgagaacaacaagacagatgtgtctgctgctgacatcgtgctgagcaagacagctgagacagatgtgctcttcaacaaggtggagagcagcggcaagaactacagcaatgtggacaccagcgtcatccccttccagaatgacatgcacaatgatgaaagtggcaagaacacagatgactgcctgaaccaccagatcagcattggagactttggctacggccactgcagcagcgagatcagcaacatcgacaagaacaccaagaatgccttccaggacatctccatgagcaatgtgtcctgggagaacagccagacagagtacagcaagacctgcttcatcagctctgtgaagcacacccagagtgaaaatggaaacaaggaccacattgatgagagcggggagaatgaggaggaggccggcctggagaacagcagcgagatctctgcagatgagtggagccggggcaacatcctgaagaacagcgtgggggagaacatcgagcctgtgaagatcctggtgcctgagaagagcctgccctgcaaggtgagcaacaacaactaccccatccctgagcagatgaacctgaatgaagacagctgcaacaagaagagcaatgtgattgacaacaagagcggcaaggtgacagcctatgacctgctgagcaacagagtcatcaagaagcccatgtctgccagcgccctgtttgtgcaggaccaccggccccagttcctgattgagaaccccaagaccagcctggaggatgccaccctgcagatcgaggagctgtggaagaccctgtctgaggaggagaagctgaacctcttcaacggcagccactacctggatgtgctgtacaagatgacagcagatgaccagcgctacagcggcagcacctacctgagtgacccccggctgacagccaacggcttcaagatcaagctgatccctggggtgtccatcacagagaactacctggagattgagggcatggccaactgcctgcccttctatggagtggccgacctgaaggagatcctgaatgccatcctgaacagaaatgccaaggaggtgtatgaatgtcggcccaggaaggtgatctcctacctggagggggaggccgtgcggctgagccggcagctgcccatgtacctgagcaaagaagacatccaggacatcatctacaggatgaagcaccagtttggaaatgagatcaaggaatgtgtgcacggccggcccttcttccaccacctgacctacctgcctgagaccacctag

SEQ ID NO: 45875 - DNA, 2313 bp, Artificial Sequence
  derived and/or modified sequence
atgaagcagctgcccgccgccaccgtgcggctgctgagcagcagccagatcatcacctccgttgtgagcgtggtgaaggagttgatcgagaattctctcgacgcaggagccacatccgttgacgtgaagcttgaaaattacggattcgacaaaattgaagtgcgcgataacggagagggcatcaaggccgttgacgcccctgttatggctatgaagtactatacttccaagatcaattctcacgaagacctggagaacctgaccacctacgggtttcgcggcgaggccctggggagcatctgttgcattgccgaggtgttgataactacccgtacagcggccgataatttctcaacgcagtatgtgcttgacggatcagggcacatcctatcccaaaaaccgtcccacctcgggcagggcaccactgtgactgcccttcgcctatttaaaaatctgcctgttcgaaagcaattctacagtacagccaaaaagtgcaaagacgaaataaaaaagatacaggatcttctcatgagcttcggtattctcaaaccagacctgagaatcgtattcgtgcataacaaggcggtgatctggcagaagtccagagtgtcagatcataagatggctctaatgtcagtgctgggcacagccgtgatgaacaacatggagtccttccagtaccactccgaggagagccagatctacctgtctgggtttctaccaaagtgcgacgccgaccactcatttacctctctgtctactccagaacggtctttcatctttattaattctcgcccagtgcatcagaaggatattctcaagttaatccggcaccactataacctgaagtgtttgaaggaaagcacgcggctctatccagtgttctttttgaaaattgacgtgcctacagccgacgtagatgtcaacctcaccccagataagtcacaggtactcctgcagaataaggagtcagtgctaatcgctcttgagaacctcatgactacctgttacggcccgctgccgagcacgaattcttatgagaataataagaccgacgtctccgccgcggacatagttttgtccaagacagctgaaaccgacgtgcttttcaacaaagtggaaagtagtggtaaaaattacagtaatgtcgatacttcagtgattcctttccaaaatgacatgcacaacgacgaatctgggaaaaacactgacgactgtttgaaccaccagataagcatcggcgacttcggatatggacactgcagctccgaaattagcaatattgacaagaataccaagaatgcttttcaggacatatcaatgtccaacgtgtcctgggagaactcccagacggagtattcgaagacctgtttcatttctagcgtcaagcatactcaaagtgaaaacgggaataaagaccatattgatgagtctggggagaacgaagaagaagccggcctagagaattcctccgaaatatcggctgacgaatggagccgcggaaacattttgaagaactcagtcggggaaaacatcgagccagttaagatcttggtcccggaaaagagcctcccttgtaaggtgagtaataataactatccaattcctgagcagatgaacctcaacgaagatagctgtaataaaaagtcaaatgtgatcgacaataagagcgggaaagtgactgcatatgaccttcttagtaatagggtgattaaaaaacctatgagcgcctccgctctgtttgtccaggaccatcggccacaatttctcattgaaaaccctaagacctctctggaggatgccacccttcagatagaggagctgtggaaaacgctctcagaggaggagaaactgaatttgtttaacggtagccactatctggacgtgctctataagatgacagcggatgatcaacgatactctggatcgacctatcttagcgatccccggttaacagcgaacgggttcaagatcaagctgattccaggcgttagcattacagagaactaccttgaaatcgagggcatggcgaattgtctgcctttttatggcgttgccgatctgaaggagattctgaacgctattctcaatcggaatgcaaaggaggtatacgaatgccgtcctcgaaaggtgatttcctatctggaaggggaggccgtgcggctgtcccggcagctgcctatgtacctctccaaggaggacatccaggacatcatctataggatgaaacatcagttcggaaatgaaataaaggagtgcgtgcacggaaggccattcttccatcacctgacctacttgccagaaacaacctag

SEQ ID NO: 45876 - DNA, 2313 bp, Artificial Sequence
  derived and/or modified sequence
atgaagcagctgcccgcagccaccgtgcgactcctgagctcaagtcagatcataacatcagtggtgagtgtcgtcaaggaactgattgagaacagtctcgatgccggagccacgagcgtggacgtcaaacttgaaaattacggatttgacaagattgaagtacgcgataacggagagggcatcaaagctgtcgatgcccctgtgatggccatgaagtactatacatccaaaatcaattctcacgaagacttggaaaaccttacaacatacggattccgaggcgaagcccttggatcgatctgctgtattgcggaggtgttgatcaccacccggacagcggcagataatttcagcacacagtacgtgttggacggctctggtcatattctttctcagaagccaagccacctcgggcagggtacaaccgtaaccgcccttaggttgtttaagaaccttccagtgcggaaacagttttattccacagccaagaagtgcaaagacgagataaagaaaatacaagacctgcttatgtcttttggcattctgaaaccagacctgcggatcgtctttgtgcacaataaagccgtgatttggcagaaatctcgcgtgagcgatcataaaatggcactgatgagcgttttaggaactgcggtgatgaacaatatggagagcttccaataccactctgaggagagtcagatttacttgagtggctttctgccaaagtgcgatgctgatcacagttttacatccctatctaccccagaacgttcgtttatcttcataaacagccgccctgtgcatcaaaaggacatccttaaattgattcgtcaccattataaccttaagtgtcttaaagagagcactcggctttacccagtcttttttctgaaaatcgacgtgccaacagctgacgtggacgtcaacctgacccccgataaatcacaggttttgttgcaaaacaaggaatctgttcttatcgcccttgagaatctgatgacaacctgttatgggcctctcccctctaccaacagctacgaaaacaacaaaactgatgtgtccgccgctgatatcgtcctgtctaaaaccgctgaaactgatgttctatttaacaaagtggagtcttccggcaaaaattacagcaacgtggacactagtgtcatcccgtttcagaacgacatgcataatgacgaatctggcaaaaacaccgacgattgtcttaaccatcagatttctatcggggactttgggtatggccactgttctagcgagatcagtaacatcgacaagaacacgaagaacgcattccaggatatcagcatgagcaacgtttcttgggagaacagtcagaccgaatacagcaagacatgtttcatcagctcagttaagcatacacagtccgaaaacggaaacaaggaccatatcgacgagtctggcgagaacgaggaggaagccggtttggagaattcttcagagatatctgcagacgagtggagtcgaggtaacattctcaagaattccgtgggagagaacattgaacctgtcaaaatactagtccctgagaaatcgcttccttgcaaagtgagcaacaacaattacccgattcctgagcagatgaacctaaacgaggacagttgtaacaagaaatccaacgttatagacaataagagcggaaaagtcacagcatacgacctcctgagtaaccgggtgataaagaagcctatgtctgcctccgcccttttcgtgcaggatcaccgccctcaatttttaatcgagaatcctaagacctctctggaggacgccacattacaaatcgaggagctttggaagactctgtcagaggaggagaagctgaacttattcaacgggtcgcactacttggatgtgctgtataaaatgacggcagacgaccaaaggtattccgggagtacatatttgagcgacccaaggctcaccgctaacggcttcaagattaagctgatcccaggtgtatccatcacagagaattacctggagattgaaggtatggccaactgcctgccattctacggggttgccgacttaaaggaaatccttaacgccatcttgaataggaatgctaaggaagtgtatgaatgccggccaagaaaggttatcagttatttggaaggggaagccgtaaggctgagccgccagctgcctatgtacctcagtaaagaggatattcaggacatcatttaccgaatgaaacaccagtttggaaacgagatcaaagagtgtgtccacggcagaccgttcttccaccacctcacgtacttacctgaaactacttag

SEQ ID NO: 45877 - DNA, 2576 bp, Artificial Sequence
  derived and/or modified sequence
gctgcttgcggctagtggatggtaattgcctgcctcgcgctagcaggaagctgctctgttaaaagcgaaaatgaaacaattgcctgcggcaacagttcgactcctttcaagttctcagatcatcacttcggtggtcagtgttgtaaaagagcttattgaaaactccttggatgctggtgccacaagcgtagatgttaaactggagaactatggatttgataaaattgaggtgcgagataacggggagggtatcaaggctgttgatgcacctgtaatggcaatgaagtactacacctcaaaaataaatagtcatgaagatcttgaaaatttgacaacttacggttttcgtggagaagccttggggtcaatttgttgtatagctgaggttttaattacaacaagaacggctgctgataattttagcacccagtatgttttagatggcagtggccacatactttctcagaaaccttcacatcttggtcaaggtacaactgtaactgctttaagattatttaagaatctacctgtaagaaagcagttttactcaactgcaaaaaaatgtaaagatgaaataaaaaagatccaagatctcctcatgagctttggtatccttaaacctgacttaaggattgtctttgtacataacaaggcagttatttggcagaaaagcagagtatcagatcacaagatggctctcatgtcagttctggggactgctgttatgaacaatatggaatcctttcagtaccactctgaagaatctcagatttatctcagtggatttcttccaaagtgtgatgcagaccactctttcactagtctttcaacaccagaaagaagtttcatcttcataaacagtcgaccagtacatcaaaaagatatcttaaagttaatccgacatcattacaatctgaaatgcctaaaggaatctactcgtttgtatcctgttttctttctgaaaatcgatgttcctacagctgatgttgatgtaaatttaacaccagataaaagccaagtattattacaaaataaggaatctgttttaattgctcttgaaaatctgatgacgacttgttatggaccattacctagtacaaattcttatgaaaataataaaacagatgtttccgcagctgacatcgttcttagtaaaacagcagaaacagatgtgctttttaataaagtggaatcatctggaaagaattattcaaatgttgatacttcagtcattccattccaaaatgatatgcataatgatgaatctggaaaaaacactgatgattgtttaaatcaccagataagtattggtgactttggttatggtcattgtagtagtgaaatttctaacattgataaaaacactaagaatgcatttcaggacatttcaatgagtaatgtatcatgggagaactctcagacggaatatagtaaaacttgttttataagttccgttaagcacacccagtcagaaaatggcaataaagaccatatagatgagagtggggaaaatgaggaagaagcaggtcttgaaaactcttcggaaatttctgcagatgagtggagcaggggaaatatacttaaaaattcagtgggagagaatattgaacctgtgaaaattttagtgcctgaaaaaagtttaccatgtaaagtaagtaataataattatccaatccctgaacaaatgaatcttaatgaagattcatgtaacaaaaaatcaaatgtaatagataataaatctggaaaagttacagcttatgatttacttagcaatcgagtaatcaagaaacccatgtcagcaagtgctctttttgttcaagatcatcgtcctcagtttctcatagaaaatcctaagactagtttagaggatgcaacactacaaattgaagaactgtggaagacattgagtgaagaggaaaaactgaatctttttaatggatctcattatttagacgttttatataaaatgacagcagatgaccaaagatacagtggatcaacttacctgtctgatcctcgtcttacagcgaatggtttcaagataaaattgataccaggagtttcaattactgaaaattacttggaaatagaaggaatggctaattgtctcccattctatggagtagcagatttaaaagaaattcttaatgctatattaaacagaaatgcaaaggaagtttatgaatgtagacctcgcaaagtgataagttatttagagggagaagcagtgcgtctatccagacaattacccatgtacttatcaaaagaggacatccaagacattatctacagaatgaagcaccagtttggaaatgaaattaaagagtgtgttcatggtcgcccattttttcatcatttaacctatcttccagaaactacatgattaaatatgtttaagaagattagttaccattgaaattggttctgtcataaaacagcatgagtctggttttaaattatctttgtattatgtgtcacatggttattttttaaatgaggattcactgacttgtttttatattgaaaaaagttccacgtattgtagaaaacgtaaataaactaatatagactattca

SEQ ID NO: 45878 - protein, 593 aa, Artificial Sequence
  derived and/or modified sequence
MAAHRPVEWVQAVVSRFDEQLPIKTGQQNTHTKVSTEHNKECLINISKYKFSLVISGLTTILKNVNNMRIFGEAAEKNLYLSQLIILDTLEKCLAGQPKDTMRLDETMLVKQLLPEICHFLHTCREGNQHAAELRNSASGVLFSLSCNNFNAVFSRISTRLQELTVCSEDNVDVHDIELLQYINVDCAKLKRLLKETAFKFKALKKVAQLAVINSLEKAFWNWVENYPDEFTKLYQIPQTDMAECAEKLFDLVDGFAESTKRKAAVWPLQIILLILCPEIIQDISKDVVDENNMNKKLFLDSLRKALAGHGGSRQLTESAAIACVKLCKASTYINWEDNSVIFLLVQSMVVDLKNLLFNPSKPFSRGSQPADVDLMIDCLVSCFRISPHNNQHFKICLAQNSPSTFHYVLVNSLHRIITNSALDWWPKIDAVYCHSVELRNMFGETLHKAVQGCGAHPAIRMAPSLTFKEKVTSLKFKEKPTDLETRSYKYLLLSMVKLIHADPKLLLCNPRKQGPETQGSTAELITGLVQLVPQSHMPEIAQEAMEALLVLHQLDSIDLWNPDAPVETFWEIRYMYFYFLNSTFKFYFVFLS

SEQ ID NO: 45879 - DNA, 1782 bp, Artificial Sequence
  derived and/or modified sequence
atggccgcccacagacccgtggagtgggtgcaggccgtggtgagcagattcgacgagcagctgcccatcaagaccggccagcagaacacccacaccaaggtgagcaccgagcacaacaaggagtgcctgatcaacatcagcaagtacaagttcagcctggtgatcagcggcctgaccaccatcctgaagaacgtgaacaacatgagaatcttcggcgaggccgccgagaagaacctgtacctgagccagctgatcatcctggacaccctggagaagtgcctggccggccagcccaaggacaccatgagactggacgagaccatgctggtgaagcagctgctgcccgagatctgccacttcctgcacacctgcagagagggcaaccagcacgccgccgagctgagaaacagcgccagcggcgtgctgttcagcctgagctgcaacaacttcaacgccgtgttcagcagaatcagcaccagactgcaggagctgaccgtgtgcagcgaggacaacgtggacgtgcacgacatcgagctgctgcagtacatcaacgtggactgcgccaagctgaagagactgctgaaggagaccgccttcaagttcaaggccctgaagaaggtggcccagctggccgtgatcaacagcctggagaaggccttctggaactgggtggagaactaccccgacgagttcaccaagctgtaccagatcccccagaccgacatggccgagtgcgccgagaagctgttcgacctggtggacggcttcgccgagagcaccaagagaaaggccgccgtgtggcccctgcagatcatcctgctgatcctgtgccccgagatcatccaggacatcagcaaggacgtggtggacgagaacaacatgaacaagaagctgttcctggacagcctgagaaaggccctggccggccacggcggcagcagacagctgaccgagagcgccgccatcgcctgcgtgaagctgtgcaaggccagcacctacatcaactgggaggacaacagcgtgatcttcctgctggtgcagagcatggtggtggacctgaagaacctgctgttcaaccccagcaagcccttcagcagaggcagccagcccgccgacgtggacctgatgatcgactgcctggtgagctgcttcagaatcagcccccacaacaaccagcacttcaagatctgcctggcccagaacagccccagcaccttccactacgtgctggtgaacagcctgcacagaatcatcaccaacagcgccctggactggtggcccaagatcgacgccgtgtactgccacagcgtggagctgagaaacatgttcggcgagaccctgcacaaggccgtgcagggctgcggcgcccaccccgccatcagaatggcccccagcctgaccttcaaggagaaggtgaccagcctgaagttcaaggagaagcccaccgacctggagaccagaagctacaagtacctgctgctgagcatggtgaagctgatccacgccgaccccaagctgctgctgtgcaaccccagaaagcagggccccgagacccagggcagcaccgccgagctgatcaccggcctggtgcagctggtgccccagagccacatgcccgagatcgcccaggaggccatggaggccctgctggtgctgcaccagctggacagcatcgacctgtggaaccccgacgcccccgtggagaccttctgggagatcagatacatgtacttctacttcctgaacagcaccttcaagttctacttcgtgttcctgagctag

SEQ ID NO: 45880 - DNA, 1782 bp, Artificial Sequence
  derived and/or modified sequence
atggcagcccaccggcccgtggaatgggttcaggccgtagtctctcgatttgacgaacagttgcctattaagacagggcagcagaatacacacacgaaggtttctaccgagcacaacaaggaatgccttatcaatatttcaaagtataaattcagtctggtcatttctggcctgacgaccatactcaagaatgtcaacaatatgcgcatctttggggaggctgcagaaaagaacctttatctttcccagctcattatcctcgacacgcttgagaagtgcctggcggggcaacctaaagatactatgagactcgacgagaccatgcttgtaaagcagcttcttcccgagatctgccacttcctgcatacatgccgagagggaaatcaacatgcagcagaacttagaaactctgcttcaggagtattgttctctctgtcttgtaataacttcaacgcagtgttctcccgcataagtacacggcttcaggaattgacagtgtgcagcgaggacaacgtcgatgtgcatgatattgagctcctgcagtatattaatgttgactgtgccaaactgaaacgcctcctgaaggaaactgcattcaaattcaaagcgctcaagaaagtggcccagcttgcagtgattaacagcctcgagaaagccttctggaactgggtggaaaactatcctgacgagttcacaaaactctaccagataccccaaaccgatatggcggagtgcgccgagaagctattcgatctagtggatggcttcgccgagtctacgaaaaggaaggccgccgtctggccactgcaaatcatactgctgattttgtgccctgagatcattcaagacatttctaaggatgtggtggacgagaacaacatgaacaagaagcttttcttagactcattacgcaaagcgttagccggccacgggggatcacgccagcttacagagtctgccgccattgcctgcgtaaagttgtgcaaggccagcacatacattaactgggaggacaattccgtgatctttctcctggtgcagtcaatggtcgtagacttgaagaacctgctattcaatccttctaaaccgttttccagagggtcgcagcccgccgacgtggacctcatgatagactgtcttgtgagctgtttccgaatctccccccataataatcagcacttcaagatatgtcttgcccaaaactcaccttctacgtttcactatgtgcttgtgaacagcctacatagaattattaccaattccgctttggactggtggcctaaaatcgacgccgtgtattgtcacagtgtggagctaagaaatatgttcggcgagactttgcataaagccgtccagggatgcggcgctcaccccgccataagaatggccccgtctttgactttcaaggaaaaggtgacctccctcaagtttaaggaaaagcccaccgatctggaaactcgttcctataagtacttattgctctctatggtgaagcttattcacgccgatcccaagctgcttctatgtaaccccaggaaacagggtccagagacccaaggatcgacagccgagctcatcacaggacttgtccagttggtgcctcagtcccatatgcctgagatcgcacaggaggccatggaggccctcctggtgttgcaccagttggactccattgacctctggaaccccgacgctcctgtcgaaactttctgggagatccggtatatgtacttctatttcttgaatagcacattcaagttttatttcgttttcctttcctag

SEQ ID NO: 45881 - DNA, 1782 bp, Artificial Sequence
  derived and/or modified sequence
atggccgcccacaggcctgtggagtgggtgcaggccgtggtgtccagatttgatgagcagctgcccatcaagacaggccagcagaacacccacaccaaggtgtccacagagcacaacaaggaatgtctcatcaacatcagcaagtacaagttcagcctggtgatcagcggcctgaccaccatcctgaagaatgtgaacaacatgaggatctttggagaggccgctgagaagaacctgtacctgagccagctgatcatcctggacaccctggagaagtgcctggccggccagcccaaggacaccatgaggctggatgagaccatgctggtgaagcagctgctgcctgagatctgccacttcctgcacacctgccgggagggcaaccagcacgccgctgagctgagaaattctgccagcggcgtgctcttcagcctgagctgcaacaacttcaatgctgtgttcagccgcatcagcacccggctgcaggagctgactgtgtgcagtgaagataatgtggatgtgcatgacatcgagctgctgcagtacatcaacgtggactgtgccaagctgaagaggctgctgaaggagacagccttcaagttcaaggccctgaagaaggtggcccagctggccgtcatcaacagcctggagaaggccttctggaactgggtggagaactacccagatgagttcaccaagctgtaccagatcccccagacagacatggccgagtgtgccgagaagctgtttgacctggtggatggctttgctgagagcaccaagaggaaggctgctgtgtggcccctgcagatcatcctgctgatcctgtgcccagagatcatccaggacatcagcaaggatgtggtggatgagaacaacatgaacaagaagctgttcctggacagcctgaggaaggccctggccggccacggcggcagccggcagctgacagaatctgctgccatcgcctgtgtgaagctgtgcaaggccagcacctacatcaactgggaggacaacagcgtcatcttcctgctggtgcagagcatggtggtggacctgaagaacctgctcttcaaccccagcaagcccttcagccggggcagccagcctgcagatgtggacctgatgattgactgcctggtgtcctgcttccgcatcagcccccacaacaaccagcacttcaagatctgcctggcccagaacagccccagcaccttccactacgtgctggtgaacagcctgcaccgcatcatcaccaacagcgccctggactggtggcccaagattgatgctgtgtactgccacagcgtggagctgaggaacatgtttggagagaccctgcacaaggctgtgcagggctgtggggcccacccagccatccgcatggcccccagcctgaccttcaaggagaaggtgaccagcctgaagttcaaggagaagcccacagacctggagaccaggagctacaagtacctgctgctgtccatggtgaagctgattcatgctgaccccaagctgctgctgtgcaaccccaggaagcagggccctgagacccagggcagcacagctgagctgatcaccggcctggtgcagctggtgccccagagccacatgcctgagatcgcccaggaggccatggaggccctgctggtgctgcaccagctggacagcattgacctgtggaacccagatgcccctgtggagaccttctgggagatccgctacatgtacttctacttcctgaacagcaccttcaagttctactttgtgttcctgtcctag

SEQ ID NO: 45882 - DNA, 1782 bp, Artificial Sequence
  derived and/or modified sequence
atggccgcccaccggcccgtggagtgggtgcaggccgtggtgagccggtttgacgagcaactgcccattaagacaggccagcagaacacgcatacgaaagtgagtaccgagcataacaaagagtgcctgattaatatctctaaatacaaatttagcctcgtcatctccgggttgacaacaattctgaaaaatgtgaacaatatgcgtatcttcggcgaagctgccgaaaagaatctctacttatcacagctcatcatcctcgatacccttgaaaagtgtttggctggccagcctaaggacactatgcggctcgacgaaaccatgctggtaaagcaactgctccctgagatttgccacttcttacatacttgcagagagggcaatcaacacgccgccgagctgagaaacagcgcgtccggggtgctgtttagcctaagctgcaacaacttcaacgcagttttcagccggatatcaacgaggcttcaggaactgacagtatgctcggaggacaacgtggacgttcatgatatagaactgctgcaatatatcaatgttgattgtgccaagctgaagaggctgctgaaggagactgcgtttaaatttaaggcactgaagaaagtcgctcagctcgcagtgatcaatagtctagaaaaggcattctggaattgggtcgaaaattaccctgacgaattcaccaagctctaccaaatcccacagacagacatggcggagtgcgccgaaaaactctttgacctagtagatggcttcgccgagtctactaaacggaaggccgcagtgtggcctctgcaaatcattctattgatcctatgtccagagattattcaggacatatcaaaggacgtcgttgatgagaataatatgaacaagaaactgtttctggattcactgcggaaggcgctggccggacacggaggctccaggcagctgacagagtcggccgccatcgcctgcgttaagctttgcaaggcttccacctatataaactgggaagacaactctgtgatatttctgctcgtgcaatccatggtggtagacctgaagaatctgctgttcaacccctccaagccattttcacgtggctctcagccagccgatgtcgatttgatgatcgattgtcttgtgtcttgcttcagaatctccccccataacaatcagcattttaagatctgtctggctcaaaattctccaagcactttccactatgtgctggtgaattcattgcaccgaatcatcacaaattctgccctggactggtggcctaagattgatgcagtttactgtcattctgtggagctccggaatatgttcggagaaaccctccacaaggccgtccaggggtgcggcgctcatcccgctattcgcatggcgcctagcctcacattcaaggagaaagttacctcgctgaaatttaaggagaaacccactgatctggaaacaagatcatacaaatatcttcttctgtccatggtaaaactcattcacgccgatcctaagcttttgctttgtaatcctcggaaacaaggtcccgagacccagggcagtactgctgaacttattactggtctggtccagctggttccgcaaagtcacatgcccgaaattgctcaggaggccatggaggcactcttggtcctgcaccagttagatagtatcgacctttggaaccccgatgcccctgtggagactttctgggagatccgctatatgtatttctacttcctgaacagcacatttaaattctactttgtttttctgtcatag

SEQ ID NO: 45883 - DNA, 2939 bp, Artificial Sequence
  derived and/or modified sequence
aatctctagctcgctcgcgctccctctccccgggccgtggaaaggatcccacttccggtggggtgtcatggcggcgtctcggactgtgatggctgtggggagacggcgctagtggggagagcgaccaagaggccccctcccctccccgggtccccttcccctatccccctccccccagcctccttgccaacgccccctttccctctccccctcccgctcggcgctgaccccccatccccacccccgtgggaacactgggagcctgcactccacagaccctctccttgcctcttccctcacctcagcctccgctccccgccctcttcccggcccagggcgccggcccacccttccctccgccgccccccggccgcggggaggacatggccgcgcacaggccggtggaatgggtccaggccgtggtcagccgcttcgacgagcagcttccaataaaaacaggacagcagaacacacataccaaagtcagtactgagcacaacaaggaatgtctaatcaatatttccaaatacaagttttctttggttataagcggcctcactactattttaaagaatgttaacaatatgagaatatttggagaagctgctgaaaaaaatttatatctctctcagttgattatattggatacactggaaaaatgtcttgctgggcaaccaaaggacacaatgagattagatgaaacgatgctggtcaaacagttgctgccagaaatctgccattttcttcacacctgtcgtgaaggaaaccagcatgcagctgaacttcggaattctgcctctggggttttattttctctcagctgcaacaacttcaatgcagtctttagtcgcatttctaccaggttacaggaattaactgtttgttcagaagacaatgttgatgttcatgatatagaattgttacagtatatcaatgtggattgtgcaaaattaaaacgactcctgaaggaaacagcatttaaatttaaagccctaaagaaggttgcgcagttagcagttataaatagcctggaaaaggcattttggaactgggtagaaaattatccagatgaatttacaaaactgtaccagatcccacagactgatatggctgaatgtgcagaaaagctatttgacttggtggatggttttgctgaaagcaccaaacgtaaagcagcagtttggccactacaaatcattctccttatcttgtgtccagaaataatccaggatatatccaaagacgtggttgatgaaaacaacatgaataagaagttatttctggacagtctacgaaaagctcttgctggccatggaggaagtaggcagctgacagaaagtgctgcaattgcctgtgtcaaactgtgtaaagcaagtacttacatcaattgggaagataactctgtcattttcctacttgttcagtccatggtggttgatcttaagaacctgctttttaatccaagtaagccattctcaagaggcagtcagcctgcagatgtggatctaatgattgactgccttgtttcttgctttcgtataagccctcacaacaaccaacactttaagatctgcctggctcagaattcaccttctacatttcactatgtgctggtaaattcactccatcgaatcatcaccaattccgcattggattggtggcctaagattgatgctgtgtattgtcactcggttgaacttcgaaatatgtttggtgaaacacttcataaagcagtgcaaggttgtggagcacacccagcaatacgaatggcaccgagtcttacatttaaagaaaaagtaacaagccttaaatttaaagaaaaacctacagacctggagacaagaagctataagtatcttctcttgtccatggtgaaactaattcatgcagatccaaagctcttgctttgtaatccaagaaaacaggggcccgaaacccaaggcagtacagcagaattaattacagggctcgtccaactggtccctcagtcacacatgccagagattgctcaggaagcaatggaggctctgctggttcttcatcagttagatagcattgatttgtggaatcctgatgctcctgtagaaacattttgggagattaggtatatgtacttttattttttaaattcaacttttaaattttattttgtatttttgtcttgaaatattaactctgtagtacttagtacattgtaaaacttacacttccaaaggttttatggttttgtattttatttgacttcaaattattagaatttcttgttttaactgtaagaaaagtatcacagcaatttagaaaataaattttaagaatagtgctaaattttgtcaccctaacataagtactgttgtttggtatattacttttttcagatttcaatgtggttactactgtatttttaatagattttcatagttataagcctagaatgataaaattttgtaacaatactgttttttcagttttttgaactatgatctttcataaactttctgtaataccaatgctttcgatgaatgaattaataatggacacctgcttagaagaaaaaaatgtatgcagaattttgtggtctgcttcctagattatacaaatcattacattttaatgagcatgaagtcaccacacggaggaaaatgtaaatgtgtaaacctcaagtttgccattatcttataagaatgggtgtgctaagttacttggcagctgaattaaaccttactctagagtagtgctgtccactagtaatataatgagaaccccatatgttaaaaacttttttacttactacattaaagagtaaaaagaagcaggtaaaattaattgtaattatgttttgtttaacccggtgtatattatctataatttcaacatgtaatcaatataaaagttattaatgacatttcattctcttttttttaataaagtcttcaaacttt

SEQ ID NO: 45884 - DNA, 1782 bp, Artificial Sequence
  derived and/or modified sequence
atggccgctcaccgacccgttgagtgggtacaggcagtcgtctccaggttcgacgaacaacttcctattaaaaccggccagcagaacacacatacaaaagtgtccaccgaacacaacaaagaatgcctaataaacattagtaagtacaaattctccttggtgatcagcgggctcaccaccatcctcaaaaacgtgaacaatatgagaattttcggggaggccgctgaaaaaaacttatacctcagccagttgattatattagatactctggagaagtgtctcgctggacagccaaaagacacaatgagactcgatgagaccatgttagtgaaacagcttcttccagagatttgtcacttcctgcatacctgccgggaagggaatcagcatgccgctgagttaaggaatagtgcaagcggggtgctctttagcctgtcttgcaataatttcaacgctgtgttttcaagaatctcgactcgactgcaggagttgacagtgtgctcggaggacaatgtggacgtacatgacatcgaactgctccaatatattaatgttgattgtgctaagctgaaaagactcctgaaggagactgctttcaagttcaaagctctaaagaaggtggcgcagcttgcagtaattaactccctcgaaaaggctttttggaattgggttgagaactatcctgatgagtttactaagctctaccaaattccccagactgacatggcagagtgtgcggagaagctgtttgacctcgtcgacgggttcgcagaatcaaccaaaaggaaagcggcagtgtggccgctgcagataatcctgcttatcttatgtccagaaattattcaggacataagtaaggacgttgtcgacgagaacaatatgaacaaaaagttgtttctggattcccttagaaaagcgctggctgggcacggaggctcacgccagctgacagagagcgccgcaattgcttgcgtaaaactgtgtaaagcctcgacatacatcaactgggaggacaacagcgtaatcttcctgctggttcagtccatggtcgtcgacctgaagaacctcctcttcaaccctagtaaacctttcagtcggggttcgcaacctgctgatgtggacctgatgatcgactgcctcgtatcctgtttccggatcagtccacataacaatcagcactttaagatctgcctcgcacagaatagtccttcaactttccattacgtactggtgaattcactgcatcgcattatcaccaattcagcgttagattggtggcctaaaattgatgccgtctactgccattccgtggagctgcggaacatgttcggcgaaaccttgcacaaggctgtgcagggatgtggggctcatcctgcgatccgtatggccccttccctaacttttaaagaaaaggtcaccagtctgaaatttaaagagaagcctaccgacctggaaacacgatcctacaaatatcttctactaagcatggtgaagctcatccatgcagaccctaaactcctgctgtgcaacccccgaaagcagggaccggaaacccaggggtccactgccgaactgatcacgggattggtgcagcttgtgccacagagccacatgccagagattgcccaggaggctatggaggctctgctggtactgcaccaactagacagcatcgatctttggaacccggatgctcctgttgaaacattttgggaaattagatacatgtacttctacttcctgaacagtacatttaagttctacttcgtctttttaagttag

SEQ ID NO: 45885 - protein, 747 aa, Artificial Sequence
  derived and/or modified sequence
MEGSKTPLQSSPSAQELKAPLERRHSSSSKPPLAVPPTSVFSFFPSLSKSKGGSASGSNRSSSGGVLSASSSSSKLLKSPKEKLQLRGNTRPMHPIQQSRVPHGRIMTPSVKVEKIHPKMDGTLLKSAVGPTCPATVSSLVKPGLNCPSIPKPTLPSPGQILNGKGLPAPPTLEKKPEDNSNNRKFLNKRLSEREFDPDIHCGVIDLDTKKPCTRSLTCKTHSLTQRRAVQGRRKRFDVLLAEHKNKTREKELIRHPDSQQPPQPLRDPHPAPPRTSQEPHQNPHGVIPSESKPFVASKPKPHTPSLPRPPGCPAQQGGSAPIDPPPVHESPHPPLPATEPASRLSSEEGEGDDKEESVEKLDCHYSGHHPQPASFCTFGSRQIGRGYYVFDSRWNRLRCALNLMVEKHLNAQLWKKIPPVPSTTSPISTRIPHRTNSVPTSQCGVSYLAAATVSTSPVLLSSTCISPNSKSVPAHGTTLNAQPAASGAMDPVCSMQSRQVSSSSSSPSTPSGLSSVPSSPMSRKPQKLKSSKSLRPKESSGNSTNCQNASSSTSGGSGKKRKNSSPLLVHSSSSSSSSSSSSHSMESFRKNCVAHSGPPYPSTVTSSHSIGLNCVTNKANAVNVRHDQSGRGPPTGSPAESIKRMSVMVNSSDSTLSLGPFIHQSNELPVNSHGSFSHSHTPLDKLIGKKRKCSPSSSSINNSSSKPTKVAKVPAVNNVHMKHTGTIPGAQGLMNSSLLHQPKARP

SEQ ID NO: 45886 - DNA, 2244 bp, Artificial Sequence
  derived and/or modified sequence
atggagggctctaaaacaccactccagtcctcaccatctgctcaggagctgaaggctccactggaaaggagacacagtagctctagtaagccaccactggcagtacctcctactagtgtatttagtttctttccaagcctcagcaagagcaaaggcggtagcgcttccggcagcaaccgcagttcaagtggtggagtgctgtcagcttcatcctcctcctcaaaactactcaagtcacccaaggagaaactgcaactgcgcggcaatacacggcctatgcaccccattcagcagtctagggtcccacacgggagaatcatgacccctagcgtgaaagtagagaagatccaccctaaaatggatggcaccttgctaaagtcagcggtggggcctacctgtcccgccaccgtaagcagcctggtaaagccgggcctgaattgtccgagcatccctaaacctacactccctagccccggtcagattttaaacgggaagggactgcccgccccgcccacactcgagaagaagccagaggataactccaataataggaagtttctgaataagagactctctgaaagagagttcgaccctgatattcactgtggcgtgatcgatctggacaccaagaaaccatgtactagatccctcacctgtaagacacatagtctaactcagcgcagagctgtccaggggcggagaaagcggtttgacgttttactggccgaacataagaataagactagggaaaaagagcttataagacacccagattcccagcagcccccacagcctctgagggacccccacccagcccccccgcgcacgtctcaggagccccaccagaacccgcatggcgtcattccatcggaaagtaagccttttgtagcctctaagcccaagccccacacaccaagcctgcctagaccccccgggtgcccagcccaacagggtggttcagctccaatcgaccctccccccgtacatgaatcgccccatcctcctttgcccgctacagagcccgctagtcgtctctctagcgaggaaggggagggggacgacaaggaagaaagcgtggagaaactggattgtcattactccggacaccacccgcagccagcatctttttgtacctttggtagcaggcagatcggaagaggttactacgtcttcgactcaaggtggaaccggttgcggtgcgcgctgaacttgatggttgagaagcatctgaacgcccaactttggaaaaaaataccccctgtgccttccacaacttctcccatctcaacccgaatcccccatcggacgaacagcgtgcctacttctcagtgtggtgtgagctacctcgcggccgccaccgtgtccacttctcccgtgctgctgagcagcacctgcatctcccctaacagtaaatcagtgcccgcccacggcacaacacttaatgctcagcctgccgcctctggcgccatggaccctgtctgcagcatgcaatcccggcaggtgtcttccagctcttctagcccatctacgccatccggtctgtcttccgtgcctagcagccccatgtcacgaaagccacaaaaattaaaatccagcaagtccctcagaccgaaggagagttcaggtaatagcaccaactgccagaacgcatcaagctccaccagtgggggctcaggtaaaaagcggaagaattcctctccattactggtacacagctcctcatcgagcagttccagcagcagttcttcccattctatggaaagctttagaaaaaattgcgtggcgcatagtgggcccccatatccatcaactgtaacttcctcacattccatcgggcttaactgcgtcacaaataaagctaacgccgtgaacgtcagacacgaccagagcggccgcggtccccccacaggttctcccgcagagtccatcaaacgaatgtcagtcatggtcaattctagtgactctacactgtcccttggtccttttatccaccagagcaacgaactgccggtaaattctcatgggtcattctcccatagccacacacctctggacaagctgatcggaaaaaaaagaaagtgttctccctccagtagttctatcaataactcgtcctccaagccaaccaaggtggcaaaagtacccgcagtgaataacgtccacatgaagcacactggtacaatccccggggcccagggactgatgaactcatcccttctgcaccaaccaaaagccagaccatag

SEQ ID NO: 45887 - DNA, 2244 bp, Artificial Sequence
  derived and/or modified sequence
atggagggcagcaagacccccctgcagagcagccccagcgcccaggagctgaaggcccccctggagaggaggcacagcagcagcagcaagccacccctggccgtgccccccacctctgtgttctccttcttccccagcctgagcaagagcaaaggaggcagcgccagcggcagcaacagaagcagcagtggaggagtgctgagcgccagcagcagcagcagcaagctgctgaagagccccaaggagaagctgcagctgcggggcaacacccggcccatgcaccccatccagcagagccgggtgccccacggccgcatcatgacccccagcgtgaaggtggagaagatccaccccaagatggatggcaccctgctgaagtctgctgtgggccccacctgcccagccaccgtgagcagcctggtgaagccaggcctgaactgccccagcatccccaagcccaccctgcccagccctggccagatcctgaatggcaagggcctgcctgccccacccaccctggagaagaagccagaggacaacagcaacaacaggaagttcctgaacaagaggctgtctgagcgggagtttgatcctgacatccactgcggcgtgattgacctggacaccaagaagccctgcaccaggagcctgacctgcaagacccacagcctgacccagaggagagctgtgcagggccgcaggaagagatttgatgtgctgctggccgagcacaagaacaagacccgggagaaggagctgatccgccacccagacagccagcagcccccccagcccctgcgggacccccacccagccccacccaggaccagccaggagccccaccagaacccccatggagtcatccccagcgagagcaagccctttgtggccagcaagcccaagccccacacccccagcctgccccggcccccaggctgcccagcccagcagggcggcagcgcccccattgatcctcctcctgtgcatgagagcccccacccccccctgcctgccacagagcccgccagccggctgagcagcgaggagggggagggagatgacaaggaggagagcgtggagaagctggactgccactacagcggccaccacccccagcctgccagcttctgcaccttcggcagccggcagatcggccggggctactacgtgtttgacagccgctggaaccggctgcgctgtgccctgaacctgatggtggagaagcacctgaatgcccagctgtggaagaagatcccccctgtgcccagcaccaccagccccatcagcacccgcatcccccacaggaccaacagcgtgcccaccagccagtgtggggtgtcctacctggccgccgccaccgtgtccaccagccctgtgctgctgagcagcacctgcatcagccccaacagcaagtctgtgcctgcccacggcaccaccctgaatgcccagcctgctgccagcggggccatggaccctgtgtgcagcatgcagagccggcaggtgagcagcagcagcagcagccccagcacccccagcggcctgagctctgtgcccagcagccccatgagcaggaagccccagaagctgaagagcagcaagagcctgcggcccaaggagagcagcggcaacagcaccaactgccagaatgccagcagcagcaccagcggcggcagcggcaagaagaggaagaacagcagccccctgctggtgcacagcagcagcagcagcagcagcagcagcagcagcagccacagcatggagagcttcaggaagaactgtgtggcccacagcggccccccctaccccagcacagtgaccagcagccacagcatcggcctgaactgtgtgaccaacaaggccaatgctgtgaatgtgagacatgaccagagcggccggggcccccccaccggcagccctgctgagagcatcaagaggatgtctgtgatggtgaacagcagtgacagcaccctgagcctgggccccttcatccaccagagcaatgagctgcctgtgaacagccacggcagcttcagccacagccacacccccctggacaagctgattggcaagaagaggaagtgcagccccagcagcagcagcatcaacaacagcagcagcaagcccaccaaggtggccaaggtgcctgctgtgaacaacgtgcacatgaagcacacaggcaccatccctggggcccagggcctgatgaacagcagcctgctgcaccagcccaaggcccggccctag

SEQ ID NO: 45888 - DNA, 2244 bp, Artificial Sequence
  derived and/or modified sequence
atggagggcagcaagacccccctgcagagcagccccagcgcccaggagcttaaggcacctctagagaggcggcacagctcttccagcaagcctcccctggccgtgcctccaacaagcgtgttttccttctttccatctctgtcgaagagtaagggcggcagcgccagcggcagcaatagatcaagttcaggcggagtgctttccgcctcgagcagctcttccaaactgttgaaaagccccaaagagaagcttcagctcagagggaatactagacccatgcacccaatccagcagagtagggtgcctcatggacggatcatgacaccttctgttaaagtggaaaaaatccatccaaagatggatggtacactacttaagtccgccgtgggccccacttgtcctgcaacggtatctagcctggtgaagcctggccttaactgcccttcaattcctaagccaactctgcccagtcctgggcagatccttaacggcaaaggacttcccgccccccccactctggagaagaagccagaagataacagtaataaccggaagttcttaaacaagcgcttgtcagaaagggaatttgaccctgatattcactgtggggttattgacctcgataccaagaagccttgcactcggtctctaacatgtaagacccatagtctcactcagagacgggccgtgcaaggcagacgaaagaggttcgatgtgttactcgctgaacataagaacaagacacgtgaaaaggaattgataaggcatcccgattctcagcaacctccccagccattgagggatccccatcctgctcctccccggacctcacaagagccccatcaaaacccacacggtgtgattccttcagaatcgaaaccatttgttgcatcaaagcccaaacctcataccccaagtttacctaggcccccgggatgtcccgcccaacagggaggaagcgcccctatcgaccctcctcccgtgcacgaatcaccacatcctcctttgcccgccacagagccggcttctcggttgagttcggaagagggagagggggatgataaggaagagagtgtcgaaaagctagactgccattacagcggccatcacccccagcctgccagcttctgtacgttcgggtccagacagattgggaggggctattacgtctttgacagtcgctggaacagactgagatgcgcactgaatctcatggttgagaagcatttgaacgcccagctgtggaagaaaatcccacctgtaccatcaaccacctcaccaatttccacacgaattcctcacagaacgaatagcgtaccaactagtcagtgcggagttagctaccttgctgcagctactgtgtctactagtccagtcctattatcgtccacgtgtatctcgccgaattccaagagtgtacctgcccacggaacaacactgaatgctcagcccgccgctagcggcgccatggaccccgtctgttcaatgcagagcaggcaggtgtcaagctctagctcttctccttccacccctagcggcctatcctctgtgccctcgtctccaatgtctaggaagccacagaagctgaagtcttcaaagagtcttaggccgaaagagagcagcggcaactcaacaaattgccagaacgctagtagctccacttccggcggttccggcaagaaacgcaagaacagctctcctttactagtccatagctcttccagttcctcctccagctcttcaagcagtcatagtatggaatcttttaggaaaaactgtgtggctcatagtgggccaccatacccatcgactgttaccagttcccacagcatcggtttaaactgtgtgactaataaggccaatgccgtgaacgtgcgacatgatcagtctggacgggggcctccaactggcagtcctgctgaatccattaaaaggatgagtgtgatggttaactctagtgacagtactttgtcactgggtccctttattcaccagtccaatgagctgcctgtgaatagtcacggtagtttctcccatagccatactcccttagataagctgatcggcaagaagcgcaagtgcagccccagttcaagctcaatcaataatagttcatctaaacctactaaggtggccaaggttcccgccgtaaataatgtccacatgaagcatactggcactatccctggcgcccagggacttatgaatagtagcctgctgcaccagccaaaggccagaccatag

SEQ ID NO: 45889 - DNA, 2244 bp, Artificial Sequence
  derived and/or modified sequence
atggagggctctaagacacccctgcagagtagtccctccgcgcaggaactcaaggcccctctggagagaagacattcctccagcagcaagcctccgctggccgttcctccaacatctgtcttttccttcttcccctccctttccaagtcaaaaggcggatcagcgagtggatcgaacagaagcagttctggcggagtcctttcagcaagcagctcctcctctaagctcttgaagagccctaaggagaaactgcagctgcgtggtaatactagaccaatgcacccgatccagcagtcccgcgtcccccatggaaggataatgactccgtcggtcaaagtggaaaaaattcaccctaagatggacggcacactgttaaagagtgcggttggcccaacgtgcccagccaccgtttcatcccttgtgaaaccgggtctaaattgtccttcaatcccaaaacccactctgccatcaccaggccagattctcaatggcaaaggactccctgctcctcccacgttggagaagaaacccgaggacaactcgaataaccgcaaatttctgaacaaaagactctctgagcgtgaatttgatcctgacatccattgcggagtcatcgacctcgataccaagaagccctgtacgaggtctctcacttgtaagacccattcactcactcagagaagagctgtacaggggagaaggaaacgcttcgatgttctgctagcggagcacaagaacaaaactagggaaaaggaactaatccggcaccccgatagccaacaaccccctcagcccctgagggatccccatcctgctcctcccagaacgtctcaagagccccatcaaaaccctcacggtgtcatccccagcgagtctaaaccttttgtagctagcaaacccaaacctcatactccgtccctcccaagaccccctggatgtccagcgcagcagggaggatctgctcctatagaccctccaccagttcatgaaagccctcatcctccacttcccgctactgagcctgcaagccgcctttcaagcgaggagggagagggagacgacaaggaggaatccgtcgagaaactggactgtcattacagcggccaccacccccaaccagcttcattttgcacctttgggtccagacaaattggcagaggttactatgtttttgacagcaggtggaacagactacggtgcgcattaaatctgatggtggagaagcacctgaacgctcagctgtggaagaagatccctccagtccccagcacgacgagtccaataagcacccggattccacatcgtaccaattctgtgccaacctcccagtgtggagtcagttacttggcagcagccactgtgagtacgtcaccggtgctgttgtcttcaacttgtatctcaccgaatagcaagagcgtacccgctcacggcacaacgctgaacgcacagcccgctgcctcaggagctatggaccccgtgtgttctatgcaaagccgtcaggtttcgtcatcaagttcttccccctcaaccccaagtggtctgtcatctgtccccagctcacccatgagccgaaagcctcagaagcttaaatcttctaagtccctgaggccaaaggagtcttccggaaacagcacaaactgtcagaatgccagctcctccacgtccggaggctcagggaaaaaaagaaagaatagcagcccacttttagtgcactcctctagctcctccagctcgtcttcttcctcaagccactccatggaatcttttcgaaagaattgtgtcgcacacagcggcccaccctacccatctactgttacctcttctcacagtattgggttgaactgcgtgaccaacaaggccaacgccgtcaacgttagacacgaccagtccgggaggggccctccgacgggtagtccagctgagagtataaagagaatgtctgttatggtcaattcctccgacagcaccctcagcttgggcccttttattcatcagtccaacgagttgccagtcaactcccacggcagcttctcccattcccacaccccgctagacaagctgatcggcaagaagcgaaagtgctccccgtccagttcaagtattaacaatagctcaagtaaacctactaaggtggcgaaggtgccagccgttaacaatgtacatatgaaacacacaggtacaatacccggagcccagggcttgatgaacagctccctccttcatcagcctaaggcaagaccatag

SEQ ID NO: 45890 - DNA, 2741 bp, Artificial Sequence
  derived and/or modified sequence
gttttctgttgatctgccaggacctttgtaattcaagtgctttttacagtagtagcaaatgttacataagcccaaacatggagcatatttggagttggtgggcagacccaaatcatgatgcaagcctgcagtagcaagtgtgcaatgaagcacaaccaaattctgtgaatggaaggtagcaagacgcctctccaaagcagcccttctgcgcaggagctgaaagctccactggaaagaagacatagctcatccagcaagccgcctttggccgttcctcccacttcagtattttccttcttcccttctctgtccaaaagcaaaggaggcagtgcaagtggaagcaaccgttcttccagtggaggtgttcttagcgcatcctcatcaagttccaagttgttgaaatcacccaaagagaaactgcagctcagggggaacaccaggccaatgcatcccattcagcaaagtagagttccccatggtagaatcatgacaccctctgtgaaagtggaaaagattcatccgaaaatggatggcacactactgaaatctgcggtggggccaacctgtcctgctactgtgagttccttagtcaagcctggccttaactgcccctcaataccaaagccaaccttgccttcacctggacagattctgaatggcaaagggcttcctgcaccgcccactctggaaaagaaacctgaagacaattccaataataggaaatttttaaataagagattatcagaaagagagtttgatcctgacatccactgtggggttattgatctcgacaccaagaagccctgcacccggtctttgacatgcaagacacattccttaacccagcgcagggctgtccagggtagaagaaaacgatttgatgtgttattagccgagcacaaaaacaaaaccagggaaaaggaattgattcgccatccggactctcagcaaccaccgcagcctctcagggacccgcatcccgcccctcctagaacgtcacaggagccgcaccaaaaccctcacggagtgattccttccgaatcaaagccttttgtagctagtaaacctaaacctcacacccccagtcttccaaggcctccaggctgccctgctcagcaaggtgggagtgcccccattgaccctcctccagtccatgaatctccacaccctcccctgcctgccactgagccagcttctcggttatccagtgaggagggcgaaggcgatgacaaagaagagtctgttgaaaaactggactgtcattattcaggtcatcatcctcagccagcatctttttgcacatttgggagccggcagataggaagaggctattacgtgtttgactccaggtggaatcgacttcgctgcgccctcaacctcatggtggagaagcatctgaatgcacagctatggaagaaaatcccaccagtgcccagtaccacctcacccatctccacacgtattcctcaccggacaaactctgtgccgacatcacaatgtggagtcagctatctggcagcagccaccgtctctacatccccagtcctgctctcatctacctgcatctccccaaatagcaaatcggtaccagctcatggaaccacactaaatgcacagcctgctgcttcaggggcgatggatcctgtgtgcagtatgcaatccagacaagtgtcctcttcatcctcatccccttccacgccctctggcctttcctcggttccttcctcccccatgtccaggaaacctcagaaattgaaatccagcaaatctttgaggcccaaggagtcttctggtaacagcactaactgtcaaaatgccagtagcagtaccagtggcggctcaggaaagaaacgcaaaaacagttccccactgttggttcactcttcctcctcctcttcctcctcctcctcttcttctcattccatggagtcttttaggaaaaactgtgtggctcactctgggcctccctacccctcaacggtaacatcttcccatagcatcggcctcaactgtgtgacgaataaagcaaatgcggtgaacgtccggcatgaccagtcagggaggggcccccccaccgggagccctgctgaatccatcaagaggatgagtgtgatggtgaacagcagtgattctactctttctcttgggccattcattcaccagtccaatgaactgcctgtcaactcccacggcagtttttcccactcacacactcctctagacaaactcataggaaagaaaagaaagtgctcacccagctcgagcagcatcaacaacagcagcagcaaacccacaaaggttgccaaagtgccagccgtgaacaatgtccacatgaaacacacaggcaccatcccaggggcacaaggactgatgaacagttccctccttcatcagccaaaggcacgtccctgacagctgaaaatagcacggggaggaataatgcggacacttttgaggacaagttacacctccactcagcactctggactccacgatgcctttgagtctgttttcccaacctcctgtgggcctcaagggtagaaacctgccgggctgttgttttaacgaggatttccctgaagctatgtctctagcagtgagtactcataaaggacactggatcaagttcagccaccgaattgcttttatcagtgttaaagtggtctgaactgcttgctaccaatctgtgagaagtttttgtttttgttttgttttttaacttgcagtatatcacagagcca

SEQ ID NO: 45891 - DNA, 2244 bp, Artificial Sequence
  derived and/or modified sequence
atggagggcagcaagacccccctgcagagcagccccagcgcccaggagctgaaggcccccctggagagaagacacagcagcagcagcaagccccccctggccgtgccccccaccagcgtgttcagcttcttccccagcctgagcaagagcaagggcggcagcgccagcggcagcaacagaagcagcagcggcggcgtgctgagcgccagcagcagcagcagcaagctgctgaagagccccaaggagaagctgcagctgagaggcaacaccagacccatgcaccccatccagcagagcagagtgccccacggcagaatcatgacccccagcgtgaaggtggagaagatccaccccaagatggacggcaccctgctgaagagcgccgtgggccccacctgccccgccaccgtgagcagcctggtgaagcccggcctgaactgccccagcatccccaagcccaccctgcccagccccggccagatcctgaacggcaagggcctgcccgccccccccaccctggagaagaagcccgaggacaacagcaacaacagaaagttcctgaacaagagactgagcgagagagagttcgaccccgacatccactgcggcgtgatcgacctggacaccaagaagccctgcaccagaagcctgacctgcaagacccacagcctgacccagagaagagccgtgcagggcagaagaaagagattcgacgtgctgctggccgagcacaagaacaagaccagagagaaggagctgatcagacaccccgacagccagcagcccccccagcccctgagagacccccaccccgccccccccagaaccagccaggagccccaccagaacccccacggcgtgatccccagcgagagcaagcccttcgtggccagcaagcccaagccccacacccccagcctgcccagaccccccggctgccccgcccagcagggcggcagcgcccccatcgaccccccccccgtgcacgagagcccccacccccccctgcccgccaccgagcccgccagcagactgagcagcgaggagggcgagggcgacgacaaggaggagagcgtggagaagctggactgccactacagcggccaccacccccagcccgccagcttctgcaccttcggcagcagacagatcggcagaggctactacgtgttcgacagcagatggaacagactgagatgcgccctgaacctgatggtggagaagcacctgaacgcccagctgtggaagaagatcccccccgtgcccagcaccaccagccccatcagcaccagaatcccccacagaaccaacagcgtgcccaccagccagtgcggcgtgagctacctggccgccgccaccgtgagcaccagccccgtgctgctgagcagcacctgcatcagccccaacagcaagagcgtgcccgcccacggcaccaccctgaacgcccagcccgccgccagcggcgccatggaccccgtgtgcagcatgcagagcagacaggtgagcagcagcagcagcagccccagcacccccagcggcctgagcagcgtgcccagcagccccatgagcagaaagccccagaagctgaagagcagcaagagcctgagacccaaggagagcagcggcaacagcaccaactgccagaacgccagcagcagcaccagcggcggcagcggcaagaagagaaagaacagcagccccctgctggtgcacagcagcagcagcagcagcagcagcagcagcagcagccacagcatggagagcttcagaaagaactgcgtggcccacagcggccccccctaccccagcaccgtgaccagcagccacagcatcggcctgaactgcgtgaccaacaaggccaacgccgtgaacgtgagacacgaccagagcggcagaggcccccccaccggcagccccgccgagagcatcaagagaatgagcgtgatggtgaacagcagcgacagcaccctgagcctgggccccttcatccaccagagcaacgagctgcccgtgaacagccacggcagcttcagccacagccacacccccctggacaagctgatcggcaagaagagaaagtgcagccccagcagcagcagcatcaacaacagcagcagcaagcccaccaaggtggccaaggtgcccgccgtgaacaacgtgcacatgaagcacaccggcaccatccccggcgcccagggcctgatgaacagcagcctgctgcaccagcccaaggccagaccctag

SEQ ID NO: 45892 - protein, 547 aa, Artificial Sequence
  derived and/or modified sequence
MMEEEELEFVEELEAVLQLTPEVQLAIEQVFPSQDPLDRADFNAVEYINTLFPTEQSLANIDEVVNKIRLKIRRLDDNIRTVVRGQTNVGQDGRQALEEAQKAIQQLFGKIKDIKDKAEKSEQMVKEITRDIKQLDHAKRHLTTSITTLNHLHMLAGGVDSLEAMTRRRQYGEVANLLQGVMNVLEHFHKYMGIPQIRQLSERVKAAQTELGQQILADFEEAFPSQGTKVAWLDKIDRRYAWIKRQLVDYEEKYGRMFPREWCMAERIAVEFCHVTRAELAKIMRTRAKEIEVKLLLFAIQRTTNFEGFLAKRFSGCTLTDGTLKKLESPPPSTNPFLEDEPTPEMEELATEKGDLDQPKKPKAPDNPFHGIVSKCFEPHLYVYIESQDKNLGELIDRFVADFKAQGPPKPNTDEGGAVLPSCADLFVYYKKCMVQCSQLSTGEPMIALTTIFQKYLREYAWKILSGNLPKTTTSSGGLTISSLLKEKEGSEVAKFTLEELCLICNILSTAEYCLATTQQLEEKLKEKVDRHLQQYSAAGSGSGCCL

SEQ ID NO: 45893 - protein, 832 aa, Artificial Sequence
  derived and/or modified sequence
MMEEEELEFVEELEAVLQLTPEVQLAIEQVFPSQDPLDRADFNAVEYINTLFPTEQSLANIDEVVNKIRLKIRRLDDNIRTVVRGQTNVGQDGRQALEEAQKAIQQLFGKIKDIKDKAEKSEQMVKEITRDIKQLDHAKRHLTTSITTLNHLHMLAGGVDSLEAMTRRRQYGEVANLLQGVMNVLEHFHKYMGIPQIRQLSERVKAAQTELGQQILADFEEAFPSQGTKRPGGPSNVLRDACLVANILDPRIKQEIIKKFIKQHLSEYLVLFQENQDVAWLDKIDRRYAWIKRQLVDYEEKYGRMFPREWCMAERIAVEFCHVTRAELAKIMRTRAKEIEVKLLLFAIQRTTNFEGFLAKRFSGCTLTDGTLKKLESPPPSTNPFLEDEPTPEMEELATEKGDLDQPKKPKAPDNPFHGIVSKCFEPHLYVYIESQDKNLGELIDRFVADFKAQGPPKPNTDEGGAVLPSCADLFVYYKKCMVQCSQLSTGEPMIALTTIFQKYLREYAWKILSGNLPKTTTSSGGLTISSLLKEKEGSEVAKFTLEELCLICNILSTAEYCLATTQQLEEKLKEKVDVSLIERINLTGEMDTFSTVISSSIQLLVQDLDAACDPALTAMSKMQWQNVEHVGDQSPYVTSVILHIKQNVPIIRDNLASTRKYFTQFCVKFANSFIPKFITHLFKCKPISMVGAEQLLLDTHSLKMVLLDLPSISSQVVRKAPASYTKIVVKGMTRAEMILKVVMAPHEPLVVFVDNYIKLLTDCNTETFQKILDMKGLKRSEQSSMLELLRQRLPAPPSGAESSGSLSLTAPTPEQESSRIRKLEKLIKKRL

SEQ ID NO: 45894 - protein, 128 aa, Artificial Sequence
  derived and/or modified sequence
MVLLDLPSISSQVVRKAPASYTKIVVKGMTRAEMILKVVMAPHEPLVVFVDNYIKLLTDCNTETFQKILDMKGLKRSEQSSMLELLRQRLPAPPSGAESSGSLSLTAPTPEQESSRIRKLEKLIKKRL

SEQ ID NO: 45895 - DNA, 1644 bp, Artificial Sequence
  derived and/or modified sequence
atgatggaggaggaggagctggagttcgtggaggagctggaggccgtgctgcagctgacccccgaggtgcagctggccatcgagcaggtgttccccagccaggaccccctggacagagccgacttcaacgccgtggagtacatcaacaccctgttccccaccgagcagagcctggccaacatcgacgaggtggtgaacaagatcagactgaagatcagaagactggacgacaacatcagaaccgtggtgagaggccagaccaacgtgggccaggacggcagacaggccctggaggaggcccagaaggccatccagcagctgttcggcaagatcaaggacatcaaggacaaggccgagaagagcgagcagatggtgaaggagatcaccagagacatcaagcagctggaccacgccaagagacacctgaccaccagcatcaccaccctgaaccacctgcacatgctggccggcggcgtggacagcctggaggccatgaccagaagaagacagtacggcgaggtggccaacctgctgcagggcgtgatgaacgtgctggagcacttccacaagtacatgggcatcccccagatcagacagctgagcgagagagtgaaggccgcccagaccgagctgggccagcagatcctggccgacttcgaggaggccttccccagccagggcaccaaggtggcctggctggacaagatcgacagaagatacgcctggatcaagagacagctggtggactacgaggagaagtacggcagaatgttccccagagagtggtgcatggccgagagaatcgccgtggagttctgccacgtgaccagagccgagctggccaagatcatgagaaccagagccaaggagatcgaggtgaagctgctgctgttcgccatccagagaaccaccaacttcgagggcttcctggccaagagattcagcggctgcaccctgaccgacggcaccctgaagaagctggagagccccccccccagcaccaaccccttcctggaggacgagcccacccccgagatggaggagctggccaccgagaagggcgacctggaccagcccaagaagcccaaggcccccgacaaccccttccacggcatcgtgagcaagtgcttcgagccccacctgtacgtgtacatcgagagccaggacaagaacctgggcgagctgatcgacagattcgtggccgacttcaaggcccagggcccccccaagcccaacaccgacgagggcggcgccgtgctgcccagctgcgccgacctgttcgtgtactacaagaagtgcatggtgcagtgcagccagctgagcaccggcgagcccatgatcgccctgaccaccatcttccagaagtacctgagagagtacgcctggaagatcctgagcggcaacctgcccaagaccaccaccagcagcggcggcctgaccatcagcagcctgctgaaggagaaggagggcagcgaggtggccaagttcaccctggaggagctgtgcctgatctgcaacatcctgagcaccgccgagtactgcctggccaccacccagcagctggaggagaagctgaaggagaaggtggacagacacctgcagcagtacagcgccgccggcagcggcagcggctgctgcctgtag

SEQ ID NO: 45896 - DNA, 2499 bp, Artificial Sequence
  derived and/or modified sequence
atgatggaggaggaggagctggagttcgtggaggagctggaggccgtgctgcagctgacccccgaggtgcagctggccatcgagcaggtgttccccagccaggaccccctggacagagccgacttcaacgccgtggagtacatcaacaccctgttccccaccgagcagagcctggccaacatcgacgaggtggtgaacaagatcagactgaagatcagaagactggacgacaacatcagaaccgtggtgagaggccagaccaacgtgggccaggacggcagacaggccctggaggaggcccagaaggccatccagcagctgttcggcaagatcaaggacatcaaggacaaggccgagaagagcgagcagatggtgaaggagatcaccagagacatcaagcagctggaccacgccaagagacacctgaccaccagcatcaccaccctgaaccacctgcacatgctggccggcggcgtggacagcctggaggccatgaccagaagaagacagtacggcgaggtggccaacctgctgcagggcgtgatgaacgtgctggagcacttccacaagtacatgggcatcccccagatcagacagctgagcgagagagtgaaggccgcccagaccgagctgggccagcagatcctggccgacttcgaggaggccttccccagccagggcaccaagagacccggcggccccagcaacgtgctgagagacgcctgcctggtggccaacatcctggaccccagaatcaagcaggagatcatcaagaagttcatcaagcagcacctgagcgagtacctggtgctgttccaggagaaccaggacgtggcctggctggacaagatcgacagaagatacgcctggatcaagagacagctggtggactacgaggagaagtacggcagaatgttccccagagagtggtgcatggccgagagaatcgccgtggagttctgccacgtgaccagagccgagctggccaagatcatgagaaccagagccaaggagatcgaggtgaagctgctgctgttcgccatccagagaaccaccaacttcgagggcttcctggccaagagattcagcggctgcaccctgaccgacggcaccctgaagaagctggagagccccccccccagcaccaaccccttcctggaggacgagcccacccccgagatggaggagctggccaccgagaagggcgacctggaccagcccaagaagcccaaggcccccgacaaccccttccacggcatcgtgagcaagtgcttcgagccccacctgtacgtgtacatcgagagccaggacaagaacctgggcgagctgatcgacagattcgtggccgacttcaaggcccagggcccccccaagcccaacaccgacgagggcggcgccgtgctgcccagctgcgccgacctgttcgtgtactacaagaagtgcatggtgcagtgcagccagctgagcaccggcgagcccatgatcgccctgaccaccatcttccagaagtacctgagagagtacgcctggaagatcctgagcggcaacctgcccaagaccaccaccagcagcggcggcctgaccatcagcagcctgctgaaggagaaggagggcagcgaggtggccaagttcaccctggaggagctgtgcctgatctgcaacatcctgagcaccgccgagtactgcctggccaccacccagcagctggaggagaagctgaaggagaaggtggacgtgagcctgatcgagagaatcaacctgaccggcgagatggacaccttcagcaccgtgatcagcagcagcatccagctgctggtgcaggacctggacgccgcctgcgaccccgccctgaccgccatgagcaagatgcagtggcagaacgtggagcacgtgggcgaccagagcccctacgtgaccagcgtgatcctgcacatcaagcagaacgtgcccatcatcagagacaacctggccagcaccagaaagtacttcacccagttctgcgtgaagttcgccaacagcttcatccccaagttcatcacccacctgttcaagtgcaagcccatcagcatggtgggcgccgagcagctgctgctggacacccacagcctgaagatggtgctgctggacctgcccagcatcagcagccaggtggtgagaaaggcccccgccagctacaccaagatcgtggtgaagggcatgaccagagccgagatgatcctgaaggtggtgatggccccccacgagcccctggtggtgttcgtggacaactacatcaagctgctgaccgactgcaacaccgagaccttccagaagatcctggacatgaagggcctgaagagaagcgagcagagcagcatgctggagctgctgagacagagactgcccgccccccccagcggcgccgagagcagcggcagcctgagcctgaccgcccccacccccgagcaggagagcagcagaatcagaaagctggagaagctgatcaagaagagactgtag

SEQ ID NO: 45897 - DNA, 387 bp, Artificial Sequence
  derived and/or modified sequence
atggtgctgctggacctgcccagcatcagcagccaggtggtgagaaaggcccccgccagctacaccaagatcgtggtgaagggcatgaccagagccgagatgatcctgaaggtggtgatggccccccacgagcccctggtggtgttcgtggacaactacatcaagctgctgaccgactgcaacaccgagaccttccagaagatcctggacatgaagggcctgaagagaagcgagcagagcagcatgctggagctgctgagacagagactgcccgccccccccagcggcgccgagagcagcggcagcctgagcctgaccgcccccacccccgagcaggagagcagcagaatcagaaagctggagaagctgatcaagaagagactgtag

SEQ ID NO: 45898 - DNA, 1644 bp, Artificial Sequence
  derived and/or modified sequence
atgatggaggaagaggagctggaattcgtggaggaacttgaggcagtgctccaactgacacctgaggttcagttggccatcgagcaagtcttcccctctcaggatcctctggaccgagccgacttcaacgctgtggaatacattaatacgctattccccaccgaacagagtctcgcaaacatcgacgaagttgttaacaaaattcgcctgaaaatacgaaggctggacgacaatatccggactgtggtgcggggacagactaacgtggggcaagatggaagacaggccttagaagaggcccaaaaggcgatccagcaactgttcggcaagataaaggatattaaagataaagccgagaagtctgagcagatggtgaaagaaatcacaagggacattaaacagctggaccacgcaaagcgacacctcaccacatccatcactactcttaaccatctgcacatgctggcaggaggcgtcgactcactggaggctatgaccagacgcaggcagtacggcgaagtcgcaaacttgctgcagggcgtgatgaacgtactggagcacttccacaaatatatggggatccctcagatcagacaactctctgagcgggtgaaggccgcacagaccgagctcggacaacagatccttgctgactttgaggaggccttcccaagccagggaacaaaggtggcatggctggataaaatcgaccgtcgctacgcctggataaagagacagctcgttgactacgaagagaaatacgggcgcatgtttccccgcgaatggtgtatggctgaaagaattgcggtggagttttgtcatgtcactcgagcagaactcgctaaaataatgagaacccgcgcaaaggagattgaggtcaagctgctgctgttcgccatccagcgaacaaccaactttgaaggctttctggctaagcgattttctgggtgcaccctcactgatggtaccctaaaaaaactggaatcccctccgccgagcaccaaccctttcctagaagacgagccaacgcctgagatggaggaactggctaccgaaaaaggagacctcgaccagcccaagaagccaaaggcccccgataatccattccatgggattgtgtcgaaatgctttgagccccacctctatgtttacattgaatcacaggataaaaacctgggagaactaattgataggttcgtggcggacttcaaggctcaggggccacccaaacctaacacagatgaaggcggtgcggtgcttccgagttgcgccgaccttttcgtgtactataagaaatgcatggtgcagtgttctcagctttccactggcgagccaatgattgcgctgaccacaatttttcaaaaatatctgcgagagtatgcatggaaaatactgagcggaaacttacctaagacgaccactagttcaggaggactgacgatctcatctctgctgaaggagaaggagggttcggaggtagctaaattcaccctcgaggaattgtgtctgatttgtaatatcctgagtacagctgagtattgcctcgccacgacccaacaactcgaagaaaaactgaaggagaaagtcgatcgccatttgcaacagtactctgctgccggttctggatccggttgttgtttgtag

SEQ ID NO: 45899 - DNA, 2499 bp, Artificial Sequence
  derived and/or modified sequence
atgatggaggaggaggaacttgaattcgtcgaggaactggaggccgtcctccagctgacacccgaggttcagttagcaatagagcaggtgttcccttcacaggaccccctggatcgtgccgacttcaatgccgtcgagtatatcaacaccctgttccccactgagcagagtctggctaatatcgatgaagtggtcaacaagattaggttgaaaattaggaggctggatgataacattagaactgtggtgagaggccaaactaatgttggccaggacggccgccaggcactcgaagaagcccagaaggctatccagcagctatttggaaaaataaaggacattaaagacaaagcagagaagtctgagcagatggtaaaagaaattaccagagatatcaagcaattagatcatgccaagaggcacctgactacttccatcacaacattaaaccacctacatatgttggccggcggggttgactccctagaggctatgactagaagaaggcagtacggagaagtagcgaatctgctacagggtgtgatgaacgtgttggagcattttcataaatatatgggaatccctcagatccgacagctgtcggaacgagttaaggcggcacagaccgagctggggcagcagatacttgcggacttcgaggaggctttcccctctcagggcacaaaacgaccagggggtccaagcaacgttctaagagatgcctgtcttgtcgctaatatcttagaccctcggattaaacaggaaattatcaaaaaattcatcaagcagcaccttagtgaatatctcgtccttttccaggaaaaccaggacgtagcatggctagacaagatagacagacggtacgcctggattaaaaggcagcttgtggactatgaagagaagtacggacggatgtttccgcgcgagtggtgcatggccgagcgaattgccgtcgagttctgtcatgtcacacgggccgagctggccaaaattatgcggacccgagctaaagagatagaagtaaagcttctgctgttcgccatccagagaactactaatttcgagggcttcttggcaaaacgcttctctggctgcaccctgactgacgggacattaaaaaaactggaatccccaccgccctccacaaatccctttctagaggatgagcccacacctgaaatggaggagctggctaccgagaaaggtgatttggaccagccaaaaaagcccaaagctccggacaacccgtttcacggaattgtgtcaaagtgcttcgagccacatctttatgtttatattgaaagccaggataaaaatctgggcgagctgatcgataggtttgtcgcagattttaaagctcagggacctccaaagcctaataccgacgaaggcggagctgtgctcccatcctgcgctgatttgttcgtgtactacaaaaagtgtatggtgcagtgttcccagttgtctaccggcgaaccgatgatcgccctaactacaatctttcagaagtaccttcgcgagtatgcttggaaaattctctcgggcaacctccccaaaacaaccacatcatctgggggccttactatttccagcctgctgaaggagaaggagggctcagaggttgcaaagttcacactggaggaactgtgcttaatctgcaacattctgtcgaccgcagagtattgcctcgctacaacccaacagttggaagaaaagctcaaggagaaggtggacgttagtttgatcgaacgcatcaacctgacaggggagatggatacgttctctactgtgatatcttccagtatacagttgcttgtgcaggacctcgatgcagcctgtgatcctgccctgacagccatgtctaaaatgcaatggcagaacgtcgaacatgtgggcgatcagtccccctatgtaacatccgttatcctccatattaagcagaatgttccaattatccgcgacaatctggcttctactaggaagtattttacccagttttgtgttaagttcgcaaacagtttcattcctaagttcattactcaccttttcaagtgcaaacccattagtatggtgggagccgaacagcttctgctggacacacactctcttaagatggtgcttctcgatctgccatcaattagttcccaggtggtgcggaaggcccccgcatcctacactaagatagtggtgaaggggatgactcgagcagagatgatattaaaagtcgtcatggcgccccatgaaccacttgtagttttcgtggataactacattaagctgttgacggattgcaacaccgaaactttccagaaaatcttagacatgaagggtctgaaaagatcggagcagtcctccatgctggaactgttacgtcagcgacttcctgcaccacctagcggcgctgaaagttctggatcactgtctttaaccgcacctacacccgagcaagagtcctctagaattagaaaactagaaaaactgataaagaagcgcctgtag

SEQ ID NO: 45900 - DNA, 387 bp, Artificial Sequence
  derived and/or modified sequence
atggttctcctggacctcccctcaatctcgtcacaagtggtgagaaaagcccccgcaagctatactaaaatagtcgtcaagggtatgacgagagctgagatgattcttaaggtagttatggcaccacacgaaccactggttgtgttcgtggataattatatcaagctcctgacagactgcaatactgagacattccagaaaattctggacatgaaggggctgaagaggagtgagcaatcctctatgctggagctactgaggcagcgactgcccgccccaccttcaggagccgaatcctcaggttctctgtctttgaccgcccctaccccagagcaggaatcgagtcggatcagaaagctcgaaaaactaatcaaaaagcggctgtag

SEQ ID NO: 45901 - DNA, 1644 bp, Artificial Sequence
  derived and/or modified sequence
atgatggaggaggaggagctggagtttgtggaggagctggaggccgtgctgcagctgaccccagaggtgcagctggccatcgagcaggtgttccccagccaggaccccctggacagagctgacttcaatgctgtggagtacatcaacaccctcttccccacagagcagagcctggccaacattgatgaggtggtgaacaagatccggctgaagatccggcggctggatgacaacatcagaacagtggtgcggggccagaccaacgtgggccaggacggccggcaggccctggaggaggcccagaaggccatccagcagctgtttgggaagatcaaggacatcaaggacaaggccgagaagtctgagcagatggtgaaggagatcacccgggacatcaagcagctggaccacgccaagaggcacctgaccaccagcatcaccaccctgaaccacctgcacatgctggccggcggcgtggacagcctggaggccatgacccggcggcggcagtatggagaggtggccaacctgctgcagggcgtgatgaatgtgctggagcacttccacaagtacatgggcatcccccagatccggcagctgtctgagcgggtgaaggccgcccagacagagctgggccagcagatcctggccgactttgaggaggccttccccagccagggcaccaaggtggcctggctggacaagattgaccggcgctatgcctggatcaagaggcagctggtggactatgaggagaagtatggccgcatgttcccccgggagtggtgcatggccgagagaattgctgtggagttctgccacgtgaccagggctgagctggccaagatcatgaggacccgggccaaggagattgaggtgaagctgctgctgtttgccatccagaggaccaccaactttgagggcttcctggccaagcgcttcagcggctgcaccctgacagatggcaccctgaagaagctggagagccccccacccagcaccaaccccttcctggaggatgagcccaccccagagatggaggagctggccacagagaagggggacctggaccagcccaagaagcccaaggccccagacaaccccttccacggcatcgtgtccaaatgttttgagccccacctgtatgtgtacatcgagagccaggacaagaacctgggggagctgattgacagatttgtggccgacttcaaggcccagggcccccccaagcccaacacagatgagggcggcgctgtgctgcccagctgtgccgacctgtttgtgtactacaagaagtgcatggtgcagtgcagccagctgagcactggagagcccatgattgccctgaccaccatcttccagaagtacctgcgggagtatgcctggaagatcctgagcggcaacctgcccaagaccaccaccagcagcggcggcctgaccatcagcagcctgctgaaggagaaggagggcagcgaggtggccaagttcaccctggaggagctgtgcctgatctgcaacatcctgagcacagctgagtactgcctggccaccacccagcagctggaggagaagctgaaggagaaggtggacagacacctgcagcagtacagcgctgctggcagcggcagcggctgctgcctgtag

SEQ ID NO: 45902 - DNA, 2499 bp, Artificial Sequence
  derived and/or modified sequence
atgatggaggaggaggagctggagtttgtggaggagctggaggccgtgctgcagctgaccccagaggtgcagctggccatcgagcaggtgttccccagccaggaccccctggacagagctgacttcaatgctgtggagtacatcaacaccctcttccccacagagcagagcctggccaacattgatgaggtggtgaacaagatccggctgaagatccggcggctggatgacaacatcagaacagtggtgcggggccagaccaacgtgggccaggacggccggcaggccctggaggaggcccagaaggccatccagcagctgtttgggaagatcaaggacatcaaggacaaggccgagaagtctgagcagatggtgaaggagatcacccgggacatcaagcagctggaccacgccaagaggcacctgaccaccagcatcaccaccctgaaccacctgcacatgctggccggcggcgtggacagcctggaggccatgacccggcggcggcagtatggagaggtggccaacctgctgcagggcgtgatgaatgtgctggagcacttccacaagtacatgggcatcccccagatccggcagctgtctgagcgggtgaaggccgcccagacagagctgggccagcagatcctggccgactttgaggaggccttccccagccagggcaccaagaggcctgggggccccagcaatgtgctgagagatgcctgcctggtggccaacatcctggacccccgcatcaagcaggagatcatcaagaagttcatcaagcagcacctgtctgagtacctggtgctcttccaggagaaccaggatgtggcctggctggacaagattgaccggcgctatgcctggatcaagaggcagctggtggactatgaggagaagtatggccgcatgttcccccgggagtggtgcatggccgagagaattgctgtggagttctgccacgtgaccagggctgagctggccaagatcatgaggacccgggccaaggagattgaggtgaagctgctgctgtttgccatccagaggaccaccaactttgagggcttcctggccaagcgcttcagcggctgcaccctgacagatggcaccctgaagaagctggagagccccccacccagcaccaaccccttcctggaggatgagcccaccccagagatggaggagctggccacagagaagggggacctggaccagcccaagaagcccaaggccccagacaaccccttccacggcatcgtgtccaaatgttttgagccccacctgtatgtgtacatcgagagccaggacaagaacctgggggagctgattgacagatttgtggccgacttcaaggcccagggcccccccaagcccaacacagatgagggcggcgctgtgctgcccagctgtgccgacctgtttgtgtactacaagaagtgcatggtgcagtgcagccagctgagcactggagagcccatgattgccctgaccaccatcttccagaagtacctgcgggagtatgcctggaagatcctgagcggcaacctgcccaagaccaccaccagcagcggcggcctgaccatcagcagcctgctgaaggagaaggagggcagcgaggtggccaagttcaccctggaggagctgtgcctgatctgcaacatcctgagcacagctgagtactgcctggccaccacccagcagctggaggagaagctgaaggagaaggtggatgtgtccctcatcgagcgcatcaacctgaccggggagatggacaccttcagcaccgtcatcagcagcagcatccagctgctggtgcaggacctggatgctgcctgtgaccctgccctgacagccatgagcaagatgcagtggcagaatgtggagcacgtgggggaccagagcccctacgtgaccagcgtcatcctgcacatcaagcagaatgtgcccatcatccgggacaacctggccagcaccaggaagtacttcacccagttctgtgtgaagtttgccaacagcttcatccccaagttcatcacccacctgttcaagtgcaagcccatctccatggtgggcgctgagcagctgctgctggacacccacagcctgaagatggtgctgctggacctgcccagcatcagcagccaggtggtgaggaaggccccagccagctacaccaagatcgtggtgaagggcatgaccagggctgagatgatcctgaaggtggtgatggcccctcatgagcccctggtggtgtttgtggacaactacatcaagctgctgacagactgcaacacagagaccttccagaagatcctggacatgaagggcctgaagaggtctgagcagagctccatgctggagctgctgcggcagaggctgcctgcccctccttctggagctgagagcagcggcagcctgagcctgacagcccccaccccagagcaggagagcagccgcatcaggaagctggagaagctgatcaagaagaggctgtag

SEQ ID NO: 45903 - DNA, 387 bp, Artificial Sequence
  derived and/or modified sequence
atggtgctgctggacctgcccagcatcagcagccaggtggtgaggaaggccccagccagctacaccaagatcgtggtgaagggcatgaccagggctgagatgatcctgaaggtggtgatggcccctcatgagcccctggtggtgtttgtggacaactacatcaagctgctgacagactgcaacacagagaccttccagaagatcctggacatgaagggcctgaagaggtctgagcagagctccatgctggagctgctgcggcagaggctgcctgcccctccttctggagctgagagcagcggcagcctgagcctgacagcccccaccccagagcaggagagcagccgcatcaggaagctggagaagctgatcaagaagaggctgtag

SEQ ID NO: 45904 - DNA, 1644 bp, Artificial Sequence
  derived and/or modified sequence
atgatggaggaggaggagctggagttcgtggaggagctggaggccgtgctccagctgacacccgaggtccagctcgccatcgagcaggtctttccaagccaggacccactggatcgcgcagatttcaatgctgtcgagtatatcaacaccctgtttcccaccgagcagtcgctggctaatattgacgaagtagttaataaaatccgtctcaagattcggagattggacgataacatccgcactgtggtgagaggccagacaaacgtgggacaggacggacgccaagctctggaagaagctcagaaagccatccagcagttattcgggaagattaaggacataaaagacaaggccgaaaaatctgagcagatggtgaaagagataacaagagatattaaacagctggaccacgcaaaaaggcacctgactaccagtataacaaccttaaaccacctgcacatgctcgccgggggagtggattccctggaggcaatgaccaggcgtagacaatacggcgaggtggctaacctacttcaaggggtgatgaatgtgctcgaacattttcacaagtacatgggcatccctcagatccgtcagttgtccgagcgagtgaaagcggcacaaactgagcttggccagcagattctcgccgactttgaggaagctttcccatcccaaggaaccaaggttgcatggctcgacaagattgataggcgatatgcctggatcaagcgacagctggtcgactacgaggagaaatacggccgaatgtttcccagggagtggtgcatggcggaacgaattgcagtcgaattttgtcacgtgacacgggctgaactcgcaaaaatcatgcggacgagagccaaggaaattgaggtcaaactgctgcttttcgcaattcaacgcaccaccaattttgagggcttcctggccaagcggttttcaggctgcacgttgaccgatggcacactgaaaaagctcgagtctcccccaccctccaccaacccatttttggaggatgagccaactccagaaatggaggaattggctactgagaaaggcgatctggatcagcctaaaaagcctaaggctcccgataatccctttcacggcattgtgagcaaatgcttcgagccacacttgtacgtctacatcgaatcacaggacaaaaacctgggcgaactgattgaccgatttgtagccgatttcaaggcccagggcccgcccaaaccaaacaccgacgaaggcggggcagtgttgccttcgtgtgcggatctgtttgtgtattacaaaaaatgtatggtccagtgctctcagctgagcacgggtgaaccaatgatcgctctcaccaccattttccaaaagtacctgagggagtatgcttggaagattctgtccggcaacctgcccaaaacaaccacctcttccggcggcttgaccatctcatcccttctaaaagagaaggagggcagcgaggtcgcgaagtttaccttggaagaactgtgcctgatctgtaatatactgagcacagctgagtactgtctcgccacaacacagcaacttgaagagaagctgaaggagaaggtggatcgccacctgcagcaatactcagctgctgggtccggcagtggatgttgcttatag

SEQ ID NO: 45905 - DNA, 2499 bp, Artificial Sequence
  derived and/or modified sequence
atgatggaggaggaggagctggagttcgtggaggagctggaggccgtcctgcagctgacccccgaggtccagctggctatcgagcaggtgtttccctcgcaggaccctcttgaccgcgccgattttaacgcagtggagtatattaatacactgttccctaccgagcaatctctggccaatatagacgaagtggtcaacaagattcggcttaagattcgaaggctggacgacaatatcaggacagtcgtcaggggacagaccaatgtggggcaggacgggcgtcaagcattagaggaggctcagaaagccatccaacagctctttgggaagattaaagatatcaaggataaagcggaaaagtcagagcagatggtcaaggagatcaccagagacattaaacagctcgatcacgccaaacgccatctgacgactagcattactacactcaatcatctgcatatgctcgccggaggggttgatagccttgaggccatgactaggaggaggcagtatggtgaggtagcaaacctgttacaaggtgtgatgaacgtgctggaacattttcacaagtacatggggattccccagattcggcaattgagcgagagagttaaggccgcccagactgaattggggcagcagatcctggccgacttcgaagaggcgttcccttcacaagggacgaaacgtcctggaggcccctctaatgtgttgcgagatgcgtgtctggttgctaatatcttggatccccggatcaagcaggaaatcatcaaaaagttcattaaacaacacctctccgaatatctcgtgctgttccaggaaaatcaggacgtggcatggctggataagatcgatcgaaggtacgcctggatcaagcgacagctagtagattacgaggagaaatatggccgtatgttcccccgggaatggtgcatggctgaaagaatagccgtagagttttgccacgtgacgcgtgctgagttggcaaaaatcatgagaacgcgggccaaggagatcgaggtgaagctcctcctctttgcaatccagcgtactaccaactttgaagggtttcttgcgaagcggttcagtgggtgtacacttactgatgggacacttaaaaaacttgaatctccgcctccctctactaatcccttcctggaagatgagccaacacccgaaatggaggagcttgccaccgagaagggggatcttgatcagcccaagaaacctaaggcgcccgataacccattccatggaattgtgagcaaatgtttcgagccacacctttatgtgtacatcgaaagtcaggataaaaacctcggcgaacttatcgaccgctttgttgcggattttaaggcccaagggcccccaaagccaaacacagatgaagggggggctgtcttaccttcttgtgctgatctgtttgtctattacaagaaatgcatggtacagtgtagccagcttagtacgggggagcctatgatcgcgctcaccactatatttcagaaatacctgagggagtacgcctggaaaattctcagcggcaacctgcctaagacaactacttcttctggagggctgaccatttcctctctgctgaaagagaaggagggttcagaggtggccaaatttacactagaagagctttgcctaatatgcaatattctaagtacagcagagtactgccttgccacgacacaacagctggaagagaagctcaaagaaaaggttgatgtgagtctgatcgagaggattaacctcacgggagaaatggacacctttagcacggtaatctcctcctcaatccaactactggtacaggacttagatgccgcttgcgatccggcactgaccgctatgtcaaaaatgcagtggcagaacgtcgagcatgtcggcgatcagagtccctatgtaacatcagtgatactgcatattaagcaaaatgtacccataattcgcgataatctggcttcaactaggaaatatttcacgcaattttgtgttaaattcgccaattcgtttatcccaaaattcatcacccacctgttcaagtgcaagccaattagtatggtgggcgcagaacagctgctgctcgatacacattccctcaaaatggtcctcctcgacctacctagcatttcaagccaggtggtcagaaaggctcctgccagctatacaaaaatagtggttaagggtatgacacgagccgagatgattcttaaggtcgtgatggctccccacgagcccctggtcgtcttcgtggacaactatatcaaactcctcacagattgcaacaccgaaaccttccagaagatactagatatgaagggtcttaagcggagtgagcagtcatcaatgctggagctgttacgccaacggctccccgcccccccgagcggggcagagagttctggctccctgtcactcaccgcccctacgccggagcaggaatcttcccgaattcgcaagttagagaagctaatcaagaagagactgtag

SEQ ID NO: 45906 - DNA, 387 bp, Artificial Sequence
  derived and/or modified sequence
atggtgctgctggacctgcccagcatcagcagccaggtggtgcggaaagcccctgcaagctatactaaaatcgtggtaaaggggatgactagagccgagatgatccttaaggtcgtaatggccccccacgagcccctcgtcgtcttcgtggacaattacataaagcttctaacagactgtaataccgagactttccaaaagatcctggacatgaagggcctaaaacggtctgaacaatccagtatgctggaactgttgagacagcgtctgcctgctcccccgagcggggcagaatcttcaggaagtctttctctgacagctcctacaccagagcaagagagcagccgaatcaggaagctcgaaaagctcataaaaaaaagattatag

SEQ ID NO: 45907 - DNA, 1644 bp, Artificial Sequence
  derived and/or modified sequence
atgatggaggaggaggaactagaatttgtagaagagctagaagcggtactgcaattgacacccgaggtgcagttagccatagagcaagtttttccctctcaggaccccctggaccgggctgacttcaacgcagtcgaatacatcaacacactgtttcctaccgaacagtctctcgctaatatcgacgaggtcgtcaacaaaattcgcttaaaaatccgacggctggatgacaatatcagaaccgtggtccggggacagaccaatgttggacaggatggtcggcaagctctcgaggaagcgcaaaaagctatccagcagctttttggcaagataaaggatatcaaggataaggcagagaaaagcgagcagatggttaaggagattacacgcgacatcaaacagctggatcacgccaaaagacatttgacgacctctattacaacgctgaatcatcttcacatgttggccggtggagtggacagtttggaagccatgactcgcaggcgacaatacggtgaagttgccaatttgttacagggcgtgatgaatgtgctggaacacttccacaagtacatggggatcccccaaatcaggcagctgagtgaacgggttaaagccgctcaaacagaattaggccagcagatcctcgcagatttcgaagaagcttttccgagccaaggtacaaaagtggcctggctggacaaaatcgaccgccgttacgcttggatcaaaaggcaactcgtggactatgaagaaaagtatggccgtatgttccctcgtgaatggtgcatggcagaaagaatcgcagtggaattctgccacgtaacccgggcagagcttgcaaagataatgaggacccgtgccaaagaaatcgaagtgaaattgctgctcttcgccatccaaagaactacaaacttcgaaggctttctcgcaaagaggtttagcggatgcaccctgaccgacgggacattgaagaagctggagagcccgcctcctagtaccaatccttttttagaggatgagccaactcctgagatggaggaacttgctactgagaaaggagacctggaccagcctaagaagccgaaggcgcctgacaacccatttcacggaatcgtgagtaagtgcttcgaaccacatctttatgtgtatatcgagagtcaggacaagaatttgggtgaacttatcgaccggttcgtggccgacttcaaagctcagggaccgcctaaacctaataccgatgagggaggcgcagtcttaccatcatgcgcggacttgttcgtctattacaagaaatgtatggtccagtgcagccaactgtccaccggggagccaatgattgcgttaactacgatattccagaagtacctccgggagtacgcttggaagatattgagtggcaatttgccaaagacaactacatctagcggtggcctgaccatctccagcctactgaaggagaaggagggctccgaggtagctaaatttaccttggaggagctgtgtctgatttgtaacatattatcgaccgccgaatactgtttggcgactactcagcaacttgaagagaagttaaaggaaaaggtggataggcacttacagcagtactcagccgcaggaagcgggagtggttgctgcctctag

SEQ ID NO: 45908 - DNA, 2499 bp, Artificial Sequence
  derived and/or modified sequence
atgatggaggaggaggaactggaattcgtggaggagcttgaggccgtccttcaactgactcccgaagtccaattggccattgagcaagtatttccatcccaagaccctttggacagggccgacttcaacgcagtggagtatatcaacaccttgtttccgacggagcagtcgttggccaacatagacgaggtcgtcaacaaaatcagactgaagatcagacgactggacgataacataaggaccgtcgttagggggcagacgaacgtgggacaggatgggcgacaggccctcgaggaagcacaaaaggccattcagcagctgttcggaaaaatcaaagacataaaggataaggccgaaaaatccgaacagatggttaaggaaattacccgggacatcaaacaactggatcatgccaagagacacctcaccaccagtataaccaccctcaaccatctacatatgttagcgggaggcgtggactcactcgaagctatgacccgccgtaggcaatatggtgaggtggctaatctattacagggcgtgatgaatgtcctggagcacttccataaatatatgggcatccctcagattagacagctgagcgagagggtgaaagccgctcagactgaactcggtcagcagatcttggccgattttgaagaggcattcccctcccaggggactaagcggccagggggtccatctaatgttctgagggatgcctgcctcgtcgcgaatatactggacccaaggatcaagcaggagattataaagaagtttatcaagcaacacttaagtgagtatctcgtgttgtttcaggaaaatcaagacgtggcctggcttgacaagattgaccgtcgttacgcctggatcaagagacagttagttgattacgaagagaagtacggtagaatgttccctcgggaatggtgtatggcggagagaatagcagtggaattttgccacgtgacgagagcagaattagccaaaatcatgcggacccgggctaaggagatcgaggtgaaactcctgctctttgctattcagaggactacaaattttgagggtttcctagccaagagattctcaggttgtactttaaccgatggcaccttgaagaaactagaaagccccccaccctctacaaacccatttctggaggatgaacctacccctgagatggaggagctggccacagagaagggagacctggaccaacccaaaaagccaaaagccccagacaatcccttccacggcatcgtgtccaagtgcttcgagccacacctatacgtgtacatagagtcccaggacaagaatttgggtgaactcattgatcgcttcgtggcggatttcaaggcccagggcccaccaaagccaaatacagatgaaggaggagcggtgctcccatcatgcgcggacttgttcgtgtactataagaagtgtatggtccagtgcagtcagctgtctacgggtgagccaatgattgcgttaacaaccattttccagaaatatctgagagagtacgcctggaaaatcctgtctggtaatctgcctaagaccaccacaagcagcgggggacttactatcagttctctgctgaaagagaaggagggctctgaagtcgccaagtttactttagaggagctttgtctcatctgtaatattttgtctacggcagagtattgtctagctaccacgcagcagttggaggagaagctgaaggagaaggtggacgtgtcactgattgaaagaatcaacctgaccggggagatggatactttttcaaccgttatcagctcatctatccaactgctcgttcaggacttggatgccgcatgtgatccagccctgaccgctatgtccaaaatgcagtggcagaacgtcgagcacgttggagatcagtctccctatgttacatctgtaattctgcacataaaacaaaacgttcccattatccgggacaatctagccagcaccaggaaatatttcacccaattctgtgtaaaatttgccaactcttttatccctaaatttattacgcatctattcaagtgtaagcctatcagcatggtgggcgctgaacagctgcttctcgatacccattcgttaaaaatggtcctgctggacctccctagcattagctcccaagtggtgcggaaagctcccgcttcctataccaaaatagtggtcaagggtatgactcgggcagaaatgattctcaaggtcgtgatggcccctcacgaacctctggtggtgtttgtggataactatatcaagttgctcacagattgcaatactgaaactttccaaaagatcttagatatgaaaggtctaaagcggagtgagcagtcatctatgctggaacttctacggcaacgacttcccgcaccccctagcggggctgaaagcagcgggtctctgtcattgacagcacctacacctgagcaggaaagcagtcgaatcaggaagttggagaaactgattaagaaacggctctag

SEQ ID NO: 45909 - DNA, 387 bp, Artificial Sequence
  derived and/or modified sequence
atggtcctcctcgacttaccgagcatatcttcgcaggtcgttcggaaggccccagcaagctataccaaaattgtcgtgaagggcatgacaagggccgagatgatcctgaaggtcgtgatggctccacacgaacccttggtcgtgtttgtcgataactacataaagctcttgacagactgcaatactgagacatttcaaaagatcctggacatgaaagggctgaagagatcagagcagtcttcgatgctggaactgttacgccagcggttgccagcacctccgtctggcgctgagtcttccggatctttgtccctcaccgcgcctacaccagagcaagaaagctccagaatcagaaagctcgagaagctgatcaaaaaacggctctag

SEQ ID NO: 45910 - DNA, 1903 bp, Artificial Sequence
  derived and/or modified sequence
atgatggaggaggaggaactggagttcgtggaggagctggaagccgtgctgcagctcacgcccgaggtgcagctggccatcgagcaggtgtttccaagccaggaccctctagatcgagcagatttcaatgctgttgagtatatcaataccctgttcccaaccgagcaatctctggcgaacatagacgaagtcgtgaacaaaattaggctgaaaataaggagactggatgacaatattcgaactgttgtaagaggtcagacgaacgtggggcaggatggacggcaagcgcttgaagaggctcagaaagctatccaacaactctttggcaaaatcaaagatatcaaagacaaagctgaaaaatcagagcaaatggtgaaagaaatcacccgtgatattaagcaattagatcacgccaaacgccacctgaccacctcaatcaccacactgaaccacctgcacatgctggcaggaggtgtcgactccctcgaagccatgaccaggcgaagacaatacggagaagttgctaatctccttcagggtgtgatgaatgtcctggagcacttccacaagtatatggggattccgcagatccggcagctttccgaaagagtgaaggctgcacagactgagttaggacagcaaatcctggcagattttgaagaagcgtttccttcccagggcaccaaggttgcctggctggacaaaatcgacagacgctatgcctggataaaacgccagcttgtggactatgaggagaaatacggccgcatgtttccacgtgagtggtgcatggctgagaggattgcggtggaattttgccatgtgacaagggcagaacttgccaagattatgcgtaccagagcgaaggaaattgaagtgaaattgcttctttttgctattcaaagaacaactaactttgaggggtttcttgcaaaacgcttctccggctgcaccctgaccgatgggaccctgaaaaagcttgagtctccacccccatctaccaatcccttcctggaagatgagccaacaccagagatggaggaactggcaacggagaaaggagatttagatcaaccaaagaagcctaaagccccagacaatccatttcatggcattgtttccaagtgttttgagcctcatctctacgtgtatatcgaatcccaagacaagaacctcggagagctgatagatcggtttgtggctgatttcaaagcccaggggccacctaagcccaacactgatgaagggggtgccgtgctccccagctgcgccgacctctttgtctactacaagaagtgcatggtgcaatgctctcagctcagtactggggagcccatgatcgccctgaccaccattttccagaagtacctccgagaatacgcctggaaaatcctctctggcaacctgcccaaaaccacaaccagcagtggaggactgactatcagcagcctcctcaaggaaaaggagggctcagaagtagccaagttcactctggaggagctctgcctcatctgtaacatcctgagcacggcagagtactgtctggccaccacccagcagctagaagaaaaactcaaagaaaaagtggatcgtcatctccagcagtattcagctgctggttcaggatctggatgctgcctgtgatcctgccctgactgccatgagcaagatgcagtggcagaacgtggagcacgttggtgaccagagcccctacgtcacctctgtcattctgcacatcaagcagaacgtccccatcatccgtgacaacctggcttccacacgcaagtacttcactcagttctgcgttaaatttgcaaactccttcattcccaaattcatcacccacctcttcaagtgcaagccaattagcatggtgggagcagaacaggtgagatggacgtag

SEQ ID NO: 45911 - DNA, 13106 bp, Artificial Sequence
  derived and/or modified sequence
gaagtgccggagcggctgacagagcggctgacggagccgggctcaccaggtcgctgccgcgagggagttgctgtgctggggcctgggtggcggctggaggcctgagttgggctcgcggcgggggtcggcagggggccgggtggcggaatgatggaggaggaggaactggagttcgtggaggagctggaagccgtgctgcagctcacgcccgaggtgcagctggccatcgagcaggtgtttccaagccaggaccctctagatcgagcagatttcaatgctgttgagtatatcaataccctgttcccaaccgagcaatctctggcgaacatagacgaagtcgtgaacaaaattaggctgaaaataaggagactggatgacaatattcgaactgttgtaagaggtcagacgaacgtggggcaggatggacggcaagcgcttgaagaggctcagaaagctatccaacaactctttggcaaaatcaaagatatcaaagacaaagctgaaaaatcagagcaaatggtgaaagaaatcacccgtgatattaagcaattagatcacgccaaacgccacctgaccacctcaatcaccacactgaaccacctgcacatgctggcaggaggtgtcgactccctcgaagccatgaccaggcgaagacaatacggagaagttgctaatctccttcagggtgtgatgaatgtcctggagcacttccacaagtatatggggattccgcagatccggcagctttccgaaagagtgaaggctgcacagactgagttaggacagcaaatcctggcagattttgaagaagcgtttccttcccagggcaccaagagaccaggaggacccagcaatgttctacgagatgcatgtctggttgctaatattctagatcccaggatcaaacaggaaatcatcaaaaagtttattaaacagcatctgtcagagtatctggtactttttcaagaaaaccaagatgttgcctggctggacaaaatcgacagacgctatgcctggataaaacgccagcttgtggactatgaggagaaatacggccgcatgtttccacgtgagtggtgcatggctgagaggattgcggtggaattttgccatgtgacaagggcagaacttgccaagattatgcgtaccagagcgaaggaaattgaagtgaaattgcttctttttgctattcaaagaacaactaactttgaggggtttcttgcaaaacgcttctccggctgcaccctgaccgatgggaccctgaaaaagcttgagtctccacccccatctaccaatcccttcctggaagatgagccaacaccagagatggaggaactggcaacggagaaaggagatttagatcaaccaaagaagcctaaagccccagacaatccatttcatggcattgtttccaagtgttttgagcctcatctctacgtgtatatcgaatcccaagacaagaacctcggagagctgatagatcggtttgtggctgatttcaaagcccaggggccacctaagcccaacactgatgaagggggtgccgtgctccccagctgcgccgacctctttgtctactacaagaagtgcatggtgcaatgctctcagctcagtactggggagcccatgatcgccctgaccaccattttccagaagtacctccgagaatacgcctggaaaatcctctctggcaacctgcccaaaaccacaaccagcagtggaggactgactatcagcagcctcctcaaggaaaaggagggctcagaagtagccaagttcactctggaggagctctgcctcatctgtaacatcctgagcacggcagagtactgtctggccaccacccagcagctagaagaaaaactcaaagaaaaagtggatgtaagtctgattgaacgaatcaatctgactggagagatggacacgttcagcaccgtcatctccagcagtattcagctgctggttcaggatctggatgctgcctgtgatcctgccctgactgccatgagcaagatgcagtggcagaacgtggagcacgttggtgaccagagcccctacgtcacctctgtcattctgcacatcaagcagaacgtccccatcatccgtgacaacctggcttccacacgcaagtacttcactcagttctgcgttaaatttgcaaactccttcattcccaaattcatcacccacctcttcaagtgcaagccaattagcatggtgggagcagaacagctgctgctggacacccactcgctgaagatggtcctgctcgatctcccctccatcagctcgcaggtggtgaggaaggcacccgccagctacaccaagatcgttgtcaaaggcatgacccgggctgagatgatcctcaaggtagtgatggcccctcatgaaccgttggtggtgtttgttgacaactacatcaaacttctcacagactgcaacacagaaacctttcagaagatactggacatgaaggggctgaagaggagtgagcagagcagcatgctggaactcctgcgccagcggctccccgcaccgccctcgggggcagaaagctccggctcactgtccctgacggcgccaacaccagagcaagagtcgtcacgcatccgcaagctcgagaaactcattaaaaagagactgtagcagcagcaaggggccctttgctcctggctggagaccctcagcgcccgttccccagaagcccccaacctctcctgtgctccccggcactctcacatcgtcggtcttcaaacttcctgggacatgtgggttgttactgagtctctcccatgccctgtcttacttcctgccctaatcggagacgctgagtaagggctgggctctaagagggcgatttaggtgatctctggttcgtgaagcagaggcagcagtggaggataggtccctgagctgcccttgactcatgtagcctccccatggcagtcacaccctcttgacacgtgggccccacccgtcctttttttttttttttttttttttttttgagacagagtctcgctctgtcacccaggctggagtgcagtggcgtgatctcggctcactgcaacctccgcctcccaggttcaagcaattctcctgcctcagcctcctgagtatcggattacaggcgtgagccaccgagcccagccccttcctccatttctttactcccaccctgctcctggtttctagggaagggaaaccaggaagttcacttggaagacgtttcctaggttttctcatcagatgaagccatgggaacgcccaggaagtccatactctcaaacccctttctgcccactcaccttcaggtccacagcactttccagcgtcatctgaaatagcaaaggtgatgtgcagcatcccagtgatgtgttcctgtgttatgagaaggagtctggggttctggatgcctcaggaacagaatatggaccttaaagaccaggctgagagcctggcctggcacgcagcctgcccgccccccccgcccttcctgtccaccgcgggctctctgcagcagggcttgccgaagagactgctcccgacctctcatgtcatcctgcatccagagaatggcagcatatcaagccgttaaccctgattcactcggttcccttgaaaccaggcctcagttaaccatgaccacagctacaggcaaaccgctgctgttgctgcctgcttttgctgaagaatgatatcttgccaggcacggcggctcatgcctgtagtcgcaacactttgggagaccaaggcaggaggatcacttgagtccaggagtttgagaccagcctgggcaacatacagatgtctacaaaaataaaaatttgcaaggtgtggtggcatgcacctgtagtcccaactgctagggaggctgaggtgggcagattgcttgagctcaggagtttgagaccagtctgggcaacctggcaaaaccaaaaatacaaaaaattggctgggtgtggtggctcatgcctgtaatcacagcactttgggaggctgaggcaggtggatcacctgaggtcaggaattcgagaccagcctgcccaacatggcgaaaccctgtctcaactaaaaataaaaaaaattagccgggtgtcatggcgagtgcctgtaatcccagctactggggaggctgaggcaggagaatcacttaaacccgggaggtggaggctgcagtgagccaagatttcaccactgcactccagcctgggtgacagagcaagaccccttctcaaaaagttttcaggatagaggaaatttccttaaaatccataaaacttgtaacagccgtacagtaggaataaggtttggaaatctgcctggaaacctgatttcctcatccccaccttgtttcccaacataaccactgctctgtgcccctgccctctctgccaggctttctccccgatgccgtccagctctgatcctgagtgtcatttcttcatcggcttccaggctgtccttgctagctggtttgactctcacgcatcaagcgtctcaaatttgagaatgcggaggagaaaagaagtgttgcgagaaggagatgcggccttcagttgaggtctattaggaaaagattccaaataagacaagggcggggggcggcagtcgggagagcccccaggaagccctgtagatgcccccaccccagcccatggagttgctatggttaagcagcctgagccgtacagttgaaaaggggcggtggggcccatctccaaatagcacagccagttcagccgtctgtcctcaacccaggagagctgggaaagccagtggactcctgcacctggttcttgtcactcctggcgtttgtgtacagatcaccacttctctttttggttcattgttgaggagtcgttttccggacggctccatcacagcattgagctatcaagctgctgttttccacagttggtggtcacagccagggaagttgctgtcttgatttgttacattgtcagtaatccccaaggaaccaatggatgtcagtaggagtttctgttaaatgtctccttgatggggactcagtactgtgtagagacgctgtgtttctcttctgggggtgtgcatcagaaccactggggccttttaaaatctacagatgccggccgggcgccgtggctcacgcctggaatcccagcacttggggaggctgaggcgggcggatcacaagcgcaggaaattgagaccatccttgccaatatggtgaaaccccatctctacaaaaaatacaaaaattaccggggtgtggtggcgtgcacacctcccagctacttgggaggctgaggcaggagaatcgcttgaacccgggaggcaaagattgcagtgagccgagatcacgccactgcactccagcctggcgacagagtgagactctatctcaaaacaaacaaaaaaacagatgcccggagattttgagtcagtaagtttggatggggcctggcatacaggtttaaaagttccataggtagttataacgtttacaccttgttaagaaccactgcaacagagagatttgctttatggaagggctcctgccacgcattttcatacatgtctatttttctgactctaagctaaaagtgcgccgacactacacttgagctggtgccaacgtggtgaagattctctactgataacagctttcattttaaacttgtgttgggtcaggcgcggtggctcacgcctgtaatcccagcactttgggaggccgaggtgggcggatcacatgaggtcacgagtttgagaccagcctggccaacatggcaaaatcccatctctactaaaaatacaaaaaaaaaaaaaaaaaaagcaggcaggtggcgggtgcctgtaatcccagctacttgggaggctgaggcaggggaatcagttgaatccgggaggcggaggttgcagtgagccgaggtcccgccactgcactccagcctgggagacagagtgagactcagttaaaaaaaaaagacttttggtggtggtggggaccatgcccaggattgggctctctccatactgatgaggattcttcttgttttgatgaccaacccccaagcagaagctttatttattaacatcacttcaaaaataacgtatcaaaggggcaccctaggccgggtactgtggcatcacacctgtaatgccagtgctttgagaggctgaggtgggaagattgcttgagcccaggacttcaagacaagcctgggcaacagagtgagaccccatctctattaaaaaataggccgggcatggtggctcacactggtaatcccagcactttgggaggccgaggcaggtggatcatgtgaggtcaggagttcgagaccagcctggccgacatggtgaaaccctgtctttactaaaaatacaaaattagccaggcgtggtggtgggcgcctgtaatcccagctactcaggaggctgaagcaggaggatcgcttgaacccaggaggcagaggctgcagtgagccgagatcatgccattgcactcctgcctgggtgacggagcaagactctctaaaaaataataaggtaaaaggagtacctgtggatgaaagcagcagctaacagctctgtgattcagctagacctagatattgtgcccattccttcccctcagtccattttctgtagcccctttaaaaaccaaaaaacaactttgaagtcactttgggtttaaaataaatagtggtaatttgtataatcaataaagagttcactctgctcttactgaggggacttgtctgaaagctggcttagcggtgtccaggccagagaacatcctgtgtggactcttaacaatgaaacaggagccgcaatggacaaggtgttctgatctccaaacccagctcagggattgaagctaactaccgccactccttcctctctcgaagaacaaagagccagtacccagggctctgcccacccccgagaaggggtgcctgatttcttatgtctagggtggctcctctgtgcagatcagacaggactgagagcagacaagctgagaccagcatgaccagtacagggcacgcagagcgtgggggcaggtccgaggctgctgctcgatgcagggtatgacaccaacccttcctgaattgccatcggatgaggagacctggttccctgttgaaagaatgccaggggaaatgctgcatgtgcacagctggaaatggggttccttctctaggaagagcactcggaataacctgctggaaatggggttccttccctaggaagagcactcagaataacctgctggaaatgggattccttggctaggaagagcactcagaataacctgctggaaatgggattccttggctaggaagagcactcagaataacctgctggaaatgggattccttacctaggaagagcactcggaataacctgctggaaatgggattccttacctaggaagagcactcggaataacctgctggaaatggggttccttccctaggaagagcactcggaataacctgctggaaatggggttccttccctaggaagagcactcggaataacctgctggaaatggggttccttcgctaggaagagcactcggaataacctgctggaaatgggattccttcgctaggaagagcactcggaataacctgctggaaatgggattccttcgctaggaagagcactcggaataacctgctggaaatgagattccttccctaggaagagcactcggaataacctgctggaaatgggattccttcgctaggaagagcactcggaataacctgctggaaatgagattccttcgctaggaagagcactcggaataacctgctggaaatgggattccttcgctaggaagagcactcggaataacctgctggaaatgagattccttcgctaggaagagcactcggaataacctgctggaaatgggattccttcgctaggaagagcactcggaataacctgctggaaatgggattccttcgctaggaagagcactcggaataacctgctggaaatgggattccttccctaggaagagcactcggaataacctgctggaaatgagattccttccctaggaagagcactcggaataacctgctggaaatgggattccttcgctaggaagagcactcggaataacctgctggaaatgggattccttcgctaggaagagcactcagaacaacctgcctgcttgagggtgacagcaagtgtctcacacttctcgtctactccaagtcagattcctaaaaataaaatagagctccaatgggcaatttaagcaaaagccttagaaacatggacacctgaaatgctggcctacatgaagggtacgatgacattttatatattaaataaaaattcccagtcctgttttagtattcatcagaatagcctcttggaccctcgaagttctacacctttgggagatataaatttccttaaaataaagggattgcttctttgtgtaaatagctttcattttctccatctggaagtgatttctgcctgcatgttggagcacaaaatactgcagttaattaaagcattactggatgtcatttgctagaatgtatttccttactgctgacagaaaacagaacagactctaggaaagaagtagcaagtccgtgaccctggccgctcctggtggctgcccttctcccttccctgacagtctaaggaagcaacgcgtgggagcagaatgtggccgactgagcccagtcctgacctgcccagttgcagtggagcctgtctgtaatgttgtgtaaagtgttttgcttctgacttggaaccctacttgccctgtgaatttctatcctgtgaaccttcccttctctgtccttaccgttcccatcacagcctgctcttccagtgacggccaagtgatttctctcctgcacgcatgagtccatcctgtttccttagtagctggatggacgttttgccatgaaaactctttgggaagtcttgtgtcctttagtgatttctctcctgcacgcatgagtccatcctgtttccttagtagctggttggacgtttttgccatgaaaactcttcgggaagtcctgtgtcctttcaacaggggaaaactggctgcggcccttccattaggctccaggatcattacctcgtttccattctttcttttcaacagctccccactttactagggaagccaagggatcaacctaatgagaaaagaaccttccctgtagcccacctggaagggcattgcctgccagctccttccttctcacctatgtgaacaggagggaagatgccggcgatccatggatctgtgggacatgaaggacgtgtccatcagaaatgaaagcagcctgggattggaagcatccacagaagacttgatctgcaggtcttgatttggacctggcactttgacaccaggcgagtcactgatcccctgagcatccattttcaatattggtgagaggggattataatgaatattggctgtgaaggtcacacaagaccgggctatatgcacttgctctgccataaggcagtgtgaagtgtgttcgtgatcacttgtgggcgggagcctgtggctgtcttgcctggactggcttttttaaacatggatgagtggtgacaaatcctgcggccgtgtgcaggctacatccgcagcgagctccgcatatctggtctttgcctttttaggtcatgactgtaatatcaagcttacacgagagttttaaaagactgagcagtatccccttcccctggcagctgctgcttccgtagcatttagggataaacctgcagacactgagaagagagcttcctccctcctggggctggtggcgaggctgcctgttgtggaaaatagggcatgtctcctgtgaatgcgaattgcgagggttgccaaagcctcccttccaagaaacttgcttaggtgtctggtgtccacagaccagactcttctcccgacagggacaaaaattcttgcctgcctttctttttcttttttttccttttacttattcttgccttttttcttcttcttcttctttaggtatgatgccccccaaaaaactaagcaagattaacttgggacaggcagttctaactgggaagcctgagctcacaggctgtttggattactttccaattgtgtttcaaagatgtttagacttttcccaaggccagctgaatccttataatcagcccaaaagttcctttctgtttctgtctgtcccctttgagggtgttgactcagagaacctggggcaatatgagatgttaaaataaaaatagcgtccaacgtcccgcctcctgggaatgctgctcacttcatccgagggttctgggagcttctgctcagtcatcaaatggaatttgcacaattgtcttgcctcctgttttgggtaatttttcaacaagtgagaaattaagaacagcttctcaacaaacttccctctacttccagggccaagaaaagtatttgcagtgtgggctgcagctttcaggggtctcaggtgaaatggtggcaagaaaccccagctcccttcatgtgtttgccttgcgctgatggaaaaggaaggcacttctcagctgccagagaccacattccacagggttcttcacaaaatcaagcactgcagtggaccaactggagcagccactggagggctttagaaggcaaatggaatacatatcaaatgctatataaagaaaacatctgtttacacagagtcccccacagcctcatacctacacccaatatcaaatgctgtataaagaaacatcagtttacacacagagccccccacaacctcatacccacaccgaatatcaaatgctatacaaagaaacatcagtttacacacagagtcccccacagcctcatacccatgcctgtcacatctttgcacagccctaaaggatccagagctttggatcagcagctggctagctcggaggccagaggagggtgctgaggggagtggaggtcagttggggtagccctgggccctggctgcacagtccagctgctgtgtggcctgcatgtggtatcttaggtcatgagagggcctgggcaattcagtgctatctgtacatgttggtggggtgggaaggaaaaggtaactgtgtatttactgtgtcctggatacattatctcatcggatgaaattcctgctaagttaagctccgtttagtggacgggacttggaggctcaaagagggtaagtgacaggcccaaggatatgtgcctagtgaggggtgagccaggattcgatgtgtgactagtaaggggtcagccaggattcaatatgtgactagtaaggggtcagccaggatttcatatgggactagtaaggggtcggccaggatttgatacgtgactagcaaggggacaagccaggatttgatatgtgactagtgaggggcgagccaggattcgatatgtgactagtaaggggtcagccaagatttgatatgtgactagtgaggggcgagacaggatttgatatgtgactagtgaggggcgagccaggatttgatatgtgactggtgaggggcgagccaggatttgatatgtgactggtgaggggcgagccaggatttgatatgtgactggtgaggggcgagccaggatttgatatgtgactggtgaggggcgagccaggatttgatatgtgactggtgaggggcgagccaggatttgatatgtgactggtgaggggcgagccaggatttgatatgtgactggtgaggggcgagccaggatttgatatgtgactggtgaggggcgagccaggatttgatatgtgactggtgaggggcgagccaggatttgatatgtgactggtgaggggcgagccaggatttgatatgtgactggtgaggggcgagccaggatttgatatgtgactggtgaggggtggagccagtcaggatttgatatgtggttagtgaggggttagccagtcaggatttgatatgtggctagtgaggggcgagccaggatttgatatgtgactagtaagggggtgagccaggattcaatacgtgacaagtgaggggtgagccaggattcaatacgtgaccagtgaggggcgagccaggattcgatacgtgaccagtgaggggcgagccaggatgcgatacgtgaccagtgaggggcgagccaggattccatacgtgactagtgaggggtgagccaggattcgatatgtgagtagtgaggagtgagccaggatttgatatgtggctactgaggggcgagccaggatttgatatgtgactagtaaggggtcagccaggatttgatacgtgactagtcagggggtcagccaggattcgatacgtgactagtaaggggtcagccaggatttgatatgtgactagtgaggggtgagccaggatttgacatgtgactagtgaggggtgagccaggattcaatatgtgactagtgaggggtgagccaggattcgatatgtacctagtgaggggtcagccaggatttgatatgtggctagtaaggggtgagccagccaggatttgatatgtgactagtgacgagtgagccaggatttgatatgtgactagtaagggggtgaggcaggatttgatatgtgactagtaagggggtgaggcaggatttgatatgtgactggtgaggggtgagacaggatttgatatgtgactagtgaggggtgagccaggatttgctatgtgactagtaagggggcgagccaggatttggctccagccttcattccaacatccatgccttttgtacttcaccagcagttttcaaatttatgggacaaaattttacattggattccctctatacaaaatagataaaagtattttatgaatacattttatgagttcaaatatttttcagaagaaatcagtaaaagcattgaaaactattccagcaaataggaagcactttaaaccaaggttatggatgaaaatgtgtgtgtatcaaccccagtttacttctgggttgcacagaatagagaaatcttgatttaatccagctaagaattttcaaatagtatccattttgttttgttttaaacagctcttcttgcaatggtagaggctcttcaattaaacagagatggtaacaggc

SEQ ID NO: 45912 - DNA, 487 bp, Artificial Sequence
  derived and/or modified sequence
aaccggaaatgaattccagcttcccgtccaacttttgtctaaccccgtccgttgcatgagatgagtttgctgctgctggacacccactcgctgaagatggtcctgctcgatctcccctccatcagctcgcaggtggtgaggaaggcacccgccagctacaccaagatcgttgtcaaaggcatgacccgggctgagatgatcctcaaggtagtgatggcccctcatgaaccgttggtggtgtttgttgacaactacatcaaacttctcacagactgcaacacagaaacctttcagaagatactggacatgaaggggctgaagaggagtgagcagagcagcatgctggaactcctgcgccagcggctccccgcaccgccctcgggggcagaaagctccggctcactgtccctgacggcgccaacaccagagcaagagtcgtcacgcatccgcaagctcgagaaactcattaaaaagagactgtagcagc

SEQ ID NO: 45913 - protein, 504 aa, Artificial Sequence
  derived and/or modified sequence
MAWVLKMDEVIESGLVHDFDASLSGIGQELGAGAYSMSDVLALPIFKQEDSSLPLDGETEHPPFQYVMCAATSPAVKLHDETLTYLNQGQSYEIRMLDNRKMGDMPEINGKLVKSIIRVVFHDRRLQYTEHQQLEGWKWNRPGDRLLDLDIPMSVGIIDTRTNPSQLNAVEFLWDPAKRTSAFIQVHCISTEFTPRKHGGEKGVPFRIQVDTFKQNENGEYTDHLHSASCQIKVFKPKGADRKQKTDREKMEKRTAHEKEKYQPSYDTTILTECSPWPDAPTAYVNNSPSPAPTFTSPQQSTCSVPDSNSSSPNHQGDGASQTSGEQIQPSATIQETQQWLLKNRFSSYTRLFSNFSGADLLKLTKEDLVQICGAADGIRLYNSLKSRSVRPRLTIYVCREQPSSTVLQGQQQAASSASENGSGAPYVYHAIYLEEMIASEVARKLALVFNIPLHQINQVYRQGPTGIHILVSDQMVQNFQDESCFLFSTVKAESSDGIHIILK

SEQ ID NO: 45914 - DNA, 1515 bp, Artificial Sequence
  derived and/or modified sequence
atggcctgggtgctgaagatggacgaggtgatcgagagcggcctggtgcacgacttcgacgccagcctgagcggcatcggccaggagctgggcgccggcgcctacagcatgagcgacgtgctggccctgcccatcttcaagcaggaggacagcagcctgcccctggacggcgagaccgagcacccccccttccagtacgtgatgtgcgccgccaccagccccgccgtgaagctgcacgacgagaccctgacctacctgaaccagggccagagctacgagatcagaatgctggacaacagaaagatgggcgacatgcccgagatcaacggcaagctggtgaagagcatcatcagagtggtgttccacgacagaagactgcagtacaccgagcaccagcagctggagggctggaagtggaacagacccggcgacagactgctggacctggacatccccatgagcgtgggcatcatcgacaccagaaccaaccccagccagctgaacgccgtggagttcctgtgggaccccgccaagagaaccagcgccttcatccaggtgcactgcatcagcaccgagttcacccccagaaagcacggcggcgagaagggcgtgcccttcagaatccaggtggacaccttcaagcagaacgagaacggcgagtacaccgaccacctgcacagcgccagctgccagatcaaggtgttcaagcccaagggcgccgacagaaagcagaagaccgacagagagaagatggagaagagaaccgcccacgagaaggagaagtaccagcccagctacgacaccaccatcctgaccgagtgcagcccctggcccgacgcccccaccgcctacgtgaacaacagccccagccccgcccccaccttcaccagcccccagcagagcacctgcagcgtgcccgacagcaacagcagcagccccaaccaccagggcgacggcgccagccagaccagcggcgagcagatccagcccagcgccaccatccaggagacccagcagtggctgctgaagaacagattcagcagctacaccagactgttcagcaacttcagcggcgccgacctgctgaagctgaccaaggaggacctggtgcagatctgcggcgccgccgacggcatcagactgtacaacagcctgaagagcagaagcgtgagacccagactgaccatctacgtgtgcagagagcagcccagcagcaccgtgctgcagggccagcagcaggccgccagcagcgccagcgagaacggcagcggcgccccctacgtgtaccacgccatctacctggaggagatgatcgccagcgaggtggccagaaagctggccctggtgttcaacatccccctgcaccagatcaaccaggtgtacagacagggccccaccggcatccacatcctggtgagcgaccagatggtgcagaacttccaggacgagagctgcttcctgttcagcaccgtgaaggccgagagcagcgacggcatccacatcatcctgaagtag

SEQ ID NO: 45915 - DNA, 447 bp, Artificial Sequence
  derived and/or modified sequence
atggcctgggtgctgaagatggacgaggtgatcgagagcggcctggtgcacgacttcgacgccagcctgagcggcatcggccaggagctgggcgccggcgcctacagcatgagcgacgtgctggccctgcccatcttcaagcaggaggacagcagcctgcccctggacggcgagaccgagcacccccccttccagtacgtgatgtgcgccgccaccagccccgccgtgaagctgcacgacgagaccctgacctacctgaaccagggccagagctacgagatcagaatgctggacaacagaaagatgggcgacatgcccgagatcaacggcaagctggtgaagagcatcatcagagtggtgttccacgacagaagactgcagtacaccgagcaccagcagctggagggctggaagtggaacagacccggcgacagactgctggactag

SEQ ID NO: 45916 - DNA, 1515 bp, Artificial Sequence
  derived and/or modified sequence
atggcctgggttctgaagatggatgaggtgattgagagtggcctggtgcacgatttcgacgccagcttatctggaattggtcaagaattaggagcaggagcttacagtatgagcgacgtcctcgccctgccaatcttcaaacaggaggacagctctctgcccttggatggggaaaccgagcaccctccgttccagtatgtgatgtgtgccgccacctctcctgccgtgaaactgcatgatgagaccttgacctacctcaatcaaggccagtcctacgagattaggatgctggataataggaagatgggagatatgcccgagattaatggcaaacttgttaaatctatcattagagttgtatttcacgataggcggctgcagtacaccgaacatcagcagctcgagggctggaagtggaacaggccaggagaccgtctcctggatttagatattcccatgtccgtaggcatcatcgacacaagaacaaacccaagtcagctgaatgccgtcgaattcctgtgggacccagccaagagaacctccgccttcatccaagtgcattgcatctctacagagtttacaccccggaagcatggaggagaaaagggcgtgccctttcggattcaagtggacacgtttaagcagaacgagaatggcgaatatacggatcacctgcacagtgcatcatgccagattaaggtgtttaagcctaaaggagccgatcgaaagcagaaaactgacagagagaagatggagaagaggactgcacacgagaaggagaagtaccagccctcatacgataccaccattctgacagagtgtagcccatggcccgatgcacctaccgcctacgtcaataactcaccgagtccggctcctacgttcacctcaccacagcagtctacttgttctgtcccagacagcaacagttcttcacctaaccaccagggtgatggagcatctcagaccagcggggaacagattcagccgtcggccaccatacaggaaacccagcagtggcttctgaaaaacaggttttcatcctacacaaggctatttagcaacttcagcggagcagacctcttaaagctcacaaaggaggatctggtacagatctgcggcgcggccgatggtatccgcctgtataattccctcaagtctaggtctgtaagaccaaggttgacaatttacgtgtgtagagaacagccttccagtacggtgctacaaggccagcagcaggccgcttcttctgcctccgagaatggctcaggcgccccttacgtgtaccatgcaatctatctcgaagagatgatagcttctgaagtagctcgcaagcttgctctagtgttcaatatccccctgcaccagatcaatcaggtgtaccgccagggaccaaccggcattcacatcctggtgagcgaccagatggtgcaaaacttccaagatgagtcttgctttttgttttctactgtgaaggccgaaagtagtgatgggattcacattatcctgaaatag

SEQ ID NO: 45917 - DNA, 447 bp, Artificial Sequence
  derived and/or modified sequence
atggcatgggtgctcaagatggacgaggtgatcgaatccggccttgtacatgatttcgatgcgtccctgtcaggtatcggccaggaactgggcgccggggcatattccatgtcggatgtgctcgcgctgcccatcttcaagcaggaggattccagcttgcccctcgacggcgaaactgaacaccccccattccagtacgtcatgtgtgccgctacatcacccgccgtgaaactgcacgacgaaactctgacgtatctgaatcaaggtcagtcgtacgagattcggatgctcgataatcggaagatgggagacatgccagagataaatggaaagctcgtgaaatccatcattcgcgtagtctttcacgataggaggcttcagtataccgaacaccagcagttggagggatggaagtggaaccggcccggagatcgacttctcgattag

SEQ ID NO: 45918 - DNA, 1515 bp, Artificial Sequence
  derived and/or modified sequence
atggcctgggtgctgaagatggatgaggtgattgaaagtggcctggtgcatgactttgatgccagcctgagcggcatcggccaggagctgggcgctggggcctacagcatgtctgatgtgctggccctgcccatcttcaagcaggaggacagcagcctgcccctggatggagaaacagagcacccccccttccagtatgtgatgtgtgccgccaccagccctgctgtgaagctgcatgatgagaccctgacctacctgaaccagggccagagctatgagatccgcatgctggacaacaggaagatgggagacatgcctgagatcaatggcaagctggtgaagagcatcatccgggtggtgttccatgaccggcggctgcagtacacagagcaccagcagctggagggctggaagtggaacagacctggggaccggctgctggacctggacatccccatgtctgtgggcatcatcgacaccaggaccaaccccagccagctgaatgctgtggagttcctgtgggaccctgccaagaggaccagcgccttcatccaggtgcactgcatcagcacagagttcacccccaggaagcacggcggggagaagggcgtgcccttccgcatccaggtggacaccttcaagcagaatgaaaatggagagtacacagaccacctgcacagcgccagctgccagatcaaggtgttcaagcccaagggagctgacaggaagcagaagacagaccgggagaagatggagaagaggacagcccacgagaaggagaagtaccagcccagctatgacaccaccatcctgacagaatgtagcccctggccagatgcccccacagcctacgtgaacaacagccccagccctgcccccaccttcaccagcccccagcagagcacctgcagcgtgcctgacagcaacagcagcagccccaaccaccagggagatggagccagccagaccagcggggagcagatccagcccagcgccaccatccaggagacccagcagtggctgctgaagaaccgcttcagcagctacaccaggctcttcagcaacttctctggagctgacctgctgaagctgaccaaggaggacctggtgcagatctgtggggctgctgatggcatccggctgtacaacagcctgaagagccgctctgtgcggccccggctgaccatctacgtgtgccgggagcagcccagcagcacagtgctgcagggccagcagcaggccgccagcagcgcctctgaaaatggaagtggggccccctacgtgtaccacgccatctacctggaggagatgattgccagcgaggtggccaggaagctggccctggtgttcaacatccccctgcaccagatcaaccaggtgtaccggcagggccccaccggcatccacatcctggtgtctgaccagatggtgcagaacttccaggatgagagctgcttcctgttcagcacagtgaaggccgagagcagtgatggcatccacatcatcctgaagtag

SEQ ID NO: 45919 - DNA, 447 bp, Artificial Sequence
  derived and/or modified sequence
atggcctgggtgctgaagatggatgaggtgattgaaagtggcctggtgcatgactttgatgccagcctgagcggcatcggccaggagctgggcgctggggcctacagcatgtctgatgtgctggccctgcccatcttcaagcaggaggacagcagcctgcccctggatggagaaacagagcacccccccttccagtatgtgatgtgtgccgccaccagccctgctgtgaagctgcatgatgagaccctgacctacctgaaccagggccagagctatgagatccgcatgctggacaacaggaagatgggagacatgcctgagatcaatggcaagctggtgaagagcatcatccgggtggtgttccatgaccggcggctgcagtacacagagcaccagcagctggagggctggaagtggaacagacctggggaccggctgctggactag

SEQ ID NO: 45920 - DNA, 1515 bp, Artificial Sequence
  derived and/or modified sequence
atggcctgggtgctgaagatggacgaggtgatcgagagcggcctggtgcatgactttgacgcttcactctccgggatcggtcaggaactcggcgcgggcgcatacagtatgagcgacgtgcttgcacttccaatattcaaacaagaggatagctcacttccactggatggggaaacagagcacccaccatttcaatacgtgatgtgtgcggcaacctcccctgcagtcaaactgcatgatgaaactctaacttacttgaaccagggccagtcttatgagattagaatgctggataaccgcaaaatgggcgatatgcccgagataaatgggaaactggtaaaatccattattcgggtggtgtttcacgatcgcaggctgcagtacactgagcaccaacagcttgaaggctggaagtggaaccgacctggggatcgactattggatcttgatatccccatgagcgtcggaatcatagacaccaggactaacccctctcagcttaatgcggtagagtttctttgggaccccgctaagagaacctctgcttttatacaagtgcattgcattagcaccgagtttaccccgagaaagcacgggggagagaaaggggtgcctttccgtattcaggtagacacattcaaacaaaatgagaacggggaatatacagaccatctgcactcagcatcctgccagatcaaggttttcaagccaaaaggggccgatcgcaagcaaaaaaccgatagagaaaagatggaaaaacggacagcccatgagaaggagaaatatcagccatcatatgatacaacaatcctgacggaatgctccccgtggccagacgcccccacagcctacgtgaacaatagtccatctccggcgcccaccttcaccagcccacagcagagcacctgcagcgtgcccgatagcaattcttctagtcccaatcaccaaggagatggcgctagccagaccagcggcgagcaaatccagccatccgccaccatccaagagacccagcagtggcttctcaagaaccgcttttccagctacactcggcttttttctaatttcagtggcgcagacctgttgaaattaaccaaagaggacctcgtgcagatctgcggggcagccgatggaatccgactctataacagcttgaaatctcgttcagtgcgcccacgcctcactatttatgtgtgtagggaacagccttcatcaaccgttctgcaaggccaacaacaagccgcctcctcagcatcagagaacggctctggcgcaccttatgtgtaccatgctatttatctggaagagatgatcgcctctgaggttgccagaaaactggccttagtttttaatattccgctacatcagataaatcaagtctatcggcagggaccaacgggcatccatattttagtgtctgaccagatggtccagaatttccaggatgagtcatgtttcttgttctccactgtgaaagcggaaagcagcgacggaatccatataatcctaaagtag

SEQ ID NO: 45921 - DNA, 447 bp, Artificial Sequence
  derived and/or modified sequence
atggcctgggtgctgaagatggacgaggtgatcgagagcggcctggtgcacgacttcgatgccagcctgagcgggattgggcaggaactgggggccggcgcttactccatgtctgatgtacttgcgctgcccatcttcaaacaggaagatagctccttaccactcgacggagagactgaacaccccccatttcagtacgtaatgtgtgcagccacatcccctgctgtgaaattgcacgacgagaccctaacatatctgaaccagggacagtcgtacgagatacggatgctggacaataggaagatgggagacatgccagagattaatggtaaactcgtcaaatctattatacgcgtggtgttccacgatcggcggctgcagtacactgaacaccagcagctcgaagggtggaagtggaaccgccctggagacaggctgctggattag

SEQ ID NO: 45922 - DNA, 1515 bp, Artificial Sequence
  derived and/or modified sequence
atggcatgggtgctgaagatggatgaggtgattgagtctggtcttgtgcatgattttgacgctagtctcagcggaattggccaggagctcggggcaggtgcatattctatgtctgacgtcttagcactgcccattttcaaacaggaagattccagtctgcctctggacggggagaccgaacacccaccttttcagtatgtaatgtgtgcagccactagtcctgcggtaaagttacatgacgagaccttgacctacctcaaccagggccagagttacgagattagaatgctcgataaccggaaaatgggcgacatgcccgagatcaatgggaagctcgtcaagtcaatcatccgtgtggtcttccacgatcgcagactgcagtacacggaacaccagcagctggaaggctggaaatggaacagaccaggagataggctcttggatctggacataccaatgtccgtgggaatcatcgatactagaactaacccatctcagcttaacgccgtcgaatttctctgggatcctgcgaaacggacttccgccttcatccaggtgcattgcatatccactgagttcactccgagaaaacacggcggagagaagggggtgccctttcggatccaagtcgatacattcaagcagaatgagaacggcgagtataccgatcacctccatagcgccagctgtcaaataaaggtcttcaagcctaagggagcagatcgaaagcagaaaaccgatcgtgaaaagatggaaaagaggactgcacatgaaaaggagaagtaccaaccctcctatgatactaccattttgaccgaatgttctccatggccggatgctcccacagcgtacgtgaacaacagcccatctcccgctccaacctttacctcaccccaacagagcacatgcagtgttcctgattcaaattctagctctccaaaccaccagggagacggtgcaagccagacctccggggaacaaatccagccatcagcaactatacaagagacgcagcaatggctgctcaagaaccgtttcagttcgtatactagactgtttagcaacttttctggggctgacctgcttaagctcaccaaggaggatcttgtccagatatgcggtgctgccgatggcatacggctctacaatagtctgaagtctcggtctgtaagacctcgcctgactatatacgtatgcagagaacaaccaagcagcacagtgctgcagggccaacagcaagccgctagcagtgctagtgaaaatggctctggtgctccttacgtgtaccacgcaatctatctcgaggaaatgattgcaagcgaggtggcacggaagttagcgctggtgtttaatatccctttgcatcaaatcaatcaggtgtatcggcagggacccaccggtattcacattttggtgtccgatcagatggtccagaacttccaggacgagtcctgctttcttttcagcactgttaaggccgaatcatccgacggcattcatattatcctgaaatag

SEQ ID NO: 45923 - DNA, 447 bp, Artificial Sequence
  derived and/or modified sequence
atggcctgggtactgaagatggacgaagtgatcgagagcggtctggtgcacgactttgatgctagcctgtccgggattgggcaggaactgggtgctggggcatattcaatgagcgatgttctagctctccctatattcaagcaagaagacagctctctacctcttgacggtgaaacggaacacccaccgtttcagtacgttatgtgtgcagccacctcccccgcagtcaaactgcacgacgaaacactgacctacctgaaccagggacagagctatgaaatccgtatgctggataaccgcaagatgggggacatgccagaaattaatggcaaactcgtgaaatctatcataagggtggtcttccacgaccggagacttcagtataccgagcaccagcagcttgagggttggaagtggaatcgccctggcgatcggctattggattag

SEQ ID NO: 45924 - DNA, 3669 bp, Artificial Sequence
  derived and/or modified sequence
agtggggcccccgcagctctcgtcccggccgccgctggtgaccactcgccgcccctccggaggcttcacccgcgccctcccccaggacgcgccagcggagctccggctccttcgccctggacgcggaggccgcggtgtgcggggcgacggcgaggccggaagatggcctgggtgctcaagatggacgaggtgatcgagtccgggctggtgcacgacttcgacgccagcctctcgggcatcgggcaggaactgggcgccggcgcttacagcatgagtgatgtcttggcattgcccattttcaagcaggaagattccagccttccattggatggtgaaacagagcacccaccctttcagtatgtgatgtgtgctgcaacgtcaccagcagtaaaactgcatgatgaaacgcttacttatttgaaccaaggtcagtcatatgaaattcggatgctggataatcggaaaatgggtgatatgcctgagatcaatggaaaattagtaaagagcatcataagggttgtattccatgacagacggctacaatacacagagcatcagcaacttgaaggatggaagtggaatcgcccaggagacagacttcttgatttagatattccaatgtctgtgggaataattgacacaaggacgaatccaagccagttaaatgcggttgaatttctgtgggacccagcaaaacgcacctctgctttcattcaggtacactgcatcagcacagaatttactccacggaagcacggaggtgaaaagggagtgccctttaggatccaggttgacacctttaagcagaatgaaaatggagaatacacagatcatctacactcagctagctgccaaatcaaagtttttaagcctaaaggtgcagacaggaaacaaaaaactgaccgagagaagatggagaagagaacagctcatgaaaaagaaaagtatcagccgtcctatgataccacaatcctcacagagtgttctccgtggcccgatgcccccacagcctatgtgaataacagcccttccccagcgcccactttcacctccccacagcagagcacttgcagtgtcccagacagcaattcttcttccccaaatcatcagggagatggagcttcacagacctctggtgaacaaattcagccttcagctacgatccaggaaacacagcaatggctgctcaaaaacagattctcttcctacacaagactgttctctaatttttcaggtgccgacttattaaaactgacaaaggaggatttagttcaaatttgtggtgcagccgatggaattcggctctataattcactgaagtcaaggtcggttagaccccgtttaaccatctatgtctgccgggagcagccaagcagcacagtgctgcaagggcagcagcaagctgcaagcagtgcaagcgagaatggcagtggggcaccctatgtttatcatgcaatctacttggaagaaatgattgcctcagaagttgctcgaaaacttgcgctggtgtttaatatccctctccaccaaattaatcaggtttacagacagggtcccaccggtattcacattcttgttagtgatcagatggttcagaattttcaagatgagagttgttttttattctccacagtaaaagctgaaagtagtgatggcatccacataattttgaagtgatgtcttatatagactgaactgtattcagtaccaaatagtcacgcttaaaagtgtgtgaagactgaatccaagaagtcttgggattggattttaccatatgaaatgtttcatattgaaaacacaagatgacctttctaatgagctgtatgagaggtgaatctcctcactgtcactgccatagccaagcatcctcatgagagtgagcacatcggcacagcatgcatccagctctggaggccacggtgcaggcatagctgcctgctgctctggcagaggccagtaaatacagttcctagaagcagcctttgctgtctttttacactgtatgcggtttggaaatgaatgtagaaacttactgtgggcatttacctttctgtgccagtttggcttttattgcctgaaccttatgctgacctggagaggagatgggggacagtgctgttgtggggccagcagtgaatctgtatgcggagagttgtgttgtgctgatgtggccgttggtggtcaggtaagaggctcggcaccttcttggaagaaatcatgtctgagggtgtacgtttgatatgatcatgccagattggagaagatccaagccaggaagatgggcttgaagcaaactgcattatcaggagtaccttggtgagaggatcagtgtaaatcctaataggtacaaagacttttgtgttttggctttgtcacagatttattgaaaaacttttttgcttctgcttccatttttagcattttagtttctggttttcatttttggagattccttgccttttaaactcgtggtttttctctcattttcttccctctctccctccatctctgaccacccccaccctaaccccccacccccaccatcctattaaacatttttaaagccctaccccagacattggaaataggtgacccaagtagggggagaaagtattattgttgatagcttctgactaggtgttaagggatcttcattatgaacaagatgaatttttttctggaaacactagatgttatcaatcaaacactaaaatgtaccatacaaatcccttaagcctctcaaatattgagctttagtacaatcatggatagacattctggtgatgatttaggggctttttatacaccacatactagcttctttctctataagagtgcctctttcataaaaccaaatgcttgtctgctagcatacttttcaaagggaatccactgttttctcactttcctcccatatctccgtccttcatccaaaaccttcccagaatccatcagcaagcatgtttgaggcctgtggtgtaggggactgaattttttttttaacttctattccattttaattgtaggatatctttgtccatatacccaggtgtcctgatttgaatgtactatttgatcctcattgtgttcaggcaaaaaataggaaatgagtaattttgagtttgaaatctctcccagaagacaaactacttcagtgagtaaaagctttgacattttatgttttattcataaagggggttaattatttgctacaaagaagcacgatctattttcatcatcgatttgaaaatatctgtaactcctatagatcctataggcagagagttttcctttctgactttttccctttgctttcgtgtgaccacatgttttctgtaccagtcactggggaaagaagtgagtttatctcgtttgttttaaaagttttgcttgtctatttagcattcctttttgggtctcaagatttatggaacaataaatgtcatttaatgctgtgtgcttattttgaattcctcatcaggttttagaagcggggtaaaaatacttagatgcttatcagacttgaaattatactgagtggcattgaacgtgagtttgtcccagtgaaacaggctaaataaattttggcaccagcaaatttgttactttgtttttttaatagtaggatgtacacatttcagtataataaatgttttctgattgttttgc

SEQ ID NO: 45925 - DNA, 581 bp, Artificial Sequence
  derived and/or modified sequence
gtgcggggacgcagcgaggccaccccggctgggaacagccgcgtgggcggggccgcattgcactctctggacagttcctgggccgcgaggcgcggggagtggccctaagcgcggggctgtacggggagggccggaagatggcctgggtgctcaagatggacgaggtgatcgagtccgggctggtgcacgacttcgacgccagcctctcgggcatcgggcaggaactgggcgccggcgcttacagcatgagtgatgtcttggcattgcccattttcaagcaggaagattccagccttccattggatggtgaaacagagcacccaccctttcagtatgtgatgtgtgctgcaacgtcaccagcagtaaaactgcatgatgaaacgcttacttatttgaaccaaggtcagtcatatgaaattcggatgctggataatcggaaaatgggtgatatgcctgagatcaatggaaaattagtaaagagcatcataagggttgtattccatgacagacggctacaatacacagagcatcagcaacttgaaggatggaagtggaatcgcccaggagacagacttcttgat

SEQ ID NO: 45926 - protein, 540 aa, Artificial Sequence
  derived and/or modified sequence
MAWVLKMDEVIESGLVHDFDASLSGIGQELGAGAYSMSDVLALPIFKQEDSSLPLDGETEHPPFQYVMCAATSPAVKLHDETLTYLNQGQSYEIRMLDNRKMGDMPEINGKLVKSIIRVVFHDRRLQYTEHQQLEGWKWNRPGDRLLDLDIPMSVGIIDTRTNPSQLNAVEFLWDPAKRTSAFIQVHCISTEFTPRKHGGEKGVPFRIQVDTFKQNENGEYTDHLHSASCQIKVFKPKGADRKQKTDREKMEKRTAHEKEKYQPSYDTTILTEMRLEPIIEDAVEHEQKKSSKRTLPADYGDSLAKRGSCSPWPDAPTAYVNNSPSPAPTFTSPQQSTCSVPDSNSSSPNHQGDGASQTSGEQIQPSATIQETQQWLLKNRFSSYTRLFSNFSGADLLKLTKEDLVQICGAADGIRLYNSLKSRSVRPRLTIYVCREQPSSTVLQGQQQAASSASENGSGAPYVYHAIYLEEMIASEVARKLALVFNIPLHQINQVYRQGPTGIHILVSDQMVQNFQDESCFLFSTVKAESSDGIHIILK

SEQ ID NO: 45927 - protein, 148 aa, Artificial Sequence
  derived and/or modified sequence
MAWVLKMDEVIESGLVHDFDASLSGIGQELGAGAYSMSDVLALPIFKQEDSSLPLDGETEHPPFQYVMCAATSPAVKLHDETLTYLNQGQSYEIRMLDNRKMGDMPEINGKLVKSIIRVVFHDRRLQYTEHQQLEGWKWNRPGDRLLD

SEQ ID NO: 45928 - DNA, 4162 bp, Artificial Sequence
  derived and/or modified sequence
gtcgcgttgaagccagcgtccggccggcagagcggcgtcggcggggttggccggggcggtgtggcgctagagcctgggcgggccgggggcaaggagtcaaggcttgggggcgggtgacgggcgggcggagggcttgcccccgtgtggtcctcggagcggcccgaggtccagcctcccagcggtcccggaggaggatgcgaccggggggccccgggcggggcggtcggcggcggctgcagcgctagcggcgcgggggctgggcggcggcgccggcatgaggcgcagggccggtgtccgcgggagggtggcgctgccggcggcccggccgctcccgctgcaattgctcgctgggctcgtcgtgccctgccagtggggcccccgcagctctcgtcccggccgccgctggtgaccactcgccgcccctccggaggcttcacccgcgccctcccccaggacgcgccagcggagctccggctccttcgccctggacgcggaggccgcggtgtgcggggcgacggcgaggccggaagatggcctgggtgctcaagatggacgaggtgatcgagtccgggctggtgcacgacttcgacgccagcctctcgggcatcgggcaggaactgggcgccggcgcttacagcatgagtgatgtcttggcattgcccattttcaagcaggaagattccagccttccattggatggtgaaacagagcacccaccctttcagtatgtgatgtgtgctgcaacgtcaccagcagtaaaactgcatgatgaaacgcttacttatttgaaccaaggtcagtcatatgaaattcggatgctggataatcggaaaatgggtgatatgcctgagatcaatggaaaattagtaaagagcatcataagggttgtattccatgacagacggctacaatacacagagcatcagcaacttgaaggatggaagtggaatcgcccaggagacagacttcttgatttagatattccaatgtctgtgggaataattgacacaaggacgaatccaagccagttaaatgcggttgaatttctgtgggacccagcaaaacgcacctctgctttcattcaggtacactgcatcagcacagaatttactccacggaagcacggaggtgaaaagggagtgccctttaggatccaggttgacacctttaagcagaatgaaaatggagaatacacagatcatctacactcagctagctgccaaatcaaagtttttaagcctaaaggtgcagacaggaaacaaaaaactgaccgagagaagatggagaagagaacagctcatgaaaaagaaaagtatcagccgtcctatgataccacaatcctcacagagatgaggcttgagcctataattgaagatgcagttgaacatgagcagaaaaagtccagcaagcggactttgccagcagactacggtgattctctggcaaagcgaggcagttgttctccgtggcccgatgcccccacagcctatgtgaataacagcccttccccagcgcccactttcacctccccacagcagagcacttgcagtgtcccagacagcaattcttcttccccaaatcatcagggagatggagcttcacagacctctggtgaacaaattcagccttcagctacgatccaggaaacacagcaatggctgctcaaaaacagattctcttcctacacaagactgttctctaatttttcaggtgccgacttattaaaactgacaaaggaggatttagttcaaatttgtggtgcagccgatggaattcggctctataattcactgaagtcaaggtcggttagaccccgtttaaccatctatgtctgccgggagcagccaagcagcacagtgctgcaagggcagcagcaagctgcaagcagtgcaagcgagaatggcagtggggcaccctatgtttatcatgcaatctacttggaagaaatgattgcctcagaagttgctcgaaaacttgcgctggtgtttaatatccctctccaccaaattaatcaggtttacagacagggtcccaccggtattcacattcttgttagtgatcagatggttcagaattttcaagatgagagttgttttttattctccacagtaaaagctgaaagtagtgatggcatccacataattttgaagtgatgtcttatatagactgaactgtattcagtaccaaatagtcacgcttaaaagtgtgtgaagactgaatccaagaagtcttgggattggattttaccatatgaaatgtttcatattgaaaacacaagatgacctttctaatgagctgtatgagaggtgaatctcctcactgtcactgccatagccaagcatcctcatgagagtgagcacatcggcacagcatgcatccagctctggaggccacggtgcaggcatagctgcctgctgctctggcagaggccagtaaatacagttcctagaagcagcctttgctgtctttttacactgtatgcggtttggaaatgaatgtagaaacttactgtgggcatttacctttctgtgccagtttggcttttattgcctgaaccttatgctgacctggagaggagatgggggacagtgctgttgtggggccagcagtgaatctgtatgcggagagttgtgttgtgctgatgtggccgttggtggtcaggtaagaggctcggcaccttcttggaagaaatcatgtctgagggtgtacgtttgatatgatcatgccagattggagaagatccaagccaggaagatgggcttgaagcaaactgcattatcaggagtaccttggtgagaggatcagtgtaaatcctaataggtacaaagacttttgtgttttggctttgtcacagatttattgaaaaacttttttgcttctgcttccatttttagcattttagtttctggttttcatttttggagattccttgccttttaaactcgtggtttttctctcattttcttccctctctccctccatctctgaccacccccaccctaaccccccacccccaccatcctattaaacatttttaaagccctaccccagacattggaaataggtgacccaagtagggggagaaagtattattgttgatagcttctgactaggtgttaagggatcttcattatgaacaagatgaatttttttctggaaacactagatgttatcaatcaaacactaaaatgtaccatacaaatcccttaagcctctcaaatattgagctttagtacaatcatggatagacattctggtgatgatttaggggctttttatacaccacatactagcttctttctctataagagtgcctctttcataaaaccaaatgcttgtctgctagcatacttttcaaagggaatccactgttttctcactttcctcccatatctccgtccttcatccaaaaccttcccagaatccatcagcaagcatgtttgaggcctgtggtgtaggggactgaattttttttttaacttctattccattttaattgtaggatatctttgtccatatacccaggtgtcctgatttgaatgtactatttgatcctcattgtgttcaggcaaaaaataggaaatgagtaattttgagtttgaaatctctcccagaagacaaactacttcagtgagtaaaagctttgacattttatgttttattcataaagggggttaattatttgctacaaagaagcacgatctattttcatcatcgatttgaaaatatctgtaactcctatagatcctataggcagagagttttcctttctgactttttccctttgctttcgtgtgaccacatgttttctgtaccagtcactggggaaagaagtgagtttatctcgtttgttttaaaagttttgcttgtctatttagcattcctttttgggtctcaagatttatggaacaataaatgtcatttaatgctgtgtgcttattttgaattcctcatcaggttttagaagcggggtaaaaatacttagatgcttatcagacttgaaattatactgagtggcattgaacgtgagtttgtcccagtgaaacaggctaaataaattttggcaccagcaaatttgttactttgtttttttaatagtaggatgtacacatttcagtataataaatgttttctgattgttttgcaaaaaaaaaaaaaaaaa

SEQ ID NO: 45929 - DNA, 1623 bp, Artificial Sequence
  derived and/or modified sequence
atggcctgggtgctgaagatggacgaggtgatcgagagcggcctggtgcacgacttcgacgccagcctgagcggcatcggccaggagctgggcgccggcgcctacagcatgagcgacgtgctggccctgcccatcttcaagcaggaggacagcagcctgcccctggacggcgagaccgagcacccccccttccagtacgtgatgtgcgccgccaccagccccgccgtgaagctgcacgacgagaccctgacctacctgaaccagggccagagctacgagatcagaatgctggacaacagaaagatgggcgacatgcccgagatcaacggcaagctggtgaagagcatcatcagagtggtgttccacgacagaagactgcagtacaccgagcaccagcagctggagggctggaagtggaacagacccggcgacagactgctggacctggacatccccatgagcgtgggcatcatcgacaccagaaccaaccccagccagctgaacgccgtggagttcctgtgggaccccgccaagagaaccagcgccttcatccaggtgcactgcatcagcaccgagttcacccccagaaagcacggcggcgagaagggcgtgcccttcagaatccaggtggacaccttcaagcagaacgagaacggcgagtacaccgaccacctgcacagcgccagctgccagatcaaggtgttcaagcccaagggcgccgacagaaagcagaagaccgacagagagaagatggagaagagaaccgcccacgagaaggagaagtaccagcccagctacgacaccaccatcctgaccgagatgagactggagcccatcatcgaggacgccgtggagcacgagcagaagaagagcagcaagagaaccctgcccgccgactacggcgacagcctggccaagagaggcagctgcagcccctggcccgacgcccccaccgcctacgtgaacaacagccccagccccgcccccaccttcaccagcccccagcagagcacctgcagcgtgcccgacagcaacagcagcagccccaaccaccagggcgacggcgccagccagaccagcggcgagcagatccagcccagcgccaccatccaggagacccagcagtggctgctgaagaacagattcagcagctacaccagactgttcagcaacttcagcggcgccgacctgctgaagctgaccaaggaggacctggtgcagatctgcggcgccgccgacggcatcagactgtacaacagcctgaagagcagaagcgtgagacccagactgaccatctacgtgtgcagagagcagcccagcagcaccgtgctgcagggccagcagcaggccgccagcagcgccagcgagaacggcagcggcgccccctacgtgtaccacgccatctacctggaggagatgatcgccagcgaggtggccagaaagctggccctggtgttcaacatccccctgcaccagatcaaccaggtgtacagacagggccccaccggcatccacatcctggtgagcgaccagatggtgcagaacttccaggacgagagctgcttcctgttcagcaccgtgaaggccgagagcagcgacggcatccacatcatcctgaagtag

SEQ ID NO: 45930 - DNA, 1623 bp, Artificial Sequence
  derived and/or modified sequence
atggcctgggtgctcaagatggatgaggttattgagagcggcttggtgcatgactttgatgcgagcctgtcagggattggacaggagttaggagctggggcctatagtatgagcgacgttctcgcactgccaatcttcaaacaggaggatagtagcctgccgctcgatggggagactgagcatccaccctttcagtacgtcatgtgcgccgcaacgagtcccgcggttaagctccacgacgagacactaacatacctgaaccaaggccagagttatgagatccggatgctggacaacagaaagatgggggatatgcctgaaatcaacgggaaactggtgaagtccatcattagggttgtcttccacgacaggcgtctccagtacaccgaacatcagcagctggaaggatggaaatggaatagaccaggcgacaggctgctggacttggatattccgatgtccgtgggcatcatcgacacccggaccaacccatcccaactcaacgcggtggagtttctgtgggaccctgccaagagaacgagtgcatttatccaggtgcattgcatttctactgagttcacgccccgaaagcacggaggtgaaaaaggtgtgcccttccgcatacaggtagacacgttcaagcagaacgagaacggtgagtatactgatcacctacatagtgccagttgccagatcaaggtatttaaacctaagggagcggacagaaagcagaaaacagatcgcgaaaagatggagaagagaaccgcccacgagaaggagaagtaccagcccagctatgacaccaccattttgaccgagatgcggctcgagcctattatcgaagatgcggtcgagcatgagcagaaaaagagtagtaaacgtacacttcctgccgattacggagattctctggccaagagaggcagttgttctccctggcccgatgcccccactgcctacgttaacaatagcccttccccagccccaacattcacaagcccccagcaatctacctgttccgtgccagactctaattcgtcctcacctaatcaccagggcgacggcgcatcccagacatctggagagcaaattcagccttccgccaccattcaagagacacagcagtggctgttaaaaaatcgatttagcagctatacccggctgttttctaactttagtggcgccgatctgcttaagctgacgaaggaagacctggtgcagatctgtggcgcagctgacgggattcggttgtacaactccttaaaaagccggtccgttcggccccgactcacaatctacgtgtgtcgagagcagcctagctccacagtgctgcaaggacagcagcaggctgcaagtagcgctagcgagaacggcagcggggccccgtacgtctaccatgccatctatttggaagagatgattgcctctgaggtcgcccgcaagctcgccctggtgtttaacatcccgctgcatcaaattaatcaagtgtatcgccaggggcctactggtattcacattctggttagtgaccagatggtgcagaactttcaagacgaatcttgctttctgtttagtaccgtaaaggccgaaagctcagacggcatacatattatcttgaagtag

SEQ ID NO: 45931 - DNA, 1623 bp, Artificial Sequence
  derived and/or modified sequence
atggcttgggtgctgaaaatggacgaggtgatagagagtgggctggtccacgacttcgatgcaagtctgtcagggattggccaagaattgggcgcgggcgcctacagcatgtctgatgtgctagccctgcccattttcaagcaggaggattctagtctcccactagatggcgagacagaacatcctccatttcagtatgtgatgtgtgctgccacgtccccggcggtgaaattgcatgatgaaacccttacctatctgaatcagggtcagtcctacgaaatcagaatgctcgacaatcgcaaaatgggagacatgcctgagatcaatggcaagctggtcaagtccatcattcgagtggtgttccatgaccgcaggcttcagtacacagaacatcaacagttagagggttggaaatggaataggccaggcgatcggttgctggacctcgacataccaatgagtgtcggaatcatagatactcggactaacccatcccagctcaatgcagttgagttcctgtgggatcccgctaagaggacgtctgcttttatccaagtccactgcatctcaacagagttcactcccagaaaacacggcggcgaaaaaggggtaccttttcgcatccaggtcgacacctttaagcaaaacgaaaacggtgaatacacagaccacctgcattcagcctcctgtcaaatcaaggtatttaaaccaaagggagctgataggaagcaaaaaaccgatagggagaagatggaaaagcggacagcccatgagaaagaaaagtatcagccttcttacgacacaaccatactcactgaaatgaggctggagccaataatcgaagatgctgtggaacacgaacagaagaagagctctaagcgtacactccccgccgactatggtgattcattggcaaagcggggttcctgttctccttggccagacgccccaacagcttatgtcaataattccccttcaccagcgcccacttttactagcccccagcagagtacttgctctgtgcctgatagcaactcgagctctcctaaccaccagggcgacggggcatcccagacctccggcgagcagatccaaccttccgccactatccaggaaacccaacaatggttattgaagaaccgcttctcctcgtatactcggctcttctctaatttctcaggggccgacttactcaaactgaccaaagaagatctggttcagatatgcggcgccgccgatggaattcggttgtataactcactgaagtcacgtagtgtgaggcctaggctcacaatctacgtgtgccgcgagcagccgtcctctactgtgctgcaagggcagcagcaagctgctagctcagcgtccgagaatggatctggagcaccctatgtctatcacgccatctacttggaagagatgattgcaagtgaggtggcacggaagctagcgctggtattcaatattccgctccaccagattaatcaggtttaccggcagggcccaaccggaatccacatactggtcagcgatcagatggtgcagaatttccaggacgaatcgtgcttcctgttctctaccgtgaaagctgagtcttctgacggtattcatatcattttgaaatag

SEQ ID NO: 45932 - DNA, 1623 bp, Artificial Sequence
  derived and/or modified sequence
atggcctgggtgctgaagatggatgaggtgattgaaagtggcctggtgcatgactttgatgccagcctgagcggcatcggccaggagctgggcgctggggcctacagcatgtctgatgtgctggccctgcccatcttcaagcaggaggacagcagcctgcccctggatggagaaacagagcacccccccttccagtatgtgatgtgtgccgccaccagccctgctgtgaagctgcatgatgagaccctgacctacctgaaccagggccagagctatgagatccgcatgctggacaacaggaagatgggagacatgcctgagatcaatggcaagctggtgaagagcatcatccgggtggtgttccatgaccggcggctgcagtacacagagcaccagcagctggagggctggaagtggaacagacctggggaccggctgctggacctggacatccccatgtctgtgggcatcatcgacaccaggaccaaccccagccagctgaatgctgtggagttcctgtgggaccctgccaagaggaccagcgccttcatccaggtgcactgcatcagcacagagttcacccccaggaagcacggcggggagaagggcgtgcccttccgcatccaggtggacaccttcaagcagaatgaaaatggagagtacacagaccacctgcacagcgccagctgccagatcaaggtgttcaagcccaagggagctgacaggaagcagaagacagaccgggagaagatggagaagaggacagcccacgagaaggagaagtaccagcccagctatgacaccaccatcctgacagagatgaggctggagcccatcattgaagatgctgtggagcacgagcagaagaagagcagcaagaggaccctgcctgctgactatggagacagcctggccaagaggggcagctgcagcccctggccagatgcccccacagcctacgtgaacaacagccccagccctgcccccaccttcaccagcccccagcagagcacctgcagcgtgcctgacagcaacagcagcagccccaaccaccagggagatggagccagccagaccagcggggagcagatccagcccagcgccaccatccaggagacccagcagtggctgctgaagaaccgcttcagcagctacaccaggctcttcagcaacttctctggagctgacctgctgaagctgaccaaggaggacctggtgcagatctgtggggctgctgatggcatccggctgtacaacagcctgaagagccgctctgtgcggccccggctgaccatctacgtgtgccgggagcagcccagcagcacagtgctgcagggccagcagcaggccgccagcagcgcctctgaaaatggaagtggggccccctacgtgtaccacgccatctacctggaggagatgattgccagcgaggtggccaggaagctggccctggtgttcaacatccccctgcaccagatcaaccaggtgtaccggcagggccccaccggcatccacatcctggtgtctgaccagatggtgcagaacttccaggatgagagctgcttcctgttcagcacagtgaaggccgagagcagtgatggcatccacatcatcctgaagtag

SEQ ID NO: 45933 - DNA, 1623 bp, Artificial Sequence
  derived and/or modified sequence
atggcctgggtgctgaagatggacgaggtgatcgagagcggcctggtgcatgactttgatgcctccctctccggcatcggtcaagaactgggagccggggcgtactctatgagtgacgttcttgccctccctatctttaagcaagaggacagctcactgcccttggacggtgagactgagcatcccccttttcaatacgttatgtgtgcagctactagccccgctgtgaaacttcacgacgagactctgacttatctcaatcagggccaatcatacgagatccgaatgttggataatcgtaagatgggcgatatgccggagattaatggcaagttggttaagagtatcattcgggtggttttccacgacaggcggctccagtacaccgagcatcaacagctagagggatggaaatggaacagacctggagatagacttcttgacctggacatacccatgtccgtgggcatcatagacacgcgcactaacccctctcaactgaacgccgtggagttcctgtgggatcctgctaaacgcaccagcgcctttatccaggtgcactgtatatctactgagttcacgccaagaaagcacggaggggagaaaggtgtaccgttccgcattcaggttgacacttttaaacagaatgaaaatggagagtatacagaccaccttcacagcgccagctgtcagatcaaagtgtttaagccaaaaggtgctgatcgcaagcagaagactgatagggagaagatggaaaagcgcacagcacatgaaaaggagaagtaccaacccagttatgacacaaccatattgactgagatgaggttggagcccatcatcgaggacgctgtggaacacgagcaaaagaagagctccaaacggaccctgccagcggattatggagattcactggccaagcgggggagctgctccccctggccagacgctccaaccgcatacgttaataacagtccttcaccagcccctacttttacgagccctcagcagtctacttgttctgtacctgatagcaattccagttcgcccaaccaccaaggtgatggcgccagtcagaccagcggagaacagattcagccttctgcgactatccaggagactcaacagtggctgctgaaaaaccgattttcatcctacactaggttgttctccaacttctccggcgcagatcttcttaagttgaccaaggaagacctcgtgcaaatctgcggtgctgccgacggaatccggctgtataatagcctgaaatctcgctctgtgcgacccaggctcacaatctacgtttgccgcgagcagccctcgagtaccgtgctgcagggacagcagcaggccgctagcagcgccagcgaaaatggcagcggagctccatatgtgtaccatgccatatacttggaagagatgattgccagcgaggtagcacgtaagctcgccctcgtgttcaacatcccactgcaccagattaaccaggtgtaccgccaaggaccgaccggcatccacattttagtcagcgaccagatggtgcagaactttcaggatgagtcctgcttcctctttagtaccgtgaaagccgagtcctctgatggcattcacattatactgaaatag

SEQ ID NO: 45934 - DNA, 1623 bp, Artificial Sequence
  derived and/or modified sequence
atggcctgggtgctgaagatggacgaggtgatcgagagcggcctggttcacgactttgatgccagcctttccggaattggtcaggagttaggcgccggcgcatacagcatgtccgacgtactcgcccttcccatattcaagcaggaagactcaagcctgccactcgacggagaaactgagcatcccccattccaatatgtgatgtgcgctgctaccagtcccgccgtgaaattgcatgacgagacattaacatatttgaaccagggtcagagctacgagatcaggatgctagacaatcgcaagatgggtgacatgccggaaattaatggcaaactggtgaaatccatcatccgtgtggtgttccacgacagacgactccaatatactgagcaccagcagcttgaaggctggaaatggaaccgtcctggagacagactcctggatctggacattccaatgagtgttggtattatcgacacccgcacgaacccctcacaactgaatgcggtcgagtttctgtgggatcctgccaagaggacgtctgcctttatccaagtgcactgtatctccacagaattcacccctagaaaacacggaggagagaagggagttccgttccgcatacaggttgacaccttcaagcagaatgaaaatggagagtatacggaccacctccactccgcctcctgccagatcaaggtttttaaacccaagggagccgatcgtaagcagaagaccgatcgggagaagatggaaaaacgtacagctcacgaaaaggaaaaatatcagccctcgtacgatacaactattctgactgaaatgagactcgagccaatcatcgaggacgctgtggagcatgaacaaaaaaagtcgagtaagagaaccctccctgccgattatggcgattccctggctaagaggggttcctgttctccgtggccggatgcccccaccgcgtatgtgaacaatagccctagcccggccccaaccttcacaagtccgcagcagagcacatgcagtgtccccgatagcaactcttcaagtcccaatcaccagggcgacggcgcctcccagacatccggtgaacagattcagcctagcgccactatccaggagacccaacagtggctgctgaagaatcgctttagctcctatacacgcctattttctaatttcagcggtgccgacctgcttaaactgaccaaagaagacctggtccaaatatgcggtgccgcggacggcattagactgtataactctctgaagtcccgaagtgttaggcctaggctgacgatctatgtgtgccgggagcagcccagctccacggtgttgcaagggcagcagcaggctgcgtccagcgcttccgaaaacggctctggggctccttacgtgtatcacgctatctacctggaggagatgattgcatccgaggtcgctagaaaacttgcgctcgtattcaacatccctcttcaccaaataaaccaggtgtatcgacagggacccaccggcattcatatcttggtatcagaccagatggttcagaattttcaagacgagagctgttttctgttttcaaccgtgaaagctgaaagttccgacggcatccacattatcctgaaatag

SEQ ID NO: 45935 - DNA, 1623 bp, Artificial Sequence
  derived and/or modified sequence
atggcgtgggtgctgaagatggatgaagttatcgaaagcggacttgtccacgacttcgatgcctctttgagcggaattggtcaagaactcggcgcaggggcttactcaatgtctgatgtgctggccctgcctatctttaagcaagaggattcctctctgccactggacggagaaacagagcacccaccatttcagtatgttatgtgtgccgctacctcccctgcagtgaaactccatgatgagactctgacatatctgaaccagggccagagttatgaaattaggatgctcgacaatcggaaaatgggggatatgcctgaaattaacggtaaacttgtcaagtctatcatccgcgtggtgtttcacgatcggagactccagtacaccgagcatcagcagctcgaaggctggaagtggaaccgtcccggtgatagactgctggacctggatatacctatgtctgtgggtatcatcgacacgcggacaaacccatctcaactcaatgcggtcgagtttctttgggaccctgctaagagaacctccgcattcatacaagtgcactgcatctcaacagagttcactcccagaaaacatggaggtgagaagggcgtcccattcagaattcaagtggatacctttaagcagaatgagaacggtgaatacacagaccatttacactctgcgagctgccaaattaaagtgttcaagcccaaaggtgcagatcgcaagcagaagacagaccgtgagaagatggaaaaacggacagcccatgagaaagagaaataccaaccaagctacgacaccactatcttgacagagatgagactggagccaatcattgaagatgccgttgaacacgaacagaagaaaagttcaaagcggaccctgcctgctgactacggggacagcctggcgaaaaggggctcttgctccccgtggcctgacgctccaaccgcctatgtaaacaactcaccaagccccgctcccacatttacaagccctcagcagtccacttgttcggtgccagatagcaatagctcaagtcctaaccaccagggggatggtgcatctcagaccagtggcgagcagattcagccatctgcaactatccaagagacacagcagtggctgttgaaaaacagattctctagttacacacggttattttctaacttctctggcgctgatctgctgaagctaactaaggaggacctggtccagatctgtggcgcagccgatggcattcgtttgtataactctctcaaaagcaggtccgtgcgcccaaggcttacaatttacgtttgcagggaacagcccagttcaaccgtgctccagggccagcagcaggccgcaagcagtgcttcagagaacggcagcggagcaccttacgtgtaccacgctatttaccttgaagagatgattgccagtgaggtagctcggaagcttgccctcgtcttcaacataccactgcatcaaatcaatcaggtctatagacagggcccaacagggatccacatccttgtttcggaccagatggttcaaaattttcaagacgagagttgcttcctgttttcgaccgtgaaagctgagtcctccgatggtatccacattatcttgaaatag

SEQ ID NO: 45936 - DNA, 1623 bp, Artificial Sequence
  derived and/or modified sequence
atggcatgggtgctcaagatggatgaggttatcgaatctggtctcgtgcatgatttcgacgcaagcctgtccgggataggtcaggagttgggagccggtgcctatagtatgagtgatgtgcttgcactccccatattcaagcaggaggatagttctctaccattggacggagagacagaacaccctccattccagtatgtgatgtgcgcagccaccagtccagcagtgaagttgcacgatgagaccctcacttatttaaatcagggccaatcctatgaaattcggatgctcgacaaccgtaagatgggcgatatgcccgaaatcaatggtaagctggtgaagagcattatacgggttgtcttccatgaccgccgattacaatataccgagcaccagcagctggaaggatggaagtggaacaggcccggtgaccgcttgctcgatctggatattcctatgtcagtggggatcatagacactaggacaaatcctagccagcttaacgctgttgaatttctgtgggaccccgctaaaagaacatccgctttcatacaggtccattgtattagcactgaatttacaccgagaaaacacggcggagaaaaaggagtcccgttcaggatacaggtcgacactttcaaacagaatgagaatggcgagtatacggatcacttgcatagtgcttcctgtcagatcaaggtgtttaagccgaagggagccgatcgcaagcaaaaaacggacagggaaaagatggagaaacgaaccgcccacgaaaaagagaaataccagcctagctacgacacgacaattcttaccgagatgagactcgaacctatcatcgaagatgcagtagagcacgagcagaaaaaaagtagcaagcgaaccctacccgctgactatggggacagccttgcaaaacgagggagttgcagcccatggcctgatgcccctaccgcatacgtgaataatagtccttcacccgctcccacctttaccagcccccagcaatctacttgcagtgtccctgacagtaatagtagctcgcctaaccaccagggggacggtgcctcccagacgtctggggagcaaattcagccatcagctacgatccaagagacacagcagtggctgctcaagaaccggttttccagctacaccagactcttctccaactttagcggagccgacctcctaaaactgacgaaagaggacctagtccagatttgcggagcggcagacggtattcgactgtacaactcccttaagtctcggagtgttcgaccgaggcttaccatatacgtgtgccgggaacagcccagcagcactgtgctccaggggcagcagcaggcagccagtagtgcaagcgagaatgggagcggcgctccctacgtctaccacgcaatatacctcgaggagatgatcgcttctgaggtcgccagaaaactcgctctagtatttaatattcccctccatcaaattaatcaggtgtaccggcagggacccaccggaatccacatcctagtctccgatcagatggtccagaatttccaggacgaatcatgctttttgttcagtaccgtgaaggctgaatctagcgatggcatccatatcattctgaaatag

SEQ ID NO: 45937 - DNA, 2074 bp, Artificial Sequence
  derived and/or modified sequence
ctgggccgcgaggcgcggggagtggccctaagcgcggggctgtacggggagggccgaggcgtggggcgaacgccggggcggggtcggggcggggccgggggaggcggaagcggcgcgtgaacctaagtcggagtcgcgttgaagccagcgtccggccggcagagcggcgtcggcggggacgcgccagcggagctccggctccttcgccctggacgcggaggccgcggtgtgcggggcgacggcgaggccggaagatggcctgggtgctcaagatggacgaggtgatcgagtccgggctggtgcacgacttcgacgccagcctctcgggcatcgggcaggaactgggcgccggcgcttacagcatgagtgatgtcttggcattgcccattttcaagcaggaagattccagccttccattggatggtgaaacagagcacccaccctttcagtatgtgatgtgtgctgcaacgtcaccagcagtaaaactgcatgatgaaacgcttacttatttgaaccaaggtcagtcatatgaaattcggatgctggataatcggaaaatgggtgatatgcctgagatcaatggaaaattagtaaagagcatcataagggttgtattccatgacagacggctacaatacacagagcatcagcaacttgaaggatggaagtggaatcgcccaggagacagacttcttgatttagatattccaatgtctgtgggaataattgacacaaggacgaatccaagccagttaaatgcggttgaatttctgtgggacccagcaaaacgcacctctgctttcattcaggtacactgcatcagcacagaatttactccacggaagcacggaggtgaaaagggagtgccctttaggatccaggttgacacctttaagcagaatgaaaatggagaatacacagatcatctacactcagctagctgccaaatcaaagtttttaagcctaaaggtgcagacaggaaacaaaaaactgaccgagagaagatggagaagagaacagctcatgaaaaagaaaagtatcagccgtcctatgataccacaatcctcacagagatgaggcttgagcctataattgaagatgcagttgaacatgagcagaaaaagtccagcaagcggactttgccagcagactacggtgattctctggcaaagcgaggcagttgttctccgtggcccgatgcccccacagcctatgtgaataacagcccttccccagcgcccactttcacctccccacagcagagcacttgcagtgtcccagacagcaattcttcttccccaaatcatcagggagatggagcttcacagacctctggtgaacaaattcagccttcagctacgatccaggaaacacagcaatggctgctcaaaaacagattctcttcctacacaagactgttctctaatttttcaggtgccgacttattaaaactgacaaaggaggatttagttcaaatttgtggtgcagccgatggaattcggctctataattcactgaagtcaaggtcggttagaccccgtttaaccatctatgtctgccgggagcagccaagcagcacagtgctgcaagggcagcagcaagctgcaagcagtgcaagcgagaatggcagtggggcaccctatgtttatcatgcaatctacttggaagaaatgattgcctcagaagttgctcgaaaacttgcgctggtgtttaatatccctctccaccaaattaatcaggtttacagacagggtcccaccggtattcacattcttgttagtgatcagatggttcagaattttcaagatgagagttgttttttattctccacagtaaaagctgaaagtagtgatggcatccacataattttgaagtgatgtcttatatagactgaactgtattcagtaccaaatagtcacgcttaaaagtgtgtgaagactgaatccaagaagtcttgggattggattttaccatatgaaatgtttcatattgaaaacacaagatgacctttctaatgagctgtatgagaggtgaatctcctcactgtcactgccatagccaagcatcctcatga

SEQ ID NO: 45938 - DNA, 4148 bp, Artificial Sequence
  derived and/or modified sequence
gtcgcgttgaagccagcgtccggccggcagagcggcgtcggcggggttggccggggcggtgtggcgctagagcctgggcgggccgggggcaaggagtcaaggcttgggggcgggtgacgggcgggcggagggcttgcccccgtgtggtcctcggagcggcccgaggtccagcctcccagcggtcccggaggaggatgcgaccggggggccccgggcggggcggtcggcggcggctgcagcgctagcggcgcgggggctgggcggcggcgccggcatgaggcgcagggccggtgtccgcgggagggtggcgctgccggcggcccggccgctcccgctgcaattgctcgctgggctcgtcgtgccctgccagtggggcccccgcagctctcgtcccggccgccgctggtgaccactcgccgcccctccggaggcttcacccgcgccctcccccaggacgcgccagcggagctccggctccttcgccctggacgcggaggccgcggtgtgcggggcgacggcgaggccggaagatggcctgggtgctcaagatggacgaggtgatcgagtccgggctggtgcacgacttcgacgccagcctctcgggcatcgggcaggaactgggcgccggcgcttacagcatgagtgatgtcttggcattgcccattttcaagcaggaagattccagccttccattggatggtgaaacagagcacccaccctttcagtatgtgatgtgtgctgcaacgtcaccagcagtaaaactgcatgatgaaacgcttacttatttgaaccaaggtcagtcatatgaaattcggatgctggataatcggaaaatgggtgatatgcctgagatcaatggaaaattagtaaagagcatcataagggttgtattccatgacagacggctacaatacacagagcatcagcaacttgaaggatggaagtggaatcgcccaggagacagacttcttgatttagatattccaatgtctgtgggaataattgacacaaggacgaatccaagccagttaaatgcggttgaatttctgtgggacccagcaaaacgcacctctgctttcattcaggtacactgcatcagcacagaatttactccacggaagcacggaggtgaaaagggagtgccctttaggatccaggttgacacctttaagcagaatgaaaatggagaatacacagatcatctacactcagctagctgccaaatcaaagtttttaagcctaaaggtgcagacaggaaacaaaaaactgaccgagagaagatggagaagagaacagctcatgaaaaagaaaagtatcagccgtcctatgataccacaatcctcacagagatgaggcttgagcctataattgaagatgcagttgaacatgagcagaaaaagtccagcaagcggactttgccagcagactacggtgattctctggcaaagcgaggcagttgttctccgtggcccgatgcccccacagcctatgtgaataacagcccttccccagcgcccactttcacctccccacagcagagcacttgcagtgtcccagacagcaattcttcttccccaaatcatcagggagatggagcttcacagacctctggtgaacaaattcagccttcagctacgatccaggaaacacagcaatggctgctcaaaaacagattctcttcctacacaagactgttctctaatttttcaggtgccgacttattaaaactgacaaaggaggatttagttcaaatttgtggtgcagccgatggaattcggctctataattcactgaagtcaaggtcggttagaccccgtttaaccatctatgtctgccgggagcagccaagcagcacagtgctgcaagggcagcagcaagctgcaagcagtgcaagcgagaatggcagtggggcaccctatgtttatcatgcaatctacttggaagaaatgattgcctcagaagttgctcgaaaacttgcgctggtgtttaatatccctctccaccaaattaatcaggtttacagacagggtcccaccggtattcacattcttgttagtgatcagatggttcagaattttcaagatgagagttgttttttattctccacagtaaaagctgaaagtagtgatggcatccacataattttgaagtgatgtcttatatagactgaactgtattcagtaccaaatagtcacgcttaaaagtgtgtgaagactgaatccaagaagtcttgggattggattttaccatatgaaatgtttcatattgaaaacacaagatgacctttctaatgagctgtatgagaggtgaatctcctcactgtcactgccatagccaagcatcctcatgagagtgagcacatcggcacagcatgcatccagctctggaggccacggtgcaggcatagctgcctgctgctctggcagaggccagtaaatacagttcctagaagcagcctttgctgtctttttacactgtatgcggtttggaaatgaatgtagaaacttactgtgggcatttacctttctgtgccagtttggcttttattgcctgaaccttatgctgacctggagaggagatgggggacagtgctgttgtggggccagcagtgaatctgtatgcggagagttgtgttgtgctgatgtggccgttggtggtcaggtaagaggctcggcaccttcttggaagaaatcatgtctgagggtgtacgtttgatatgatcatgccagattggagaagatccaagccaggaagatgggcttgaagcaaactgcattatcaggagtaccttggtgagaggatcagtgtaaatcctaataggtacaaagacttttgtgttttggctttgtcacagatttattgaaaaacttttttgcttctgcttccatttttagcattttagtttctggttttcatttttggagattccttgccttttaaactcgtggtttttctctcattttcttccctctctccctccatctctgaccacccccaccctaaccccccacccccaccatcctattaaacatttttaaagccctaccccagacattggaaataggtgacccaagtagggggagaaagtattattgttgatagcttctgactaggtgttaagggatcttcattatgaacaagatgaatttttttctggaaacactagatgttatcaatcaaacactaaaatgtaccatacaaatcccttaagcctctcaaatattgagctttagtacaatcatggatagacattctggtgatgatttaggggctttttatacaccacatactagcttctttctctataagagtgcctctttcataaaaccaaatgcttgtctgctagcatacttttcaaagggaatccactgttttctcactttcctcccatatctccgtccttcatccaaaaccttcccagaatccatcagcaagcatgtttgaggcctgtggtgtaggggactgaattttttttttaacttctattccattttaattgtaggatatctttgtccatatacccaggtgtcctgatttgaatgtactatttgatcctcattgtgttcaggcaaaaaataggaaatgagtaattttgagtttgaaatctctcccagaagacaaactacttcagtgagtaaaagctttgacattttatgttttattcataaagggggttaattatttgctacaaagaagcacgatctattttcatcatcgatttgaaaatatctgtaactcctatagatcctataggcagagagttttcctttctgactttttccctttgctttcgtgtgaccacatgttttctgtaccagtcactggggaaagaagtgagtttatctcgtttgttttaaaagttttgcttgtctatttagcattcctttttgggtctcaagatttatggaacaataaatgtcatttaatgctgtgtgcttattttgaattcctcatcaggttttagaagcggggtaaaaatacttagatgcttatcagacttgaaattatactgagtggcattgaacgtgagtttgtcccagtgaaacaggctaaataaattttggcaccagcaaatttgttactttgtttttttaatagtaggatgtacacatttcagtataataaatgttttctgattgttttgcaaa

SEQ ID NO: 45939 - protein, 815 aa, Artificial Sequence
  derived and/or modified sequence
MKSNQERSNECLPPKKREIPATSRSSEEKAPTLPSDNHRVEGTAWLPGNPGGRGHGGGRHGPAGTSVELGLQQGIGLHKALSTGLDYSPPSAPRSVPVATTLPAAYATPQPGTPVSPVQYAHLPHTFQFIGSSQYSGTYASFIPSQLIPPTANPVTSAVASAAGATTPSQRSQLEAYSTLLANMGSLSQTPGHKAEQQQQQQQQQQQQHQHQQQQQQQQQQQQQQHLSRAPGLITPGSPPPAQQNQYVHISSSPQNTGRTASPPAIPVHLHPHQTMIPHTLTLGPPSQVVMQYADSGSHFVPREATKKAESSRLQQAIQAKEVLNGEMEKSRRYGAPSSADLGLGKAGGKSVPHPYESRHVVVHPSPSDYSSRDPSGVRASVMVLPNSNTPAADLEVQQATHREASPSTLNDKSGLHLGKPGHRSYALSPHTVIQTTHSASEPLPVGLPATAFYAGTQPPVIGYLSGQQQAITYAGSLPQHLVIPGTQPLLIPVGSTDMEASGAAPAIVTSSPQFAAVPHTFVTTALPKSENFNPEALVTQAAYPAMVQAQIHLPVVQSVASPAAAPPTLPPYFMKGSIIQLANGELKKVEDLKTEDFIQSAEISNDLKIDSSTVERIEDSHSPGVAVIQFAVGEHRAQVSVEVLVEYPFFVFGQGWSSCCPERTSQLFDLPCSKLSVGDVCISLTLKNLKNGSVKKGQPVDPASVLLKHSKADGLAGSRHRYAEQENGINQGSAQMLSENGELKFPEKMGLPAAPFLTKIEPSKPAATRKRRWSAPESRKLEKSEDEPPLTLPKPSLIPQEVKICIEGRSNVGK

SEQ ID NO: 45940 - DNA, 2448 bp, Artificial Sequence
  derived and/or modified sequence
atgaagagcaatcaagagcgcagcaacgaatgcttgccacccaagaaaagagagattccagcaacctctaggtcaagcgaagagaaagcacccaccctcccctcagataatcatagggtcgaagggacagcttggttgcctgggaacccagggggtcgtggccatggcgggggccggcacgggcctgccggaacctcagttgaattaggacttcagcaaggcatcggcttgcacaaggccttatcaactggcctcgactatagcccgccgtccgcaccacgcagtgtgccggttgccaccaccctgcccgctgcatacgcgaccccccagccgggaactcccgtgtcccctgtgcagtacgcacacctcccacataccttccaatttattggctctagccagtattccggcacttacgcctcgttcatcccgtcccagctaattccccccacagcgaaccctgtaacaagcgctgttgcctccgcggctggcgctaccacccctagccagaggagccagcttgaagcatattctacgctcctcgcgaatatgggttctctgtcacagactccaggccataaggccgaacagcagcagcagcaacagcagcaacagcagcagcagcaccagcatcaacaacagcagcagcagcaacagcagcagcaacagcagcaacacctttcaagagctccaggactgatcacaccaggatcacctccacctgcacagcagaaccagtatgtgcacatcagctctagtccccagaataccggccgaaccgcaagccctcccgctattccagtgcatcttcacccccaccagacgatgattccacacaccttgacactcggacctcccagccaggtcgttatgcagtacgccgactccggatcccacttcgtgccccgggaggccacaaaaaaagctgagtcttcccgactccaacaggcaattcaggctaaagaggttcttaatggcgagatggaaaagagccggaggtacggcgccccctcttccgcagatcttggcctgggcaaggccggtggtaagtctgtgcctcacccgtacgagagtcgacacgtggttgtgcatccttctcccagcgactactcctcgcgagacccctcaggggtgcgagctagcgtgatggtgctgccaaacagtaacaccccagccgccgaccttgaggttcagcaagccactcacagagaagccagtccctccaccttaaatgacaaatcaggattacatctcggtaaaccgggtcatcgctcatatgctttgtcaccacacactgtgatacaaacaacacatagtgcctccgaacccctgcccgtaggcttgccagccaccgcgttctatgcggggactcagcccccagtcattggttacctgagtggacaacagcaggccatcacttacgccgggtcactgcctcagcacctggtgattcccggcacccagcctttattgatcccagtgggcagcactgacatggaggccagcggagcagcccctgcaattgtcaccagcagcccccagttcgctgctgtgccccacacattcgtaaccacagctctgccaaaaagcgagaattttaatcctgaggccttggttacacaggcggcctaccctgcaatggtgcaggcacaaatacatttacctgttgtacagtctgtcgcaagccccgcagctgcacctccaacacttccaccctattttatgaaaggaagtattatccaactggcaaatggagagctgaagaaggtggaggacctgaagactgaggattttatccagagtgccgagatcagcaacgacctcaaaatagactcaagcaccgtggagcgcattgaagatagccactccccgggcgtggctgttattcaattcgcagtcggcgaacatcgtgcccaggtgtctgtggaggttctggtggagtacccattctttgtgttcggacagggctggagcagctgctgcccagaaaggacgtcccagctgttcgatttgccatgcagcaaactatctgtgggagatgtttgcatcagcttgaccctgaaaaacctaaaaaacggcagtgttaaaaagggccaacctgtcgaccccgcaagcgtactcctcaagcactccaaagccgacgggcttgccgggagtagacaccgctatgcagaacaggaaaatgggatcaatcagggtagcgcccagatgctgagtgaaaatggagaactcaagttccctgaaaagatgggtttgcccgctgctccatttctgactaaaatcgagcccagtaagcccgcagcgacacggaagaggagatggtcagccccagagtctcgcaagcttgaaaagtccgaagacgagccaccactgactctccctaaaccatcattgattcctcaggaggtcaaaatctgtatcgagggccggagcaatgttggaaagtag

SEQ ID NO: 45941 - DNA, 2448 bp, Artificial Sequence
  derived and/or modified sequence
atgaaaagcaatcaggagagatcaaacgagtgcttacctccgaagaagcgcgagattccggctacctcacgttcttctgaggaaaaggcccccaccctgccttctgacaaccacagagtggagggaacagcatggttacccggtaatcccggaggaaggggtcatggcggaggtcgccacggacccgcaggcacctccgtcgagttggggctgcagcagggtatcggtctgcataaggcactaagtaccggcctcgactactcaccaccttccgcgccacgttctgtcccagtcgccaccactttacctgccgcttacgcaacacctcaacccggaacaccggtttcacctgtccagtatgcacatttgcctcacacattccagtttatcgggtcctctcagtactccgggacctacgctagttttattcctagccagcttatccctcctaccgcaaatcctgtcaccagcgcagtcgcttcagctgccggcgctacgacgccatcccagcgcagtcagctcgaggcatattcaactctgctcgcaaatatgggttctctttctcaaacacccggtcataaggccgaacagcagcagcagcagcagcagcaacagcagcagcagcaccagcaccagcaacaacagcagcagcagcaacagcagcaacagcagcagcatctatcgagggcacccggcctcatcacccccgggtcgcctccccctgcccagcagaaccagtacgtgcatatctccagctccccacagaacactggccgaacagcatctcctcccgccatcccagtccatctgcatccccatcagactatgattccgcatacactcaccctgggtccaccgtcccaggtcgtgatgcagtatgctgattcagggtcccacttcgtacctcgggaggcaacaaagaaagccgagtcatcacgcttgcagcaggcgatccaggccaaagaggtgttaaatggggaaatggagaaaagcaggcgttatggggctccttcatctgctgatcttggcctgggcaaagccgggggaaaatctgtgcctcatccttatgagtcccggcatgtggttgtgcatccatcgccatcagactacagctccagggaccccagcggcgtgagagcttcggtcatggttttgcctaactctaatactcccgctgctgaccttgaagtacagcaggcgacgcacagggaggcctccccttccacattaaacgacaagagcggcctccacctcggcaagccaggtcacagatcctacgctttaagcccacacaccgtaatacagacaactcatagcgcctctgagcctctgcccgttggcctgcccgcaacagcgttttacgccggcacccaaccaccagtgatcggatatctgtcagggcaacaacaggccatcacatatgccggctctctaccccaacaccttgtcattcccggcacccaacccctcctgatccccgtggggagcactgacatggaggccagcggagccgcgcccgccatcgttactagtagccctcagtttgccgccgtacctcacaccttcgtgaccaccgccctgccaaagagcgagaacttcaacccagaagctctggtgacccaggcagcatacccagcgatggttcaagcccagattcatctcccagtggtgcaatcagtcgccagcccagccgcagctcctcccaccctgcccccctacttcatgaaaggaagcattatccagctggccaacggcgaattaaaaaaggtggaggatcttaagactgaagatttcattcagtctgcggaaatttccaacgatcttaagatcgactctagcacggtggagaggatagaggattcccacagtcccggagtagccgttattcagttcgctgtcggtgaacacagagcccaagttagcgtggaagtgctggtcgagtaccccttctttgtgtttgggcagggatggtcaagttgctgcccagagcggacatcacagttgttcgatctgccttgctccaaacttagcgtgggggatgtttgtatctcactcactctgaagaatttaaagaacggaagcgtcaaaaaagggcagccagtggatccagcctctgtcctcctaaagcacagcaaagccgacggacttgccgggtcaaggcaccgctatgctgaacaggaaaatggcatcaaccagggcagtgcacaaatgctaagcgagaatggagagctgaaatttcccgaaaagatgggacttcctgccgcccctttcctaaccaaaattgaaccaagtaagccagcggccactagaaaacggagatggtccgctcctgagagtcggaagcttgagaagagtgaagatgagccccctctgactctcccaaagccatcgcttatccctcaggaagttaaaatctgcatcgagggccgcagcaatgtcgggaaatag

SEQ ID NO: 45942 - DNA, 2448 bp, Artificial Sequence
  derived and/or modified sequence
atgaagtcaaaccaagagcgtagcaacgaatgcctgccccctaaaaagagggaaatccccgcgaccagcaggagttccgaggagaaagctccaactctaccctccgacaaccaccgtgtggagggaacagcatggctccccggcaacccaggcggtaggggacacggtggggggaggcacgggccagctgggacctccgtggagctgggactgcagcaagggatcggcctccacaaagccctgagcacaggcctcgattactccccgccatcagctccgaggtcagttccggtcgctacaaccctccctgcagcatatgcgacaccccagcccgggactccagtctcacccgttcagtacgcccacctcccccatacatttcagtttatcggttcttctcaatattccggtacttacgcttcgttcatacctagccagctcattcctcctaccgcaaatcctgtgacaagcgcagtggcctcagccgccggagctactacacctagccagaggagtcagctggaggcgtattccaccctgctggccaatatggggagcctttcacagacacctggacataaggccgaacagcaacagcagcagcagcagcagcagcagcagcagcatcagcaccaacagcaacagcagcagcaacaacagcagcagcaacagcagcacctgtctagagccccagggctgatcacacccggttccccacctccagcccagcagaatcaatacgtacacatatcttcttcaccccaaaatactgggcgaaccgcctcacctcctgcaattccagtccacctgcatcctcatcaaaccatgattccccacacgctcaccttgggtcccccatcccaggtcgttatgcagtacgccgattcgggcagccattttgtgccacgcgaggccacaaagaaggcagaaagttctcgactccaacaggcgatacaggccaaagaggtgcttaacggcgagatggagaaatccaggcgttacggggccccatcctcagctgatctgggtctgggaaaggcaggcgggaagtcagttcctcacccatatgagtctagacacgttgttgtgcatcccagcccttctgattacagcagtcgggacccatcaggagtacgtgcttctgtgatggtactgccaaattctaacacaccggccgctgacctggaggtgcagcaggctacccaccgggaggcctctccctctaccctcaatgacaaatctggcctacacctaggaaagccaggacatagatcatacgccttatcgccccatacggtgattcagacaactcacagtgccagtgaacctttgccagtaggattgccagccacggcgttttacgccggtacacagccacctgtgattggatatttatctggccagcagcaggcaataacgtacgctggcagtcttcctcaacacctagtgatcccggggacccagcctctgctcataccagtcggcagcacagatatggaagcgtccggcgccgcaccagctatcgtgacgtctagtcctcaatttgctgcagtgcctcataccttcgtaactactgctctgcccaaatccgagaatttcaacccagaggccctggtgacacaggccgcctaccccgccatggtgcaagctcagatacacctgcccgttgtgcagagcgtagctagccccgcagcggccccaccaacccttcccccttactttatgaagggcagcattatccagctcgcgaatggggaacttaagaaagtggaagacctgaagactgaagactttattcagtctgccgagatttctaacgacctaaaaattgatagtagcacagtcgaaagaatcgaggacagccactcacccggggtggccgtgattcagtttgcagtcggggaacaccgggcacaggtgtcagttgaagtactcgtcgagtacccctttttcgtgttcggccagggatggtcctcatgttgtccagagcgcaccagccagctttttgacctcccgtgctctaagttatcagtcggtgacgtgtgcatcagtctcaccctgaaaaatctgaaaaatggttcagtaaagaaaggccaaccagttgatccagcttccgtccttctgaaacacagcaaggccgatggattagctgggtctcgccacaggtacgctgagcaggagaacgggattaaccagggctcagcgcaaatgctctccgagaacggcgagttgaagtttcctgagaagatgggcctgcccgccgctcctttccttacaaaaatcgaaccgagcaagcctgctgccacaaggaagcgacgatggtctgccccagaaagcagaaaacttgagaaatcagaggacgaacctcccttaactctccctaagcccagtctgattccacaggaggtcaagatctgtatcgagggccgctcaaatgtgggaaagtag

SEQ ID NO: 45943 - DNA, 2448 bp, Artificial Sequence
  derived and/or modified sequence
atgaagagcaaccaggagaggagcaatgaatgtctgccccccaagaagcgggagatcccagccaccagccgcagcagcgaggagaaggcccccaccctgcccagcgacaaccaccgggtggagggcacagcctggctgcccggcaaccctgggggccggggccatggaggcggccgccacggccctgctggcacctctgtggagctgggcctgcagcagggcatcggcctgcacaaggccctgagcacaggcctggactacagccccccatctgcccccaggtctgtgcctgtggccaccaccctgcctgctgcctatgccaccccccagcccggcacccctgtgtcccctgtgcagtatgcccacctgccccacaccttccagttcatcggcagcagccagtacagcggcacctacgccagcttcatccccagccagctgatccccccaacagccaaccctgtgaccagcgctgtggccagcgctgctggggccaccacccccagccagaggagccagctggaggcctacagcaccctgctggccaacatgggcagcctgagccagaccccaggccacaaggccgagcagcagcagcagcagcagcagcagcagcagcagcagcaccagcaccagcagcagcagcagcagcagcagcagcagcagcagcagcagcacctgagccgggcccctggcctcatcaccccaggcagccccccaccagcccagcagaaccagtatgtgcacatcagcagcagcccccagaacacaggccgcacagccagccccccagccatccctgtgcacctgcacccccaccagaccatgatcccccacaccctgaccctgggcccccccagccaggtggtgatgcagtatgctgacagcggcagccactttgtgccccgggaggccaccaagaaggccgagagcagccggctgcagcaggccatccaggccaaggaggtgctgaatggagagatggagaagagccgccgctacggggcccccagcagcgctgacctgggcctgggcaaggccggcggcaagtctgtgccccacccctatgagagccgccacgtggtggtgcaccccagccccagcgactacagcagccgggaccccagcggcgtgcgggcctctgtgatggtgctgcccaacagcaacaccccagctgctgacctggaggtgcagcaggccacccaccgggaggccagccccagcaccctgaatgacaagagcggcctgcacctgggcaagccaggccacaggagctatgccctgagcccccacacagtcatccagaccacccacagcgccagcgagcccctgcctgtgggcctgcctgccacagccttctacgccggcacccagccccctgtgattggctacctgagcggccagcagcaggccatcacctacgccggcagcctgccccagcacctggtgattcctggcacccagcccctgctgatccctgtgggcagcacagacatggaggccagcggggccgccccagccatcgtgaccagcagcccccagtttgctgctgtgccccacacctttgtgaccacagccctgcccaagtctgagaacttcaaccctgaggccctggtgacccaggccgcctacccagccatggtgcaggcccagatccacctgcctgtggtgcagagcgtggccagccctgctgctgccccacccaccctgcccccctacttcatgaagggcagcatcatccagctggccaacggggagctgaagaaggtggaggacctgaagacagaggacttcatccagagcgctgagatcagcaatgacctgaagattgacagcagcacagtggagagaattgaggacagccacagccctggggtggccgtcatccagtttgctgtgggggagcaccgggcccaggtgtctgtggaggtgctggtggagtaccccttctttgtgtttggccagggctggagcagctgctgcccagagaggaccagccagctgtttgacctgccctgcagcaagctgtctgtgggagatgtgtgcatcagcctgaccctgaagaacctgaagaatggatctgtgaagaagggccagcctgtggaccctgcctctgtgctgctgaagcacagcaaggcagatggcctggccggcagccgccacagatatgcagagcaggagaatggcatcaaccagggcagcgcccagatgctgtctgaaaatggagagctgaagtttcctgagaagatgggcctgcctgctgcccccttcctgaccaagattgagcccagcaagccagctgccaccaggaagaggcgctggagcgcccctgagagcaggaagctggagaagtcagaagatgagccccccctgaccctgcccaagcccagcctcatcccccaggaggtgaagatctgcatcgagggccgcagcaatgtgggcaagtag

SEQ ID NO: 45944 - DNA, 2448 bp, Artificial Sequence
  derived and/or modified sequence
atgaagagcaaccaggagcggagcaacgagtgcctgccccccaagaaaagggagatccccgctacatcccgcagttcagaggagaaggcacctactctgccaagcgataaccaccgagtggagggaaccgcatggctccctggcaaccccgggggcagaggtcacggcggcggaagacatgggccagcagggacaagcgtcgagctaggcttacagcagggcatcggccttcataaagctctgtccaccggcctggactactctcccccctccgcaccgcgctccgtccctgttgctacaactctccccgcggcctatgctactcctcaaccaggcacaccagtgagcccagtgcagtatgcgcatctcccacatacctttcagtttatcgggagctcccaatactcaggcacctatgcctcctttatcccatcccagcttatcccacccaccgccaatcccgtcactagcgcagttgccagtgcagctggcgcgacaacacctagccagagatcacaactggaagcctacagtacccttctggcaaacatgggctctttgagccaaactcccggccacaaggcggagcaacagcagcagcaacaacaacagcagcaacagcagcatcagcatcagcaacagcagcagcagcaacagcagcaacaacagcagcagcacctgtccagggcaccaggactcataacgcccgggtctcccccacccgcccagcagaatcagtatgttcatattagcagctctccccaaaatactgggcggaccgcgtctcctcccgccattcctgtgcatctccatccacatcagacaatgattccgcataccctcactctcggcccgccctctcaggtcgtcatgcaatacgctgattctgggagtcattttgtgccaagggaggcaaccaagaaagcagagtccagtaggctgcaacaagcaatacaggccaaggaggtcctgaatggagaaatggagaaatcacgccggtatggggccccttccagtgccgacctgggcctgggcaaggccggcgggaaatctgtgcctcatccttacgagtcacgccatgtggtggtacatccatcaccctccgactactccagtagagacccatctggggtcagggcctcagttatggtcttgcccaattctaatactcctgccgccgacctggaagtgcagcaggccactcaccgcgaagccagcccatccacattgaatgacaaatcaggtctgcacctggggaagcctgggcacagatcttacgctctttctccacataccgtgattcagaccactcactcagcctctgagcctctacccgttggcctcccggctacagcattctacgcgggcacccagccccctgtgataggctaccttagtggtcagcagcaagctattacatacgccggctccctgccccaacacctggtgatccctggaacgcaacctcttctcatccccgttggatctactgacatggaggccagtggagcggctcctgcaatagtaacttctagtccccaattcgcggctgtccctcacacattcgtgacaactgctctccctaaatcagagaatttcaatcctgaagcccttgtaactcaggccgcttatccagccatggtgcaggcccagattcatttgcccgtggttcagtccgtggcctctcccgctgcggcccctcctaccctgcccccctattttatgaaaggttcaattattcagctggccaatggcgaactcaaaaaagttgaagacctaaaaacagaggactttatccaatcagcggaaattagcaatgatcttaaaatcgatagttccactgttgaaaggatcgaggattctcacagtccaggagtggccgtcatacagtttgcagtgggagagcatcgggcccaggtgtctgtagaagtcctggtggagtaccctttttttgttttcgggcagggatggagctcctgctgccctgaaagaacatcccagctgttcgatctgccctgttctaagctttccgttggagacgtgtgtatatccctcaccttaaaaaacttgaagaacggaagcgtcaaaaaaggtcagccagtcgatcctgcgtctgtgctgctgaaacactcaaaagccgacggactggctggctccaggcatagatacgcagagcaggagaatgggatcaatcagggatctgcacagatgctctcagaaaatggcgagctgaaatttcccgagaagatggggttgccagctgcccccttccttactaaaatagaacctagtaagccagcagctacccgaaagagacgatggtccgcccccgaatcccggaaactggagaagtccgaagatgagccccccctaacactcccgaaaccctcattgattccacaggaggtcaagatctgcatcgagggtagatccaacgtggggaagtag

SEQ ID NO: 45945 - DNA, 2448 bp, Artificial Sequence
  derived and/or modified sequence
atgaagagcaaccaggagcggagcaacgagtgcctgccccccaagaaacgggagatccccgccacctctcggtctagcgaggaaaaagcaccaacactaccctctgacaatcatcgggtcgaagggacagcatggttacctggtaaccccgggggcaggggacatgggggaggaagacacgggcctgcgggtaccagtgtcgagttgggtctccagcaaggtatcgggctacataaagcgctaagcactggactggattactctcctcctagtgctcctcgcagcgttcccgtggctactacactgccagccgcttatgcaactcctcagcctgggactccagtttcaccggtgcaatacgcccacctaccgcatacattccagttcattggatctagccaatactctggaacttacgcgtcatttattccttcccagctgatcccgcccacggccaacccggtcacttctgcagtagccagtgccgccggagccacaacaccctcacagagaagccaactggaggcctattcgaccttgctggccaatatgggctctctgtcacagacgcccggacataaagcagaacagcagcaacagcagcagcagcagcaacagcagcagcatcagcaccaacagcaacaacagcagcagcagcaacagcagcagcaacagcatctctcccgcgcccccggcctaattactccaggaagccccccgcctgcccagcagaatcagtacgtacacatctcttctagcccccagaacaccggccggacagcgtccccacccgccattcctgtgcaccttcatccccatcagactatgataccacataccctaactctcggacccccgtcacaggtagtgatgcaatacgccgacagtggttcccactttgttcccagagaggcaacaaagaaagccgagtccagtaggctccaacaggcgattcaggccaaggaggtgttaaacggcgagatggaaaagtctcgacggtatggcgctcctagttctgcggacctgggtctcggtaaggcaggaggtaagagtgttccacacccttacgaatctcgccatgtcgtggtgcacccctcaccatccgattacagctcccgcgacccgagtggtgtgagagcaagcgtcatggtcctgcccaatagcaacacacccgcggctgatctggaagtacagcaggccacccaccgggaagcgagcccaagcaccctcaatgacaaatcaggcctgcacctcggaaaaccagggcataggagctacgccttgtcaccacacacagtaatacagacaacccatagtgcttcagaaccactgcctgtgggcctgccagcgacagcattctacgctggaacccagcctccggtgataggatacttaagcggccagcagcaggctattacctatgcaggcagtcttcctcagcatctggtgatccccggaacccaaccgcttttaatccctgtaggttctaccgatatggaagctagcggcgccgcccctgctattgtgacttcctcaccacaattcgccgcggtacctcacacttttgtcactaccgctctcccgaagtcagagaatttcaatcctgaagccctcgtgactcaggccgcataccccgccatggtgcaagcgcagattcacctaccagtggtacagagcgtggcatctccagcagcggcccccccaactctgcccccgtattttatgaagggatcaattatccaattagcgaatggcgagttaaagaaggtcgaagatctgaagacggaggattttatccagagcgcagagatatcaaacgacttgaagatagactcttccacagtcgagcgaattgaggactctcattcccccggagtggcagtgattcaattcgccgtgggcgagcacagggcgcaggtctccgtggaagtgttggttgagtacccgttcttcgttttcgggcaaggctggagcagttgctgtcccgagagaacttctcagttgtttgatctgccgtgcagtaaactttccgtgggagacgtctgcatcagcctgacactcaagaacctaaaaaatggatcggtgaaaaagggtcagcccgtagatccagcaagcgtgctgttgaaacacagtaaagccgatggtctggcaggcagccggcacaggtacgccgagcaggagaatggcatcaaccagggctccgctcagatgctttccgaaaacggggagctgaaatttcctgaaaaaatgggcttgcctgccgccccctttctcaccaagatcgagccatcgaagcctgccgccactcggaagcggcggtggtccgctcctgagtcgcgtaaactcgagaaatccgaagatgaaccccctctgacccttccaaagccttcactgattccccaggaggtaaagatatgtatagaagggagatctaatgtgggcaagtag

SEQ ID NO: 45946 - DNA, 2448 bp, Artificial Sequence
  derived and/or modified sequence
atgaagagcaaccaggagcggagcaacgagtgcctgccccccaagaaaagagagatacctgccacctctcggtctagcgaagaaaaagcacctaccttaccatccgacaaccatagggtggagggcacagcttggctgccgggtaacccagggggtcgcggtcacggtggcgggagacacggcccagctgggaccagcgtcgagcttgggctgcagcagggtattggtctacacaaggccctgtccacaggcctggattattccccaccttcagccccaaggtcggtgcctgtggcaacaaccctaccggccgcctacgccaccccccagccagggacccccgtatctccagtgcagtatgctcatctgccacataccttccaatttatcggaagtagccaatactcagggacgtatgcctcgttcattccttcccagctgatcccccccaccgcgaaccccgtaactagcgctgtggcctcagcagccggcgcgacaactccctcgcagcgctcccagctggaggcatatagcacactcctcgccaacatggggtcgctgagtcagacccccggccacaaggcggagcagcagcaacagcagcagcagcagcagcagcagcagcatcagcaccagcaacagcaacagcagcagcaacagcagcagcagcagcagcatctgagtagagcgccagggctgatcacacctggcagcccaccgccggcacagcagaaccagtacgtgcacatctcttccagtccgcagaacactgggcgcacagcctctcctccagcgatacctgtgcacctccatccccaccagactatgattccacacacactcacattgggcccaccttcacaggtagtcatgcaatatgccgactccgggtcccatttcgtgcctagggaggccactaagaaggcagaaagttcacgtttacagcaagcaatccaggccaaggaagtgcttaacggcgagatggagaagtccagacgctatggcgcaccctcaagtgccgacctgggccttggcaaagcagggggcaaaagcgtaccacacccttacgaaagcagacatgtggtggttcatccctccccctcagattattctagccgcgacccctccggggttcgcgcatctgtgatggtccttccaaattcaaacacccccgcagctgacttagaggtgcagcaggcgactcaccgcgaggccagccctagtaccctgaacgacaaaagcggcttacacctggggaagccagggcatcgctcatacgccctgagtccccacacagtcatccagacaacacactcagcaagtgagccgctgcccgtgggcctgcctgctaccgcattctacgctggtacccagcctcctgtgatcggatatctgtcagggcaacagcaggcaattacatacgccggttctctgccccagcatcttgtaatccccggcacacagccgcttttaatccctgtaggcagtaccgatatggaagcctctggcgcggcccctgccatcgtgacctcgtctcctcagtttgcagccgtaccacatacctttgtaactacggctctgccgaagtcggagaactttaaccccgaagccttggtgacccaagcggcctaccctgctatggtgcaggcgcaaattcacttgcccgtagtgcagtctgtggcctcacctgcagcggcccctccgacacttccaccttacttcatgaaagggtcgatcattcaattggccaacggagagctgaaaaaggtggaagatctcaaaacggaagattttatccagagcgcggagataagtaacgatctcaagatagatagcagtacagtggaaaggatagaagattctcattctccaggcgtcgcggtaattcaatttgccgtaggggagcaccgggctcaagtctctgtggaagtccttgttgaatatcccttttttgtttttggccagggctggtcaagctgctgccccgagcgtactagccagctattcgacctcccatgtagcaaactaagcgtcggcgatgtgtgtataagcttaaccctgaaaaacctgaagaatgggtcagtgaagaaaggccagcctgtggaccccgcctccgtgttacttaagcattctaaagccgatggcctggcaggcagtcgccacaggtacgctgagcaggaaaacggcatcaatcaaggcagtgcccagatgctctcagagaacggcgaattgaagtttccagaaaagatgggactgcccgccgctccgtttctgacgaagatcgaaccatcgaaacccgcggcaacgaggaaacggcgatggtctgcaccggagtcacggaagctggagaaatccgaagacgaaccccccttgacgttgccaaaaccctctcttattccacaggaggtgaaaatttgtatcgagggcagatcgaatgtcggaaagtag

SEQ ID NO: 45947 - DNA, 2448 bp, Artificial Sequence
  derived and/or modified sequence
atgaagtcgaaccaggagcgttctaacgagtgcctgcccccaaagaagcgcgaaatccctgccaccagccgttcatcagaagaaaaagccccaacgctgccaagcgataaccatcgcgtagaaggcactgcctggctaccgggaaatcctggcggtagggggcacggcggagggagacatggtcccgcagggacctccgtggagctgggactccagcagggcatagggttgcataaagccctctctacaggactggattattcgccacctagcgcgccacgtagtgtacccgtggccactaccctgcctgctgcatacgccaccccgcagcccggaacaccggtgagccctgtgcagtacgcacaccttccacacacctttcaatttattggctcatcgcaatattcgggaacttacgcctcattcatcccttcccagttgatacccccaaccgcgaatcctgtgactagcgcagtggctagtgcagccggagccacaactccctctcagagatctcagcttgaggcctactctaccctccttgccaacatgggatcgctgtcacagacccccggacataaagccgagcagcagcagcaacagcaacagcaacaacagcagcagcatcagcatcagcagcaacaacagcagcagcagcaacagcagcagcagcagcatctgtcccgggcaccgggactgattacgcccggaagccctcctcccgcacaacagaatcagtatgtgcacataagctctagccctcaaaacacaggcaggacagccagcccgccagctattccagtgcacctgcatccccaccaaacgatgattcctcatacactcacccttggtccccctagccaggtcgttatgcaatatgccgatagcggttctcactttgttccgagagaggcaaccaaaaaagctgagagttctagattgcagcaggcaattcaggctaaggaagttctcaatggggaaatggaaaaaagcaggcgatatggagccccttcgtcagccgacctcggactggggaaagctggcggtaaatccgtacctcatccatatgagtccagacacgtcgtggtccacccatcaccaagcgactacagcagtagagaccctagcggagtgagggctagtgtgatggtgctccccaattcgaacacccccgcagcggatcttgaggtacaacaggccacccacagagaagcaagcccctcgaccctgaatgacaaaagtggactccatctgggtaaacccggacatcgaagctacgccttgagccctcacactgtgatccagaccacccactccgcaagcgagcctctgccagttgggttgcccgctaccgctttctatgccggaacacagccaccagtgatcggctatctcagtggacagcagcaggccatcacctacgccggttctcttccgcaacacctcgtgattcctggaacccagcctctgctcatccctgttggaagcacagacatggaagcctctggagcagctccagcaatcgtcaccagttctccacagtttgctgcagtgccacacacctttgtcactactgccctgccaaaatccgagaacttcaacccagaggctttggttacgcaagccgcttatcctgctatggtccaggcgcagattcacctgcctgtcgttcagagtgtggcctctcccgcagcggctcctcctaccctgccaccctactttatgaagggatccattatccagctggccaatggagagctcaaaaaagttgaagacctgaagaccgaggattttatccagtctgcagagattagcaacgacctaaagattgattcgagcactgtcgagaggatcgaggattctcacagcccaggggtggcggtgatccaattcgccgtaggcgaacatcgggctcaggtcagcgtcgaagttctcgtggaatatccgttcttcgtattcggacaagggtggtccagttgctgccccgagcgaacttcccagctgtttgatctgccttgctccaaactgagcgtgggtgacgtgtgcattagtttaaccttaaaaaatttgaagaatggctctgtgaaaaagggtcagcccgtagacccagcttcagtcttgctgaagcactcaaaagctgacggcctggccggttcccgtcatcggtatgctgaacaggagaacgggatcaatcagggcagcgctcagatgctgtctgaaaatggggaacttaaatttcctgaaaagatgggactgcccgcagctcccttcctgacgaagatcgaaccaagcaagcccgctgcgacgcgcaaaagaagatggtcggccccagagtctcggaaattagagaagtctgaggatgaaccacctctcacactcccgaagccctcacttatccctcaggaggttaagatttgcattgaaggcagatccaatgtaggaaaatag

SEQ ID NO: 45948 - DNA, 2448 bp, Artificial Sequence
  derived and/or modified sequence
atgaagtcaaatcaagagcgaagtaatgagtgcctgcctccaaaaaagcgagagatcccagccacctctcgaagttccgaggagaaggccccaacacttccatctgataaccatagggtggaaggcaccgcctggctcccgggaaaccctggtggacggggtcatggcggtggtcgccacggaccagccggaacgtccgtggagctggggctgcagcagggcattggcttgcacaaagcacttagtactggattggactattccccacccagcgctcccagaagcgtgccggttgccactacactgcctgctgcgtacgctacaccgcagcccggaacaccggtctcacccgtgcagtatgcgcatctcccccacacatttcagtttatcggaagcagccaatatagtggaacgtatgcttcattcattccatctcagctaatccccccaaccgccaaccccgttacatccgctgtggcgtccgctgcgggagccaccaccccatctcagcgcagccaactcgaggcctactccactctcttggctaacatgggaagcctgagtcagaccccgggtcacaaagcagagcagcagcagcagcagcagcagcagcaacaacagcagcaccagcatcaacagcaacaacagcaacagcagcagcagcagcagcagcaacacctctcccgtgccccaggtttaatcacacccggatccccccctcctgcgcagcagaaccagtacgtgcatatctccagttctccacagaacacaggaagaacagcatcaccacccgctattcctgtgcatctgcacccacaccaaaccatgattccacacacactcacactcggacccccatcacaggtcgtcatgcagtatgccgattcaggatcacacttcgtgcccagggaagcaactaaaaaagcagaatcttcccggctgcaacaagctatccaggcaaaagaggtgctgaacggagaaatggagaaatcccgcagatatggcgcacccagctctgcggacctgggcctgggcaaggcgggtggaaagagtgttccccacccttacgagagcaggcacgtggtcgtgcacccttctccgagtgattattctagcagagacccgagcggcgtcagagcgagcgtgatggtgctgcccaactcaaacacccccgctgccgatctggaagtacagcaagccacacacagagaagccagcccatccacacttaacgataaatccgggctgcacttaggaaagcctggccatagatcgtatgccctgagtcctcacactgtcattcagacaacgcattcagcctccgaaccgcttccagtgggattaccggcaaccgctttctatgcaggaactcagccccctgtgatcgggtatctgagtgggcagcaacaagcaattacctacgccggtagcctcccacagcatttagttatcccaggaactcagccactgctgattcccgtgggctccaccgacatggaggcctccggggctgctcccgctattgtgacatcaagtcctcagttcgccgcagtcccccacacttttgtcactactgctctgccaaaatcagagaactttaaccccgaggctcttgtgactcaggcggcttatccagctatggtgcaggctcagattcatcttcctgtggtgcagtctgtcgcttctccggctgcagccccaccaactctgcctccttattttatgaagggatccattatccaattagccaacggagaattaaaaaaagtcgaagacctgaagacagaggattttattcagtccgccgagatatcaaatgacctgaaaattgatagctcaacagtcgaacggattgaggattctcacagccccggtgtggcagtaattcaatttgctgtgggcgagcatcgggcacaggtcagcgtagaagtgttagttgagtatccattcttcgtattcggacaagggtggtcttcatgttgccccgagcggacgtctcagctattcgacttgccctgttccaagctcagtgtgggggacgtgtgcatttcacttacactaaaaaacctgaaaaacggctcagtcaagaagggccagcctgtggaccccgcttctgtattgctcaagcactcgaaggccgatggactcgccggaagtcgccacaggtacgcagaacaggaaaacggtataaatcaagggagcgctcagatgctgagcgagaacggagaattgaagtttccagaaaaaatgggcttacccgcagctccctttctgaccaagattgaacctagcaaacctgccgctactcgaaagcgccgatggtctgccccagaaagcagaaagctggagaaatcagaagatgagccccctctgactctgcccaaaccttctctaatacctcaggaagtgaagatatgtatcgagggacgcagcaacgtcggcaagtag

SEQ ID NO: 45949 - DNA, 2448 bp, Artificial Sequence
  derived and/or modified sequence
atgaaatctaaccaggagagatctaatgagtgcttgcctcctaagaagcgagagatccctgccacttccaggtcaagtgaagaaaaggcccctacgctccctagtgacaaccatcgggtcgaaggcacagcttggttaccaggcaacccaggaggcaggggccatggcggaggacgacatggcccagccggtacctccgtcgaactgggtctccaacaaggcataggacttcacaaggccctgagcacagggcttgactattctcctccttcagcgcctcgcagcgtgcccgtagctactacactccccgcagcctatgccacacctcaacctggaacaccagtcagtcccgtgcagtacgcccacctgccccacacttttcagtttatcggctcttcgcaatacagcgggacatatgcctcttttataccctcacagctgatccctccaaccgccaacccagtaacatccgccgtggcctcagctgccggagcaactacaccaagccagaggagccagctggaagcatattccacccttctcgcaaacatgggttctctctcccagacccccggacataaagccgagcagcagcagcaacagcagcagcagcagcagcagcaacatcaacaccaacagcagcagcaacagcagcagcaacagcagcaacagcaacacctgagtagagctcctggattgatcacgcctgggagcccccctccggcacaacaaaatcaatacgttcatatctcatcttcacctcagaacacgggacgaacagctagtcccccagccatcccagtgcatctccacccgcaccaaacaatgattccacataccctgaccctgggcccaccgagccaggtggttatgcagtacgctgattcagggtcgcattttgtgcctcgggaggcgacaaagaaagccgaaagctctcggctgcagcaagcaattcaggcaaaagaggtattgaacggagagatggagaagtctagaagatatggggctcctagctctgctgacttagggctgggcaaagcaggaggaaagtccgtacctcatccctacgaaagtagacatgtcgtcgttcatccctccccatcggactattcatccagggacccctctggagtaagagcaagcgtcatggtattgcccaacagcaacacaccagccgctgacctggaggtgcagcaagctacacacagagaggcctctccatctacactcaacgataagtcgggtcttcatcttggcaagcccggacaccggagttatgccctgtcaccccatacggtaattcagacgacccattcagcgagtgagccactgcctgtcggcctcccggcaacagccttctatgctgggacccaacctccagtgatcggatacctgagcggtcaacagcaggcaattacttacgccggttccttgccacaacatcttgtgattcctggtactcagcctttgttgatcccggtcggcagtactgacatggaggcgagcggggctgctccggctattgtgacatcctcccctcagttcgccgctgtcccacatacattcgtgactactgccctccccaaaagcgaaaactttaaccccgaggccctggtcacccaagccgcataccctgctatggttcaagctcagatacatctaccggtagtccagtccgtggcttcccctgccgctgctccacctacattgccaccgtacttcatgaagggcagcatcatccaactggcgaatggcgagttgaaaaaggtggaggacctgaaaacggaggacttcatacaaagtgcagagatctcaaacgatcttaaaatcgattcgtcaacggtcgaacggattgaagactcacactctcctggagtggccgttatccagttcgccgttggcgaacacagagcgcaagtgtctgtggaggttctcgtggagtaccctttttttgtatttggccaggggtggagctcttgctgcccagagcgaacctctcagctctttgatcttccctgtagtaaattgagcgtaggtgacgtctgtatctccctgacactcaagaaccttaagaacgggagtgtcaagaagggacaacctgtggaccccgcttcagtgctcctcaagcactcgaaggccgatgggttggctgggagcaggcacagatacgcagagcaggaaaacgggatcaatcaaggctccgcacaaatgctgtctgaaaacggtgagttgaaattccctgagaaaatgggactgcccgcagccccatttctgacaaagatcgagcccagcaaaccagcagccactcgcaagcgacgctggtccgccccagaatcaaggaaactcgagaagagcgaagatgagcctcctttgactctgcccaaaccctcacttatcccacaggaggtgaaaatctgcattgagggcagaagcaacgtgggcaaatag

SEQ ID NO: 45950 - DNA, 10603 bp, Artificial Sequence
  derived and/or modified sequence
ctactacagtggcggagccgtacaggacctgtttcactgcagggggatccaaaacaagccccgtggagcagcagccagagcaacagcagccgcaagacattgtttctctccctctgcccccccttccccacgcaaccccagatccatttacactttacagttttacctcacaaaaactactacaagcaccaagctccctgatggaaaggagcatcgtgcatcaagtcaccagggtggtccattcaagctgcagatttgtttgtcatccttgtacagcaatctcctcctccactgccactacagggaagtgcatcacatgtcagcatactggagcatagtgaaagagtctattttgaagcttcaaacttagtgctgctgcagaccaggaacaagagagaaagagtggatttcagcctgcacggatggtcttgaaacacaaatggtttttggtctaggcgttttacactgagattctccactgccaccctttctactcaagcaaaatcttcgtgaaaagatctgctgcaaggaactgatagcttatggttctccattgtgatgaaagcacatggtacagttttccaaagaaattagaccattttcttcgtgagaaagaaatcgacgtgctgttttcataggggtatttctcacttctctgtgaaaggaagaaagaacacgcctgagcccaagagccctcaggagccctccagagcctgtgggaagtctccatggtgaagtataggctgaggctacctgtgaacagtacgcagtgaatgttcatccagagctgctgttggcggattgtacccacggggagatgattcctcatgaagagcctggatcccctacagaaatcaaatgtgactttccgtttatcagactaaaatcagagccatccagacagtgaaacagtcaccgtggaggggggacggcgaaaaatgaaatccaaccaagagcggagcaacgaatgcctgcctcccaagaagcgcgagatccccgccaccagccggtcctccgaggagaaggcccctaccctgcccagcgacaaccaccgggtggagggcacagcatggctcccgggcaaccctggtggccggggccacgggggcgggaggcatgggccggcagggacctcggtggagcttggtttacaacagggaataggtttacacaaagcattgtccacagggctggactactccccgcccagcgctcccaggtctgtccccgtggccaccacgctgcctgccgcgtacgccaccccgcagccagggaccccggtgtcccccgtgcagtacgctcacctgccgcacaccttccagttcattgggtcctcccaatacagtggaacctatgccagcttcatcccatcacagctgatccccccaaccgccaaccccgtcaccagtgcagtggcctcggccgcaggggccaccactccatcccagcgctcccagctggaggcctattccactctgctggccaacatgggcagtctgagccagacgccgggacacaaggctgagcagcagcagcagcagcagcagcagcagcagcagcagcatcagcatcagcagcagcagcagcagcagcagcagcagcagcagcagcagcacctcagcagggctccggggctcatcaccccggggtcccccccaccagcccagcagaaccagtacgtccacatttccagttctccgcagaacaccggccgcaccgcctctcctccggccatccccgtccacctccacccccaccagacgatgatcccacacacgctcaccctggggcccccctcccaggtcgtcatgcaatacgccgactccggcagccactttgtccctcgggaggccaccaagaaagctgagagcagccggctgcagcaggccatccaggccaaggaggtcctgaacggtgagatggagaagagccggcggtacggggccccgtcctcagccgacctgggcctgggcaaggcaggcggcaagtcggttcctcacccgtacgagtccaggcacgtggtggtccacccgagcccctcagactacagcagtcgtgatccttcgggggtccgggcctctgtgatggtcctgcccaacagcaacacgcccgcagctgacctggaggtgcaacaggccactcatcgtgaagcctccccttctaccctcaacgacaaaagtggcctgcatttagggaagcctggccaccggtcctacgcgctctcaccccacacggtcattcagaccacacacagtgcttcagagccactcccggtgggactgccagccacggccttctacgcagggactcaaccccctgtcatcggctacctgagcggccagcagcaagcaatcacctacgccggcagcctgccccagcacctggtgatccccggcacacagcccctgctcatcccggtcggcagcactgacatggaagcgtcgggggcagccccggccatagtcacgtcatccccccagtttgctgcagtgcctcacacgttcgtcaccaccgcccttcccaagagcgagaacttcaaccctgaggccctggtcacccaggccgcctacccagccatggtgcaggcccagatccacctgcctgtggtgcagtccgtggcctccccggcggcggctccccctacgctgcctccctacttcatgaaaggctccatcatccagttggccaacggggagctaaagaaggtggaagacttaaaaacagaagatttcatccagagtgcagagataagcaacgacctgaagatcgactccagcaccgtagagaggattgaagacagccatagcccgggcgtggccgtgatacagttcgccgtcggggagcaccgagcccaggtcagcgttgaagttttggtagagtatcctttttttgtgtttggacagggctggtcatcctgctgtccggagagaaccagccagctctttgatttgccgtgttccaaactctcagttggggatgtctgcatctcgcttaccctcaagaacctgaagaacggctctgttaaaaagggccagcccgtggatcccgccagcgtcctgctgaagcactcaaaggccgacggcctggcgggcagcagacacaggtatgccgagcaggaaaacggaatcaaccaggggagtgcccagatgctctctgagaatggcgaactgaagtttccagagaaaatgggattgcctgcagcgcccttcctcaccaaaatagaacccagcaagcccgcggcaacgaggaagaggaggtggtcggcgccagagagccgcaaactggagaagtcagaagacgaaccacctttgactcttcctaagccttctctaattcctcaggaggttaagatttgcattgaaggccggtctaatgtaggcaagtagaggcagcgtgggggaaaggaaacgtggctctcccttatcatttgtatccagattactgtactgtaggctaaaataacacagtatttacatgttatcttcttaattttaggtttctgttctaaccttgtcattagagttacagcaggtgtgtcgcaggagactggtgcatatgctttttccacgagtgtctgtcagtgagcgggcgggaggaagggcacagcaggagcggtcagggctccaggcatccccggggaagaaaggaacggggcttcacagtgcctgccttctctagcggcacagaagcagccgggggcgctgactcccgctagtgtcaggagaaaagtcccgtgggaagggtcctgcaggggtgcagggttgcacgcatgtgggggtgcacaggcgctgtggcggcgagtgagggtctctttttctctgcctccctctgcctcactctcttgctatcggcatgggccgggggggttcagagcagtgtcctcctggggttcccacgtgcaaaatcaacatcaggaacccagcttcagggcatcgcggagacgcgtcagatggcagatttggaaagttaaccatttaaaagaacatttttctctccaacatattttacaataaaagcaacttttaattgtatagatatatatttccccctatggggcctgactgcactgatatatattttttttaaagagcaactgccacatgcgggatttcatttctgctttttactagtgcagcgatgtcaccagggtgttgtggtggacagggaagcccctgctgtcatggccccacatggggtaaggggggttgggggtgggggagagggagagagcgaacacccacgctggtttctgtgcagtgttaggaaaaccaatcaggttattgcattgacttcactcccaagaggtagatgcaaactgcccttcagtgagagcaacagaagctcttcacgttgagtttgcgaaatctttttgtctttgaactctagtactgtttatagttcatgactatggacaactcgggtgccactttttttttttttcagattccagtgtgacatgaggaattagattttgaagatgagcatatattactatctttaagcatttaaaaatactgttcacactttattaccaagcatcttggtctctcattcaacaagtactgtatctcactttaaactctttggggaaaaaacaaaaacaaaaaaaactaagttgctttctttttttcaacactgtaactacatttcagctctgcagaattgctgaagagcaagatattgaaagtttcaatgtggtttaaagggatgaatgtgaattatgaactagtatgtgacaataaatgaccaccaagtactacctgacgggaggcacttttcactttgatgtctgagaatcagttcaaggcatatgcagagttggcagagaaactgagagaaaagggatggagaagagaatactcatttttgtccagtgtttttctttttaagatgaacttttaaagaaccttgcgatttgcacatattgagtttataacttgtgtgatattcctgcagtttttatccaataacattgtgggaaaggtttgggggactgaacgagcataaataaatgtagcaaaatttctttctaacctgcctaaactctaggccattttataaggttatgttcctttgaaaattcattttggtctttttaccacatctgtcacaaaaagccaggtcttagcgggctcttagaaactctgagaattttcttcagattcattgagagagttttccataaagacatttatatatgtgagcaagattttttttaaacaattactttattattgttgttattaatgttattttcagaatggcttttttttttctattcaaaatcaaatcgagatttaatgtttggtacaaacccagaaagggtatttcatagtttttaaacctttcattcccagagatccgaaatatcatttgtgggttttgaatgcatctttaaagtgctttaaaaaaaagttttataagtagggagaaatttttaaatattcttacttggatggctgcaactaaactgaacaaatacctgacttttcttttaccccattgaaaatagtactttcttcgtttcacaaattaaaaaaaaaatctggtatcaacccacattttggctgtctagtattcatttacatttagggttcaccaggactaatgatttttataaaccgttttctggggtgtaccaaaaacatttgaataggtttagaatagctagaatagttccttgactttcctcgaatttcattaccctctcagcatgcttgcagagagctgggtgggctcattcttgcagtcatactgcttatttagtgctgtattttttaaacgtttctgttcagagaacttgcttaatcttccatatattctgctcagggcacttgcaattattaggttttgtttttctttttgttttttagcctttgatggtaagaggaatacgggctgccacatagactttgttctcattaatatcactatttacaactcatgtggactcagaaaaacacacaccaccttttggcttacttcgagtattgaattgactggatccactaaaccaacactaagatgggaaaacacacatggtttggagcaataggaacatcatcataatttttgtggttctatttcaggtataggaattataaaataattggttctttctaaacacttgtcccatttcattctcttgcttttttagcatgtgcaatactttctgtgccaatagagtctgaccagtgtgctatatagttaaagctcattcccttttggctttttccttgtttggttgatcttccccattctggccagagcagggctggagggaaggagccaggagggagagagcctcccacctttcccctgctgcggatgctgagtgctggggcggggagccttcaggagccccgtgcgtctgccgccacgttgcagaaagagccagccaaggagacccgggggaggaaccgcagtgtcccctgtcaccacacggaatagtgaatgtggagtgtggagaggaaggaggcagattcatttctaagacgcactctggagccatgtagcctggagtcaacccattttccacggtcttttctgcaagtgggcaggcccctcctcggggtctgtgtccttgagacttggagccctgcctctgagcctggacgggaagtgtggcctgttgtgtgtgtgcgttctgagcgtgttggccagtggctgtggaggggaccacctgccacccacggtcaccactcccttgtggcagctttctcttcaaataggaagaacgcacagagggcaggagcctcctgtttgcagacgttggcgggccccgaggctcccagagcagcctctgtcaccgcttctgtgtagcaaacattaacgatgacaggggtagaaattcttcggtgccgttcagcttacaaggatcagccatgtgcctctgtactatgtccactttgcaatatttaccgacagccgtcttttgttctttctttcctgttttccatttttaaactagtaacagcaggccttttgcgtttacaatggaacacaatcaccaagaaattagtcagggcgaaaagaaaaaaataatactattaataagaaaccaacaaacaagaacctctctttctagggatttctaaatatataaaatgactgttccttagaatgtttaacttaagaattatttcagtttgtctgggccacactggggcagaggggggagggagggatacagagatggatgccacttacctcagatcttttaaagtggaaatccaaattgaattttcatttggactttcaggataattttctatgttggtcaacttttcgttttccctaactcacccagtttagtttgggatgatttgatttctgttgttgttgatcccatttctaacttggaattgtgagcctctatgttttctgttaggtgagtgtgttgggttttttccccccaccaggaagtggcagcatccctccttctcccctaaagggactctgcggaacctttcacacctctttctcagggacggggcaggtgtgtgtgtggtacactgacgtgtccagaagcagcactttgactgctctggagtagggttgtacaatttcaaggaatgtttggatttcctgcatcttgtggattactccttagataccgcatagattgcaatataatgctgcatgttcaagatgaacagtagctcctagtaatcataaaatccactctttgcacagtttgatctttactgaaatatgttgccaaaatttatttttgttgttgtagctctggattttgttttgttttgttttttaaggaaacgattgacaataccctttaacatctgtgactactaaggaaacctatttctttcatagagagaaaaatctccaatgcttttgaagacactaataccgtgctatttcagatatgggtgaggaagcagagctctcggtaccgaaggccgggcttcttgagctgtgttggttgtcatggctactgtttcatgaaccacaagcagctcaacagactggtctgttgccttctgaaaccctttgcacttcaatttgcaccaggtgaaaacagggccagcagactccatggcccaattcggtttcttcggtggtgatgtgaaaggagagaattacactttttttttttttaagtggcgtggaggcctttgcttccacatttgtttttaacccagaatttctgaaatagagaatttaagaacacatcaagtaataaatatacagagaatatacttttttataaagcacatgcatctgctattgtgttgggttggtttcctctcttttccacggacagtgttgtgtttctggcatagggaaactccaaacaacttgcacacctctactccggagctgagatttcttttacatagatgacctcgcttcaaatacgttaccttactgatgataggatcttttcttgtagcactataccttgtgggaatttttttttaaatgtacacctgatttgagaagctgaagaaaacaaaattttgaagcactcactttgaggagtacaggtaatgttttaaaaaattgcacaaaagaaaaatgaatgtcgaaatgattcattcagtgtttgaaagatatggctctgttgaaacaatgagtttcatactttgtttgtaaaaaaaaaaaagcagagaagggttgaaagttacatgtttttttgtatatagaaatttgtcatgtctaaatgatcagatttgtatggttatggcctggaagaattactacgtaaaaggctcttaaactatacctatgcttattgttatttttgttacatatagccctcgtctgagggaggggaactcggtattctgcgatttgagaatactgttcattcctatgctgaaagtacttctctgagctcccttcttagtctaaactcttaagccattgcaacttctttttcttcagagatgatgtttgacattttcagcacttcctgttcctataaacccaaagaatataatcttgaacacgaagtgtttgtaacaagggatccaggctaccaatcaaacaggactcattatggggacaaaaaaaaaaattatttcaccttctttccccccacacctcatttaaatggggggagtaaaaacatgatttcaatgtaaatgcctcattttattttagttttattttgatttttatttaatataaagaggccagaataaatacggagcatcttctcagaatagtattcctgtccaaaaatcaagccggacagtggaaactggacagctgtggggatattaagcacccccacttacaattcttaaattcagaatctcgtcccctcccttctcgttgaaggcaactgttctggtagctaactttctcctgtgtaatggcgggagggaacaccggcttcagtttttcatgtccccatgacttgcatacaaatggttcaactgtattaaaattaagtgcatttggccaataggtagtatctatacaataacaacaatctctaagaatttccataacttttcttatctgaaaggactcaagtcttccactgcagatacattggaggcttcacccacgttttctttccctttagtttgtttgctgtctggatggccaatgagcctgtctccttttctgtggccaatctgaaggccttcgttggaagtgttgtttacagtaatccttaccaagataacatactgtcctccagaataccaagtattaggtgacactagctcaagctgttgtcttcagagcagttaccaagaagctcggtgcacaggttttctctggttcttacaggaaccacctactctttcagttttctggcccaggagtggggtaaatcctttagttagtgcatttgaacttgatacctgtgcattcagttctgtgaatactgccctttttggcggggtttcctcatctccccagcctgaactgctcaactctaaacccaaattagtgtcagccgaaaggaggtttcaagatagtcctgtcagtatttgtggtgaccttcagattagacagtcttcatttccagccagtggagtcctggctccagagccatctctgagactcgtactactggatgttttaatatcagatcattacccaccatatgcctcccacaggccaagggaaaacagacaccagaacttgggttgagggcactaccagactgacatggccagtacagaggagaactagggaaggaatgatgttttgcaccttattgaaaagaaaattttaagtgcatacataatagttaagagcttttattgtgacaggagaacttttttccatatgcgtgcatactctctgtaattccagtgtaaaatattgtacttgcactagcttttttaaacaaatattaaaaaatggaagaattcatattctattttctaatcgtggtgtgtctatttgtaggatacactcgagtctgtttattgaattttatggtccctttctttgatggtgcttgcaggttttctaggtagaaattatttcattattataataaaacaatgtttgattcaaaatttgaacaaaattgttttaaataaattgtctgtataccagtacaagtttattgtttcagtatactcgtactaataaaataacagtgccaattgca

SEQ ID NO: 45951 - DNA, 10587 bp, Artificial Sequence
  derived and/or modified sequence
gaggagagagcagagtataccgcagacatcatttctactacagtggcggagccgtacaggacctgtttcactgcagggggatccaaaacaagccccgtggagcagcagccagagcaacagcagccgcaagacattgtttctctccctctgcccccccttccccacgcaaccccagatccatttacactttacagagcatcgtgcatcaagtcaccagggtggtccattcaagctgcagatttgtttgtcatccttgtacagcaatctcctcctccactgccactacagggaagtgcatcacatgtcagcatactggagcatagtgaaagagtctattttgaagcttcaaacttagtgctgctgcagaccaggaacaagagagaaagagtggatttcagcctgcacggatggtcttgaaacacaaatggtttttggtctaggcgttttacactgagattctccactgccaccctttctactcaagcaaaatcttcgtgaaaagatctgctgcaaggaactgatagcttatggttctccattgtgatgaaagcacatggtacagttttccaaagaaattagaccattttcttcgtgagaaagaaatcgacgtgctgttttcatagggtatttctcacttctctgtgaaaggaagaaagaacacgcctgagcccaagagccctcaggagccctccagagcctgtgggaagtctccatggtgaagtataggctgaggctacctgtgaacagtacgcagtgaatgttcatccagagctgctgttggcggattgtacccacggggagatgattcctcatgaagagcctggatcccctacagaaatcaaatgtgactttccgtttatcagactaaaatcagagccatccagacagtgaaacagtcaccgtggaggggggacggcgaaaaatgaaatccaaccaagagcggagcaacgaatgcctgcctcccaagaagcgcgagatccccgccaccagccggtcctccgaggagaaggcccctaccctgcccagcgacaaccaccgggtggagggcacagcatggctcccgggcaaccctggtggccggggccacgggggcgggaggcatgggccggcagggacctcggtggagcttggtttacaacagggaataggtttacacaaagcattgtccacagggctggactactccccgcccagcgctcccaggtctgtccccgtggccaccacgctgcctgccgcgtacgccaccccgcagccagggaccccggtgtcccccgtgcagtacgctcacctgccgcacaccttccagttcattgggtcctcccaatacagtggaacctatgccagcttcatcccatcacagctgatccccccaaccgccaaccccgtcaccagtgcagtggcctcggccgcaggggccaccactccatcccagcgctcccagctggaggcctattccactctgctggccaacatgggcagtctgagccagacgccgggacacaaggctgagcagcagcagcagcagcagcagcagcagcagcagcagcatcagcatcagcagcagcagcagcagcagcagcagcagcagcagcagcagcacctcagcagggctccggggctcatcaccccggggtcccccccaccagcccagcagaaccagtacgtccacatttccagttctccgcagaacaccggccgcaccgcctctcctccggccatccccgtccacctccacccccaccagacgatgatcccacacacgctcaccctggggcccccctcccaggtcgtcatgcaatacgccgactccggcagccactttgtccctcgggaggccaccaagaaagctgagagcagccggctgcagcaggccatccaggccaaggaggtcctgaacggtgagatggagaagagccggcggtacggggccccgtcctcagccgacctgggcctgggcaaggcaggcggcaagtcggttcctcacccgtacgagtccaggcacgtggtggtccacccgagcccctcagactacagcagtcgtgatccttcgggggtccgggcctctgtgatggtcctgcccaacagcaacacgcccgcagctgacctggaggtgcaacaggccactcatcgtgaagcctccccttctaccctcaacgacaaaagtggcctgcatttagggaagcctggccaccggtcctacgcgctctcaccccacacggtcattcagaccacacacagtgcttcagagccactcccggtgggactgccagccacggccttctacgcagggactcaaccccctgtcatcggctacctgagcggccagcagcaagcaatcacctacgccggcagcctgccccagcacctggtgatccccggcacacagcccctgctcatcccggtcggcagcactgacatggaagcgtcgggggcagccccggccatagtcacgtcatccccccagtttgctgcagtgcctcacacgttcgtcaccaccgcccttcccaagagcgagaacttcaaccctgaggccctggtcacccaggccgcctacccagccatggtgcaggcccagatccacctgcctgtggtgcagtccgtggcctccccggcggcggctccccctacgctgcctccctacttcatgaaaggctccatcatccagttggccaacggggagctaaagaaggtggaagacttaaaaacagaagatttcatccagagtgcagagataagcaacgacctgaagatcgactccagcaccgtagagaggattgaagacagccatagcccgggcgtggccgtgatacagttcgccgtcggggagcaccgagcccaggtcagcgttgaagttttggtagagtatcctttttttgtgtttggacagggctggtcatcctgctgtccggagagaaccagccagctctttgatttgccgtgttccaaactctcagttggggatgtctgcatctcgcttaccctcaagaacctgaagaacggctctgttaaaaagggccagcccgtggatcccgccagcgtcctgctgaagcactcaaaggccgacggcctggcgggcagcagacacaggtatgccgagcaggaaaacggaatcaaccaggggagtgcccagatgctctctgagaatggcgaactgaagtttccagagaaaatgggattgcctgcagcgcccttcctcaccaaaatagaacccagcaagcccgcggcaacgaggaagaggaggtggtcggcgccagagagccgcaaactggagaagtcagaagacgaaccacctttgactcttcctaagccttctctaattcctcaggaggttaagatttgcattgaaggccggtctaatgtaggcaagtagaggcagcgtgggggaaaggaaacgtggctctcccttatcatttgtatccagattactgtactgtaggctaaaataacacagtatttacatgttatcttcttaattttaggtttctgttctaaccttgtcattagagttacagcaggtgtgtcgcaggagactggtgcatatgctttttccacgagtgtctgtcagtgagcgggcgggaggaagggcacagcaggagcggtcagggctccaggcatccccggggaagaaaggaacggggcttcacagtgcctgccttctctagcggcacagaagcagccgggggcgctgactcccgctagtgtcaggagaaaagtcccgtgggaagggtcctgcaggggtgcagggttgcacgcatgtgggggtgcacaggcgctgtggcggcgagtgagggtctctttttctctgcctccctctgcctcactctcttgctatcggcatgggccgggggggttcagagcagtgtcctcctggggttcccacgtgcaaaatcaacatcaggaacccagcttcagggcatcgcggagacgcgtcagatggcagatttggaaagttaaccatttaaaagaacatttttctctccaacatattttacaataaaagcaacttttaattgtatagatatatatttccccctatggggcctgactgcactgatatatattttttttaaagagcaactgccacatgcgggatttcatttctgctttttactagtgcagcgatgtcaccagggtgttgtggtggacagggaagcccctgctgtcatggccccacatggggtaaggggggttgggggtgggggagagggagagagcgaacacccacgctggtttctgtgcagtgttaggaaaaccaatcaggttattgcattgacttcactcccaagaggtagatgcaaactgcccttcagtgagagcaacagaagctcttcacgttgagtttgcgaaatctttttgtctttgaactctagtactgtttatagttcatgactatggacaactcgggtgccactttttttttttttcagattccagtgtgacatgaggaattagattttgaagatgagcatatattactatctttaagcatttaaaaatactgttcacactttattaccaagcatcttggtctctcattcaacaagtactgtatctcactttaaactctttggggaaaaaacaaaaacaaaaaaaactaagttgctttctttttttcaacactgtaactacatttcagctctgcagaattgctgaagagcaagatattgaaagtttcaatgtggtttaaagggatgaatgtgaattatgaactagtatgtgacaataaatgaccaccaagtactacctgacgggaggcacttttcactttgatgtctgagaatcagttcaaggcatatgcagagttggcagagaaactgagagaaaagggatggagaagagaatactcatttttgtccagtgtttttctttttaagatgaacttttaaagaaccttgcgatttgcacatattgagtttataacttgtgtgatattcctgcagtttttatccaataacattgtgggaaaggtttgggggactgaacgagcataaataaatgtagcaaaatttctttctaacctgcctaaactctaggccattttataaggttatgttcctttgaaaattcattttggtctttttaccacatctgtcacaaaaagccaggtcttagcgggctcttagaaactctgagaattttcttcagattcattgagagagttttccataaagacatttatatatgtgagcaagattttttttaaacaattactttattattgttgttattaatgttattttcagaatggcttttttttttctattcaaaatcaaatcgagatttaatgtttggtacaaacccagaaagggtatttcatagtttttaaacctttcattcccagagatccgaaatatcatttgtgggttttgaatgcatctttaaagtgctttaaaaaaaagttttataagtagggagaaatttttaaatattcttacttggatggctgcaactaaactgaacaaatacctgacttttcttttaccccattgaaaatagtactttcttcgtttcacaaattaaaaaaaaaatctggtatcaacccacattttggctgtctagtattcatttacatttagggttcaccaggactaatgatttttataaaccgttttctggggtgtaccaaaaacatttgaataggtttagaatagctagaatagttccttgactttcctcgaatttcattaccctctcagcatgcttgcagagagctgggtgggctcattcttgcagtcatactgcttatttagtgctgtattttttaaacgtttctgttcagagaacttgcttaatcttccatatattctgctcagggcacttgcaattattaggttttgtttttctttttgttttttagcctttgatggtaagaggaatacgggctgccacatagactttgttctcattaatatcactatttacaactcatgtggactcagaaaaacacacaccaccttttggcttacttcgagtattgaattgactggatccactaaaccaacactaagatgggaaaacacacatggtttggagcaataggaacatcatcataatttttgtggttctatttcaggtataggaattataaaataattggttctttctaaacacttgtcccatttcattctcttgcttttttagcatgtgcaatactttctgtgccaatagagtctgaccagtgtgctatatagttaaagctcattcccttttggctttttccttgtttggttgatcttccccattctggccagagcagggctggagggaaggagccaggagggagagagcctcccacctttcccctgctgcggatgctgagtgctggggcggggagccttcaggagccccgtgcgtctgccgccacgttgcagaaagagccagccaaggagacccgggggaggaaccgcagtgtcccctgtcaccacacggaatagtgaatgtggagtgtggagaggaaggaggcagattcatttctaagacgcactctggagccatgtagcctggagtcaacccattttccacggtcttttctgcaagtgggcaggcccctcctcggggtctgtgtccttgagacttggagccctgcctctgagcctggacgggaagtgtggcctgttgtgtgtgtgcgttctgagcgtgttggccagtggctgtggaggggaccacctgccacccacggtcaccactcccttgtggcagctttctcttcaaataggaagaacgcacagagggcaggagcctcctgtttgcagacgttggcgggccccgaggctcccagagcagcctctgtcaccgcttctgtgtagcaaacattaacgatgacaggggtagaaattcttcggtgccgttcagcttacaaggatcagccatgtgcctctgtactatgtccactttgcaatatttaccgacagccgtcttttgttctttctttcctgttttccatttttaaactagtaacagcaggccttttgcgtttacaatggaacacaatcaccaagaaattagtcagggcgaaaagaaaaaaataatactattaataagaaaccaacaaacaagaacctctctttctagggatttctaaatatataaaatgactgttccttagaatgtttaacttaagaattatttcagtttgtctgggccacactggggcagaggggggagggagggatacagagatggatgccacttacctcagatcttttaaagtggaaatccaaattgaattttcatttggactttcaggataattttctatgttggtcaacttttcgttttccctaactcacccagtttagtttgggatgatttgatttctgttgttgttgatcccatttctaacttggaattgtgagcctctatgttttctgttaggtgagtgtgttgggttttttccccccaccaggaagtggcagcatccctccttctcccctaaagggactctgcggaacctttcacacctctttctcagggacggggcaggtgtgtgtgtggtacactgacgtgtccagaagcagcactttgactgctctggagtagggttgtacaatttcaaggaatgtttggatttcctgcatcttgtggattactccttagataccgcatagattgcaatataatgctgcatgttcaagatgaacagtagctcctagtaatcataaaatccactctttgcacagtttgatctttactgaaatatgttgccaaaatttatttttgttgttgtagctctggattttgttttgttttgttttttaaggaaacgattgacaataccctttaacatctgtgactactaaggaaacctatttctttcatagagagaaaaatctccaatgcttttgaagacactaataccgtgctatttcagatatgggtgaggaagcagagctctcggtaccgaaggccgggcttcttgagctgtgttggttgtcatggctactgtttcatgaaccacaagcagctcaacagactggtctgttgccttctgaaaccctttgcacttcaatttgcaccaggtgaaaacagggccagcagactccatggcccaattcggtttcttcggtggtgatgtgaaaggagagaattacactttttttttttttaagtggcgtggaggcctttgcttccacatttgtttttaacccagaatttctgaaatagagaatttaagaacacatcaagtaataaatatacagagaatatacttttttataaagcacatgcatctgctattgtgttgggttggtttcctctcttttccacggacagtgttgtgtttctggcatagggaaactccaaacaacttgcacacctctactccggagctgagatttcttttacatagatgacctcgcttcaaatacgttaccttactgatgataggatcttttcttgtagcactataccttgtgggaatttttttttaaatgtacacctgatttgagaagctgaagaaaacaaaattttgaagcactcactttgaggagtacaggtaatgttttaaaaaattgcacaaaagaaaaatgaatgtcgaaatgattcattcagtgtttgaaagatatggctctgttgaaacaatgagtttcatactttgtttgtaaaaaaaaaaaagcagagaagggttgaaagttacatgtttttttgtatatagaaatttgtcatgtctaaatgatcagatttgtatggttatggcctggaagaattactacgtaaaaggctcttaaactatacctatgcttattgttatttttgttacatatagccctcgtctgagggaggggaactcggtattctgcgatttgagaatactgttcattcctatgctgaaagtacttctctgagctcccttcttagtctaaactcttaagccattgcaacttctttttcttcagagatgatgtttgacattttcagcacttcctgttcctataaacccaaagaatataatcttgaacacgaagtgtttgtaacaagggatccaggctaccaatcaaacaggactcattatggggacaaaaaaaaaaattatttcaccttctttccccccacacctcatttaaatggggggagtaaaaacatgatttcaatgtaaatgcctcattttattttagttttattttgatttttatttaatataaagaggccagaataaatacggagcatcttctcagaatagtattcctgtccaaaaatcaagccggacagtggaaactggacagctgtggggatattaagcacccccacttacaattcttaaattcagaatctcgtcccctcccttctcgttgaaggcaactgttctggtagctaactttctcctgtgtaatggcgggagggaacaccggcttcagtttttcatgtccccatgacttgcatacaaatggttcaactgtattaaaattaagtgcatttggccaataggtagtatctatacaataacaacaatctctaagaatttccataacttttcttatctgaaaggactcaagtcttccactgcagatacattggaggcttcacccacgttttctttccctttagtttgtttgctgtctggatggccaatgagcctgtctccttttctgtggccaatctgaaggccttcgttggaagtgttgtttacagtaatccttaccaagataacatactgtcctccagaataccaagtattaggtgacactagctcaagctgttgtcttcagagcagttaccaagaagctcggtgcacaggttttctctggttcttacaggaaccacctactctttcagttttctggcccaggagtggggtaaatcctttagttagtgcatttgaacttgatacctgtgcattcagttctgtgaatactgccctttttggcggggtttcctcatctccccagcctgaactgctcaactctaaacccaaattagtgtcagccgaaaggaggtttcaagatagtcctgtcagtatttgtggtgaccttcagattagacagtcttcatttccagccagtggagtcctggctccagagccatctctgagactcgtactactggatgttttaatatcagatcattacccaccatatgcctcccacaggccaagggaaaacagacaccagaacttgggttgagggcactaccagactgacatggccagtacagaggagaactagggaaggaatgatgttttgcaccttattgaaaagaaaattttaagtgcatacataatagttaagagcttttattgtgacaggagaacttttttccatatgcgtgcatactctctgtaattccagtgtaaaatattgtacttgcactagcttttttaaacaaatattaaaaaatggaagaattcatattctattttctaatcgtggtgtgtctatttgtaggatacactcgagtctgtttattgaattttatggtccctttctttgatggtgcttgcaggttttctaggtagaaattatttcattattataataaaacaatgtttgattcaaaatttgaacaaaattgttttaaataaattgtctgtataccagtacaagtttattgtttcagtatactcgtactaataaaataacagtgccaattgca

SEQ ID NO: 45952 - DNA, 10636 bp, Artificial Sequence
  derived and/or modified sequence
gaggagagagcagagtataccgcagacatcatttctactacagtggcggagccgtacaggacctgtttcactgcagggggatccaaaacaagccccgtggagcagcagccagagcaacagcagccgcaagacattgtttctctccctctgcccccccttccccacgcaaccccagatccatttacactttacagttttacctcacaaaaactactacaagcaccaagctccctgatggaaaggagcatcgtgcatcaagtcaccagggtggtccattcaagctgcagatttgtttgtcatccttgtacagcaatctcctcctccactgccactacagggaagtgcatcacatgtcagcatactggagcatagtgaaagagtctattttgaagcttcaaacttagtgctgctgcagaccaggaacaagagagaaagagtggatttcagcctgcacggatggtcttgaaacacaaatggtttttggtctaggcgttttacactgagattctccactgccaccctttctactcaagcaaaatcttcgtgaaaagatctgctgcaaggaactgatagcttatggttctccattgtgatgaaagcacatggtacagttttccaaagaaattagaccattttcttcgtgagaaagaaatcgacgtgctgttttcatagggtatttctcacttctctgtgaaaggaagaaagaacacgcctgagcccaagagccctcaggagccctccagagcctgtgggaagtctccatggtgaagtataggctgaggctacctgtgaacagtacgcagtgaatgttcatccagagctgctgttggcggattgtacccacggggagatgattcctcatgaagagcctggatcccctacagaaatcaaatgtgactttccgtttatcagactaaaatcagagccatccagacagtgaaacagtcaccgtggaggggggacggcgaaaaatgaaatccaaccaagagcggagcaacgaatgcctgcctcccaagaagcgcgagatccccgccaccagccggtcctccgaggagaaggcccctaccctgcccagcgacaaccaccgggtggagggcacagcatggctcccgggcaaccctggtggccggggccacgggggcgggaggcatgggccggcagggacctcggtggagcttggtttacaacagggaataggtttacacaaagcattgtccacagggctggactactccccgcccagcgctcccaggtctgtccccgtggccaccacgctgcctgccgcgtacgccaccccgcagccagggaccccggtgtcccccgtgcagtacgctcacctgccgcacaccttccagttcattgggtcctcccaatacagtggaacctatgccagcttcatcccatcacagctgatccccccaaccgccaaccccgtcaccagtgcagtggcctcggccgcaggggccaccactccatcccagcgctcccagctggaggcctattccactctgctggccaacatgggcagtctgagccagacgccgggacacaaggctgagcagcagcagcagcagcagcagcagcagcagcagcagcatcagcatcagcagcagcagcagcagcagcagcagcagcagcagcagcagcacctcagcagggctccggggctcatcaccccggggtcccccccaccagcccagcagaaccagtacgtccacatttccagttctccgcagaacaccggccgcaccgcctctcctccggccatccccgtccacctccacccccaccagacgatgatcccacacacgctcaccctggggcccccctcccaggtcgtcatgcaatacgccgactccggcagccactttgtccctcgggaggccaccaagaaagctgagagcagccggctgcagcaggccatccaggccaaggaggtcctgaacggtgagatggagaagagccggcggtacggggccccgtcctcagccgacctgggcctgggcaaggcaggcggcaagtcggttcctcacccgtacgagtccaggcacgtggtggtccacccgagcccctcagactacagcagtcgtgatccttcgggggtccgggcctctgtgatggtcctgcccaacagcaacacgcccgcagctgacctggaggtgcaacaggccactcatcgtgaagcctccccttctaccctcaacgacaaaagtggcctgcatttagggaagcctggccaccggtcctacgcgctctcaccccacacggtcattcagaccacacacagtgcttcagagccactcccggtgggactgccagccacggccttctacgcagggactcaaccccctgtcatcggctacctgagcggccagcagcaagcaatcacctacgccggcagcctgccccagcacctggtgatccccggcacacagcccctgctcatcccggtcggcagcactgacatggaagcgtcgggggcagccccggccatagtcacgtcatccccccagtttgctgcagtgcctcacacgttcgtcaccaccgcccttcccaagagcgagaacttcaaccctgaggccctggtcacccaggccgcctacccagccatggtgcaggcccagatccacctgcctgtggtgcagtccgtggcctccccggcggcggctccccctacgctgcctccctacttcatgaaaggctccatcatccagttggccaacggggagctaaagaaggtggaagacttaaaaacagaagatttcatccagagtgcagagataagcaacgacctgaagatcgactccagcaccgtagagaggattgaagacagccatagcccgggcgtggccgtgatacagttcgccgtcggggagcaccgagcccaggtcagcgttgaagttttggtagagtatcctttttttgtgtttggacagggctggtcatcctgctgtccggagagaaccagccagctctttgatttgccgtgttccaaactctcagttggggatgtctgcatctcgcttaccctcaagaacctgaagaacggctctgttaaaaagggccagcccgtggatcccgccagcgtcctgctgaagcactcaaaggccgacggcctggcgggcagcagacacaggtatgccgagcaggaaaacggaatcaaccaggggagtgcccagatgctctctgagaatggcgaactgaagtttccagagaaaatgggattgcctgcagcgcccttcctcaccaaaatagaacccagcaagcccgcggcaacgaggaagaggaggtggtcggcgccagagagccgcaaactggagaagtcagaagacgaaccacctttgactcttcctaagccttctctaattcctcaggaggttaagatttgcattgaaggccggtctaatgtaggcaagtagaggcagcgtgggggaaaggaaacgtggctctcccttatcatttgtatccagattactgtactgtaggctaaaataacacagtatttacatgttatcttcttaattttaggtttctgttctaaccttgtcattagagttacagcaggtgtgtcgcaggagactggtgcatatgctttttccacgagtgtctgtcagtgagcgggcgggaggaagggcacagcaggagcggtcagggctccaggcatccccggggaagaaaggaacggggcttcacagtgcctgccttctctagcggcacagaagcagccgggggcgctgactcccgctagtgtcaggagaaaagtcccgtgggaagggtcctgcaggggtgcagggttgcacgcatgtgggggtgcacaggcgctgtggcggcgagtgagggtctctttttctctgcctccctctgcctcactctcttgctatcggcatgggccgggggggttcagagcagtgtcctcctggggttcccacgtgcaaaatcaacatcaggaacccagcttcagggcatcgcggagacgcgtcagatggcagatttggaaagttaaccatttaaaagaacatttttctctccaacatattttacaataaaagcaacttttaattgtatagatatatatttccccctatggggcctgactgcactgatatatattttttttaaagagcaactgccacatgcgggatttcatttctgctttttactagtgcagcgatgtcaccagggtgttgtggtggacagggaagcccctgctgtcatggccccacatggggtaaggggggttgggggtgggggagagggagagagcgaacacccacgctggtttctgtgcagtgttaggaaaaccaatcaggttattgcattgacttcactcccaagaggtagatgcaaactgcccttcagtgagagcaacagaagctcttcacgttgagtttgcgaaatctttttgtctttgaactctagtactgtttatagttcatgactatggacaactcgggtgccactttttttttttttcagattccagtgtgacatgaggaattagattttgaagatgagcatatattactatctttaagcatttaaaaatactgttcacactttattaccaagcatcttggtctctcattcaacaagtactgtatctcactttaaactctttggggaaaaaacaaaaacaaaaaaaactaagttgctttctttttttcaacactgtaactacatttcagctctgcagaattgctgaagagcaagatattgaaagtttcaatgtggtttaaagggatgaatgtgaattatgaactagtatgtgacaataaatgaccaccaagtactacctgacgggaggcacttttcactttgatgtctgagaatcagttcaaggcatatgcagagttggcagagaaactgagagaaaagggatggagaagagaatactcatttttgtccagtgtttttctttttaagatgaacttttaaagaaccttgcgatttgcacatattgagtttataacttgtgtgatattcctgcagtttttatccaataacattgtgggaaaggtttgggggactgaacgagcataaataaatgtagcaaaatttctttctaacctgcctaaactctaggccattttataaggttatgttcctttgaaaattcattttggtctttttaccacatctgtcacaaaaagccaggtcttagcgggctcttagaaactctgagaattttcttcagattcattgagagagttttccataaagacatttatatatgtgagcaagattttttttaaacaattactttattattgttgttattaatgttattttcagaatggcttttttttttctattcaaaatcaaatcgagatttaatgtttggtacaaacccagaaagggtatttcatagtttttaaacctttcattcccagagatccgaaatatcatttgtgggttttgaatgcatctttaaagtgctttaaaaaaaagttttataagtagggagaaatttttaaatattcttacttggatggctgcaactaaactgaacaaatacctgacttttcttttaccccattgaaaatagtactttcttcgtttcacaaattaaaaaaaaaatctggtatcaacccacattttggctgtctagtattcatttacatttagggttcaccaggactaatgatttttataaaccgttttctggggtgtaccaaaaacatttgaataggtttagaatagctagaatagttccttgactttcctcgaatttcattaccctctcagcatgcttgcagagagctgggtgggctcattcttgcagtcatactgcttatttagtgctgtattttttaaacgtttctgttcagagaacttgcttaatcttccatatattctgctcagggcacttgcaattattaggttttgtttttctttttgttttttagcctttgatggtaagaggaatacgggctgccacatagactttgttctcattaatatcactatttacaactcatgtggactcagaaaaacacacaccaccttttggcttacttcgagtattgaattgactggatccactaaaccaacactaagatgggaaaacacacatggtttggagcaataggaacatcatcataatttttgtggttctatttcaggtataggaattataaaataattggttctttctaaacacttgtcccatttcattctcttgcttttttagcatgtgcaatactttctgtgccaatagagtctgaccagtgtgctatatagttaaagctcattcccttttggctttttccttgtttggttgatcttccccattctggccagagcagggctggagggaaggagccaggagggagagagcctcccacctttcccctgctgcggatgctgagtgctggggcggggagccttcaggagccccgtgcgtctgccgccacgttgcagaaagagccagccaaggagacccgggggaggaaccgcagtgtcccctgtcaccacacggaatagtgaatgtggagtgtggagaggaaggaggcagattcatttctaagacgcactctggagccatgtagcctggagtcaacccattttccacggtcttttctgcaagtgggcaggcccctcctcggggtctgtgtccttgagacttggagccctgcctctgagcctggacgggaagtgtggcctgttgtgtgtgtgcgttctgagcgtgttggccagtggctgtggaggggaccacctgccacccacggtcaccactcccttgtggcagctttctcttcaaataggaagaacgcacagagggcaggagcctcctgtttgcagacgttggcgggccccgaggctcccagagcagcctctgtcaccgcttctgtgtagcaaacattaacgatgacaggggtagaaattcttcggtgccgttcagcttacaaggatcagccatgtgcctctgtactatgtccactttgcaatatttaccgacagccgtcttttgttctttctttcctgttttccatttttaaactagtaacagcaggccttttgcgtttacaatggaacacaatcaccaagaaattagtcagggcgaaaagaaaaaaataatactattaataagaaaccaacaaacaagaacctctctttctagggatttctaaatatataaaatgactgttccttagaatgtttaacttaagaattatttcagtttgtctgggccacactggggcagaggggggagggagggatacagagatggatgccacttacctcagatcttttaaagtggaaatccaaattgaattttcatttggactttcaggataattttctatgttggtcaacttttcgttttccctaactcacccagtttagtttgggatgatttgatttctgttgttgttgatcccatttctaacttggaattgtgagcctctatgttttctgttaggtgagtgtgttgggttttttccccccaccaggaagtggcagcatccctccttctcccctaaagggactctgcggaacctttcacacctctttctcagggacggggcaggtgtgtgtgtggtacactgacgtgtccagaagcagcactttgactgctctggagtagggttgtacaatttcaaggaatgtttggatttcctgcatcttgtggattactccttagataccgcatagattgcaatataatgctgcatgttcaagatgaacagtagctcctagtaatcataaaatccactctttgcacagtttgatctttactgaaatatgttgccaaaatttatttttgttgttgtagctctggattttgttttgttttgttttttaaggaaacgattgacaataccctttaacatctgtgactactaaggaaacctatttctttcatagagagaaaaatctccaatgcttttgaagacactaataccgtgctatttcagatatgggtgaggaagcagagctctcggtaccgaaggccgggcttcttgagctgtgttggttgtcatggctactgtttcatgaaccacaagcagctcaacagactggtctgttgccttctgaaaccctttgcacttcaatttgcaccaggtgaaaacagggccagcagactccatggcccaattcggtttcttcggtggtgatgtgaaaggagagaattacactttttttttttttaagtggcgtggaggcctttgcttccacatttgtttttaacccagaatttctgaaatagagaatttaagaacacatcaagtaataaatatacagagaatatacttttttataaagcacatgcatctgctattgtgttgggttggtttcctctcttttccacggacagtgttgtgtttctggcatagggaaactccaaacaacttgcacacctctactccggagctgagatttcttttacatagatgacctcgcttcaaatacgttaccttactgatgataggatcttttcttgtagcactataccttgtgggaatttttttttaaatgtacacctgatttgagaagctgaagaaaacaaaattttgaagcactcactttgaggagtacaggtaatgttttaaaaaattgcacaaaagaaaaatgaatgtcgaaatgattcattcagtgtttgaaagatatggctctgttgaaacaatgagtttcatactttgtttgtaaaaaaaaaaaagcagagaagggttgaaagttacatgtttttttgtatatagaaatttgtcatgtctaaatgatcagatttgtatggttatggcctggaagaattactacgtaaaaggctcttaaactatacctatgcttattgttatttttgttacatatagccctcgtctgagggaggggaactcggtattctgcgatttgagaatactgttcattcctatgctgaaagtacttctctgagctcccttcttagtctaaactcttaagccattgcaacttctttttcttcagagatgatgtttgacattttcagcacttcctgttcctataaacccaaagaatataatcttgaacacgaagtgtttgtaacaagggatccaggctaccaatcaaacaggactcattatggggacaaaaaaaaaaattatttcaccttctttccccccacacctcatttaaatggggggagtaaaaacatgatttcaatgtaaatgcctcattttattttagttttattttgatttttatttaatataaagaggccagaataaatacggagcatcttctcagaatagtattcctgtccaaaaatcaagccggacagtggaaactggacagctgtggggatattaagcacccccacttacaattcttaaattcagaatctcgtcccctcccttctcgttgaaggcaactgttctggtagctaactttctcctgtgtaatggcgggagggaacaccggcttcagtttttcatgtccccatgacttgcatacaaatggttcaactgtattaaaattaagtgcatttggccaataggtagtatctatacaataacaacaatctctaagaatttccataacttttcttatctgaaaggactcaagtcttccactgcagatacattggaggcttcacccacgttttctttccctttagtttgtttgctgtctggatggccaatgagcctgtctccttttctgtggccaatctgaaggccttcgttggaagtgttgtttacagtaatccttaccaagataacatactgtcctccagaataccaagtattaggtgacactagctcaagctgttgtcttcagagcagttaccaagaagctcggtgcacaggttttctctggttcttacaggaaccacctactctttcagttttctggcccaggagtggggtaaatcctttagttagtgcatttgaacttgatacctgtgcattcagttctgtgaatactgccctttttggcggggtttcctcatctccccagcctgaactgctcaactctaaacccaaattagtgtcagccgaaaggaggtttcaagatagtcctgtcagtatttgtggtgaccttcagattagacagtcttcatttccagccagtggagtcctggctccagagccatctctgagactcgtactactggatgttttaatatcagatcattacccaccatatgcctcccacaggccaagggaaaacagacaccagaacttgggttgagggcactaccagactgacatggccagtacagaggagaactagggaaggaatgatgttttgcaccttattgaaaagaaaattttaagtgcatacataatagttaagagcttttattgtgacaggagaacttttttccatatgcgtgcatactctctgtaattccagtgtaaaatattgtacttgcactagcttttttaaacaaatattaaaaaatggaagaattcatattctattttctaatcgtggtgtgtctatttgtaggatacactcgagtctgtttattgaattttatggtccctttctttgatggtgcttgcaggttttctaggtagaaattatttcattattataataaaacaatgtttgattcaaaatttgaacaaaattgttttaaataaattgtctgtataccagtacaagtttattgtttcagtatactcgtactaataaaataacagtgccaattgca

SEQ ID NO: 45953 - DNA, 2448 bp, Artificial Sequence
  derived and/or modified sequence
atgaagagcaaccaggagagaagcaacgagtgcctgccccccaagaagagagagatccccgccaccagcagaagcagcgaggagaaggcccccaccctgcccagcgacaaccacagagtggagggcaccgcctggctgcccggcaaccccggcggcagaggccacggcggcggcagacacggccccgccggcaccagcgtggagctgggcctgcagcagggcatcggcctgcacaaggccctgagcaccggcctggactacagcccccccagcgcccccagaagcgtgcccgtggccaccaccctgcccgccgcctacgccaccccccagcccggcacccccgtgagccccgtgcagtacgcccacctgccccacaccttccagttcatcggcagcagccagtacagcggcacctacgccagcttcatccccagccagctgatcccccccaccgccaaccccgtgaccagcgccgtggccagcgccgccggcgccaccacccccagccagagaagccagctggaggcctacagcaccctgctggccaacatgggcagcctgagccagacccccggccacaaggccgagcagcagcagcagcagcagcagcagcagcagcagcagcaccagcaccagcagcagcagcagcagcagcagcagcagcagcagcagcagcacctgagcagagcccccggcctgatcacccccggcagccccccccccgcccagcagaaccagtacgtgcacatcagcagcagcccccagaacaccggcagaaccgccagcccccccgccatccccgtgcacctgcacccccaccagaccatgatcccccacaccctgaccctgggcccccccagccaggtggtgatgcagtacgccgacagcggcagccacttcgtgcccagagaggccaccaagaaggccgagagcagcagactgcagcaggccatccaggccaaggaggtgctgaacggcgagatggagaagagcagaagatacggcgcccccagcagcgccgacctgggcctgggcaaggccggcggcaagagcgtgccccacccctacgagagcagacacgtggtggtgcaccccagccccagcgactacagcagcagagaccccagcggcgtgagagccagcgtgatggtgctgcccaacagcaacacccccgccgccgacctggaggtgcagcaggccacccacagagaggccagccccagcaccctgaacgacaagagcggcctgcacctgggcaagcccggccacagaagctacgccctgagcccccacaccgtgatccagaccacccacagcgccagcgagcccctgcccgtgggcctgcccgccaccgccttctacgccggcacccagccccccgtgatcggctacctgagcggccagcagcaggccatcacctacgccggcagcctgccccagcacctggtgatccccggcacccagcccctgctgatccccgtgggcagcaccgacatggaggccagcggcgccgcccccgccatcgtgaccagcagcccccagttcgccgccgtgccccacaccttcgtgaccaccgccctgcccaagagcgagaacttcaaccccgaggccctggtgacccaggccgcctaccccgccatggtgcaggcccagatccacctgcccgtggtgcagagcgtggccagccccgccgccgccccccccaccctgcccccctacttcatgaagggcagcatcatccagctggccaacggcgagctgaagaaggtggaggacctgaagaccgaggacttcatccagagcgccgagatcagcaacgacctgaagatcgacagcagcaccgtggagagaatcgaggacagccacagccccggcgtggccgtgatccagttcgccgtgggcgagcacagagcccaggtgagcgtggaggtgctggtggagtaccccttcttcgtgttcggccagggctggagcagctgctgccccgagagaaccagccagctgttcgacctgccctgcagcaagctgagcgtgggcgacgtgtgcatcagcctgaccctgaagaacctgaagaacggcagcgtgaagaagggccagcccgtggaccccgccagcgtgctgctgaagcacagcaaggccgacggcctggccggcagcagacacagatacgccgagcaggagaacggcatcaaccagggcagcgcccagatgctgagcgagaacggcgagctgaagttccccgagaagatgggcctgcccgccgcccccttcctgaccaagatcgagcccagcaagcccgccgccaccagaaagagaagatggagcgcccccgagagcagaaagctggagaagagcgaggacgagccccccctgaccctgcccaagcccagcctgatcccccaggaggtgaagatctgcatcgagggcagaagcaacgtgggcaagtag

SEQ ID NO: 45954 - protein, 544 aa, Artificial Sequence
  derived and/or modified sequence
MSDGLDNEEKPPAPPLRMNSNNRDSSALNHSSKPLPMAPEEKNKKARLRSIFPGGGDKTNKKKEKERPEISLPSDFEHTIHVGFDAVTGEFTGIPEQWARLLQTSNITKLEQKKNPQAVLDVLKFYDSKETVNNQKYMSFTSGDKSAHGYIAAHPSSTKTASEPPLAPPVSEEEDEEEEEEEDENEPPPVIAPRPEHTKSIYTRSVVESIASPAVPNKEVTPPSAENANSSTLYRNTDRQRKKSKMTDEEILEKLRSIVSVGDPKKKYTRFEKIGQGASGTVYTALDIATGQEVAIKQMNLQQQPKKELIINEILVMRENKNPNIVNYLDSYLVGDELWVVMEYLAGGSLTDVVTETCMDEGQIAAVCRECLQALDFLHSNQVIHRDIKSDNILLGMDGSVKLTDFGFCAQITPEQSKRSTMVGTPYWMAPEVVTRKAYGPKVDIWSLGIMAIEMVEGEPPYLNENPLRALYLIATNGTPELQNPERLSAVFRDFLNRCLEMDVDRRGSAKELLQHPFLKLAKPLSSLTPLIIAAKEAIKNSSR

SEQ ID NO: 45955 - DNA, 1635 bp, Artificial Sequence
  derived and/or modified sequence
atgtctgatggacttgataatgaagagaaacctccagcaccgcctctcagaatgaattcaaacaacagagactcctctgccttgaaccactcttccaagccactgccaatggcccccgaagagaagaataagaaggcccggttgcggtcaattttccccggaggaggagataagaccaataaaaaaaaggagaaagagcgcccggagatctctctgccctcagattttgagcatactatccatgtcgggtttgatgctgtgactggggaatttactgggataccagaacagtgggccaggttgctgcagaccagtaacattactaagctggagcagaaaaaaaatccacaggcggttttagacgtgctcaagttttatgactctaaagaaacagttaacaaccagaaatacatgtcattcacttcaggagacaagagcgcacacgggtacatagccgctcacccttcctccaccaaaacagcatccgagccacctctggcaccaccagtatctgaagaagaagatgaagaggaggaggaggaggaagacgagaacgagccccccccagttatagccccacgtccagaacatactaagagcatctacacccgctctgtggtggagagtattgcgtccccagcagttccaaacaaggaggtgaccccgccctcagctgaaaacgccaacagcagtaccctataccgaaataccgatcggcagcgcaaaaaatccaagatgacagatgaagaaatactggaaaagctgcgtagcatcgtcagtgtgggagacccaaaaaaaaaatatacccggttcgagaagatcgggcagggtgctagtggtacagtgtacaccgctctcgatattgcaaccggacaggaggtggccatcaaacagatgaatctccaacagcagcccaaaaaagagttaattattaacgaaatcctcgtcatgagagagaataagaacccgaatatcgtcaattatttggacagttatctggtcggggatgaattgtgggtggtcatggagtatctagccggcgggagccttacagacgtggtaactgaaacgtgtatggacgaggggcaaattgccgcagtgtgtcgggaatgtctgcaggccctggatttcctgcacagcaatcaggtgatacaccgcgatataaagagcgataatatccttctcggtatggacggatctgtgaaactaactgatttcggcttctgcgcacagattactcccgaacagtccaaacggtcgactatggttggcacaccctattggatggcccctgaagttgttacgcggaaggcatacggaccgaaggtcgatatctggtccttaggcatcatggcaatcgagatggttgagggggagcctccctacctcaacgaaaaccctctgagggccctgtacctgatagcgacaaacggaacccctgagctgcaaaaccctgaaagattgagcgctgtgttcagggatttcctgaaccgatgtttggaaatggacgtagaccgtagaggctcagccaaagagcttcttcaacaccctttcctcaagctggcaaagcccctgtcctctctcaccccactcatcatcgccgccaaagaagctatcaagaattcttcgagatag

SEQ ID NO: 45956 - DNA, 1635 bp, Artificial Sequence
  derived and/or modified sequence
atgtccgacggtctggacaacgaagaaaagcctcctgcccctccactcagaatgaactcaaataatcgggactcaagcgccctcaatcattcctctaagcccttacccatggcacctgaagaaaagaacaaaaaagctcgtctgaggtcgattttccccggagggggcgataagactaacaagaaaaaagagaaggaacggcccgaaatctccctgccgtctgatttcgagcataccatccatgtcggattcgatgccgtaaccggggagttcacaggtatcccagagcaatgggcccgcctgcttcagacgtcgaacattaccaaactggagcagaagaaaaacccacaggctgtccttgatgtgcttaaattctacgattcgaaagagactgtaaacaaccagaagtacatgagttttacttcaggagacaagagtgcccacgggtatatcgctgcccacccttcatctacgaaaaccgccagcgagcctcctctggcaccccccgtgagtgaggaggaggatgaagaggaggaagaagaagaggatgaaaatgagccccctcccgtgatcgcacctcggccggaacacacaaagtcaatatacacccgcagcgttgtcgagagcattgcctcacccgcagtcccaaataaagaggtaacccctcctagcgctgaaaatgctaactcaagtactttatatcgcaatacagaccgccagaggaaaaagtcaaagatgaccgacgaggaaatactggagaaactgaggtctatcgtgtccgttggggatcccaagaaaaagtacactagatttgagaagattggacaaggagcttctggcacagtgtacacagccctcgacatcgccaccgggcaggaagtggcaatcaaacagatgaatcttcagcaacagcccaagaaggagctgataatcaacgaaatactggtcatgagggagaataagaatcctaacatcgtgaactaccttgattcatacctcgtaggtgacgagctgtgggtagttatggagtatttagccggcgggtcgttgactgacgtcgtgaccgagacatgtatggatgaggggcaaattgcagccgtttgcagagaatgcctccaagcactggatttcctgcacagcaaccaagtaattcacagggacattaagtctgataatattttacttggaatggacgggtccgtcaaactcaccgacttcggattctgcgctcagatcacccctgaacagtcaaagagatccactatggtaggcacaccatactggatggccccggaagtggtgaccaggaaggcttatggtccaaaggtagacatatggtcactgggtataatggcgatcgaaatggtcgagggtgaaccaccatacctgaatgagaacccactgcgggcattatatctcattgctaccaacggaactcccgagctgcagaacccagaacgactctccgctgtctttagggacttcctcaaccgctgtctcgagatggacgtggaccggcgcgggtctgccaaagaattactccagcatccgtttctgaagttggcaaagcctctctcgagcttaacccctctgattatagccgctaaggaggctatcaaaaacagcagtcggtag

SEQ ID NO: 45957 - DNA, 1635 bp, Artificial Sequence
  derived and/or modified sequence
atgagcgatgggctggacaatgaggaaaagcctcccgcccccccacttcgcatgaacagcaataaccgggattctagcgccttgaatcattccagcaagccactgccaatggctccggaagagaagaacaagaaggcccgcctgcgatcaatctttcccgggggcggggataaaaccaataaaaaaaaagaaaaggaaagacctgaaattagcttgcccagcgattttgaacacaccatacatgtgggctttgacgccgtgacaggcgaattcacagggatccccgaacaatgggcacggcttctgcagacctcaaatattactaaactggagcagaagaaaaacccccaggctgttctcgatgtgcttaagttctacgactcaaaggagaccgtcaacaatcagaagtatatgagcttcacgagcggggacaagagcgcgcatggctacatcgcagctcatccaagctccactaaaactgcctccgagcctcccctggctcctcctgtgtcggaagaggaggacgaggaggaggaagaggaggaggatgagaacgagccaccacctgtgatcgccccccgtccagagcacaccaagtctatttatactagaagcgttgtggagagtatcgcttcgccggcggttcccaataaggaggtgactccaccctccgcagagaacgccaactccagtactctgtataggaacacagatcgccaacgcaagaagagcaaaatgaccgatgaggaaatcctggagaagctgaggagcatcgtgtctgtgggagatcctaagaagaagtatacccggttcgagaaaatcggacagggggcctctggcacagtgtacactgccttggacatcgccacggggcaggaggtggccataaagcagatgaacctccaacagcagccaaagaaggaactcatcattaatgagatcctggtgatgagggagaacaagaaccccaatattgttaactatctagactcctacctggtcggagacgagctttgggtggtcatggagtatttggccggaggatccctgactgatgtggtaacggaaacgtgtatggacgaggggcagattgcggctgtgtgtcgcgagtgtctccaggccttggattttctgcactccaatcaagtgatccatcgcgatataaagagcgacaacattctcctgggcatggacggaagcgttaaactgacggattttggcttctgcgcacagattacccctgagcaatccaaaagatctacaatggtaggtacgccctattggatggctccagaagtcgtgactcggaaagcctacggaccgaaagtagatatctggtctctaggtatcatggcaatcgagatggttgagggcgaaccaccgtacttgaacgaaaatcctctaagggctctgtacctcatcgctactaacggaaccccggagctccaaaaccccgagcgactcagtgcagtgtttcgtgacttcctgaatcggtgcctagagatggatgtggaccgcaggggatcagcgaaggaactactgcaacacccattcttgaaattggcgaaacctctgagtagtctaacccctttaatcatcgccgcaaaggaggccataaaaaattccagtagatag

SEQ ID NO: 45958 - DNA, 1635 bp, Artificial Sequence
  derived and/or modified sequence
atgtctgatggcctggacaatgaggagaagcccccagccccacccctgaggatgaacagcaacaacagagacagcagcgccctgaaccacagcagcaagcccctgcccatggcccctgaggagaagaacaagaaggcccggctgcggagcatcttccctgggggcggggacaagaccaacaagaagaaggagaaggagaggcctgagatcagcctgcccagcgactttgagcacaccatccacgtgggctttgatgctgtgactggagagttcaccggcatccctgagcagtgggcccggctgctgcagaccagcaacatcaccaagctggagcagaagaagaacccccaggccgtgctggatgtgctgaagttctatgacagcaaggagaccgtgaacaaccagaagtacatgtccttcaccagcggggacaagagcgcccacggctacatcgccgcccaccccagcagcaccaagacagccagcgagccccccctggcccctcctgtgtctgaggaggaggatgaggaggaggaggaggaggaggatgaaaatgaacctcctcctgtgattgcccccaggcctgagcacaccaagagcatctacaccaggtctgtggtggagagcatcgccagccctgctgtgcccaacaaggaggtgaccccacccagcgcagaaaatgccaacagcagcaccctgtacagaaacacagaccggcagaggaagaagagcaagatgacagatgaggagatcctggagaagctgcggagcatcgtgtctgtgggggaccccaagaagaagtacaccaggtttgagaagattggccagggcgccagcggcaccgtgtacacagccctggacatcgccaccggccaggaggtggccatcaagcagatgaacctgcagcagcagcccaagaaggagctgatcatcaatgagatcctggtgatgagggagaacaagaaccccaacatcgtgaactacctggacagctacctggtgggagatgagctgtgggtggtgatggagtacctggccggcggcagcctgacagatgtggtgacagagacctgcatggatgagggccagattgctgctgtgtgccgggagtgcctgcaggccctggacttcctgcacagcaaccaggtgatccaccgggacatcaagagtgacaacatcctgctgggcatggatggctctgtgaagctgacagactttggcttctgtgcccagatcaccccagagcagagcaagaggagcaccatggtgggcaccccctactggatggcccctgaggtggtgaccaggaaggcctacggccccaaggtggacatctggagcctgggcatcatggccatcgagatggtggagggggagcccccctacctgaatgaaaaccccctgcgggccctgtacctgattgccaccaacggcaccccagagctgcagaaccctgagcggctgtctgctgtgttccgggacttcctgaaccgctgcctggagatggatgtggaccggcggggcagcgccaaggagctgctgcagcaccccttcctgaagctggccaagcccctgagcagcctgacccccctcatcatcgccgccaaggaggccatcaagaacagcagcaggtag

SEQ ID NO: 45959 - DNA, 1635 bp, Artificial Sequence
  derived and/or modified sequence
atgagcgacggcctggacaacgaggagaagccccccgccccccccttacggatgaatagtaataacagagattcatctgccctcaaccattcctccaaacccttgcctatggccccagaggagaagaacaaaaaggcgagactgcgctccatctttcctggaggaggtgataagaccaacaaaaaaaaagagaaagaacgtccagagatatcactcccaagcgactttgagcacactatccacgtgggttttgatgccgtcacaggagagttcactggaatccccgaacagtgggcgcgactcttgcagaccagtaatatcactaagcttgaacagaaaaaaaatccacaggctgttctggacgtgctgaaattctacgactcaaaggaaacggtgaataatcaaaagtacatgtcattcacctcaggagacaagtcagctcatggctatatcgctgcacaccccagctccacaaaaaccgcgtccgaaccgcctttggcccccccagtcagcgaagaagaggatgaggaagaggaggaggaggaggatgagaacgaaccaccacccgtcatcgcaccacgaccagagcacaccaagtccatatatacccgctctgttgtcgaaagcatcgcttcaccagccgtcccaaataaggaggtgactcccccttcagccgagaacgcaaactcatcaaccctttaccgtaataccgacaggcaaagaaagaagtccaagatgactgatgaagaaattctcgagaaactccgctccatcgtgtccgttggtgatcctaaaaaaaaatatacccgatttgagaagatcggtcagggagcctctggcactgtgtatactgcgctggacattgcaacaggccaggaggtggcgattaagcagatgaatcttcagcagcagcccaagaaagagctgatcattaacgagattctggtgatgcgggaaaacaaaaatcctaacattgtgaattatctggactcatatttggtcggggatgagttgtgggtggtgatggagtatctggctggcggttccctgaccgatgtggtaaccgagacatgtatggacgaggggcagatcgcagccgtgtgccgggaatgcctgcaggccctggatttcctgcacagcaatcaggtgattcacagagatattaaatccgacaacatcctactggggatggatggcagtgtcaaactgacagacttcggcttctgcgcccagataactcctgagcaaagcaagcgctcaacaatggtcggaacgccctactggatggcaccagaagtggtgacacgtaaggcctacggcccaaaggttgatatctggtctctagggatcatggctatcgagatggtggagggagaacccccttacttaaatgaaaatcccctgcgcgccttatatcttatcgccaccaacgggacaccagagctccaaaatcccgagcgacttagcgccgtgttccgggacttcctcaacaggtgtctggagatggacgtggaccgcagaggatcagctaaggaactactacaacaccctttcttgaaactggcgaagccactgtcaagcctaacacctttgatcatcgctgccaaggaagccatcaaaaatagttctagatag

SEQ ID NO: 45960 - DNA, 1635 bp, Artificial Sequence
  derived and/or modified sequence
atgagcgacggcctggacaacgaggagaagccccccgccccccccttgaggatgaattcaaataatcgtgacagcagcgcactgaatcattcctccaagcccctccccatggcccctgaggaaaaaaacaaaaaggcaagactgaggtcaatattccctggcggcggggacaagactaataaaaagaaggaaaaggagcgtccagagatatcattgccctcagattttgaacacacaatccacgtgggcttcgacgccgtcaccggcgaatttacgggaattcccgagcaatgggcgcgcttattacagacatcgaacattaccaaactcgagcaaaagaaaaacccacaggccgtgctcgacgttttgaaattctacgactccaaggagactgtgaataatcaaaaatatatgagctttacgagcggggataaaagtgcgcatgggtacattgctgcccatccatcttctaccaaaaccgctagtgagcctccactagctcccccagtctccgaagaggaggacgaggaggaagaagaagaggaggatgagaatgaacctccacccgttatagctcccaggccggaacacaccaaatcaatttatacccgttcagtcgtggagagtattgcctcccctgcagtgcccaataaggaagtgacacctcccagcgctgaaaacgcaaattcctccactctgtatcggaataccgatagacagagaaagaagagcaagatgaccgatgaagagattctggagaagctccgatctatagttagtgtgggagacccaaagaagaaatacacgcgttttgagaagattggccagggggcttccggtacggtctacaccgccttggatatagcaaccggtcaggaagtggctataaaacagatgaatcttcaacagcaacccaagaaggagctgatcataaacgaaatccttgttatgagagagaacaagaaccccaacatcgtaaattatcttgattcatatctcgtaggcgacgagctttgggtcgtcatggagtacctggcgggtggcagccttacagatgtggttaccgaaacctgcatggacgaggggcaaatcgcagcagtgtgcagagaatgcctgcaggccctggattttctgcattctaatcaggttattcatagggatattaaatcagacaatatcctcttgggaatggacggatccgtgaagctcactgacttcggtttttgcgcccaaataacaccagagcagagcaagcggagcaccatggtgggaactccttactggatggcccccgaggttgttacccgcaaagcctacggccccaaggtcgatatatggtcgctgggtatcatggctatcgaaatggtggagggagaacccccttaccttaacgagaatccgttgcgggccttgtacctgatagctactaatggcaccccggaacttcagaatcccgaacgtctgtccgccgtgtttagggattttctgaaccgctgccttgagatggatgtagaccggagaggttccgctaaagagcttttgcaacacccattcctgaagctagcaaagcctctctcctctcttaccccgctcattatagccgcaaaagaggccataaagaactcctccagatag

SEQ ID NO: 45961 - DNA, 1635 bp, Artificial Sequence
  derived and/or modified sequence
atgagcgacggcctggacaacgaggagaagccccccgccccccccctgcggatgaattccaataaccgagacagcagtgccctgaaccacagcagcaagcctttaccaatggcccctgaagagaagaataagaaggcacgcttgagatctatcttccctggaggtggggataaaaccaacaagaaaaaagaaaaggaacgccctgaaatcagtctgccctctgattttgagcacaccattcatgtggggtttgacgcagtgacaggagaatttacgggcatacccgaacagtgggcaaggttactccagacatcaaacatcacgaagctggaacagaaaaagaaccctcaggccgttctggatgtgctgaaattttatgattccaaagagacggttaataatcagaagtacatgagcttcacttctggggacaagagtgcgcacggatacatcgcggcccacccatcatccaccaagaccgcttctgaacccccactggcaccccccgtgagcgaagaagaggacgaggaggaagaggaggaagaagacgaaaatgaaccacctcctgtcatagcaccgaggccagagcataccaagtctatatatacaaggtcagtggtggagtctatcgccagccctgccgtgcctaataaagaggtgacgccaccaagcgcagagaacgcgaactcttcaacactctatcggaacaccgaccggcaaagaaagaagtccaagatgaccgatgaggaaatcctcgagaagttgcgctcaatagtctccgtaggggacccaaagaagaagtatacccggtttgaaaaaattggacagggcgcgagcggtacagtgtatacggctctagacatcgcgacaggtcaggaggtagctatcaagcaaatgaacctgcagcagcagcccaagaaagaattgattattaacgaaatcctggtaatgcgggaaaacaagaaccctaacattgttaattacctcgatagctatttggtcggtgatgagctgtgggtggtcatggagtacctcgcgggtggctctctgacagacgtagtaacagaaacctgtatggacgaaggacagatcgccgccgtgtgccgcgaatgtttgcaagcactagattttctccactctaatcaggtgattcacagggacatcaagagtgacaatatcttacttggaatggacgggtccgttaaactcaccgatttcggcttttgtgcccagatcactccagagcagtctaaacggtccaccatggtgggcaccccctattggatggctcccgaggtggtcactcgtaaagcctatgggcccaaggttgatatttggagtttggggattatggccattgagatggtcgaaggcgagccaccatatctgaatgaaaacccactgagggccctgtacttgattgcgacaaatggtacgcccgagctgcagaacccagagcgactaagtgcggtgttccgcgacttcctgaacaggtgcctggaaatggacgtggacaggaggggaagcgctaaggaactgttacagcacccgttcctgaagctcgcaaagcctctgtcaagccttactcctctgattatcgccgctaaagaggccattaaaaacagttcacgctag

SEQ ID NO: 45962 - DNA, 2510 bp, Artificial Sequence
  derived and/or modified sequence
agaggaaaggtcttgacggggtggctggatccgtggcagaatccagttccagattctagacttgagggttctgggctgttggtctgtagaagcgaaggagagaaggactcaaatccaggccaagtgtatggctgtctgaggtattggaacagaaggaggtccattcctgttggtgacaacaccgtggccctgttctgggatgagcaaggtgtaaaggtttcccccaagaaagagcagctgagtccttgcatcttgtggcagctggtgtgcccagcactgagtctgtaggagctgaagccagcccggacccttctcatgggcagtgcccacctgtgctgaagtcctgcagcggtggcggtgtgaggagctgtgaaattagttgtaactgaaaatgtctgacggtctggataatgaagagaaacccccggctcctccactgaggatgaatagtaacaaccgggattcttcagcactcaaccacagctccaaaccacttcccatggcccctgaagagaagaataagaaagccaggcttcgctctatcttcccaggaggaggggataaaaccaataagaagaaggagaaagagcgcccagagatctctcttccttcagactttgagcatacgattcatgtggggtttgatgcagtcaccggggaattcactggaattccagagcaatgggcacgattactccaaacttccaacataacaaaattggaacagaagaagaacccacaagctgttctagatgttctcaaattctatgattccaaagaaacagtcaacaaccagaaatacatgagctttacatcaggagataaaagtgcacatggatacatagcagcccatccttcgagtacaaaaacagcatctgagcctccattggcccctcctgtgtctgaagaagaagatgaagaggaagaagaagaagaagatgaaaatgagccaccaccagttatcgcaccaagaccagagcatacaaaatcaatctatactcgttctgtggttgaatccattgcttcaccagcagtaccaaataaagaggtcacaccaccctctgctgaaaatgccaattccagtactttgtacaggaacacagatcggcaaagaaaaaaatccaagatgacagatgaggagatcttagagaagctaagaagcattgtgagtgttggggacccaaagaaaaaatacacaagatttgaaaaaattggtcaaggggcatcaggtactgtttatacagcactagacattgcaacaggacaagaggtggccataaagcagatgaaccttcaacagcaacccaagaaggaattaattattaatgaaattctggtcatgagggaaaataagaaccctaatattgttaattatttagatagctacttggtgggtgatgaactatgggtagtcatggaatacttggctggtggctctctgactgatgtggtcacagagacctgtatggatgaaggacagatagcagctgtctgcagagagtgcctgcaagctttggatttcctgcactcaaaccaggtgatccatagagatataaagagtgacaatattcttctcgggatggatggctctgttaaattgactgactttgggttctgtgcccagatcactcctgagcaaagtaaacgaagcactatggtgggaaccccatattggatggcacctgaggtggtgactcgaaaagcttatggtccgaaagttgatatctggtctcttggaattatggcaattgaaatggtggaaggtgaacccccttaccttaatgaaaatccactcagggcattgtatctgatagccactaatggaactccagagctccagaatcctgagagactgtcagctgtattccgtgactttttaaatcgctgtcttgagatggatgtggataggcgaggatctgccaaggagcttttgcagcatccatttttaaaattagccaagcctctctccagcctgactcctctgattatcgctgcaaaggaagcaattaagaacagcagccgctaagactgcaagccttacacctcaccatctccctcatgagtaagactgaaataaaactctgctgcaggaaagatggaagaaaagacagtcaaatggggtgggggttctttacctttcaaatgaatagaaacttcttataagcctttttcctactccctcagattatgtaatttatttgtaagcctgaatcgcagcccaaacagggcagcaatgttgaagtgaccataaagtggtcacttccaccgtgaagcgaaagagccagtagtgaatcccctcattttgtgcattcactttgaagaaaaaggtttctcaaagatgcacactccctcttcatagtgttgtgtttgtttttaagttagagagtagtccctcttgcattcaaacctccttcaaaactccttacccaatgtgatgtttttcacttgcattgtcattagatgtccagaaaaaaaaaagatgtcaaaatgtttttctaaaaaaagaaagc

SEQ ID NO: 45963 - DNA, 2477 bp, Artificial Sequence
  derived and/or modified sequence
aatcacagtcaaaatacacccagatgctctcacacacccagacgcgcgcgcatccccgggccatggggcgcacgtgagcccgcaccccgcgcacccagccctgcctctcgccagagcatcctcagcagctgccaccgaagcagcctcctccttctctcttcctcctcctcctaccacggccgccgccaccaccgctgcggctgtgatctcctatcccctctggtcctccttcctcccccagttcctgctcctcctcccatcccctgctcctcctgcccagcagcgaagggcagaaccctcggctgccgccctccttcgctctgaccaagaagaggctggaacaggagctgtgaaattagttgtaactgaaaatgtctgacggtctggataatgaagagaaacccccggctcctccactgaggatgaatagtaacaaccgggattcttcagcactcaaccacagctccaaaccacttcccatggcccctgaagagaagaataagaaagccaggcttcgctctatcttcccaggaggaggggataaaaccaataagaagaaggagaaagagcgcccagagatctctcttccttcagactttgagcatacgattcatgtggggtttgatgcagtcaccggggaattcactggaattccagagcaatgggcacgattactccaaacttccaacataacaaaattggaacagaagaagaacccacaagctgttctagatgttctcaaattctatgattccaaagaaacagtcaacaaccagaaatacatgagctttacatcaggagataaaagtgcacatggatacatagcagcccatccttcgagtacaaaaacagcatctgagcctccattggcccctcctgtgtctgaagaagaagatgaagaggaagaagaagaagaagatgaaaatgagccaccaccagttatcgcaccaagaccagagcatacaaaatcaatctatactcgttctgtggttgaatccattgcttcaccagcagtaccaaataaagaggtcacaccaccctctgctgaaaatgccaattccagtactttgtacaggaacacagatcggcaaagaaaaaaatccaagatgacagatgaggagatcttagagaagctaagaagcattgtgagtgttggggacccaaagaaaaaatacacaagatttgaaaaaattggtcaaggggcatcaggtactgtttatacagcactagacattgcaacaggacaagaggtggccataaagcagatgaaccttcaacagcaacccaagaaggaattaattattaatgaaattctggtcatgagggaaaataagaaccctaatattgttaattatttagatagctacttggtgggtgatgaactatgggtagtcatggaatacttggctggtggctctctgactgatgtggtcacagagacctgtatggatgaaggacagatagcagctgtctgcagagagtgcctgcaagctttggatttcctgcactcaaaccaggtgatccatagagatataaagagtgacaatattcttctcgggatggatggctctgttaaattgactgactttgggttctgtgcccagatcactcctgagcaaagtaaacgaagcactatggtgggaaccccatattggatggcacctgaggtggtgactcgaaaagcttatggtccgaaagttgatatctggtctcttggaattatggcaattgaaatggtggaaggtgaacccccttaccttaatgaaaatccactcagggcattgtatctgatagccactaatggaactccagagctccagaatcctgagagactgtcagctgtattccgtgactttttaaatcgctgtcttgagatggatgtggataggcgaggatctgccaaggagcttttgcagcatccatttttaaaattagccaagcctctctccagcctgactcctctgattatcgctgcaaaggaagcaattaagaacagcagccgctaagactgcaagccttacacctcaccatctccctcatgagtaagactgaaataaaactctgctgcaggaaagatggaagaaaagacagtcaaatggggtgggggttctttacctttcaaatgaatagaaacttcttataagcctttttcctactccctcagattatgtaatttatttgtaagcctgaatcgcagcccaaacagggcagcaatgttgaagtgaccataaagtggtcacttccaccgtgaagcgaaagagccagtagtgaatcccctcattttgtgcattcactttgaagaaaaaggtttctcaaagatgcacactccctcttcatagtgttgtgtttgtttttaagttagagagtagtccctcttgcattcaaacctccttcaaaactccttacccaatgtgatgtttttcacttgcattgtcattagatgtccagaaaaaaaaaagatgtcaaaatgtttttct

SEQ ID NO: 45964 - DNA, 2550 bp, Artificial Sequence
  derived and/or modified sequence
aatcacagtcaaaatacacccagatgctctcacacacccagacgcgcgcgcatccccgggccatggggcgcacgtgagcccgcaccccgcgcacccagccctgcctctcgccagagcatcctcagcagctgccaccgaagcagcctcctccttctctcttcctcctcctcctaccacggccgccgccaccaccgctgcggctgtgatctcctatcccctctggtcctccttcctcccccagttcctgctcctcctcccatcccctgctcctcctgcccagcagcgaagggcagaaccctcggctgccgccctccttcgctctgaccaagaagaggctggaacagaataacatacagaggacagctttctcttctgaggagtcagaagttcagttcgcccaacatggaatgacttgaggagctgtgaaattagttgtaactgaaaatgtctgacggtctggataatgaagagaaacccccggctcctccactgaggatgaatagtaacaaccgggattcttcagcactcaaccacagctccaaaccacttcccatggcccctgaagagaagaataagaaagccaggcttcgctctatcttcccaggaggaggggataaaaccaataagaagaaggagaaagagcgcccagagatctctcttccttcagactttgagcatacgattcatgtggggtttgatgcagtcaccggggaattcactggaattccagagcaatgggcacgattactccaaacttccaacataacaaaattggaacagaagaagaacccacaagctgttctagatgttctcaaattctatgattccaaagaaacagtcaacaaccagaaatacatgagctttacatcaggagataaaagtgcacatggatacatagcagcccatccttcgagtacaaaaacagcatctgagcctccattggcccctcctgtgtctgaagaagaagatgaagaggaagaagaagaagaagatgaaaatgagccaccaccagttatcgcaccaagaccagagcatacaaaatcaatctatactcgttctgtggttgaatccattgcttcaccagcagtaccaaataaagaggtcacaccaccctctgctgaaaatgccaattccagtactttgtacaggaacacagatcggcaaagaaaaaaatccaagatgacagatgaggagatcttagagaagctaagaagcattgtgagtgttggggacccaaagaaaaaatacacaagatttgaaaaaattggtcaaggggcatcaggtactgtttatacagcactagacattgcaacaggacaagaggtggccataaagcagatgaaccttcaacagcaacccaagaaggaattaattattaatgaaattctggtcatgagggaaaataagaaccctaatattgttaattatttagatagctacttggtgggtgatgaactatgggtagtcatggaatacttggctggtggctctctgactgatgtggtcacagagacctgtatggatgaaggacagatagcagctgtctgcagagagtgcctgcaagctttggatttcctgcactcaaaccaggtgatccatagagatataaagagtgacaatattcttctcgggatggatggctctgttaaattgactgactttgggttctgtgcccagatcactcctgagcaaagtaaacgaagcactatggtgggaaccccatattggatggcacctgaggtggtgactcgaaaagcttatggtccgaaagttgatatctggtctcttggaattatggcaattgaaatggtggaaggtgaacccccttaccttaatgaaaatccactcagggcattgtatctgatagccactaatggaactccagagctccagaatcctgagagactgtcagctgtattccgtgactttttaaatcgctgtcttgagatggatgtggataggcgaggatctgccaaggagcttttgcagcatccatttttaaaattagccaagcctctctccagcctgactcctctgattatcgctgcaaaggaagcaattaagaacagcagccgctaagactgcaagccttacacctcaccatctccctcatgagtaagactgaaataaaactctgctgcaggaaagatggaagaaaagacagtcaaatggggtgggggttctttacctttcaaatgaatagaaacttcttataagcctttttcctactccctcagattatgtaatttatttgtaagcctgaatcgcagcccaaacagggcagcaatgttgaagtgaccataaagtggtcacttccaccgtgaagcgaaagagccagtagtgaatcccctcattttgtgcattcactttgaagaaaaaggtttctcaaagatgcacactccctcttcatagtgttgtgtttgtttttaagttagagagtagtccctcttgcattcaaacctccttcaaaactccttacccaatgtgatgtttttcacttgcattgtcattagatgtccagaaaaaaaaaagatgtcaaaatgtttttct

SEQ ID NO: 45965 - DNA, 1635 bp, Artificial Sequence
  derived and/or modified sequence
atgtccgacggcctggataacgaggagaaaccgcctgccccaccactgagaatgaactctaacaatcgcgactctagcgctctgaaccactcgtctaagcctctgcccatggccccagaagaaaagaacaaaaaggcccgactccggtccattttcccaggcggaggggacaagactaataagaagaaggaaaaagagagacccgagatctctctgccgtctgactttgagcataccattcatgtggggttcgacgccgtgactggagaattcactggaatccccgaacagtgggccagacttcttcagacaagcaatatcaccaagctagagcagaaaaaaaatcctcaggccgtcctcgatgtcctgaagttttatgacagcaaggaaaccgttaacaatcaaaagtacatgagttttacctcgggcgataaaagtgcgcacgggtacatcgctgcccaccccagtagtacaaagacggcttcggaacctcctctcgcacctccggtgagcgaagaggaagacgaggaagaagaggaggaagaggacgagaatgagccccctccagtcatcgctccccgtcccgaacacacgaagagcatatacactcgctcagtggtggagtcgattgcttcccccgctgtccccaataaagaggtgacccctcctagcgccgagaatgcaaactcgagtactctgtatcggaacacagaccgccagaggaaaaagagcaagatgactgacgaagaaatcttagagaaactccgctccatcgtgagtgtgggggaccctaaaaagaaatacacccggttcgagaaaattggtcagggagctagcggcaccgtctatactgctttggatattgccacaggacaagaggttgccataaaacagatgaatctgcagcagcagccaaagaaggagctgatcattaacgagatccttgtgatgcgcgagaataagaacccgaatatcgtcaattatctggactcttaccttgtcggagacgagctctgggtcgttatggagtatcttgctgggggatccttgacagatgtagtcacagaaacctgtatggacgaaggtcagatcgccgcagtgtgtagggagtgtttacaggccttggattttctgcacagcaatcaagtgatccatagggatatcaagtccgataacatcctcctcgggatggatggatctgtgaaactgactgatttcggattttgtgcccagattacaccagagcagtccaagagaagcaccatggtcggaaccccgtattggatggcccctgaggtagtcacgagaaaagcttatggtccgaaggtagatatttggtctctgggcatcatggccatcgagatggtagaaggggaacccccttacctgaatgagaatcctttaagagccctttatctgatcgcaacgaacggcaccccagaactccaaaatcccgagcgcctttccgcagtgtttagggattttcttaatcgttgtctagagatggacgtggatagacgcggaagtgcaaaagaattattgcagcatccatttttaaagttagccaagccactgtcatctctgacccccctgattattgctgcgaaggaggccatcaagaacagtagcagatag

SEQ ID NO: 45966 - DNA, 1635 bp, Artificial Sequence
  derived and/or modified sequence
atgagcgatggcctggacaacgaagagaaaccaccagcgcctccgctgagaatgaattccaataatagagattcctctgcactgaaccacagttcaaagcctctccctatggctccagaagaaaaaaacaagaaggcgaggctgcgctccatatttcccggtggaggagataagacaaacaagaagaaagagaaagagcgaccagaaatttccctcccgtctgattttgagcatacaattcatgtaggctttgacgcagtcactggcgagtttactgggattccagagcaatgggctagattattgcagacgtctaatatcactaaactggagcaaaagaagaatccccaggccgtcctggatgtccttaaattctatgactccaaggagacggtcaataatcagaagtacatgagctttacctcgggagataaatcagcccacggctacattgccgcacacccctcttccaccaaaactgcatcagaaccaccgctggccccacctgtgtcagaggaagaagacgaggaggaagaggaagaggaagatgagaatgagcctccccctgtgatcgctccccgtcctgaacacacaaaatccatttacacgagaagtgtggtggagtccatagcaagtcctgccgttcctaataaagaagtgactcccccatcagctgagaacgccaactcttcaactctatacaggaacaccgaccgccagcggaagaagagtaaaatgacagacgaagagatcttagaaaagctgcgctcaatcgtgtcagttggcgaccccaagaagaaatacactagatttgaaaagatcggtcaaggtgccagtggcactgtttataccgccctggatatcgccacaggtcaggaggttgcaattaagcagatgaatctgcagcagcagccaaaaaaagaattgatcattaacgaaatcctggtcatgcgggagaacaagaacccgaatatcgttaactatttggattcctatctagttggcgacgaattatgggtggtgatggagtatcttgccggaggctcactgacagatgttgtcactgagacttgcatggacgagggtcagattgcggctgtctgccgcgaatgcctccaggctcttgactttctacattctaaccaggttatccatagagatattaaatcagataacattctgctgggcatggacggctctgtgaaattaaccgacttcgggttctgcgcacagataactcccgagcagtctaaacggtctaccatggtgggtactccatattggatggcccctgaggttgtcactaggaaggcctatgggcctaaagttgacatctggagcctgggcatcatggccatcgagatggtcgaaggcgaaccaccctacttgaatgaaaaccccctgcgagctctgtacttaattgccacaaatgggacgcccgaactgcagaacccggagcggctgtctgccgttttcagagattttctcaacaggtgcctagagatggacgtcgaccgcaggggcagcgctaaagagctattgcaacatccctttctcaagctcgccaagcctctgagcagcctcacaccattgataattgccgcaaaagaagcaattaagaactcgagccgttag

SEQ ID NO: 45967 - DNA, 1635 bp, Artificial Sequence
  derived and/or modified sequence
atgtctgacgggcttgacaatgaggaaaagccgcctgccccaccactgagaatgaacagcaataatcgagattccagcgctctgaaccactcatccaagcctctacccatggcccctgaggaaaaaaacaaaaaggccagactacggagcattttccccggtggaggtgataaaacaaataagaagaaggagaaggaacggcctgaaatatctttacccagcgattttgaacacaccatccacgtgggttttgatgcagtaactggagagtttactggcatccccgagcagtgggccaggttactgcagacaagcaacataacaaagcttgagcagaagaagaacccccaagctgtcctggacgttttgaagttctatgattctaaggaaactgtcaataatcagaagtacatgagcttcaccagcggagataaaagcgcccatggttacattgcagcacacccaagttctaccaaaacagcttccgagccccctctggcaccgccagtctctgaggaagaagacgaagaggaagaggaagaggaagacgagaatgagccccctcctgtcatcgcgccacgcccagaacataccaagtccatatacacccggagtgtcgtcgaatcaatcgcctcccctgccgtgccgaataaagaagtgactcccccaagcgctgagaacgctaatagttctacattataccggaataccgataggcagaggaaaaagtctaagatgactgatgaggagatcctggaaaagctcaggtccatcgtgtctgtgggcgatccaaagaaaaaatacacgcgcttcgagaagatcggccagggcgcatcagggacagtgtacacggccctggacatcgcgaccggccaggaagtcgctataaagcagatgaaccttcagcagcagccaaagaaggagttgatcattaacgagatactggtgatgagggagaataagaatccgaatattgtgaactacctggactcttaccttgtgggcgacgaactgtgggtagttatggaatacctggccggaggctcgctgacagatgttgtcaccgagacatgcatggatgagggccagatcgccgcagtgtgtagggaatgtctacaggccttagactttctccactctaaccaggtaatccatcgggacataaagtccgataacattctcctgggcatggatggctccgttaaactgacggactttggcttctgtgcgcaaatcaccccagaacagtctaaaaggtccacgatggtgggcaccccttattggatggcaccagaggtggttactagaaaagcctacgggcctaaagtcgatatctggtcactcggtatcatggctatagaaatggtggaaggtgagcccccatatctgaacgagaaccctctaagggccctgtatctgattgccacaaacggaactcccgagctgcagaaccccgagcgactgagcgcggtgttccgggatttcctcaatcggtgtctggaaatggacgtggaccggcgtggaagcgccaaggagctgttgcagcacccgttcctgaagcttgcaaagccactgtcaagcctaacgcctctgattatcgctgccaaagaagcgatcaagaattcctcaagatag

SEQ ID NO: 45968 - DNA, 1635 bp, Artificial Sequence
  derived and/or modified sequence
atgagcgacggcctggacaacgaggagaagccccccgccccccccctgagaatgaacagcaacaacagagacagcagcgccctgaaccacagcagcaagcccctgcccatggcccccgaggagaagaacaagaaggccagactgagaagcatcttccccggcggcggcgacaagaccaacaagaagaaggagaaggagagacccgagatcagcctgcccagcgacttcgagcacaccatccacgtgggcttcgacgccgtgaccggcgagttcaccggcatccccgagcagtgggccagactgctgcagaccagcaacatcaccaagctggagcagaagaagaacccccaggccgtgctggacgtgctgaagttctacgacagcaaggagaccgtgaacaaccagaagtacatgagcttcaccagcggcgacaagagcgcccacggctacatcgccgcccaccccagcagcaccaagaccgccagcgagccccccctggccccccccgtgagcgaggaggaggacgaggaggaggaggaggaggaggacgagaacgagcccccccccgtgatcgcccccagacccgagcacaccaagagcatctacaccagaagcgtggtggagagcatcgccagccccgccgtgcccaacaaggaggtgaccccccccagcgccgagaacgccaacagcagcaccctgtacagaaacaccgacagacagagaaagaagagcaagatgaccgacgaggagatcctggagaagctgagaagcatcgtgagcgtgggcgaccccaagaagaagtacaccagattcgagaagatcggccagggcgccagcggcaccgtgtacaccgccctggacatcgccaccggccaggaggtggccatcaagcagatgaacctgcagcagcagcccaagaaggagctgatcatcaacgagatcctggtgatgagagagaacaagaaccccaacatcgtgaactacctggacagctacctggtgggcgacgagctgtgggtggtgatggagtacctggccggcggcagcctgaccgacgtggtgaccgagacctgcatggacgagggccagatcgccgccgtgtgcagagagtgcctgcaggccctggacttcctgcacagcaaccaggtgatccacagagacatcaagagcgacaacatcctgctgggcatggacggcagcgtgaagctgaccgacttcggcttctgcgcccagatcacccccgagcagagcaagagaagcaccatggtgggcaccccctactggatggcccccgaggtggtgaccagaaaggcctacggccccaaggtggacatctggagcctgggcatcatggccatcgagatggtggagggcgagcccccctacctgaacgagaaccccctgagagccctgtacctgatcgccaccaacggcacccccgagctgcagaaccccgagagactgagcgccgtgttcagagacttcctgaacagatgcctggagatggacgtggacagaagaggcagcgccaaggagctgctgcagcaccccttcctgaagctggccaagcccctgagcagcctgacccccctgatcatcgccgccaaggaggccatcaagaacagcagcagatag

SEQ ID NO: 45969 - protein, 580 aa, Artificial Sequence
  derived and/or modified sequence
MSDGLDNEEKPPAPPLRMNSNNRDSSALNHSSKPLPMAPEEKNKKARLRSIFPGGGDKTNKKKEKERPEISLPSDFEHTIHVGFDAVTGEFTNSPFQTSRPVTVASSQSEGKMPDLYGSQMCPGKLPEGIPEQWARLLQTSNITKLEQKKNPQAVLDVLKFYDSKETVNNQKYMSFTSGDKSAHGYIAAHPSSTKTASEPPLAPPVSEEEDEEEEEEEDENEPPPVIAPRPEHTKSIYTRSVVESIASPAVPNKEVTPPSAENANSSTLYRNTDRQRKKSKMTDEEILEKLRSIVSVGDPKKKYTRFEKIGQGASGTVYTALDIATGQEVAIKQMNLQQQPKKELIINEILVMRENKNPNIVNYLDSYLVGDELWVVMEYLAGGSLTDVVTETCMDEGQIAAVCRECLQALDFLHSNQVIHRDIKSDNILLGMDGSVKLTDFGFCAQITPEQSKRSTMVGTPYWMAPEVVTRKAYGPKVDIWSLGIMAIEMVEGEPPYLNENPLRALYLIATNGTPELQNPERLSAVFRDFLNRCLEMDVDRRGSAKELLQHPFLKLAKPLSSLTPLIIAAKEAIKNSSR

SEQ ID NO: 45970 - protein, 181 aa, Artificial Sequence
  derived and/or modified sequence
MSDGLDNEEKPPAPPLRMNSNNRDSSALNHSSKPLPMAPEEKNKKARLRSIFPGGGDKTNKKKEKERPEISLPSDFEHTIHVGFDAVTGEFTNSPFQTSRPVTVASSQSEGKMPDLYGSQMCPGKLPEGIPEQWARLLQTSNITKLEQKKNPQAVLDVLKFYDSKETVNNQKYMSFTSGDK

SEQ ID NO: 45971 - DNA, 1743 bp, Artificial Sequence
  derived and/or modified sequence
atgtccgatggcctcgacaacgaggaaaaaccgcccgccccacctctcagaatgaactctaataatcgggattccagcgccctgaaccactcatcaaagccgctgccaatggcccctgaggaaaaaaataagaaagcgagactgagatctattttccccggcgggggcgacaagaccaacaagaagaaggaaaaagaacggccagaaatatccttgccttctgactttgagcacactatacatgtcgggttcgatgccgttacaggggagtttacaaacagtccctttcagacctctcgtccagtcaccgtggccagcagtcaatccgagggcaagatgccggacctatatggcagccagatgtgtcccggaaagctcccagaagggattccggagcagtgggccagacttctccaaacaagtaatattacgaagctggagcaaaagaagaacccacaagccgtgctagatgtgcttaagttttatgactctaaagagactgttaacaaccagaaatacatgtctttcacctctggagacaagagtgcgcacggctacattgccgctcatccaagttccacaaaaacggcgtcagagcctcccctcgcaccacctgtgtcagaggaggaggatgaagaggaggaggaggaggaggacgaaaacgagccgcctcccgtgattgcccctcggccggagcatacgaaatccatttatacgagatccgtggtagagtccatcgcctctcccgccgtgcccaataaggaagtcactccccctagtgcagagaacgccaactccagcaccctgtacagaaatacagatagacaaaggaaaaagtccaagatgacagacgaagaaatcctggagaagctgaggtctattgtgtcagttggcgatccaaaaaaaaaatataccagattcgagaaaattgggcagggcgcctccggcaccgtatataccgcccttgatatcgcaactgggcaggaggttgccatcaagcaaatgaatcttcaacaacagcctaaaaaggagcttattataaatgagattttggtcatgcgcgaaaataagaatcctaatatcgtaaattatctggatagctacctcgttggggacgagttgtgggtcgtcatggaatacctcgcgggcgggtcccttaccgatgtggtgacggagacctgcatggacgagggccagatcgcagctgtctgtcgggaatgtctgcaagccctggactttcttcattcaaatcaagtgattcaccgggacattaagagcgataacattctcctgggtatggatggcagcgtgaagttgaccgactttggcttctgtgctcagatcaccccagagcagagcaaacggagcactatggtgggtaccccttattggatggcacctgaggtggtcactcggaaggcttacgggcctaaggtggacatctggtcattgggcatcatggccatcgaaatggtcgagggagaacccccgtacttaaacgagaatcccctgcgcgctctatacctgatcgccaccaatggaaccccagagcttcaaaatccagagaggctgtccgcggtctttagggacttcctgaacagatgcttggaaatggacgtcgatagacgcggaagtgcaaaggagctactgcagcacccttttctcaagcttgccaaacctctctccagcctgaccccgctcataatcgccgccaaggaggccataaaaaactctagcagatag

SEQ ID NO: 45972 - DNA, 546 bp, Artificial Sequence
  derived and/or modified sequence
atgtcagatggcttagacaatgaagagaaaccacccgccccaccgttaagaatgaactccaataatcgagactccagcgccctaaaccatagcagtaaacctctaccaatggcacccgaggaaaaaaacaaaaaggccagattacgaagcattttccccggcggaggtgataaaacaaacaagaagaaggaaaaggaaagacctgagatcagcctacctagtgattttgagcacaccatccatgtaggcttcgatgcggtcactggggagttcaccaactctccatttcagaccagtaggccggtcacagtcgcctcaagccagagtgagggaaaaatgccagacctgtacggctcccagatgtgccctggcaagctacctgaaggtatccccgagcagtgggctagactgctgcagacttcaaacatcaccaagctggaacaaaaaaagaacccccaggccgtgctcgacgtgttaaaattttatgacagtaaggagaccgtgaacaatcagaagtatatgtccttcacctcaggggacaaatag

SEQ ID NO: 45973 - DNA, 1743 bp, Artificial Sequence
  derived and/or modified sequence
atgagcgacgggctcgataacgaagagaagcctccagccccgcctctgcgtatgaactcaaataatagggacagtagcgcattgaaccactcatctaagcccctccccatggcaccggaagaaaagaataagaaagccagactacgctctatcttcccgggagggggggataagactaacaaaaagaaggaaaaagagcggccggagatcagcctgccaagcgacttcgagcatacaattcatgttgggttcgacgctgtgactggcgaattcactaattctccatttcagacatctagacctgttaccgtcgccagctctcagtcggaagggaagatgcccgacctgtatggaagccaaatgtgcccgggtaagctgcctgaaggtatacccgaacagtgggctagactgttacaaacgtctaacataaccaagttagagcagaaaaagaatcctcaggccgtccttgacgtgctgaagttttatgactctaaagaaaccgttaataatcagaagtatatgtcatttacctcaggtgataaaagtgcgcacggctacatagctgctcacccttcctcgacaaaaactgcgtccgagcctccattagcacctcctgtttccgaagaagaggacgaggaggaggaagaagaggaggacgagaacgagcccccacctgttattgcaccgagacccgagcatacaaaatctatttatacccgtagtgttgttgagtccatagcgagccccgcggttccgaacaaggaggtgacgcccccttcggcagagaatgcgaattcgtcgactctctaccgcaacactgatcgccagcgaaaaaaaagtaaaatgaccgacgaggaaatcttggaaaagctacgaagtatcgtgagcgtcggtgaccctaaaaaaaaatacacccgctttgagaaaatcgggcagggggcctctggaaccgtttatacggctctggatatagccaccgggcaggaagtggctatcaagcagatgaacctacagcagcagccaaagaaggagctgatcataaacgagatccttgtcatgcgcgaaaataaaaaccctaatatcgtaaactacctcgatagttacctggtgggcgatgaactctgggtggtgatggaatatctcgccggcgggagcttgaccgacgttgtgacagaaacatgcatggacgagggccagatcgccgcggtctgtagagagtgcctccaggctctggacttcttacactcaaaccaggtgatccacagggatattaagtccgataacatcctcctggggatggatggcagcgtaaagttgacagattttggtttctgtgcccagattacccccgagcagagcaaacggagtacaatggtggggaccccatattggatggccccggaggtcgtgactcgcaaagcctatgggccaaaggttgacatctggtccctagggatcatggccatagaaatggtcgagggggaaccaccatatttgaacgaaaatcctctgcgggcactgtatttgatcgctaccaacggtacgccagaactacagaatcctgagcgtctaagcgctgtctttagggacttcctgaaccgctgcttagagatggacgtggatcggagggggtctgcaaaggagcttctacagcacccctttctaaagctggcaaagccccttagctctctgacaccactgatcattgccgccaaagaggccatcaagaacagcagcagatag

SEQ ID NO: 45974 - DNA, 1743 bp, Artificial Sequence
  derived and/or modified sequence
atgtctgatggcctggacaatgaggagaagcccccagccccacccctgaggatgaacagcaacaacagagacagcagcgccctgaaccacagcagcaagcccctgcccatggcccctgaggagaagaacaagaaggcccggctgcggagcatcttccctgggggcggggacaagaccaacaagaagaaggagaaggagaggcctgagatcagcctgcccagcgactttgagcacaccatccacgtgggctttgatgctgtgactggagagttcaccaacagccccttccagaccagcaggcctgtgacagtggccagcagccagagcgagggcaagatgccagacctgtatggcagccagatgtgccctgggaagctgcctgagggcatccctgagcagtgggcccggctgctgcagaccagcaacatcaccaagctggagcagaagaagaacccccaggccgtgctggatgtgctgaagttctatgacagcaaggagaccgtgaacaaccagaagtacatgtccttcaccagcggggacaagagcgcccacggctacatcgccgcccaccccagcagcaccaagacagccagcgagccccccctggcccctcctgtgtctgaggaggaggatgaggaggaggaggaggaggaggatgaaaatgaacctcctcctgtgattgcccccaggcctgagcacaccaagagcatctacaccaggtctgtggtggagagcatcgccagccctgctgtgcccaacaaggaggtgaccccacccagcgcagaaaatgccaacagcagcaccctgtacagaaacacagaccggcagaggaagaagagcaagatgacagatgaggagatcctggagaagctgcggagcatcgtgtctgtgggggaccccaagaagaagtacaccaggtttgagaagattggccagggcgccagcggcaccgtgtacacagccctggacatcgccaccggccaggaggtggccatcaagcagatgaacctgcagcagcagcccaagaaggagctgatcatcaatgagatcctggtgatgagggagaacaagaaccccaacatcgtgaactacctggacagctacctggtgggagatgagctgtgggtggtgatggagtacctggccggcggcagcctgacagatgtggtgacagagacctgcatggatgagggccagattgctgctgtgtgccgggagtgcctgcaggccctggacttcctgcacagcaaccaggtgatccaccgggacatcaagagtgacaacatcctgctgggcatggatggctctgtgaagctgacagactttggcttctgtgcccagatcaccccagagcagagcaagaggagcaccatggtgggcaccccctactggatggcccctgaggtggtgaccaggaaggcctacggccccaaggtggacatctggagcctgggcatcatggccatcgagatggtggagggggagcccccctacctgaatgaaaaccccctgcgggccctgtacctgattgccaccaacggcaccccagagctgcagaaccctgagcggctgtctgctgtgttccgggacttcctgaaccgctgcctggagatggatgtggaccggcggggcagcgccaaggagctgctgcagcaccccttcctgaagctggccaagcccctgagcagcctgacccccctcatcatcgccgccaaggaggccatcaagaacagcagcaggtag

SEQ ID NO: 45975 - DNA, 546 bp, Artificial Sequence
  derived and/or modified sequence
atgtctgatggcctggacaatgaggagaagcccccagccccacccctgaggatgaacagcaacaacagagacagcagcgccctgaaccacagcagcaagcccctgcccatggcccctgaggagaagaacaagaaggcccggctgcggagcatcttccctgggggcggggacaagaccaacaagaagaaggagaaggagaggcctgagatcagcctgcccagcgactttgagcacaccatccacgtgggctttgatgctgtgactggagagttcaccaacagccccttccagaccagcaggcctgtgacagtggccagcagccagagcgagggcaagatgccagacctgtatggcagccagatgtgccctgggaagctgcctgagggcatccctgagcagtgggcccggctgctgcagaccagcaacatcaccaagctggagcagaagaagaacccccaggccgtgctggatgtgctgaagttctatgacagcaaggagaccgtgaacaaccagaagtacatgtccttcaccagcggggacaagtag

SEQ ID NO: 45976 - DNA, 1743 bp, Artificial Sequence
  derived and/or modified sequence
atgagcgacggcctggacaacgaggagaagccccccgccccccccttacgaatgaacagtaacaaccgcgactcatcagccctgaaccacagcagtaagccactgcccatggctccagaggaaaagaacaagaaagcccggctgcgctcaatctttcctggggggggcgacaagaccaacaagaagaaggagaaggagcggcctgagatctccctgcccagcgatttcgagcacaccatccacgtgggcttcgacgccgtaacaggtgaatttacaaattctccctttcaaaccagccgtccagtgaccgtggccagctcccagtctgaaggcaagatgcccgacctctacggctctcagatgtgtcctggcaagttgccggaaggcattccagagcagtgggcaagattgctccaaacctccaacatcacaaagcttgaacaaaaaaaaaatccccaggcagtgttagatgtgctcaagttctacgacagtaaggagaccgtaaacaaccaaaagtacatgtctttcacttcaggggataaatctgctcacggatacatcgccgcccatccgtcctccacaaaaactgcctcagaaccgcccctagcacccccggtttctgaagaggaagacgaagaagaagaagaggaggaggacgagaatgagcctcctccggttatagccccacgtcccgaacacacaaagagcatttatacaaggagcgtggttgagagtattgcctcacctgcagtcccaaataaagaagtgaccccacctagcgcagaaaacgctaatagctctactttgtacagaaatactgacagacagagaaagaagtcaaagatgacagacgaggaaatcctcgaaaagctgcgctccattgtttctgtgggggaccccaaaaaaaagtatacccgcttcgaaaaaatcggtcagggagcaagcgggactgtgtataccgctctcgatattgcgaccggacaagaggtggccatcaagcaaatgaatctccagcaacagcccaagaaggagctgatcatcaacgaaattctggtgatgagggagaacaaaaatcctaatatcgtaaattatttagactcctatctggtgggtgacgagctttgggtggtgatggaatatctggccggaggatcgcttacggacgtcgtcacagagacatgtatggatgagggacagatcgccgccgtttgtagagagtgtctccaagcgctggatttccttcattcaaatcaggttatccaccgcgacatcaaaagcgataacattcttcttgggatggatggatctgttaagctcacggattttgggttctgcgctcagatcacccctgagcaatctaaacgcagtaccatggtgggcacaccctattggatggcccccgaggtcgtgaccaggaaggcctacgggcctaaggttgatatctggagtctgggcattatggcaattgagatggtcgagggggagcctccctacttaaatgagaatcctctgagggcactgtaccttatcgcaacaaatggtactcccgaacttcagaacccggaacgcctgagcgctgtgtttagggatttcttgaaccgctgtttggagatggacgttgatcggaggggctctgccaaggagttgttgcagcacccctttcttaaactggcaaagccgctctcatctctcaccccactgattattgccgccaaagaggcaattaaaaactcttcacggtag

SEQ ID NO: 45977 - DNA, 546 bp, Artificial Sequence
  derived and/or modified sequence
atgagcgacggcctggacaacgaggagaagccccccgccccccccttgagaatgaactcaaacaaccgggactcctccgcattgaaccactcgagcaagccacttcctatggctcccgaggagaaaaacaagaaagccagacttaggagtatcttcccgggcggtggtgataaaacaaacaaaaaaaaagaaaaggaacggcccgagatcagcctgccctccgatttcgagcatacgattcacgttggtttcgatgctgtcactggcgaattcaccaactcgccatttcagacgtcacgcccagtaactgtagcatcaagtcaaagcgaaggaaagatgcccgacctctacgggagccagatgtgccccgggaaactgccagaggggattcccgagcagtgggccagactgctgcagaccagtaacattactaagttggagcagaagaaaaatccgcaggccgtcctagatgtcctcaagttctacgatagcaaagagactgtgaacaatcagaagtacatgtcattcacttctggtgataagtag

SEQ ID NO: 45978 - DNA, 1743 bp, Artificial Sequence
  derived and/or modified sequence
atgagcgacggcctggacaacgaggagaagccccccgccccccccctcagaatgaattccaacaatcgggactcttccgctctgaatcatagttccaaaccactgccaatggcgcctgaagagaagaataagaaggcgcggctgcgctcgattttccccgggggaggggataagacaaacaagaagaaggaaaaagagcggccagagatcagtctccctagcgactttgaacatactatccatgtggggttcgacgctgtgacaggagaattcactaactccccatttcagacttctcgtccggtcacagtggcgagttctcagagtgaaggcaagatgcccgatctgtacggaagtcagatgtgtcccggtaagctgccagagggaataccagaacagtgggccaggctgctccagaccagtaatataaccaagctcgaacagaagaaaaaccctcaagcagtcctggatgtattgaaattttatgactcgaaagagaccgtcaataaccagaagtacatgtcattcacttctggagacaagagcgcccacggctacatcgcagcacatccctcatccaccaagacagccagcgagcccccactcgccccgccggtcagcgaggaagaagatgaagaggaggaagaggaggaggatgagaatgaaccaccaccagtcattgcgccccggcctgagcataccaagagcatttacactcgatcagtggtcgagtcgatcgctagccccgctgtacccaataaggaggtgacccccccttcagcggagaatgctaacagttctaccctctaccgaaacaccgaccgacaacgaaagaaatccaagatgacagacgaagagattctggaaaagctgcgcagcatcgtttctgtcggggatcctaagaaaaagtacacgcggttcgagaaaatcggtcagggcgccagcgggactgtatatactgccctggatattgccacaggacaggaggtggctatcaagcagatgaatctgcagcagcaacctaagaaagagctcatcataaatgagattctggtaatgcgggaaaataaaaatccgaatattgtgaactacctggattcgtatctcgttggggatgagctgtgggtcgtgatggaatacctcgcaggcggctccctgacagacgttgtgacagaaacctgcatggacgagggtcagattgccgctgtgtgccgagagtgcttgcaggccctggacttcctgcactcaaaccaggttatacaccgcgatataaagtctgacaatatcctcctgggcatggatgggagcgtgaagcttactgacttcggcttctgtgcgcaaatcacaccagagcagtccaagcgatccacaatggtgggcacaccgtattggatggctcctgaagttgtgacgaggaaagcttacggtcccaaggtcgatatttggagcctcggaatcatggctatcgaaatggttgagggtgaaccaccctacctgaacgaaaatccactacgcgctctttacctcattgctactaatggcactccagagctccagaaccctgagcgactatccgcagtgtttcgagacttccttaatcggtgtttggaaatggacgtcgaccggcggggctctgctaaagaactgctgcagcatccattcctgaagttggcgaaaccactgtcctcattgacgcctctgataatcgcagccaaggaggccatcaagaacagcagtaggtag

SEQ ID NO: 45979 - DNA, 2241 bp, Artificial Sequence
  derived and/or modified sequence
gagctgtgaaattagttgtaactgaaaatgtctgacggtctggataatgaagagaaacccccggctcctccactgaggatgaatagtaacaaccgggattcttcagcactcaaccacagctccaaaccacttcccatggcccctgaagagaagaataagaaagccaggcttcgctctatcttcccaggaggaggggataaaaccaataagaagaaggagaaagagcgcccagagatctctcttccttcagactttgagcatacgattcatgtggggtttgatgcagtcaccggggaattcactaactcccctttccagacctctagacctgtgacggtcgcttcaagtcaatcagagggaaaaatgccagatctctatggctcacagatgtgcccagggaagctcccagagggaattccagagcaatgggcacgattactccaaacttccaacataacaaaattggaacagaagaagaacccacaagctgttctagatgttctcaaattctatgattccaaagaaacagtcaacaaccagaaatacatgagctttacatcaggagataaaagtgcacatggatacatagcagcccatccttcgagtacaaaaacagcatctgagcctccattggcccctcctgtgtctgaagaagaagatgaagaggaagaagaagaagaagatgaaaatgagccaccaccagttatcgcaccaagaccagagcatacaaaatcaatctatactcgttctgtggttgaatccattgcttcaccagcagtaccaaataaagaggtcacaccaccctctgctgaaaatgccaattccagtactttgtacaggaacacagatcggcaaagaaaaaaatccaagatgacagatgaggagatcttagagaagctaagaagcattgtgagtgttggggacccaaagaaaaaatacacaagatttgaaaaaattggtcaaggggcatcaggtactgtttatacagcactagacattgcaacaggacaagaggtggccataaagcagatgaaccttcaacagcaacccaagaaggaattaattattaatgaaattctggtcatgagggaaaataagaaccctaatattgttaattatttagatagctacttggtgggtgatgaactatgggtagtcatggaatacttggctggtggctctctgactgatgtggtcacagagacctgtatggatgaaggacagatagcagctgtctgcagagagtgcctgcaagctttggatttcctgcactcaaaccaggtgatccatagagatataaagagtgacaatattcttctcgggatggatggctctgttaaattgactgactttgggttctgtgcccagatcactcctgagcaaagtaaacgaagcactatggtgggaaccccatattggatggcacctgaggtggtgactcgaaaagcttatggtccgaaagttgatatctggtctcttggaattatggcaattgaaatggtggaaggtgaacccccttaccttaatgaaaatccactcagggcattgtatctgatagccactaatggaactccagagctccagaatcctgagagactgtcagctgtattccgtgactttttaaatcgctgtcttgagatggatgtggataggcgaggatctgccaaggagcttttgcagcatccatttttaaaattagccaagcctctctccagcctgactcctctgattatcgctgcaaaggaagcaattaagaacagcagccgctaagactgcaagccttacacctcaccatctccctcatgagtaagactgaaataaaactctgctgcaggaaagatggaagaaaagacagtcaaatggggtgggggttctttacctttcaaatgaatagaaacttcttataagcctttttcctactccctcagattatgtaatttatttgtaagcctgaatcgcagcccaaacagggcagcaatgttgaagtgaccataaagtggtcacttccaccgtgaagcgaaagagccagtagtgaatcccctcattttgtgcattcactttgaagaaaaaggtttctcaaagatgcacactccctcttcatagtgttgtgtttgtttttaagttagagagtagtccctcttgcattcaaacctccttcaaaactccttacccaatgtgatgtttttcacttgcattgtcattagatgtccagaaaaaaaaaagatgtcaaaatgtttttct

SEQ ID NO: 45980 - DNA, 573 bp, Artificial Sequence
  derived and/or modified sequence
ggagctgtgaaattagttgtaactgaaaatgtctgacggtctggataatgaagagaaacccccggctcctccactgaggatgaatagtaacaaccgggattcttcagcactcaaccacagctccaaaccacttcccatggcccctgaagagaagaataagaaagccaggcttcgctctatcttcccaggaggaggggataaaaccaataagaagaaggagaaagagcgcccagagatctctcttccttcagactttgagcatacgattcatgtggggtttgatgcagtcaccggggaattcactaactcccctttccagacctctagacctgtgacggtcgcttcaagtcaatcagagggaaaaatgccagatctctatggctcacagatgtgcccagggaagctcccagagggaattccagagcaatgggcacgattactccaaacttccaacataacaaaattggaacagaagaagaacccacaagctgttctagatgttctcaaattctatgattccaaagaaacagtcaacaaccagaaatacatgagctttacatcaggagataaaag

SEQ ID NO: 45981 - DNA, 2098 bp, Artificial Sequence
  derived and/or modified sequence
cagaatccagttccagattctagacttgagggttctgggctgttggtctgtagaagcgaaggagagaaggactcaaatccaggccaagtgtatggctgtctgaggtattggaacagaaggaggtccattcctgttggtgacaacaccgtggccctgttctgggatgagcaaggtgtaaaggtttcccccaagaaagagcagctgagtccttgcatcttgtggcagctggtgtgcccagcactgagtctgtaggagctgaagccagcccggacccttctcatgggcagtgcccacctgtgctgaagtcctgcagcggtggcggtgtgaggagctgtgaaattagttgtaactgaaaatgtctgacggtctggataatgaagagaaacccccggctcctccactgaggatgaatagtaacaaccgggattcttcagcactcaaccacagctccaaaccacttcccatggcccctgaagagaagaataagaaagccaggcttcgctctatcttcccaggaggaggggataaaaccaataagaagaaggagaaagagcgcccagagatctctcttccttcagactttgagcatacgattcatgtggggtttgatgcagtcaccggggaattcactaactcccctttccagacctctagacctgtgacggtcgcttcaagtcaatcagagggaaaaatgccagatctctatggctcacagatgtgcccagggaagctcccagagggaattccagagcaatgggcacgattactccaaacttccaacataacaaaattggaacagaagaagaacccacaagctgttctagatgttctcaaattctatgattccaaagaaacagtcaacaaccagaaatacatgagctttacatcaggagataaaagtgcacatggatacatagcagcccatccttcgagtacaaaaacagcatctgagcctccattggcccctcctgtgtctgaagaagaagatgaagaggaagaagaagaagaagatgaaaatgagccaccaccagttatcgcaccaagaccagagcatacaaaatcaatctatactcgttctgtggttgaatccattgcttcaccagcagtaccaaataaagaggtcacaccaccctctgctgaaaatgccaattccagtactttgtacaggaacacagatcggcaaagaaaaaaatccaagatgacagatgaggagatcttagagaagctaagaagcattgtgagtgttggggacccaaagaaaaaatacacaagatttgaaaaaattggtcaaggggcatcaggtactgtttatacagcactagacattgcaacaggacaagaggtggccataaagcagatgaaccttcaacagcaacccaagaaggaattaattattaatgaaattctggtcatgagggaaaataagaaccctaatattgttaattatttagatagctacttggtgggtgatgaactatgggtagtcatggaatacttggctggtggctctctgactgatgtggtcacagagacctgtatggatgaaggacagatagcagctgtctgcagagagtgcctgcaagctttggatttcctgcactcaaaccaggtgatccatagagatataaagagtgacaatattcttctcgggatggatggctctgttaaattgactgactttgggttctgtgcccagatcactcctgagcaaagtaaacgaagcactatggtgggaaccccatattggatggcacctgaggtggtgactcgaaaagcttatggtccgaaagttgatatctggtctcttggaattatggcaattgaaatggtggaaggtgaacccccttaccttaatgaaaatccactcagggcattgtatctgatagccactaatggaactccagagctccagaatcctgagagactgtcagctgtattccgtgactttttaaatcgctgtcttgagatggatgtggataggcgaggatctgccaaggagcttttgcagcatccatttttaaaattagccaagcctctctccagcctgactcctctgattatcgctgcaaaggaagcaattaagaacagcagccgctaa

SEQ ID NO: 45982 - DNA, 1743 bp, Artificial Sequence
  derived and/or modified sequence
atgagtgatggacttgataacgaggagaagcctcccgcaccgcctctgagaatgaattccaacaaccgcgatagttcggcactgaatcatagttcaaagccacttcctatggcacctgaggaaaaaaacaagaaggcaagattgcgctcaatatttcccggaggcggtgataagacaaacaaaaagaaggaaaaagagaggcccgagatcagcctcccctcagatttcgaacataccattcacgtcggcttcgatgccgtgacaggtgagtttacgaactcgcctttccagacctctaggcccgttacagttgcctccagccagagtgaaggcaagatgccggatctgtatggaagccagatgtgcccaggcaaattacctgaggggatccctgagcagtgggctcgactgcttcagacctccaacattaccaaactggagcagaaaaaaaaccctcaggcggtgctcgatgttttaaagttctatgacagcaaggagactgtgaacaaccagaaatatatgagttttacttcaggtgataagtccgcacacggttacatcgccgcacatcccagcagcaccaagacggcttcggagcctcctttagcacctcctgtaagtgaggaagaggacgaggaggaagaggaagaagaagacgaaaacgaacctccaccagtgattgcaccgcgtcctgagcatacaaagagtatctataccaggtccgtcgtggagtctattgcatctccagcagtcccaaacaaggaggtgaccccaccgtccgccgagaacgctaatagctctactctgtatcggaacacggatagacaaaggaaaaaaagcaaaatgactgatgaagagatccttgagaaactcagaagtattgtttctgtcggcgacccaaaaaaaaagtacacaaggttcgagaaaatcggccagggcgcatcaggaactgtttacactgccctggacatcgccacgggtcaggaggtcgctattaaacagatgaatctccagcagcagccaaagaaggaattgatcatcaacgaaattttagtgatgagggagaacaagaaccctaatattgtcaactacttagactcttacttggtgggcgacgaattgtgggtggtgatggaatatctggctggcggatccctgaccgatgtcgttacggaaacctgtatggatgagggacagatagcagccgtttgtagggaatgccttcaggcgctggacttcttgcattccaatcaagtgattcatagggacatcaagtcagacaacattctgctggggatggatgggagcgtgaagctcaccgatttcggtttctgtgctcagatcacgcctgagcaatctaaaagaagtaccatggtgggcacaccctattggatggcgcctgaagtggtgaccaggaaggcttatggaccaaaagttgatatttggagtctagggatcatggccattgaaatggtcgagggggagcccccatatcttaatgagaatcccctgagggccctctatttgatagccacgaacgggacccccgaacttcagaaccccgagcggctctctgcagtgtttagggacttcttaaataggtgcctggagatggacgtagacagacgcggttcagcaaaggagctcctgcagcatccattcctgaaactggccaaacccctgtcctcgcttacaccactgataatagctgccaaagaggccataaagaatagctccagatag

SEQ ID NO: 45983 - DNA, 546 bp, Artificial Sequence
  derived and/or modified sequence
atgtcggatggcttggacaacgaagaaaagccgccagcgcctcctttgcggatgaacagcaataaccgcgactcttcggctctaaaccattcatcaaaacctcttccaatggctccagaagaaaagaataaaaaagccagattacggagcattttccccggtggcggagacaagacaaataaaaaaaaagagaaagagcggcctgaaatctctttacctagtgactttgagcataccatccacgtgggtttcgatgcggtcaccggagagtttactaattcccctttccagaccagcagacctgtgactgtggcaagctcccaaagcgaaggcaagatgcccgacctgtatggtagtcagatgtgtcctggcaaacttcctgagggaattcctgagcagtgggctagacttctgcaaaccagtaacatcacaaagctggagcagaaaaaaaacccacaggccgtgctggatgtgctgaagttttacgacagcaaagagacagtaaacaaccagaagtacatgtcgttcaccagtggggataaatag

SEQ ID NO: 45984 - DNA, 1743 bp, Artificial Sequence
  derived and/or modified sequence
atgtctgacggtctggacaatgaggagaaacccccagcccctcccctgcggatgaacagcaacaacagagattcatcggctctgaatcattcttcaaagcccctgcctatggcgcctgaggagaaaaataagaaagcgagactcagatctatcttccctggtggaggcgataagactaacaagaaaaaagaaaaagagaggccggagatcagcctgccctctgacttcgagcatactatacatgttgggtttgatgctgttactggcgaattcacaaactcccccttccagacatcaaggcctgtgacagttgcatccagccaatcagagggcaagatgcctgacttgtatggatcacagatgtgtccgggtaagctgcccgaaggaatccccgagcagtgggccaggctcttgcagacaagcaatataaccaaactagagcagaagaaaaatcctcaagccgttttagacgtcctgaaattttacgacagcaaggaaaccgtgaataatcagaaatatatgagtttcaccagtggggacaagagcgcacatggatacatcgccgctcatccatcatcaacaaagaccgcctctgagcctcctttggcgccaccagtgagtgaagaagaagacgaggaggaagaagaggaggaagacgagaatgagccccctcccgtcatagctccccgaccagagcacaccaagtcaatctacacccgaagcgtggtcgagagcattgccagtcctgccgttccaaacaaagaagtgacgccaccctcagcagaaaatgctaattcatccactctatatcggaacactgatcgtcaacggaaaaaatctaagatgacagatgaagaaatcttggaaaagctccgtagcatcgtctctgtgggagatcctaaaaagaagtacactcgatttgagaagatcgggcaaggtgcctctggtacagtctatacagctttggacattgccaccggccaggaagtggcgattaaacagatgaacctgcagcagcaacctaaaaaagagttaattatcaatgaaatcctcgtgatgagggaaaataaaaatcctaacatcgtgaactacttggacagctatcttgtcggcgatgagctgtgggtggtgatggagtaccttgctgggggaagtttgaccgacgtggtcaccgaaacctgcatggatgagggccagatcgccgcagtgtgccgggagtgcctccaggctctggactttttgcactcaaaccaggtgatccacagggacataaagtccgacaatatcctgctcggaatggacggttccgtcaagttgacagacttcgggttctgtgctcagattacccctgagcagtccaaaaggtcaactatggtcggcactccctactggatggcacccgaggttgttacccgaaaggcctatggaccaaaagtggacatttggagcctgggcatcatggcaattgaaatggtggagggggaaccgccataccttaatgagaaccctctgcgagcactttacctgattgctaccaatggcacccctgagctgcagaaccctgagcgccttagcgccgtgtttcgggactttctcaatcgctgcctagagatggacgtcgacaggaggggcagcgctaaagagcttcttcagcaccctttcttgaaactggccaagccactaagtagtctgaccccattgataatcgcggcaaaagaggccattaagaactctagtaggtag

SEQ ID NO: 45985 - DNA, 1743 bp, Artificial Sequence
  derived and/or modified sequence
atgagcgacggcctggacaacgaggagaagccccccgccccccccctgagaatgaacagcaacaacagagacagcagcgccctgaaccacagcagcaagcccctgcccatggcccccgaggagaagaacaagaaggccagactgagaagcatcttccccggcggcggcgacaagaccaacaagaagaaggagaaggagagacccgagatcagcctgcccagcgacttcgagcacaccatccacgtgggcttcgacgccgtgaccggcgagttcaccaacagccccttccagaccagcagacccgtgaccgtggccagcagccagagcgagggcaagatgcccgacctgtacggcagccagatgtgccccggcaagctgcccgagggcatccccgagcagtgggccagactgctgcagaccagcaacatcaccaagctggagcagaagaagaacccccaggccgtgctggacgtgctgaagttctacgacagcaaggagaccgtgaacaaccagaagtacatgagcttcaccagcggcgacaagagcgcccacggctacatcgccgcccaccccagcagcaccaagaccgccagcgagccccccctggccccccccgtgagcgaggaggaggacgaggaggaggaggaggaggaggacgagaacgagcccccccccgtgatcgcccccagacccgagcacaccaagagcatctacaccagaagcgtggtggagagcatcgccagccccgccgtgcccaacaaggaggtgaccccccccagcgccgagaacgccaacagcagcaccctgtacagaaacaccgacagacagagaaagaagagcaagatgaccgacgaggagatcctggagaagctgagaagcatcgtgagcgtgggcgaccccaagaagaagtacaccagattcgagaagatcggccagggcgccagcggcaccgtgtacaccgccctggacatcgccaccggccaggaggtggccatcaagcagatgaacctgcagcagcagcccaagaaggagctgatcatcaacgagatcctggtgatgagagagaacaagaaccccaacatcgtgaactacctggacagctacctggtgggcgacgagctgtgggtggtgatggagtacctggccggcggcagcctgaccgacgtggtgaccgagacctgcatggacgagggccagatcgccgccgtgtgcagagagtgcctgcaggccctggacttcctgcacagcaaccaggtgatccacagagacatcaagagcgacaacatcctgctgggcatggacggcagcgtgaagctgaccgacttcggcttctgcgcccagatcacccccgagcagagcaagagaagcaccatggtgggcaccccctactggatggcccccgaggtggtgaccagaaaggcctacggccccaaggtggacatctggagcctgggcatcatggccatcgagatggtggagggcgagcccccctacctgaacgagaaccccctgagagccctgtacctgatcgccaccaacggcacccccgagctgcagaaccccgagagactgagcgccgtgttcagagacttcctgaacagatgcctggagatggacgtggacagaagaggcagcgccaaggagctgctgcagcaccccttcctgaagctggccaagcccctgagcagcctgacccccctgatcatcgccgccaaggaggccatcaagaacagcagcagatag

SEQ ID NO: 45986 - DNA, 546 bp, Artificial Sequence
  derived and/or modified sequence
atgagcgacggcctggacaacgaggagaagccccccgccccccccctgagaatgaacagcaacaacagagacagcagcgccctgaaccacagcagcaagcccctgcccatggcccccgaggagaagaacaagaaggccagactgagaagcatcttccccggcggcggcgacaagaccaacaagaagaaggagaaggagagacccgagatcagcctgcccagcgacttcgagcacaccatccacgtgggcttcgacgccgtgaccggcgagttcaccaacagccccttccagaccagcagacccgtgaccgtggccagcagccagagcgagggcaagatgcccgacctgtacggcagccagatgtgccccggcaagctgcccgagggcatccccgagcagtgggccagactgctgcagaccagcaacatcaccaagctggagcagaagaagaacccccaggccgtgctggacgtgctgaagttctacgacagcaaggagaccgtgaacaaccagaagtacatgagcttcaccagcggcgacaagtag

SEQ ID NO: 45987 - protein, 565 aa, Artificial Sequence
  derived and/or modified sequence
MSDGLDNEEKPPAPPLRMNSNNRDSSALNHSSKPLPMAPEEKNKKARLRSIFPGGGDKTNKKKEKERPEISLPSDFEHTIHVGFDAVTGEFTNSPFQTSRPVTVASSQSEGKMGIPEQWARLLQTSNITKLEQKKNPQAVLDVLKFYDSKETVNNQKYMSFTSGDKSAHGYIAAHPSSTKTASEPPLAPPVSEEEDEEEEEEEDENEPPPVIAPRPEHTKSIYTRSVVESIASPAVPNKEVTPPSAENANSSTLYRNTDRQRKKSKMTDEEILEKLRSIVSVGDPKKKYTRFEKIGQGASGTVYTALDIATGQEVAIKQMNLQQQPKKELIINEILVMRENKNPNIVNYLDSYLVGDELWVVMEYLAGGSLTDVVTETCMDEGQIAAVCRECLQALDFLHSNQVIHRDIKSDNILLGMDGSVKLTDFGFCAQITPEQSKRSTMVGTPYWMAPEVVTRKAYGPKVDIWSLGIMAIEMVEGEPPYLNENPLRALYLIATNGTPELQNPERLSAVFRDFLNRCLEMDVDRRGSAKELLQHPFLKLAKPLSSLTPLIIAAKEAIKNSSR

SEQ ID NO: 45988 - DNA, 1698 bp, Artificial Sequence
  derived and/or modified sequence
atgagcgatgggttagacaatgaagagaagcccccagctcccccattgcgaatgaacagtaataatcgggacagcagcgcacttaatcacagctccaaacctctgcctatggcccctgaggagaagaacaaaaaagcccgcctcagatccattttcccagggggcggagataaaaccaacaagaaaaaggagaaagagcgtccagagatctccctgccctcagattttgaacatactatccatgtaggattcgatgctgtcacgggggaattcacgaactcaccctttcaaacttcacgccccgtgaccgtggcaagctctcaatcagaggggaaaatggggattcctgagcagtgggcacggctactgcagacttcgaacattacaaaattggaacaaaagaaaaatccccaggccgtgttggatgtcctgaagttctacgatagcaaagaaacagtgaataaccagaaatacatgtcattcacttcaggagacaaatcagcacacggatatatcgccgcccatccaagcagcactaaaaccgcctccgagcctcctctagcacccccagtgtctgaagaggaggatgaggaagaggaggaagaggaagacgaaaacgaacctccacccgtcatcgcaccgcggccagaacacaccaagtctatttacactagatccgtcgtggaatctatcgcctccccagctgtgcccaataaggaggtgacacccccttccgcagagaatgccaatagtagcaccctctaccggaacaccgaccgtcagcgcaaaaaatcgaagatgactgacgaggaaatcctagaaaagcttcgctcgatcgtctctgtcggggatcccaaaaagaagtatacaaggttcgagaaaattggtcagggggcctcaggaactgtatataccgcacttgatatcgccaccgggcaagaagttgccatcaagcagatgaatctccagcagcagccaaagaaggagctgatcataaatgagatcttggtgatgcgagagaataaaaaccctaacattgtcaattatctcgacagctacctggtaggcgacgaactgtgggtggttatggagtatctcgccggcggcagtctgactgacgtggttacggagacctgcatggatgaaggccaaatcgcagccgtttgccgagagtgtctgcaggctctggactttttgcactcaaatcaggtgatccatagggacataaaatctgacaatattctgctgggaatggacggtagtgtgaagctgaccgacttcggcttttgcgcccaaatcacccctgaacaatctaagagatcaaccatggtcggtactccctactggatggctcccgaagtcgtgactaggaaggcctacgggcctaaggttgacatttggagcctggggattatggcaatagagatggttgagggggaacctccgtacctgaatgagaaccccctacgggctctctacctgatcgctacaaatggcacccccgaacttcagaacccggaacgcctcagcgctgtattccgcgactttttaaatagatgtctggagatggacgtggatcgtagaggaagcgccaaggaactcctgcagcacccatttttaaagttagcgaagccgctgtcaagcttaacccccttgataatcgccgcaaaggaagcgatcaaaaactcctcccgctag

SEQ ID NO: 45989 - DNA, 1698 bp, Artificial Sequence
  derived and/or modified sequence
atgagcgatggcctggataacgaggagaaacctccagcccccccattacgcatgaactctaataacagggactcctccgcacttaaccactcctcgaaaccgcttcctatggctcccgaggagaagaataagaaggcaagattgcggagcattttccctggggggggagataagacaaataagaaaaaagagaaagagcgcccagagatctcgttaccatccgatttcgagcataccatccacgtgggatttgatgcagtgacaggggaatttacgaactcacctttccagacatcccgtcccgtgacggtggcgtcgtctcagagtgagggtaaaatgggaatccccgaacaatgggcaagactgttgcagacttccaacattacaaagcttgaacagaagaaaaatccccaggccgtgctggacgtgctcaaattttatgatagcaaggagactgtaaacaatcaaaaatacatgagctttacatcgggggataagtcagcccacggatacatcgctgcccatccgtcaagcactaaaaccgcatcagagcctcctctcgcacctccggtgagcgaggaggaggatgaagaggaagaagaagaggaggacgaaaacgagcctcccccagttatcgctcctcgtccagagcataccaagagcatttacaccaggagcgtagtcgaaagtatcgcatctcccgccgtgccaaataaagaggttacacctccttccgccgaaaacgccaacagtagcaccttgtaccgcaatacggatagacagaggaagaagtccaaaatgaccgacgaagagattcttgagaaactacggagtatcgtgtctgtgggcgacccgaaaaaaaaatatacacgtttcgaaaagatcggacaaggtgcctctgggaccgtctacacggcactcgacatcgcaaccggccaagaggtggcaatcaagcagatgaatttgcaacagcagcctaagaaggagctcattattaatgagatcctggtgatgagagagaacaaaaatcctaacattgtgaattatctggattcatatctggtcggcgacgagctctgggtggttatggaatacctagccgggggtagtctaaccgatgtcgtgaccgaaacgtgtatggacgaggggcagattgctgcagtgtgccgagaatgcctgcaggcccttgacttcctgcactctaatcaagtgatccatagagacatcaagagtgataatattctgctcggcatggatggcagtgtgaaactgactgacttcgggttttgcgcacaaattactccagagcaatcgaaacggagcactatggttggcacaccatattggatggcccctgaagtggtcacccgcaaggcgtatggccctaaggtggatatctggtctcttggaataatggctatagagatggtcgagggagagccgccatacctgaacgaaaatcctctccgcgctttgtatctgatcgctacgaatggcaccccagagctgcagaatcctgagcgtttgagtgctgtatttcgtgatttcctgaacaggtgtttggaaatggacgtggatagacggggcagcgctaaagaacttctccaacatcctttcctgaagcttgccaagccattgtcaagccttactcctttgatcattgcagccaaggaagccattaaaaactcgagcagatag

SEQ ID NO: 45990 - DNA, 1698 bp, Artificial Sequence
  derived and/or modified sequence
atgtctgatggcctggacaatgaggagaagcccccagccccacccctgaggatgaacagcaacaacagagacagcagcgccctgaaccacagcagcaagcccctgcccatggcccctgaggagaagaacaagaaggcccggctgcggagcatcttccctgggggcggggacaagaccaacaagaagaaggagaaggagaggcctgagatcagcctgcccagcgactttgagcacaccatccacgtgggctttgatgctgtgactggagagttcaccaacagccccttccagaccagcaggcctgtgacagtggccagcagccagagcgagggcaagatgggcatccctgagcagtgggcccggctgctgcagaccagcaacatcaccaagctggagcagaagaagaacccccaggccgtgctggatgtgctgaagttctatgacagcaaggagaccgtgaacaaccagaagtacatgtccttcaccagcggggacaagagcgcccacggctacatcgccgcccaccccagcagcaccaagacagccagcgagccccccctggcccctcctgtgtctgaggaggaggatgaggaggaggaggaggaggaggatgaaaatgagcccccacctgtgattgcccccaggcctgagcacaccaagagcatctacaccaggtctgtggtggagagcatcgccagccctgctgtgcccaacaaggaggtgaccccaccttctgcagaaaatgccaacagcagcaccctgtacagaaacacagaccggcagaggaagaagagcaagatgacagatgaggagatcctggagaagctgcggagcatcgtgtctgtgggggaccccaagaagaagtacaccaggtttgagaagattggccagggcgccagcggcaccgtgtacacagccctggacatcgccaccggccaggaggtggccatcaagcagatgaacctgcagcagcagcccaagaaggagctgatcatcaatgagatcctggtgatgagggagaacaagaaccccaacatcgtgaactacctggacagctacctggtgggagatgagctgtgggtggtgatggagtacctggccggcggcagcctgacagatgtggtgacagagacctgcatggatgagggccagattgctgctgtgtgcagagaatgtctgcaggccctggacttcctgcacagcaaccaggtgatccaccgggacatcaagagtgacaacatcctgctgggcatggatggctctgtgaagctgacagactttggcttctgtgcccagatcaccccagagcagagcaagaggagcaccatggtgggcaccccctactggatggcccctgaggtggtgaccaggaaggcctacggccccaaggtggacatctggagcctgggcatcatggccatcgagatggtggagggggagcccccctacctgaatgaaaaccccctgcgggccctgtacctgattgccaccaacggcaccccagagctgcagaaccctgagcggctgtctgctgtgttccgggacttcctgaaccgctgcctggagatggatgtggacagaagaggcagcgccaaggagctgctgcagcaccccttcctgaagctggccaagcccctgagcagcctgacccccctcatcatcgccgccaaggaggccatcaagaacagcagcaggtag

SEQ ID NO: 45991 - DNA, 1698 bp, Artificial Sequence
  derived and/or modified sequence
atgagcgacggcctggacaacgaggagaagccccccgccccccccttgcgcatgaacagcaataaccgggattcctcagcactgaatcacagtagtaagccgcttcccatggcacccgaggagaagaacaagaaagctcgattacggtctatcttcccgggtgggggagataaaactaataagaaaaaagagaaagagcgacctgagatctcacttcctagcgactttgagcacactatacatgtgggattcgatgccgtcaccggcgaattcaccaatagcccattccaaacatctagacccgtcactgtggctagctctcagtcggagggaaagatgggcattccggagcagtgggcaaggctgctgcagacatccaacataactaaattagagcagaagaagaacccccaggcagtgctcgacgtcctcaaattctacgattcaaaggagactgttaataatcagaagtacatgtcttttacgagcggtgataagagcgcacatggttatattgctgcacacccaagcagcacaaaaacagcttcagaacccccattggctcctcctgtgagcgaggaagaggatgaggaggaggaagaggaagaggatgagaatgaacccccccctgtgatcgcccctcgtccggaacacactaagtccatctacacccgctccgttgtcgagtcaatcgcctcacctgcagtgccaaataaggaggtaacgccgccctccgccgagaatgcaaattccagcacattgtatagaaacaccgatcgccagcggaagaagagcaaaatgacagatgaagagattttagagaagctgcggtccattgtttcagtgggagacccaaagaagaagtatacccggtttgagaagattggccaaggcgcttcaggcaccgtgtataccgcccttgacatcgccaccggacaagaggttgcaataaagcagatgaacctgcagcagcagccgaaaaaggagctgatcataaatgaaatcctcgtgatgcgagaaaataaaaaccccaatatcgtgaactatcttgactcatacttggttggagatgagctctgggtggtcatggagtacctggctggtggaagcttgacggacgtggtcacagagacctgcatggatgagggccagatcgctgctgtctgtagggaatgcctacaagcccttgatttcctacactcgaatcaggtgatccatcgagacataaagtccgacaacatattactgggtatggatggatccgtgaagctgactgacttcggcttctgcgcccaaataacaccggaacaatctaagagaagcactatggtggggaccccttactggatggcccccgaggtagtgacaagaaaagcatacggacccaaagttgacatctggagcctaggaataatggctatcgagatggtggaaggcgagcccccttacctcaatgaaaatcccttgcgggcactctatctaatagccactaatggtactccagagctgcagaaccctgaaaggctcagtgccgtgtttcgggattttctgaatcgctgtctggaaatggatgtggaccggcggggtagtgcaaaggagctgctgcagcaccccttcctgaaattggcgaaaccactcagttcactcactcccctaatcattgccgcgaaagaagccataaaaaattcatcccggtag

SEQ ID NO: 45992 - DNA, 1698 bp, Artificial Sequence
  derived and/or modified sequence
atgagcgacggcctggacaacgaggagaagccccccgccccccccctgaggatgaattcaaacaaccgcgactcgtccgccttaaaccattcttcgaagccccttccaatggctccagaggagaagaataaaaaggccaggctccgctcgatctttcctggggggggcgacaaaaccaataaaaaaaaagaaaaagagcgcccagaaatctctctgccctctgacttcgagcatactattcacgtcggctttgatgccgtcacaggagagtttacaaactctccattccagacaagtcgcccggtaaccgttgcctcctcccagagcgaagggaagatgggcatccccgagcaatgggccagattgttacagactagcaatattactaaactggaacaaaaaaagaatccccaggctgttctggacgtgctgaaattctatgatagcaaagaaactgtcaacaaccagaagtacatgtcattcactagtggtgacaaaagtgctcacgggtatatagctgcacacccctccagcacaaagactgcttccgaaccacctcttgcgccaccagtgtctgaagaagaagatgaggaggaggaagaggaggaggatgagaacgaaccacccccagtgatcgcgccacgccccgagcacaccaaatcgatttataccaggagcgtagttgaatctattgcctcccctgcagtgcccaataaggaggttacgccaccaagcgccgaaaacgcaaacagctcaacactgtaccggaataccgaccggcaacgaaaaaaatctaagatgacagatgaggagattctcgagaaactccggtcaatcgtgtccgtgggcgatccaaaaaagaaatatacccggttcgagaagatcggccagggtgccagcggtacggtctacactgcactggatatcgctaccggacaggaagtggctattaaacagatgaacctccaacagcaacctaaaaaggaattgatcatcaatgagattctggtcatgcgcgagaataaaaatcctaatattgtcaactatctggactcttacctggttggtgacgagctttgggtagtgatggaatacctagctggcggttcgcttacagatgtggtgaccgagacttgcatggacgagggtcagatcgcggctgtgtgcagagaatgtctccaggctctggactttctgcatagtaatcaggtgatacaccgggatataaagtcagacaacatactcctgggtatggatgggagcgtgaagctgaccgattttggcttctgtgcccagattacacctgaacaatctaagcgcagcacaatggtggggaccccatactggatggcccccgaggtcgtgactaggaaggcttacgggccaaaagtggatatctggagtctaggtattatggcaattgagatggtggagggcgaaccaccatacttgaatgaaaatccattaagggccctctatctgattgctaccaacggaacacccgagctccagaatccagagaggctgagcgcagtgttccgcgattttctgaatcgttgtctcgaaatggacgtggatcgcaggggcagcgctaaggagcttctgcagcatcccttcttaaagcttgccaagcccctcagctcactgacgccactcatcatagcggcgaaagaagccatcaagaatagtagtcggtag

SEQ ID NO: 45993 - DNA, 2196 bp, Artificial Sequence
  derived and/or modified sequence
gagctgtgaaattagttgtaactgaaaatgtctgacggtctggataatgaagagaaacccccggctcctccactgaggatgaatagtaacaaccgggattcttcagcactcaaccacagctccaaaccacttcccatggcccctgaagagaagaataagaaagccaggcttcgctctatcttcccaggaggaggggataaaaccaataagaagaaggagaaagagcgcccagagatctctcttccttcagactttgagcatacgattcatgtggggtttgatgcagtcaccggggaattcactaactcccctttccagacctctagacctgtgacggtcgcttcaagtcaatcagagggaaaaatgggaattccagagcaatgggcacgattactccaaacttccaacataacaaaattggaacagaagaagaacccacaagctgttctagatgttctcaaattctatgattccaaagaaacagtcaacaaccagaaatacatgagctttacatcaggagataaaagtgcacatggatacatagcagcccatccttcgagtacaaaaacagcatctgagcctccattggcccctcctgtgtctgaagaagaagatgaagaggaagaagaagaagaagatgaaaatgagccaccaccagttatcgcaccaagaccagagcatacaaaatcaatctatactcgttctgtggttgaatccattgcttcaccagcagtaccaaataaagaggtcacaccaccctctgctgaaaatgccaattccagtactttgtacaggaacacagatcggcaaagaaaaaaatccaagatgacagatgaggagatcttagagaagctaagaagcattgtgagtgttggggacccaaagaaaaaatacacaagatttgaaaaaattggtcaaggggcatcaggtactgtttatacagcactagacattgcaacaggacaagaggtggccataaagcagatgaaccttcaacagcaacccaagaaggaattaattattaatgaaattctggtcatgagggaaaataagaaccctaatattgttaattatttagatagctacttggtgggtgatgaactatgggtagtcatggaatacttggctggtggctctctgactgatgtggtcacagagacctgtatggatgaaggacagatagcagctgtctgcagagagtgcctgcaagctttggatttcctgcactcaaaccaggtgatccatagagatataaagagtgacaatattcttctcgggatggatggctctgttaaattgactgactttgggttctgtgcccagatcactcctgagcaaagtaaacgaagcactatggtgggaaccccatattggatggcacctgaggtggtgactcgaaaagcttatggtccgaaagttgatatctggtctcttggaattatggcaattgaaatggtggaaggtgaacccccttaccttaatgaaaatccactcagggcattgtatctgatagccactaatggaactccagagctccagaatcctgagagactgtcagctgtattccgtgactttttaaatcgctgtcttgagatggatgtggataggcgaggatctgccaaggagcttttgcagcatccatttttaaaattagccaagcctctctccagcctgactcctctgattatcgctgcaaaggaagcaattaagaacagcagccgctaagactgcaagccttacacctcaccatctccctcatgagtaagactgaaataaaactctgctgcaggaaagatggaagaaaagacagtcaaatggggtgggggttctttacctttcaaatgaatagaaacttcttataagcctttttcctactccctcagattatgtaatttatttgtaagcctgaatcgcagcccaaacagggcagcaatgttgaagtgaccataaagtggtcacttccaccgtgaagcgaaagagccagtagtgaatcccctcattttgtgcattcactttgaagaaaaaggtttctcaaagatgcacactccctcttcatagtgttgtgtttgtttttaagttagagagtagtccctcttgcattcaaacctccttcaaaactccttacccaatgtgatgtttttcacttgcattgtcattagatgtccagaaaaaaaaaagatgtcaaaatgtttttct

SEQ ID NO: 45994 - DNA, 2638 bp, Artificial Sequence
  derived and/or modified sequence
ctggagcgctcggaggtagaggaaaggtcttgacggggtggctggatccgtggcagaatccagttccagattctagacttgagggttctgggctgttggtctgtagaagcgaaggagagaaggccatgttagtcttgctcccctcatggttttgcagactcaaatccaggccaagtgtatggctgtctgaggtattggaacagaaggaggtccattcctgttggtgacaacaccgtggccctgttctgggatgagcaaggtgtaaaggtttcccccaagaaagagcagctgagtccttgcatcttgtggcagctggtgtgcccagcactgagtctgtaggagctgaagccagcccggacccttctcatgggcagtgcccacctgtgctgaagtcctgcagcggtggcggtgtgaggagctgtgaaattagttgtaactgaaaatgtctgacggtctggataatgaagagaaacccccggctcctccactgaggatgaatagtaacaaccgggattcttcagcactcaaccacagctccaaaccacttcccatggcccctgaagagaagaataagaaagccaggcttcgctctatcttcccaggaggaggggataaaaccaataagaagaaggagaaagagcgcccagagatctctcttccttcagactttgagcatacgattcatgtggggtttgatgcagtcaccggggaattcactaactcccctttccagacctctagacctgtgacggtcgcttcaagtcaatcagagggaaaaatgggaattccagagcaatgggcacgattactccaaacttccaacataacaaaattggaacagaagaagaacccacaagctgttctagatgttctcaaattctatgattccaaagaaacagtcaacaaccagaaatacatgagctttacatcaggagataaaagtgcacatggatacatagcagcccatccttcgagtacaaaaacagcatctgagcctccattggcccctcctgtgtctgaagaagaagatgaagaggaagaagaagaagaagatgaaaatgagccaccaccagttatcgcaccaagaccagagcatacaaaatcaatctatactcgttctgtggttgaatccattgcttcaccagcagtaccaaataaagaggtcacaccaccctctgctgaaaatgccaattccagtactttgtacaggaacacagatcggcaaagaaaaaaatccaagatgacagatgaggagatcttagagaagctaagaagcattgtgagtgttggggacccaaagaaaaaatacacaagatttgaaaaaattggtcaaggggcatcaggtactgtttatacagcactagacattgcaacaggacaagaggtggccataaagcagatgaaccttcaacagcaacccaagaaggaattaattattaatgaaattctggtcatgagggaaaataagaaccctaatattgttaattatttagatagctacttggtgggtgatgaactatgggtagtcatggaatacttggctggtggctctctgactgatgtggtcacagagacctgtatggatgaaggacagatagcagctgtctgcagagagtgcctgcaagctttggatttcctgcactcaaaccaggtgatccatagagatataaagagtgacaatattcttctcgggatggatggctctgttaaattgactgactttgggttctgtgcccagatcactcctgagcaaagtaaacgaagcactatggtgggaaccccatattggatggcacctgaggtggtgactcgaaaagcttatggtccgaaagttgatatctggtctcttggaattatggcaattgaaatggtggaaggtgaacccccttaccttaatgaaaatccactcagggcattgtatctgatagccactaatggaactccagagctccagaatcctgagagactgtcagctgtattccgtgactttttaaatcgctgtcttgagatggatgtggataggcgaggatctgccaaggagcttttgcagcatccatttttaaaattagccaagcctctctccagcctgactcctctgattatcgctgcaaaggaagcaattaagaacagcagccgctaagactgcaagccttacacctcaccatctccctcatgagtaagactgaaataaaactctgctgcaggaaagatggaagaaaagacagtcaaatggggtgggggttctttacctttcaaatgaatagaaacttcttataagcctttttcctactccctcagattatgtaatttatttgtaagcctgaatcgcagcccaaacagggcagcaatgttgaagtgaccataaagtggtcacttccaccgtgaagcgaaagagccagtagtgaatcccctcattttgtgcattcactttgaagaaaaaggtttctcaaagatgcacactccctcttcatagtgttgtgtttgtttttaagttagagagtagtccctcttgcattcaaacctccttcaaaactccttacccaatgtgatgtttttcacttgcattgtcattagatgtccagaaaaaaaaaagatgtcaaaatgtttttctaaaaaaagaaagcaaaaaaagcaaggc

SEQ ID NO: 45995 - DNA, 1698 bp, Artificial Sequence
  derived and/or modified sequence
atgagtgacggcctcgacaatgaggaaaagcctcctgcgcctccacttagaatgaattcaaataacagggactcaagcgctctgaaccattccagtaaaccgctgcctatggccccagaggagaaaaacaagaaagcacggctacggtcaatcttcccaggcggaggagataagaccaacaagaaaaaagaaaaggagaggccagagatttccctcccctccgatttcgagcatactattcacgtaggcttcgatgctgtgacaggagaattcacgaattctccttttcagacttccagacctgtaaccgtcgcatcgagccagtcggagggtaagatgggcattcccgagcaatgggcgagactgctgcaaacaagtaacattactaagttggagcagaagaagaatccccaagccgtcttggacgtgctgaagttttacgactctaaagaaactgtgaacaaccagaagtatatgtcgtttaccagcggagacaaatccgcccacgggtacatcgctgcccaccctagctcaacaaaaaccgcctcagaaccaccactcgcacctcccgttagtgaagaagaggacgaggaggaggaggaagaagaagatgaaaacgagcctcccccagtaattgctcccaggcccgaacacaccaaatccatctacacaagatccgtcgtggagagtatcgcctctcctgccgtccccaacaaagaggtcacaccaccgagtgcagaaaatgcaaattctagtacactatacagaaatacagaccggcagagaaagaagagtaagatgactgacgaagagatcctggaaaaactaagaagtattgtatctgttggcgatccaaagaaaaagtacacccgattcgaaaaaatagggcagggggcatctggaaccgtttacaccgctctggacattgccacaggtcaggaagtggcgatcaaacaaatgaacctgcaacagcaacccaaaaaggagttgatcattaacgagatcctcgtgatgcgggagaataagaaccctaacatagtgaactacctcgatagctatctggtcggagatgaactgtgggttgtgatggagtatctcgccggaggatcgcttaccgacgtggtaacggagacttgcatggacgaggggcagattgccgctgtgtgcagggagtgtcttcaggcacttgacttcttacatagtaaccaagtcatccacagagatatcaagagcgacaatatcttgctcggcatggacgggtcggtgaaactgaccgatttcgggttctgtgcccagatcacacctgagcagagcaagcgcagcaccatggtcgggactccctactggatggcccctgaagtggtcacgcgtaaggcctacgggccaaaggtggacatatggtcattaggtattatggcaatcgagatggtagaaggcgaacctccctacttgaatgagaatcctctacgggcactgtacttgatagccaccaatgggacccccgagttgcaaaacccagaacgcctgtccgcagtgttccgcgattttctgaatcggtgccttgaaatggacgtggatcgccgaggtagcgcaaaggaactgttgcagcatcccttcctcaaactggctaagcctctatcctcactgacccctctcattatagccgctaaggaagccatcaaaaattcatccaggtag

SEQ ID NO: 45996 - DNA, 1698 bp, Artificial Sequence
  derived and/or modified sequence
atgtcggatgggctggacaatgaggagaaacctccagcacctccgctgcgcatgaactcaaataatcgcgactcttcggccctcaatcacagctccaaacccctcccaatggctccagaggaaaagaataagaaggccagacttcggtccatctttccgggagggggtgacaagaccaacaagaaaaaagagaaggaacggcctgagatctccttgcctagtgattttgaacataccattcacgtcggatttgatgccgtgactggagaatttactaacagcccatttcagacctcgcgtccagttacagtcgcgtcatcgcaatctgagggcaaaatggggattcctgaacagtgggcacgtctgttgcagacttctaatattactaagctagagcagaaaaagaacccacaggccgtgttggatgtgctgaaattctacgatagtaaagaaaccgtaaacaaccagaagtatatgagctttaccagcggggacaagagtgcccacggctacatcgccgctcacccctcgtcgactaagaccgcctcagaacctccccttgctcccccagtgtctgaggaagaagatgaagaggaagaggaagaagaagatgaaaacgagcccccacccgtgatcgctccacggccagaacatacaaagtcaatctacacccggtcagtggtggagtcaattgctagccccgctgttcctaacaaagaagtgactccaccgtctgcggagaatgccaattcctctactctctataggaataccgaccgacaacgaaagaagtcaaaaatgacggacgaagagatcctggaaaaattacgcagtatcgtgtcggtgggagatccgaagaagaaatacactcgttttgagaaaatcgggcagggcgcttcaggaacggtatatacggcacttgacattgcgaccggccaggaggtcgccattaagcagatgaatctgcaacagcagcccaaaaaggagcttatcatcaatgagattttagtgatgcgtgaaaataagaacccaaatattgtgaactacctggacagctatctcgtgggagacgaactgtgggtggtgatggagtacctggccggtggcagcctgactgatgtcgttaccgaaacatgtatggacgaaggccaaatcgccgcagtctgtcgggaatgtctgcaggcactggatttcctgcacagtaaccaggtaattcaccgggatataaagtccgataatatcctcttgggaatggatgggtcggtgaagctcactgactttggcttctgtgcgcagattacaccagagcagtctaagcggagtacaatggtgggaaccccctactggatggcacccgaggtcgtaactagaaaggcctatgggccaaaagtagacatctggagcctcgggatcatggctattgagatggtggagggcgaaccgccatacttaaacgagaaccccctgcgggcactgtatctgattgccactaatggaactcctgagctccagaacccagaaaggctaagtgcggtgttcagggacttccttaatagatgtctagagatggacgtcgaccggagaggttcagccaaggagttactccagcacccattcctgaaactggcaaaacctctcagtagccttacacccttaatcatcgctgctaaagaagccataaagaattcctctagatag

SEQ ID NO: 45997 - DNA, 1698 bp, Artificial Sequence
  derived and/or modified sequence
atgagcgacggcctggacaacgaggagaagccccccgccccccccctgagaatgaacagcaacaacagagacagcagcgccctgaaccacagcagcaagcccctgcccatggcccccgaggagaagaacaagaaggccagactgagaagcatcttccccggcggcggcgacaagaccaacaagaagaaggagaaggagagacccgagatcagcctgcccagcgacttcgagcacaccatccacgtgggcttcgacgccgtgaccggcgagttcaccaacagccccttccagaccagcagacccgtgaccgtggccagcagccagagcgagggcaagatgggcatccccgagcagtgggccagactgctgcagaccagcaacatcaccaagctggagcagaagaagaacccccaggccgtgctggacgtgctgaagttctacgacagcaaggagaccgtgaacaaccagaagtacatgagcttcaccagcggcgacaagagcgcccacggctacatcgccgcccaccccagcagcaccaagaccgccagcgagccccccctggccccccccgtgagcgaggaggaggacgaggaggaggaggaggaggaggacgagaacgagcccccccccgtgatcgcccccagacccgagcacaccaagagcatctacaccagaagcgtggtggagagcatcgccagccccgccgtgcccaacaaggaggtgaccccccccagcgccgagaacgccaacagcagcaccctgtacagaaacaccgacagacagagaaagaagagcaagatgaccgacgaggagatcctggagaagctgagaagcatcgtgagcgtgggcgaccccaagaagaagtacaccagattcgagaagatcggccagggcgccagcggcaccgtgtacaccgccctggacatcgccaccggccaggaggtggccatcaagcagatgaacctgcagcagcagcccaagaaggagctgatcatcaacgagatcctggtgatgagagagaacaagaaccccaacatcgtgaactacctggacagctacctggtgggcgacgagctgtgggtggtgatggagtacctggccggcggcagcctgaccgacgtggtgaccgagacctgcatggacgagggccagatcgccgccgtgtgcagagagtgcctgcaggccctggacttcctgcacagcaaccaggtgatccacagagacatcaagagcgacaacatcctgctgggcatggacggcagcgtgaagctgaccgacttcggcttctgcgcccagatcacccccgagcagagcaagagaagcaccatggtgggcaccccctactggatggcccccgaggtggtgaccagaaaggcctacggccccaaggtggacatctggagcctgggcatcatggccatcgagatggtggagggcgagcccccctacctgaacgagaaccccctgagagccctgtacctgatcgccaccaacggcacccccgagctgcagaaccccgagagactgagcgccgtgttcagagacttcctgaacagatgcctggagatggacgtggacagaagaggcagcgccaaggagctgctgcagcaccccttcctgaagctggccaagcccctgagcagcctgacccccctgatcatcgccgccaaggaggccatcaagaacagcagcagatag

SEQ ID NO: 45998 - protein, 559 aa, Artificial Sequence
  derived and/or modified sequence
MSDGLDNEEKPPAPPLRMNSNNRDSSALNHSSKPLPMAPEEKNKKARLRSIFPGGGDKTNKKKEKERPEISLPSDFEHTIHVGFDAVTGEFTPDLYGSQMCPGKLPEGIPEQWARLLQTSNITKLEQKKNPQAVLDVLKFYDSKETVNNQKYMSFTSGDKSAHGYIAAHPSSTKTASEPPLAPPVSEEEDEEEEEEEDENEPPPVIAPRPEHTKSIYTRSVVESIASPAVPNKEVTPPSAENANSSTLYRNTDRQRKKSKMTDEEILEKLRSIVSVGDPKKKYTRFEKIGQGASGTVYTALDIATGQEVAIKQMNLQQQPKKELIINEILVMRENKNPNIVNYLDSYLVGDELWVVMEYLAGGSLTDVVTETCMDEGQIAAVCRECLQALDFLHSNQVIHRDIKSDNILLGMDGSVKLTDFGFCAQITPEQSKRSTMVGTPYWMAPEVVTRKAYGPKVDIWSLGIMAIEMVEGEPPYLNENPLRALYLIATNGTPELQNPERLSAVFRDFLNRCLEMDVDRRGSAKELLQHPFLKLAKPLSSLTPLIIAAKEAIKNSSR

SEQ ID NO: 45999 - DNA, 1680 bp, Artificial Sequence
  derived and/or modified sequence
atgtcagatggcctggacaacgaggaaaagccccccgcccccccccttcgaatgaacagtaacaatcgcgattccagcgccttgaatcactccagcaagcctctccctatggcgccggaggagaaaaataaaaaggcaagattgcgtagtatttttcctggtggcggggataagaccaacaagaagaaagagaaggagagaccggagatctcgctccccagcgactttgagcacacaatccatgtggggttcgacgccgtgacaggcgagttcacccccgatctgtatggctcccagatgtgccccggcaagctgccggagggcatccccgagcagtgggctaggttacttcagaccagcaacatcactaaactggaacaaaaaaaaaatccacaagccgtactggacgtcctcaaattctatgatagtaaagagaccgtgaacaaccagaagtacatgagttttacaagcggcgataagtccgctcacggatatatagcggcacacccttctagtaccaaaaccgcatctgaaccaccactggcccctcccgtctctgaagaagaagatgaggaggaggaggaggaggaggatgaaaatgaacctcctccagtcattgcccccagacctgaacacacgaagtctatttatactcgaagcgtggtcgagagcatcgcgtcccccgccgtccctaataaggaagtcaccccaccctccgctgaaaacgccaactcttccacactgtataggaacactgaccggcaacggaagaagtcgaagatgaccgatgaggagatcctcgagaagcttaggtcaatcgtgagcgtaggcgacccaaagaagaagtacaccagatttgaaaaaattggacagggagcttcaggcactgtctatacagcactggacatcgctactggtcaagaggtggctattaagcagatgaaccttcagcagcaacctaagaaggagttgattatcaacgagattttggtcatgagagagaataaaaacccaaacatcgtgaattatctggactcatacttagtgggggacgagctgtgggtcgtaatggagtacctcgctgggggctccctgaccgacgtggtaacagaaacttgcatggacgaggggcaaatagccgctgtttgtcgagagtgcctacaggctttggactttctccattccaatcaggtcatccacagagatattaagagtgataacatcctcctggggatggacggttctgtgaaactcaccgactttgggttctgcgcacagattacccccgagcagagtaagcgcagtactatggtgggcacaccatactggatggccccagaagttgtcacgcggaaagcctatggtccgaaggtggatatctggtcgttggggattatggccattgagatggtggaaggagagcccccttatctgaacgagaatcctctcagggcgttgtatctgatcgccactaacgggacgcctgaattgcagaatccagaacgcctgtccgctgtattccgtgatttcttaaatcggtgcctggagatggatgtggataggagggggagcgccaaagagttgcttcagcatcccttcctcaaattggccaagccactgagttcattaacccctcttattatcgcagccaaagaggcaattaaaaatagcagccggtag

SEQ ID NO: 46000 - DNA, 1680 bp, Artificial Sequence
  derived and/or modified sequence
atgagcgacgggcttgacaacgaggaaaagcctcccgctccacctcttcgcatgaattccaataacagagattcatcagcccttaatcattcttctaagcccctccccatggcccccgaagagaagaacaagaaggctcggctgcggagcattttcccaggcggcggtgataaaaccaacaagaaaaaagagaaagaacgccctgagattagcctgcctagcgacttcgagcataccatccatgtgggatttgacgctgtcaccggagaatttaccccggatctctatgggagtcaaatgtgccccggtaaattgcccgaggggatccctgaacagtgggcacgcctgctccagacctctaacataactaaactcgagcagaagaagaacccccaggcggtcctggacgtgctcaaattttacgacagtaaggaaaccgttaacaatcagaaatacatgagcttcaccagcggcgacaagagtgcccatggctatatcgctgcacacccgagttcaacgaaaactgcatccgagccccctttggctccgccggtttctgaggaggaggatgaggaagaggaagaagaggaagatgaaaacgaaccaccccccgtaatagctcctcgacccgagcacacaaaaagtatttatactagatcagtggtggaaagtatcgctagtccagctgttccaaacaaagaggtcactccaccaagtgccgaaaacgccaactcctctacgctgtatcgaaatactgatagacaaagaaaaaagtccaaaatgaccgacgaggaaattctggaaaaactcagatccattgtgtctgtgggcgacccaaagaaaaaatatacccgctttgagaagatcggacagggtgcctccgggaccgtgtatacagccctggatatcgctaccggccaggaggtcgcgattaaacagatgaatctccagcagcagcctaagaaggaactaattattaacgaaatcctggttatgcgtgaaaataagaatccaaatatcgttaactacctggacagctacctcgtcggcgacgagttatgggtggtcatggagtatctggccgggggctctctgacggacgttgtcaccgagacctgcatggatgaaggtcagatagccgctgtgtgtagggagtgtttgcaagcgctggactttctacactccaaccaggtgatccaccgtgatattaagtccgacaatatcctgctgggtatggatgggtctgtaaagttaactgatttcgggttttgcgcccagataactccggaacagtccaaaagatctactatggtcggcacgccttattggatggcgccagaggtcgtgactcgcaaagcttacggaccaaaagtggatatttggagtctgggtatcatggctattgaaatggttgagggggaacccccctacttgaacgaaaatccacttagggcgctgtacctgattgctactaacggcacccctgaactgcaaaaccccgaacggctgagcgccgtttttcgggattttctgaaccgttgcctggaaatggacgtggataggcggggaagcgccaaagagcttttacagcacccatttctgaagctggccaagcccctgtcttcactgacccccctgattattgccgcaaaggaggccataaaaaatagcagtcgctag

SEQ ID NO: 46001 - DNA, 1680 bp, Artificial Sequence
  derived and/or modified sequence
atgtctgatggcctggacaatgaggagaagcccccagccccacccctgaggatgaacagcaacaacagagacagcagcgccctgaaccacagcagcaagcccctgcccatggcccctgaggagaagaacaagaaggcccggctgcggagcatcttccctgggggcggggacaagaccaacaagaagaaggagaaggagaggcctgagatcagcctgcccagcgactttgagcacaccatccacgtgggctttgatgctgtgactggagagttcaccccagacctgtatggcagccagatgtgccctgggaagctgcctgagggcatccctgagcagtgggcccggctgctgcagaccagcaacatcaccaagctggagcagaagaagaacccccaggccgtgctggatgtgctgaagttctatgacagcaaggagaccgtgaacaaccagaagtacatgtccttcaccagcggggacaagagcgcccacggctacatcgccgcccaccccagcagcaccaagacagccagcgagccccccctggcccctcctgtgtctgaggaggaggatgaggaggaggaggaggaggaggatgaaaatgagcccccacctgtgattgcccccaggcctgagcacaccaagagcatctacaccaggtctgtggtggagagcatcgccagccctgctgtgcccaacaaggaggtgaccccaccttctgcagaaaatgccaacagcagcaccctgtacagaaacacagaccggcagaggaagaagagcaagatgacagatgaggagatcctggagaagctgcggagcatcgtgtctgtgggggaccccaagaagaagtacaccaggtttgagaagattggccagggcgccagcggcaccgtgtacacagccctggacatcgccaccggccaggaggtggccatcaagcagatgaacctgcagcagcagcccaagaaggagctgatcatcaatgagatcctggtgatgagggagaacaagaaccccaacatcgtgaactacctggacagctacctggtgggagatgagctgtgggtggtgatggagtacctggccggcggcagcctgacagatgtggtgacagagacctgcatggatgagggccagattgctgctgtgtgcagagaatgtctgcaggccctggacttcctgcacagcaaccaggtgatccaccgggacatcaagagtgacaacatcctgctgggcatggatggctctgtgaagctgacagactttggcttctgtgcccagatcaccccagagcagagcaagaggagcaccatggtgggcaccccctactggatggcccctgaggtggtgaccaggaaggcctacggccccaaggtggacatctggagcctgggcatcatggccatcgagatggtggagggggagcccccctacctgaatgaaaaccccctgcgggccctgtacctgattgccaccaacggcaccccagagctgcagaaccctgagcggctgtctgctgtgttccgggacttcctgaaccgctgcctggagatggatgtggacagaagaggcagcgccaaggagctgctgcagcaccccttcctgaagctggccaagcccctgagcagcctgacccccctcatcatcgccgccaaggaggccatcaagaacagcagcaggtag

SEQ ID NO: 46002 - DNA, 1680 bp, Artificial Sequence
  derived and/or modified sequence
atgagcgacggcctggacaacgaggagaagccccccgccccccccttgagaatgaatagtaacaatcgcgatagttccgccctgaatcattcttctaaacccctaccaatggcccctgaggagaaaaataagaaggcccgtctgaggtccatttttcctggaggtggggataagacaaataagaagaaagagaaagaacggccagaaatatctctgccctctgactttgaacacacaatccatgtgggctttgatgccgtgacaggagagtttacacctgacctctatggcagccagatgtgccccggcaagcttcccgaaggaatcccagagcagtgggcccgtctgctgcagacttccaacatcacaaagctggagcagaaaaagaacccgcaggccgtgttggacgtgctgaaattctacgatagcaaggagacagtgaataatcaaaagtacatgtctttcactagtggggataaatcggcgcacggttatattgctgcgcatcctagttccacgaagaccgcaagtgagcctccgctggcgccccccgtgagcgaagaagaggacgaggaggaagaggaggaggaagacgaaaatgaacctccccctgtcatcgctcctcgccctgagcatactaagagtatttacacacgcagtgtggtggaatctatcgcctcaccggccgtccccaataaagaagtaactcctccaagtgcagaaaatgcaaactcgtcaactctgtacagaaacacggacagacagaggaagaagagtaagatgaccgacgaggaaatactcgagaagcttagaagtatcgtcagtgtcggggacccaaaaaagaaatacacacgcttcgagaagattgggcagggggcctctggaacagtatataccgccttggacattgccacaggccaggaggttgccataaagcagatgaacctgcagcaacaaccgaagaaggagctgataattaatgagatcctcgtgatgcgtgagaacaaaaaccccaatatagtcaactacttagacagctaccttgtcggtgacgagctgtgggtagttatggagtatctggccggcggttctctcaccgacgtggtgaccgaaacctgtatggacgagggtcaaatcgccgccgtctgcagagagtgtctgcaagccctagactttctgcatagcaatcaggtcatccatagggacatcaaatcagacaacattttactgggtatggacggcagcgttaagctgacagatttcggcttttgtgcacagatcacacccgagcagtcgaaaaggtcaacaatggtcgggaccccgtactggatggctccggaggtcgtgactcgtaaagcatatggccccaaagttgatatatggtcgctgggcataatggctattgaaatggtggagggggaacccccttatctgaatgagaaccccctgcgggccttatatctcatcgcaactaatggcactccggaacttcagaacccagagaggctgagcgctgtcttcagggattttcttaatcggtgcctggagatggacgtcgatcgccgtggatctgctaaggagttgctccaacacccgttccttaaactcgccaaaccgttatcaagcctcactcctctcatcatcgccgccaaggaggccatcaaaaatagttccagatag

SEQ ID NO: 46003 - DNA, 1680 bp, Artificial Sequence
  derived and/or modified sequence
atgagcgacggcctggacaacgaggagaagccccccgccccccccctgcgtatgaactccaacaatagggactcctccgcactgaaccatagtagcaaaccattgcctatggcaccagaggagaagaataagaaggcccggctccgatctatctttcccggcggtggcgacaaaacaaacaaaaagaaagagaaggagcgtcccgaaatcagcctgccaagcgacttcgagcacaccatccacgtcgggttcgatgctgtgactggggaattcacacctgacctttatggatcgcagatgtgtcccggcaagctgcctgagggaattcccgaacaatgggctcgattactccagacttctaacattacgaaactggagcagaagaaaaaccctcaggctgtgctggatgtcctgaagttttacgactctaaggaaaccgtgaacaaccagaaatacatgagcttcacatctggcgacaaaagcgctcatgggtacatcgctgcccacccttccagcaccaaaaccgcatcagaaccaccactcgcccctcctgtgagcgaagaggaggatgaggaagaggaggaggaagaggatgagaacgaacccccacctgtcatagcccccagaccggagcacacaaagagcatctatacgcgctctgtggtcgagtctattgccagtccggcagtgcctaataaagaggttaccccgcctagtgccgaaaacgccaactcatctaccctgtatagaaacaccgaccgccagcggaagaaaagcaagatgacagacgaagaaattctcgagaagctaagatctattgtgtcagtaggtgaccctaagaagaagtacaccaggttcgagaaaatcgggcagggcgcaagcgggaccgtgtataccgcgctcgatatcgctacaggccaggaagttgccattaaacagatgaacttacagcagcagccgaagaaagagctgattattaatgagattttagtcatgcgggagaacaaaaatccaaatatcgtgaactacttggacagttacttggtcggcgatgagctgtgggtggtgatggaatacctcgccgggggatcgctcacagacgtcgtcaccgaaacctgcatggacgagggtcagatcgctgccgtgtgccgcgagtgcctgcaggctctggacttcttgcattccaaccaggttatccatcgagacatcaagagcgacaatattctgctgggtatggacggttccgtaaagcttacagatttcgggttctgcgcccagataacaccggaacaaagcaagaggagcacaatggtggggacaccctactggatggcccctgaagtagtgactaggaaagcctacggtccgaaggtcgatatctggtcccttggaattatggccatcgaaatggtggaaggcgagcctccctatttgaatgagaacccacttcgcgccctgtatctaatagcaacgaatggcaccccagaacttcaaaaccccgagaggctcagtgccgtgttcagagattttctgaatagatgcctggaaatggatgtggatcgcagaggaagcgctaaggagctactgcagcatccctttctgaagttggccaagccactgtcatcccttacgccgctgatcattgctgctaaggaggcaattaaaaacagctctcgctag

SEQ ID NO: 46004 - DNA, 2178 bp, Artificial Sequence
  derived and/or modified sequence
gagctgtgaaattagttgtaactgaaaatgtctgacggtctggataatgaagagaaacccccggctcctccactgaggatgaatagtaacaaccgggattcttcagcactcaaccacagctccaaaccacttcccatggcccctgaagagaagaataagaaagccaggcttcgctctatcttcccaggaggaggggataaaaccaataagaagaaggagaaagagcgcccagagatctctcttccttcagactttgagcatacgattcatgtggggtttgatgcagtcaccggggaattcactccagatctctatggctcacagatgtgcccagggaagctcccagagggaattccagagcaatgggcacgattactccaaacttccaacataacaaaattggaacagaagaagaacccacaagctgttctagatgttctcaaattctatgattccaaagaaacagtcaacaaccagaaatacatgagctttacatcaggagataaaagtgcacatggatacatagcagcccatccttcgagtacaaaaacagcatctgagcctccattggcccctcctgtgtctgaagaagaagatgaagaggaagaagaagaagaagatgaaaatgagccaccaccagttatcgcaccaagaccagagcatacaaaatcaatctatactcgttctgtggttgaatccattgcttcaccagcagtaccaaataaagaggtcacaccaccctctgctgaaaatgccaattccagtactttgtacaggaacacagatcggcaaagaaaaaaatccaagatgacagatgaggagatcttagagaagctaagaagcattgtgagtgttggggacccaaagaaaaaatacacaagatttgaaaaaattggtcaaggggcatcaggtactgtttatacagcactagacattgcaacaggacaagaggtggccataaagcagatgaaccttcaacagcaacccaagaaggaattaattattaatgaaattctggtcatgagggaaaataagaaccctaatattgttaattatttagatagctacttggtgggtgatgaactatgggtagtcatggaatacttggctggtggctctctgactgatgtggtcacagagacctgtatggatgaaggacagatagcagctgtctgcagagagtgcctgcaagctttggatttcctgcactcaaaccaggtgatccatagagatataaagagtgacaatattcttctcgggatggatggctctgttaaattgactgactttgggttctgtgcccagatcactcctgagcaaagtaaacgaagcactatggtgggaaccccatattggatggcacctgaggtggtgactcgaaaagcttatggtccgaaagttgatatctggtctcttggaattatggcaattgaaatggtggaaggtgaacccccttaccttaatgaaaatccactcagggcattgtatctgatagccactaatggaactccagagctccagaatcctgagagactgtcagctgtattccgtgactttttaaatcgctgtcttgagatggatgtggataggcgaggatctgccaaggagcttttgcagcatccatttttaaaattagccaagcctctctccagcctgactcctctgattatcgctgcaaaggaagcaattaagaacagcagccgctaagactgcaagccttacacctcaccatctccctcatgagtaagactgaaataaaactctgctgcaggaaagatggaagaaaagacagtcaaatggggtgggggttctttacctttcaaatgaatagaaacttcttataagcctttttcctactccctcagattatgtaatttatttgtaagcctgaatcgcagcccaaacagggcagcaatgttgaagtgaccataaagtggtcacttccaccgtgaagcgaaagagccagtagtgaatcccctcattttgtgcattcactttgaagaaaaaggtttctcaaagatgcacactccctcttcatagtgttgtgtttgtttttaagttagagagtagtccctcttgcattcaaacctccttcaaaactccttacccaatgtgatgtttttcacttgcattgtcattagatgtccagaaaaaaaaaagatgtcaaaatgtttttct

SEQ ID NO: 46005 - DNA, 2606 bp, Artificial Sequence
  derived and/or modified sequence
ctggagcgctcggaggtagaggaaaggtcttgacggggtggctggatccgtggcagaatccagttccagattctagacttgagggttctgggctgttggtctgtagaagcgaaggagagaaggccatgttagtcttgctcccctcatggttttgcagactcaaatccaggccaagtgtatggctgtctgaggtattggaacagaaggaggtccattcctgttggtgacaacaccgtggccctgttctgggatgagcaaggtgtaaaggtttcccccaagaaagagcagctgagtccttgcatcttgtggcagctggtgtgcccagcactgagtctgtaggagctgaagccagcccggacccttctcatgggcagtgcccacctgtgctgaagtcctgcagcggtggcggtgtgaggagctgtgaaattagttgtaactgaaaatgtctgacggtctggataatgaagagaaacccccggctcctccactgaggatgaatagtaacaaccgggattcttcagcactcaaccacagctccaaaccacttcccatggcccctgaagagaagaataagaaagccaggcttcgctctatcttcccaggaggaggggataaaaccaataagaagaaggagaaagagcgcccagagatctctcttccttcagactttgagcatacgattcatgtggggtttgatgcagtcaccggggaattcactccagatctctatggctcacagatgtgcccagggaagctcccagagggaattccagagcaatgggcacgattactccaaacttccaacataacaaaattggaacagaagaagaacccacaagctgttctagatgttctcaaattctatgattccaaagaaacagtcaacaaccagaaatacatgagctttacatcaggagataaaagtgcacatggatacatagcagcccatccttcgagtacaaaaacagcatctgagcctccattggcccctcctgtgtctgaagaagaagatgaagaggaagaagaagaagaagatgaaaatgagccaccaccagttatcgcaccaagaccagagcatacaaaatcaatctatactcgttctgtggttgaatccattgcttcaccagcagtaccaaataaagaggtcacaccaccctctgctgaaaatgccaattccagtactttgtacaggaacacagatcggcaaagaaaaaaatccaagatgacagatgaggagatcttagagaagctaagaagcattgtgagtgttggggacccaaagaaaaaatacacaagatttgaaaaaattggtcaaggggcatcaggtactgtttatacagcactagacattgcaacaggacaagaggtggccataaagcagatgaaccttcaacagcaacccaagaaggaattaattattaatgaaattctggtcatgagggaaaataagaaccctaatattgttaattatttagatagctacttggtgggtgatgaactatgggtagtcatggaatacttggctggtggctctctgactgatgtggtcacagagacctgtatggatgaaggacagatagcagctgtctgcagagagtgcctgcaagctttggatttcctgcactcaaaccaggtgatccatagagatataaagagtgacaatattcttctcgggatggatggctctgttaaattgactgactttgggttctgtgcccagatcactcctgagcaaagtaaacgaagcactatggtgggaaccccatattggatggcacctgaggtggtgactcgaaaagcttatggtccgaaagttgatatctggtctcttggaattatggcaattgaaatggtggaaggtgaacccccttaccttaatgaaaatccactcagggcattgtatctgatagccactaatggaactccagagctccagaatcctgagagactgtcagctgtattccgtgactttttaaatcgctgtcttgagatggatgtggataggcgaggatctgccaaggagcttttgcagcatccatttttaaaattagccaagcctctctccagcctgactcctctgattatcgctgcaaaggaagcaattaagaacagcagccgctaagactgcaagccttacacctcaccatctccctcatgagtaagactgaaataaaactctgctgcaggaaagatggaagaaaagacagtcaaatggggtgggggttctttacctttcaaatgaatagaaacttcttataagcctttttcctactccctcagattatgtaatttatttgtaagcctgaatcgcagcccaaacagggcagcaatgttgaagtgaccataaagtggtcacttccaccgtgaagcgaaagagccagtagtgaatcccctcattttgtgcattcactttgaagaaaaaggtttctcaaagatgcacactccctcttcatagtgttgtgtttgtttttaagttagagagtagtccctcttgcattcaaacctccttcaaaactccttacccaatgtgatgtttttcacttgcattgtcattagatgtccagaaaaaaaaaagatgtcaaaatgtttttctaaaaaaagaaagc

SEQ ID NO: 46006 - DNA, 1680 bp, Artificial Sequence
  derived and/or modified sequence
atgtccgatgggctggataacgaagagaagccccctgctcctccgctcagaatgaacagtaacaatagggactccagtgctctgaaccattcatccaaacccttaccaatggcgcctgaggagaagaacaaaaaagcacgcctccgatccatttttccaggtggcggtgataagaccaacaagaaaaaagagaaggaaagaccagaaatctctctcccatccgactttgaacataccattcatgtcggcttcgacgctgtgacaggcgaatttacacctgacttatatggaagccagatgtgtcctggcaaactgccagaaggaattcctgagcaatgggccaggcttctgcaaaccagcaatattactaaactcgaacagaagaaaaacccgcaggctgttcttgacgtgctgaaattctacgattctaaagaaaccgtgaataatcagaagtacatgagtttcacatctggcgataagagcgcccacgggtacatcgctgcccacccctcctccacgaaaaccgccagcgaaccccctctagcccctcctgtgtcagaggaagaggacgaggaagaggaggaagaagaggacgaaaatgagccccctcccgttatcgccccacgtcccgagcacacaaagagtatctatacccgttctgtggttgaatcgattgcctccccagcagtgcccaataaggaggttacacccccttccgccgagaatgccaattcgtctaccctgtacaggaacacggaccggcagcggaagaaatctaaaatgactgacgaggaaatccttgagaaactgaggtcgatcgtgagtgtgggtgaccctaagaagaagtacacccgattcgagaagataggccaaggcgctagtggaacggtgtatactgcgctggacattgccaccggccaggaagtggcaatcaagcaaatgaatctgcagcagcagccgaaaaaagagctgatcattaatgagatactggtcatgcgcgagaataagaacccaaatatagttaactatctcgactcatacttggtaggagacgagctatgggtggtcatggagtacttagcgggaggcagcctgaccgatgtagtgactgagacttgcatggacgaaggccaaatagcagccgtgtgtagggagtgcctccaggccctggacttcttacacagcaatcaggtcatccatagagacattaaatctgataacatcctcctgggcatggacgggtctgtgaagctgaccgacttcggcttttgcgcacaaatcacacctgagcagtctaagcggtcaaccatggtcggtacaccatactggatggcccctgaggtagtcacacgtaaagcatacggcccaaaagtggacatctggtccctcgggattatggctatcgaaatggtcgaaggcgaacccccttaccttaatgagaatcctctacgggcactgtaccttatcgccaccaatgggaccccagagctccagaatcctgaacgattgtcggctgtgtttagagacttcttgaataggtgcctggaaatggatgtggatcgacgcggaagtgccaaggagctcctccagcacccgttcttgaagctagccaagccactgtcatccttaacccccttaattatcgccgctaaagaggctatcaaaaatagctcccggtag

SEQ ID NO: 46007 - DNA, 1680 bp, Artificial Sequence
  derived and/or modified sequence
atgtcagatggattagacaacgaggagaagccacccgctccaccattacgcatgaattcgaataatcgcgactcctctgccctaaaccacagttcgaaacctctccctatggccccagaagagaaaaataagaaggcaagactgcgatcaatctttcctggcggaggtgataagactaacaagaaaaaggagaaggagcgtcccgaaatttctctcccttccgactttgagcacaccatccacgtgggcttcgacgcagtgaccggggagttcacacccgatctttacggatcacagatgtgccctggcaagctccctgaagggattcccgagcaatgggccaggctactgcaaacctccaatatcaccaagcttgagcagaagaagaacccacaagccgtgctggacgtgttaaagttttacgacagtaaggaaactgtaaacaatcagaaatatatgtcatttacgtccggggataaatccgcccacgggtacatcgctgcacacccgagctccacgaagacagctagtgaaccccctcttgctccccctgttagcgaggaggaagatgaggaagaagaagaagaggaggacgagaacgaacccccacctgtgatcgctcctagacccgaacacaccaaaagcatttacacgcgctctgtcgtcgaaagcatcgcctcacccgctgtccctaacaaagaagtcaccccaccatcggcagagaatgccaactcctccactctctatagaaacacggaccgacaacggaaaaagtcgaaaatgacagacgaggagatactggagaagcttcgcagtatagtgagtgtgggcgacccaaagaagaaatatactagattcgaaaagattggtcagggggcttccggcaccgtgtatacggcacttgatatcgctacgggtcaggaagtggccatcaagcagatgaatctgcaacagcagcccaagaaggagctcatcattaatgaaatcctcgtcatgagggagaacaagaacccgaacatcgtgaactatctggattcttacctggtgggagatgagttgtgggtggtgatggagtatctcgcgggtggtagcctgacagacgtggttaccgaaacctgcatggatgagggccagattgctgcggtttgccgggagtgcctgcaggcgttggactttctgcactcgaaccaagtcatacaccgggacataaagtcagacaacatcctgctggggatggatggatctgtgaagcttacagactttggattctgtgcccagattacacctgaacagtcaaaaagaagcacgatggtcggcacaccctattggatggctccggaggtcgtgaccaggaaagcctatggcccaaaagtggacatatggagtttgggtattatggcaatcgaaatggtcgagggagagcccccttatctgaacgagaatccgctgagggcattgtatctgatcgcaactaacggcacacccgagctacaaaaccctgagcggctcagcgccgtgttccgcgacttcttgaaccgctgcctcgaaatggatgtcgataggagaggttccgcaaaagaactgctccaacatccatttctgaaattagccaagcctctgtcaagcctgacaccactgattatcgctgccaaagaggccatcaaaaatagcagccggtag

SEQ ID NO: 46008 - DNA, 1680 bp, Artificial Sequence
  derived and/or modified sequence
atgagcgacggcctggacaacgaggagaagccccccgccccccccctgagaatgaacagcaacaacagagacagcagcgccctgaaccacagcagcaagcccctgcccatggcccccgaggagaagaacaagaaggccagactgagaagcatcttccccggcggcggcgacaagaccaacaagaagaaggagaaggagagacccgagatcagcctgcccagcgacttcgagcacaccatccacgtgggcttcgacgccgtgaccggcgagttcacccccgacctgtacggcagccagatgtgccccggcaagctgcccgagggcatccccgagcagtgggccagactgctgcagaccagcaacatcaccaagctggagcagaagaagaacccccaggccgtgctggacgtgctgaagttctacgacagcaaggagaccgtgaacaaccagaagtacatgagcttcaccagcggcgacaagagcgcccacggctacatcgccgcccaccccagcagcaccaagaccgccagcgagccccccctggccccccccgtgagcgaggaggaggacgaggaggaggaggaggaggaggacgagaacgagcccccccccgtgatcgcccccagacccgagcacaccaagagcatctacaccagaagcgtggtggagagcatcgccagccccgccgtgcccaacaaggaggtgaccccccccagcgccgagaacgccaacagcagcaccctgtacagaaacaccgacagacagagaaagaagagcaagatgaccgacgaggagatcctggagaagctgagaagcatcgtgagcgtgggcgaccccaagaagaagtacaccagattcgagaagatcggccagggcgccagcggcaccgtgtacaccgccctggacatcgccaccggccaggaggtggccatcaagcagatgaacctgcagcagcagcccaagaaggagctgatcatcaacgagatcctggtgatgagagagaacaagaaccccaacatcgtgaactacctggacagctacctggtgggcgacgagctgtgggtggtgatggagtacctggccggcggcagcctgaccgacgtggtgaccgagacctgcatggacgagggccagatcgccgccgtgtgcagagagtgcctgcaggccctggacttcctgcacagcaaccaggtgatccacagagacatcaagagcgacaacatcctgctgggcatggacggcagcgtgaagctgaccgacttcggcttctgcgcccagatcacccccgagcagagcaagagaagcaccatggtgggcaccccctactggatggcccccgaggtggtgaccagaaaggcctacggccccaaggtggacatctggagcctgggcatcatggccatcgagatggtggagggcgagcccccctacctgaacgagaaccccctgagagccctgtacctgatcgccaccaacggcacccccgagctgcagaaccccgagagactgagcgccgtgttcagagacttcctgaacagatgcctggagatggacgtggacagaagaggcagcgccaaggagctgctgcagcaccccttcctgaagctggccaagcccctgagcagcctgacccccctgatcatcgccgccaaggaggccatcaagaacagcagcagatag

SEQ ID NO: 46009 - protein, 141 aa, Artificial Sequence
  derived and/or modified sequence
MKSYTPYFILLWSAVGIAKAAKIIIVPPIMFESHMYIFKTLASALHERGHHTVFLLSEGRDIAPSNHYSLQRYPGIFNSTTSDAFLQSKMRNIFSGRLTAIELFDILDHYTKNCDLMVGNHALIQGLKKEKFDLLLVDPND

SEQ ID NO: 46010 - protein, 371 aa, Artificial Sequence
  derived and/or modified sequence
MIEDSGKRGNTMAERRQLFAEMRAQDLDRIRLSTYRTACKLRFVQKKCNLHLVDIWNVIEALRENALNNLDPNTELNVSRLEAVLSTIFYQLNKRMPTTHQIHVEQSISLLLNFLLAAFDPEGHGKISVFAVKMALATLCGGKIMDKLRYIFSMISDSSGVMVYGRYDQFLREVLKLPTAVFEGPSFGYTEQSARSCFSQQKKVTLNGFLDTLMSDPPPQCLVWLPLLHRLANVENVFHPVECSYCHSESMMGFRYRCQQCHNYQLCQDCFWRGHAGGSHSNQHQMKEYTSWKSPAKKLTNALSKSLSCASSREPLHPMFPDQPEKPLNLAHIVPPRPVTSMNDTLFSHSVPSSGSPFITRSSDGAFGGCV

SEQ ID NO: 46011 - DNA, 1116 bp, Artificial Sequence
  derived and/or modified sequence
atgatcgaggatagcggaaaaagagggaacacaatggcagagcggaggcagctgttcgctgaaatgagggcccaggacctggatcggattcgacttagcacctatcggaccgcgtgcaagctcaggtttgttcagaagaaatgtaacctacacctggtagacatttggaacgtgatcgaagctctgcgtgagaacgctctaaacaacctggaccccaacaccgagctcaacgtaagcaggctcgaggctgttctttccaccattttctatcagctgaataagcgaatgcccactactcatcagatccatgtcgagcagtcaatctcactgctgctgaatttcctgctggccgcattcgacccggagggacacggtaaaattagcgtctttgccgtcaaaatggctctcgccactctgtgcggcggtaaaattatggataagctcaggtatatcttctctatgatcagcgatagcagcggcgttatggtctacggacggtacgaccagttcctccgggaggtgctcaagctacctaccgcggtcttcgagggccccagttttggctacaccgagcagagcgccagatcatgcttcagccagcagaaaaaagtcaccttaaacgggtttttggacaccttgatgtcagacccccctccccagtgcctggtgtggctgccactgcttcataggctagctaatgtggaaaacgtatttcaccccgtggagtgctcatactgtcacagcgagtccatgatgggattccgataccgatgtcagcagtgtcacaactatcagctctgccaagattgtttctggcgggggcacgccggtggaagccattccaatcagcaccagatgaaggaatacacctcttggaaatctcctgcaaagaaactaacaaacgcactcagcaagtcgcttagctgcgccagctcgagagaacctctccatcctatgtttcctgatcagcctgagaagccccttaacctggctcacatagtcccccccaggccggttacttctatgaatgatacactgttttctcactcggtgccgagttccgggtcaccatttatcactcggagttccgatggtgcatttggcggatgtgtgtag

SEQ ID NO: 46012 - DNA, 1116 bp, Artificial Sequence
  derived and/or modified sequence
atgatcgaagacagtggcaagcgaggcaacactatggcagaacgccgtcagctgttcgctgagatgcgagctcaagatcttgatagaatccggctcagtacttatcgtactgcttgtaaactgcgcttcgtgcagaagaaatgcaacttacacctggtggacatctggaatgtgattgaagctctgcgggaaaacgcattgaacaacctcgacccgaacaccgagctcaatgtatcgaggctggaggctgtgctgtctacaatcttttaccagctcaataagcgtatgccaacgacacaccagatccacgtggaacagagtattagtctgctccttaacttcctcctggcagcttttgaccctgagggccatgggaagatatccgtattcgccgttaagatggcgctggccacactctgtgggggaaaaatcatggataagttaagatatatcttctcgatgatttcagactcctcaggagtgatggtttacggtcggtacgatcagtttctccgtgaggtgttaaaactgccgactgctgtattcgaaggccccagctttggttatactgaacagagcgctagatcttgcttttcccagcaaaagaaggtcacccttaacggcttcctggatacattaatgtccgatcctcctcctcagtgtctggtgtggctgccgctcctgcatcgtctagctaatgtggaaaatgttttccatccggtcgaatgcagctattgtcattcagagagcatgatgggattcaggtaccggtgccaacagtgccataattaccagctatgccaggattgcttctggcgtggccacgcagggggctcacactccaaccaacatcagatgaaggagtacaccagttggaaatctccagcaaagaaactcacaaatgccctgtctaaaagcctctcatgcgcatcttcaagggagcctctgcatcccatgttcccggatcaaccagagaaaccgttaaatctggcccacattgtgccaccgcggccagttacttctatgaacgacactctcttctcccattccgtccccagctcaggctctccattcataacaagaagttctgatggagccttcggagggtgcgtttag

SEQ ID NO: 46013 - DNA, 1116 bp, Artificial Sequence
  derived and/or modified sequence
atgattgaagattctgggaagaggggcaacaccatggccgagcggcggcagctgtttgctgagatgagggcccaggacctggaccgcatccggctgagcacctacagaacagcctgcaagctgcgctttgtgcagaagaagtgcaacctgcacctggtggacatctggaatgtgattgaggccctgcgggagaatgccctgaacaacctggaccccaacacagagctgaatgtgtcccggctggaggccgtgctgagcaccatcttctaccagctgaacaagaggatgcccaccacccaccagatccacgtggagcagagcatcagcctgctgctgaacttcctgctggccgcctttgatcctgagggccacggcaagatctctgtgtttgctgtgaagatggccctggccaccctgtgtggcggcaagatcatggacaagctgcgctacatcttctccatgatcagtgacagcagtggagtgatggtgtatggccgctatgaccagttcctgcgggaggtgctgaagctgcccacagctgtgtttgagggccccagctttggctacacagagcagagcgcccggagctgcttcagccagcagaagaaggtgaccctgaatggcttcctggacaccctgatgtctgaccccccaccccagtgcctggtgtggctgcccctgctgcaccggctggccaacgtggagaatgtgttccaccctgtggagtgcagctactgccacagcgagagcatgatgggcttccgctaccgctgccagcagtgccacaactaccagctgtgccaggactgcttctggaggggccacgccggcggcagccacagcaaccagcaccagatgaaggagtacacctcctggaagagccctgccaagaagctgaccaatgccctgagcaagagcctgagctgtgccagcagccgggagcccctgcaccccatgtttcctgaccagcctgagaagcccctgaacctggcccacatcgtgccccccaggcctgtgacctccatgaatgacaccctcttcagccacagcgtgcccagcagcggcagccccttcatcaccaggagcagtgatggagcctttggaggctgtgtgtag

SEQ ID NO: 46014 - DNA, 1116 bp, Artificial Sequence
  derived and/or modified sequence
atgatcgaggacagcggcaagcggggcaacaccatggccgagcggcgacagctgttcgccgaaatgcgcgcgcaggaccttgatcggattcgattgagcacatatagaacggcatgtaagttacggtttgtacagaagaagtgcaatctccacttagtcgatatctggaatgtgatagaggccttacgcgagaatgcgctgaataatctagatcctaacaccgagctgaacgtgtcaaggctggaggccgtgctgtctactattttctatcaactgaataagcgcatgcccactactcatcagatacacgtcgaacagagcatctcgctgctcttgaactttttattggccgcctttgaccctgaggggcacggaaagattagtgtctttgccgtgaagatggcactggccaccctatgcggaggaaaaatcatggataaactgcggtatattttttccatgattagtgactctagcggcgtgatggtgtacggccgttacgatcagttcctgagggaggtcctcaagctgcctacggccgtattcgagggaccctccttcgggtacactgagcagtctgccagatcttgtttctctcagcagaagaaggtgactctcaatggattcctggatactttgatgtccgacccccctccccagtgtctggtgtggcttcctctcttgcaccgcctagcaaacgtggaaaatgtcttccaccctgtggagtgctcatactgtcacagcgagtcgatgatgggctttagatatcgatgtcagcagtgccacaactatcagctctgtcaggattgcttctggcgcggacatgccggtggctcccatagcaaccaacaccagatgaaagagtatacctcttggaagtcccctgcaaagaagctcaccaatgctctctccaagtccctatcttgtgcttcctctagggagcctctgcatcccatgtttccagaccagcccgagaagccattgaatttggcacatatcgtgccacccaggcctgttacgagcatgaatgacacccttttctctcatagtgttccatctagcggttcaccattcatcacccgaagctccgatggcgcatttggagggtgcgtctag

SEQ ID NO: 46015 - DNA, 1116 bp, Artificial Sequence
  derived and/or modified sequence
atgatcgaggacagcggcaagcggggcaacaccatggccgagcggaggcagttgtttgccgagatgcgtgctcaggatctcgaccgtataaggctgagtacatacaggaccgcgtgcaaattacggtttgtgcagaagaagtgcaatttgcacctggtcgatatctggaacgtgatcgaggccctccgcgagaatgctcttaacaatttggatccaaacactgaacttaacgtatcgaggctagaagccgtcctttccaccattttctaccaactcaataaaagaatgcccacaacccaccaaatccacgtggaacaatccatatccctcctcctgaactttttactggcagcctttgatcctgagggccatggaaagatatccgtgtttgccgttaagatggccctggctactctgtgcgggggcaagattatggataaactcagatacattttctcaatgatatccgactcttcgggggtgatggtctacggaagatatgatcaattcctgcgggaggtcctcaagctccctaccgcagtatttgaagggccttcctttggctacactgaacagagtgcacgaagctgtttctcccaacagaagaaggtgaccttgaacggctttttggatacactgatgtcagatcccccacctcagtgcctggtgtggcttcccctcctccacaggctggccaacgtggaaaatgtgttccaccccgtagagtgttcttattgccatagcgaaagcatgatgggttttcggtaccgctgtcagcagtgccataactaccagttgtgccaggactgcttctggcggggacacgcgggagggtctcactccaatcagcatcagatgaaagagtacacctcttggaaatcacctgccaaaaaactcacgaatgctctctcgaagagcctcagctgcgcttctagccgtgagcctctgcatcccatgttcccggaccagcccgagaaaccattgaatctggcccacattgtccctcccaggcctgtgacatccatgaatgatacgctcttcagccactccgtgccatcttcgggctcaccgttcattactcgcagctctgacggggccttcgggggatgcgtctag

SEQ ID NO: 46016 - DNA, 1116 bp, Artificial Sequence
  derived and/or modified sequence
atgatcgaggacagtgggaagaggggcaacaccatggctgagagacgccagctgttcgctgagatgcgggctcaagatcttgacaggatcagattatccacctatagaaccgcctgcaaactccgattcgtgcaaaaaaaatgcaatctgcacctggtagatatttggaacgtgatcgaggcccttcgcgaaaacgctctgaataatcttgatcctaacacagagctcaacgttagcaggctggaggccgtgttatccaccatcttttatcagcttaataaacggatgccaactacccaccagatccacgtagagcagagcatcagcctgctcctgaacttcttactagctgccttcgacccagagggacatggcaaaatttccgtgttcgctgtgaaaatggcgctcgcgacactgtgtggtgggaagattatggataaactccgttacattttcagcatgatatcagactcctcaggcgtgatggtctatggtagatatgaccaattcctgagggaagtcctgaaacttcccactgcggtattcgagggtccgagcttcggatacaccgagcagtccgcgcgaagctgcttcagccagcagaagaaggttaccctgaatgggttcttagacacactcatgagcgatccccctccacaatgtctcgtctggcttccacttctacaccggttagcaaatgtggagaacgtcttccatccagtggaatgcagctactgtcacagcgaatctatgatgggtttcaggtatcggtgtcagcaatgccacaactaccagctgtgtcaagactgcttctggcgtggccatgccggaggttcccattcaaatcagcaccagatgaaagaatatacaagttggaagtcccccgcaaaaaaattaaccaacgcgctctccaaatcgcttagctgcgcatccagcagagagccactccatccaatgttccctgaccaacccgaaaaacccctgaatctggctcacatcgttccgcctcgcccagtgacatccatgaacgataccttgtttagtcactccgtgccgtcatccggctcaccatttatcaccagaagcagcgacggggcatttggcggatgcgtgtag

SEQ ID NO: 46017 - DNA, 1116 bp, Artificial Sequence
  derived and/or modified sequence
atgattgaggacagcggaaaaaggggtaatacaatggctgagagacggcaactgttcgccgaaatgagagcgcaggacctggatcggatccgactgagtacctataggacagcttgtaaactgcggtttgtgcagaagaagtgtaatctccatctcgtggatatctggaacgtaatagaagccttgagggagaatgctctcaataaccttgatccgaacacagaacttaacgtgagcagacttgaggccgttctctctacaatattctatcagctcaataagcggatgcctactactcatcagattcacgtggagcagtctataagcctgttgctcaacttccttctggctgccttcgaccctgaaggtcacggcaagatcagcgttttcgcggttaagatggcccttgccaccctctgtggcggtaagattatggataaacttcgatacatcttttctatgatttctgattccagtggcgtgatggtgtatggacgttacgaccagtttctgagagaggtgctaaaactccccactgccgtatttgaggggccttcctttgggtacacagagcaatctgcaagaagttgcttctcacagcagaaaaaggtgactctgaacggctttttagacaccctgatgtcagatcctcctccccaatgtctggtctggctaccactgctccataggctggccaatgtggagaacgtttttcatcctgtcgaatgttcttactgtcacagcgaatcaatgatgggcttccgataccgatgtcagcagtgccataactaccagttatgtcaggactgtttttggcgtggtcacgcaggagggtcccatagcaatcagcaccaaatgaaagagtacactagttggaagagcccagcaaaaaagcttacaaatgccttgagtaagagtttgtcctgcgcctccagtcgtgagcctctgcaccccatgtttccggatcagcccgagaaacccctcaacctggcccatatagttcctcctagacctgtgaccagtatgaatgacacccttttttcacatagtgttccatcttcaggctccccctttattactcggagcagcgatggcgcattcggaggttgcgtctag

SEQ ID NO: 46018 - DNA, 1116 bp, Artificial Sequence
  derived and/or modified sequence
atgatcgaggacagcggcaagagaggcaacaccatggccgagagaagacagctgttcgccgagatgagagcccaggacctggacagaatcagactgagcacctacagaaccgcctgcaagctgagattcgtgcagaagaagtgcaacctgcacctggtggacatctggaacgtgatcgaggccctgagagagaacgccctgaacaacctggaccccaacaccgagctgaacgtgagcagactggaggccgtgctgagcaccatcttctaccagctgaacaagagaatgcccaccacccaccagatccacgtggagcagagcatcagcctgctgctgaacttcctgctggccgccttcgaccccgagggccacggcaagatcagcgtgttcgccgtgaagatggccctggccaccctgtgcggcggcaagatcatggacaagctgagatacatcttcagcatgatcagcgacagcagcggcgtgatggtgtacggcagatacgaccagttcctgagagaggtgctgaagctgcccaccgccgtgttcgagggccccagcttcggctacaccgagcagagcgccagaagctgcttcagccagcagaagaaggtgaccctgaacggcttcctggacaccctgatgagcgacccccccccccagtgcctggtgtggctgcccctgctgcacagactggccaacgtggagaacgtgttccaccccgtggagtgcagctactgccacagcgagagcatgatgggcttcagatacagatgccagcagtgccacaactaccagctgtgccaggactgcttctggagaggccacgccggcggcagccacagcaaccagcaccagatgaaggagtacaccagctggaagagccccgccaagaagctgaccaacgccctgagcaagagcctgagctgcgccagcagcagagagcccctgcaccccatgttccccgaccagcccgagaagcccctgaacctggcccacatcgtgccccccagacccgtgaccagcatgaacgacaccctgttcagccacagcgtgcccagcagcggcagccccttcatcaccagaagcagcgacggcgccttcggcggctgcgtgtag

SEQ ID NO: 46019 - DNA, 1680 bp, Artificial Sequence
  derived and/or modified sequence
agaggctggatttcatactcatagctctccctagaatttcagagagttctgttatgatctctgttgtaattaccaatttggttcaagtttgttctttaaatgaatatgcttagaattcacatatgttctggatgtactggaattaaaaggatttaagagatcatggtgtgcatgttctaggataaataggatttaccaatccttggatgaagtgcttgggaagtctttaagtgccataatcaactgccatttcaaagaatatagatggttttgaaaagttcatgctgtcccttcattgaattttagaatgattgaagatagtgggaaaagaggaaataccatggcagaaagaagacagctgtttgcagagatgagggctcaagatctggatcgcatccgactctccacctacagaacagcatgcaagcttaggtttgttcagaagaaatgcaatttgcacctggtggacatatggaatgtcatagaagcattgcgggaaaatgctctgaacaacctggacccaaacactgaactcaacgtgtcccgcttagaggctgtgctctccactattttttaccagctcaacaaacggatgccaaccactcaccaaatccatgtggagcagtccatcagcctcctccttaacttcctgcttgcagcgtttgatccggaaggccatggtaaaatttcagtatttgctgtcaaaatggctttagccacattgtgtggagggaagatcatggacaaattaagatatattttctcaatgatttctgactccagtggggtgatggtttatggacgatatgaccaattccttcgggaagttctcaaactacccacggcagtttttgaaggtccttcatttggttacacagaacagtcagccagatcctgtttctcccaacagaaaaaagtcacgttaaatggtttcttggacacgcttatgtcagatcctcccccgcagtgtctggtctggttgcctcttctgcatcgactagcaaatgtggaaaatgtcttccatccggttgagtgttcctactgccacagtgagagtatgatgggatttcgctaccgatgccaacagtgtcacaattaccagctctgtcaggactgcttctggaggggacatgccggtggttctcatagcaaccagcaccaaatgaaagagtacacgtcatggaaatcacctgctaagaagctgactaatgcattaagcaagtccctgagctgtgcttccagccgtgaacctttgcaccccatgttcccagatcagcctgagaagccactcaacttggctcacatcgtgcctcccagacctgtaaccagcatgaacgacaccctgttctcccactctgttccctcctcaggaagtccttttattaccaggagctcggacggtgcttttggtggatgcgtctagatggataacatgacttcttctaccctaaaatattcctataatactttgagctgttctggttcctccagggtgcatggtacccattaacccaaaatatgattatttcccttttttcccattttcagtcattttggaatgttctctgtgaaccacagttgtgttgtttaaagctcacatttctttctgtcaccacagagattggcctacggtttctgttttgagggtgctgttcaataaagctgtgtacactaaatgtc

SEQ ID NO: 46020 - protein, 677 aa, Artificial Sequence
  derived and/or modified sequence
MLARRQRDPLQALRRRNQELKQQVDSLLSESQLKEALEPNKRQHIYQRCIQLKQAIDENKNALQKLSKADESAPVANYNQRKEEEHTLLDKLTQQLQGLAVTISRENITEVGAPTEEEEESESEDSEDSGGEEEDAEEEEEEKEENESHKWSTGEEYIAVGDFTAQQVGDLTFKKGEILLVIEKKPDGWWIAKDAKGNEGLVPRTYLEPYSEEEEGQESSEEGSEEDVEAVDETADGAEVKQRTDPHWSAVQKAISEQINTVDVLTTMGAIPAGFRPSTLSQLLEEGNQFRANYFLQPELMPSQLAFRDLMWDATEGTIRSRPSRISLILTLWSCKMIPLPGMSIQVLSRHVRLCLFDGNKVLSNIHTVRATWQPKKPKTWTFSPQVTRILPCLLDGDCFIRSNSASPDLGILFELGISYIRNSTGERGELSCGWVFLKLFDASGVPIPAKTYELFLNGGTPYEKGIEVDPSISRRAHGSVFYQIMTMRRQPQLLVKLRSLNRRSRNVLSLLPETLIGNMCSIHLLIFYRQILGDVLLKDRMSLQSTDLISHPMLATFPMLLEQPDVMDALRSSWAGKESTLKRSEKRDKEFLKSTFLLVYHDCVLPLLHSTRLPPFRWAEEETETARWKVITDFLKQNQENQGALQALLSPDGVHEPFDLSEQTYDFLGEMRKNAV

SEQ ID NO: 46021 - DNA, 2034 bp, Artificial Sequence
  derived and/or modified sequence
atgctcgcccgaaggcagagagatcctctgcaggctctgcggcgtcggaaccaagaactgaagcagcaggtggattctttgctctcggagagtcaactgaaggaagcccttgaacccaataagcggcagcacatctaccaacggtgcatccagctaaagcaggcaatcgacgagaacaagaatgctctgcaaaaactgagcaaggctgacgaaagtgcacctgtggccaattataaccagagaaaagaggaggaacacaccttattggacaagttgacacagcagctgcaaggactggctgtgaccatcagtagagaaaatataaccgaagtgggggcccctaccgaagaggaggaggaaagtgaaagcgaagatagtgaagactctgggggggaagaggaagacgcagaggaagaggaggaggaaaaagaggagaacgaaagccataaatggtccactggtgaggaatatatcgccgtgggggatttcaccgcgcagcaagtgggggatctgaccttcaaaaagggcgaaattctgcttgtgattgaaaaaaaaccagatggctggtggatcgccaaggacgcaaaaggtaacgaagggttagtaccacgcacctatttggaaccttactcagaggaggaggaaggacaggaaagctccgaagaggggtcagaagaggacgtagaagcggttgatgaaaccgcagatggcgccgaggtgaaacagagaacagatccccattggagcgccgtgcaaaaggctatatctgaacaaatcaatacagtagacgtcctaactaccatgggcgcaattcctgcgggattcaggccatcaactctcagtcaactactagaggaaggtaatcagttccgcgccaattatttcctccaaccagaactcatgccgagccagctagcctttagagacttgatgtgggatgcaactgagggcaccattcggtcgcggccatcccggatcagcctcattctgacgctatggagctgcaaaatgatcccactacctgggatgtccattcaagtactatcgcggcacgtgaggctgtgcctgtttgatggtaacaaagtattaagtaatattcacacagtgagggctacgtggcagccaaaaaagcctaagacttggaccttctcccctcaggtgacccgtatattaccttgcctccttgacggcgattgctttatcaggagtaactcagccagccctgacctgggcatactgtttgaacttggcatttcgtatatccggaactctacaggcgaacggggtgagctcagttgcggctgggtgttcttaaagttatttgacgccagcggggtcccaatcccagctaaaacctatgagctgttcttgaatggcggcaccccatatgagaaggggatcgaggtcgatccctctatctcacggcgagcccacggttccgttttctaccagataatgacaatgaggcggcagccgcagttgctcgtcaagctgaggtccctcaatcggcgctcacggaacgtcctgagtttactccctgagactctgataggcaatatgtgttctatacatctgctgatcttctacagacagattctgggtgacgtgcttctcaaagaccgcatgtctcttcagtccaccgacttaatttcccatccaatgctggccactttccccatgctgttggagcagccagatgttatggatgccttacgctcaagttgggccggcaaagagtcgactctgaaaaggtcggagaaacgggataaagagttcttaaagagtacatttttgctggtctaccacgattgcgttttgccactgttgcacagcactagattaccaccattccggtgggctgaggaagaaactgaaactgctcgttggaaagtgatcaccgatttcctaaagcagaatcaggaaaatcagggagcactccaagctcttctgagccctgatggagtgcacgagccttttgatctcagcgagcagacatacgatttcttgggagagatgcgcaagaacgccgtgtag

SEQ ID NO: 46022 - DNA, 2034 bp, Artificial Sequence
  derived and/or modified sequence
atgctggcccggcggcagagggaccccctgcaggccctgcggcggaggaaccaggagctgaagcagcaggtggacagcctgctgtctgagagccagctgaaggaggccctggagcccaacaagaggcagcacatctaccagcgctgcatccagctgaagcaggccattgatgagaacaagaatgccctgcagaagctgagcaaggcagatgagagcgcccctgtggccaactacaaccagaggaaggaggaggagcacaccctgctggacaagctgacccagcagctgcagggcctggccgtgaccatcagccgggagaacatcacagaggtgggcgcccccacagaggaggaggaggagagcgagagcgaggacagtgaagattctggaggagaggaggaggatgctgaggaggaggaggaggagaaggaggagaatgaaagccacaagtggagcactggagaggagtacatcgctgtgggggacttcaccgcccagcaggtgggggacctgaccttcaagaagggggagatcctgctggtgattgagaagaagccagatggctggtggatcgccaaggatgccaagggaaatgaaggcctggtgcccaggacctacctggagccctacagcgaggaggaggagggccaggagagcagcgaggagggcagcgaggaggatgtggaggccgtggatgaaacagcagatggagctgaggtgaagcagaggacagacccccactggagcgctgtgcagaaggccatcagcgagcagatcaacacagtggatgtgctgaccaccatgggcgccatcccagctggcttccggcccagcaccctgagccagctgctggaggagggcaaccagttccgggccaactacttcctgcagcctgagctgatgcccagccagctggccttccgggacctgatgtgggatgccacagagggcaccatccgcagccggcccagccgcatcagcctcatcctgaccctgtggagctgcaagatgatccccctgcccggcatgagcatccaggtgctgagcagacatgtgcggctgtgcctgtttgatggcaacaaggtgctgagcaacatccacacagtgcgggccacctggcagcccaagaagcccaagacctggaccttcagcccccaggtgacccgcatcctgccctgcctgctggatggagactgcttcatccgcagcaacagcgccagcccagacctgggcatcctgtttgagctgggcatctcctacatccggaacagcactggagagcggggggagctgagctgtggctgggtgttcctgaagctgtttgatgccagcggcgtgcccatcccagccaagacctatgagctgttcctgaatggaggcaccccctatgaaaaaggaattgaggtggaccccagcatcagcagaagagcccacggcagcgtcttctaccagatcatgaccatgaggcggcagccccagctgctggtgaagctgcggagcctgaacagaagaagcagaaatgtgctgagcctgctgcctgagaccctgattggcaacatgtgcagcatccacctgctgatcttctaccggcagatcctgggagatgtgctgctgaaggacaggatgagcctgcagagcacagacctgatcagccaccccatgctggccaccttccccatgctgctggagcagccagatgtgatggatgccctgcggagctcctgggccggcaaggagagcaccctgaagaggtctgagaagagggacaaggagttcctgaagagcaccttcctgctggtgtaccatgactgtgtgctgcccctgctgcacagcacccggctgccccccttccgctgggccgaggaggagacagaaacagcccgctggaaggtgatcacagacttcctgaagcagaaccaggagaaccagggcgccctgcaggccctgctgagcccagatggagtgcatgagccctttgacctgtctgagcagacctatgacttcctgggggagatgaggaagaatgctgtgtag

SEQ ID NO: 46023 - DNA, 2034 bp, Artificial Sequence
  derived and/or modified sequence
atgctggcccggcggcagcgggaccccctgcaggccctgcggcggcggaatcaggagcttaaacagcaggtagacagtcttctgtccgaatcgcagctcaaggaagctcttgaacctaacaagcgccagcacatctaccagaggtgtatccaactgaagcaggccatcgatgaaaataagaacgccctccagaagcttagtaaggcagacgagtccgctccggtggctaactataaccagcgcaaggaagaagagcacaccctgctcgacaagctaacacagcagctccaaggcctggccgttaccatatcacgggagaatataacagaagtgggggcgcctacagaggaggaggaggagtccgagagcgaggattcggaggacagcggtggtgaagaggaagatgcagaggaagaggaagaagaaaaggaagagaacgagtcccacaagtggtcaaccggggaggagtacattgctgtgggtgacttcaccgcccaacaggtaggcgatctgaccttcaagaaaggcgagattctgctggttattgaaaagaaaccagatggatggtggatcgcaaaggatgccaagggtaacgagggcttggttccccggacgtatctggagccttactctgaggaagaggaggggcaggagtcatcggaagagggatccgaagaagacgtggaggccgtggatgaaaccgccgacggagctgaggtgaaacagagaacagatcctcattggtcagctgtccagaaggcaattagcgagcagattaataccgtggacgtgctcacgacgatgggagccattccagctgggtttcgccccagcactctgagccagctccttgaagaagggaaccagtttagagcgaattattttctacaaccagagctaatgccaagtcaattagcatttagggatctgatgtgggatgctacagagggaacaattcgcagtcgaccatctagaatcagcctaattctcaccctgtggtcttgcaagatgattccgctgccaggaatgtccattcaggtgctatcacgtcatgttagactttgcctattcgatggtaataaagtgcttagtaacatccacacagtgagggcaacgtggcagcctaaaaaacccaaaacttggacgtttagccctcaggtaactaggattctcccttgtctgctggatggggattgttttatccggtctaactccgctagcccagacctcgggatactctttgagctgggtatctcctacatcaggaactcaaccggtgaacggggggagcttagctgtggatgggtctttctgaaactattcgacgccagtggagtgcctattccagccaaaacttacgagctttttctgaacgggggtaccccttacgagaaggggattgaggtggaccccagcatttcgcgcagggcccatggttccgtgttttaccaaattatgacaatgaggcgccaaccccaattactggtgaagctccgatccttaaacaggcgatccagaaacgtgctttcactcttgccagagactttgatagggaacatgtgcagtatacaccttctgatattctacagacaaatcctgggcgacgtgcttctgaaggacagaatgtcgctgcagtccactgatcttattagtcaccctatgctcgctacctttccaatgctgcttgagcagccagatgtgatggacgctttgaggagtagttgggccggcaaagaaagcacattaaagagatctgagaagagagacaaagaatttctgaaaagcacatttctgctggtataccatgattgcgttttacccctgttgcatagcacccgtctgccaccgttcagatgggctgaggaggaaaccgagactgcaaggtggaaggtaatcactgactttttgaagcagaatcaggaaaatcagggagcccttcaagccctcctttcgcctgatggcgtccatgagcccttcgatttgtctgaacagacctatgacttcttaggagagatgcgtaagaacgccgtgtag

SEQ ID NO: 46024 - DNA, 2513 bp, Artificial Sequence
  derived and/or modified sequence
aatcagagcaccgcagccagggagatgctggcgagacgacagcgagatcctctccaggccctgcggcgccgcaatcaggagctgaagcaacaggttgatagtttgctttctgagagccaactgaaagaagctctagaacccaataaaagacaacatatttatcaaagatgtatccagttaaagcaggcaatagatgaaaataaaaatgctcttcaaaaattaagcaaagctgatgaatctgcacctgttgcaaactataatcagagaaaagaagaggagcatactcttttggacaagcttacccaacaactgcagggccttgctgtgacaataagcagagaaaatataactgaagttggggcacctactgaagaagaggaagaaagtgaaagtgaagatagtgaagacagtggtggggaggaagaagatgcagaggaggaagaggaagagaaagaggaaaatgaatctcacaaatggtcaaccggtgaagaatacatcgctgttggagattttactgctcagcaagttggagatcttacatttaagaaaggggaaattctccttgtaattgaaaaaaaacctgatggttggtggatagctaaggatgccaaaggaaatgaaggtcttgttcccagaacctacctagagccttatagtgaagaagaagaaggccaagagtcaagtgaagagggcagtgaagaagatgtagaggcggtggatgaaacagcagatggagcagaagttaagcaaagaactgatccccactggagtgctgttcagaaagcgatttcagagcagataaacactgttgatgtgttaactacgatgggagctattcctgcagggttcaggccttccacgctctcacagcttctggaggaagggaatcaatttcgagcaaattacttcttacaaccagagctcatgccttcacaactggccttcagagatctgatgtgggatgctacagaaggcactattaggtcgagaccaagtcgtatttcattgattctgacattatggagctgtaaaatgattcctcttccaggaatgagcatacaggttctcagcagacatgtacgcctctgtctatttgatggtaataaggttctgagcaacattcatacagtcagagccacatggcaacctaaaaagcccaaaacatggaccttttctccccaggttactcgcatcttaccatgtttgcttgatggtgattgctttatcaggtctaattctgcatctccagatcttggaatattatttgaacttggaatttcttatattcgcaattcaactggtgaaagaggagagttaagctgtggctgggtgtttcttaaactttttgatgccagtggagttcctattccagcaaaaacttatgagcttttcttgaatggtggtactccttatgaaaaaggtattgaagtggacccttcaatatccagaagagcacacggcagtgttttctaccagattatgacaatgagaaggcagcctcaacttctagtgaaactgagatccttgaacagaagatcaagaaatgtactaagtctactgccagaaacattaattggaaatatgtgttctattcacttgttgatattttatcgacaaattcttggagatgtgctcctgaaagacaggatgagcttgcaaagtactgatttaattagccatcccatgctggccaccttccccatgctcttggagcagcctgatgtgatggatgctctcaggagttcgtgggctggaaaagaaagcacattaaaaagatcagagaagagagacaaagagttcctgaagtccacgtttctcctggtttaccatgactgcgtgctcccacttctccactccacacgcctacccccattcaggtgggcagaagaagagactgagactgcacggtggaaagttatcactgacttccttaagcaaaaccaagaaaaccagggcgccctccaagctctgctgtcaccagacggagttcatgaaccttttgacctttcagagcagacctatgacttcttgggtgaaatgagaaagaatgcagtgtgacagtggcagcctctagccctcagcttcccacggaatcagatggatcctccacgattacgtgaataaaatgatggaaccaaaaatcactgtcactttacaacttaggttttactcttttctttctacagaccatatttttaaagaaatgtttatacaataatttaaatattttttaaaaccataaaataaatttttataaggaatactgttatatctaaatttaaacagtatttattttttcaaaaacagctacttaagttaatggtatagatttctataaaagcaagattttgtcaaaaactaaatttatgattattcaagaaagtgaaaaaaacaacctacagaatgggaaaacatatttgcaaatcatctaactgataaaggtctagtatccaaaatatttaaatttatgagtgttaataaaatttatcttgttcaatgaagaggaagttaaa

SEQ ID NO: 46025 - DNA, 2034 bp, Artificial Sequence
  derived and/or modified sequence
atgttggccagacgccaaagagacccacttcaggcgctcaggcgtagaaaccaagaacttaagcaacaagtagactcgttactgagtgaatcacagctcaaagaggcattggaacccaataaacgccaacacatatatcaaagatgtatccagctgaagcaagcaatcgatgagaataaaaacgctttacagaagttaagcaaggcggatgagtctgccccagtggcaaactataatcagaggaaagaggaagaacacacgctgctcgataagctgacgcagcagctgcaagggctggccgtgacaatctcccgggagaacataaccgaggtgggcgcacctacagaagaggaagaagagagcgagagtgaggactcagaggacagcggaggcgaagaggaggacgcagaggaggaggaggaagaaaaagaggaaaatgaatctcacaaatggagcaccggcgaagaatacatcgcggtcggagacttcaccgcacaacaggtgggcgacctgactttcaagaagggagagattctgctggtgattgagaaaaaaccagacggatggtggatagccaaagacgcgaaggggaacgagggtctggtgccaagaacttacctcgaaccatattccgaggaagaggaggggcaggaaagcagtgaggaggggagtgaggaggatgtggaggcagtcgatgagacagctgacggagccgaagttaagcaaagaaccgacccacactggtccgctgtacagaaggcaatttcagaacaaattaacacagtagatgttctgacgacgatgggcgcaatcccagccggatttcggccaagtaccctatctcagctccttgaagaagggaatcagttcagggcaaactattttctgcaaccagaattgatgccgagccaactggccttccgcgaccttatgtgggatgctacagaagggacaattaggagccgacccagtcggatcagtctcattctgacactttggagctgtaaaatgattccactgcccggtatgtccatccaggttctcagccgccatgttcgactgtgcttattcgatggtaacaaagtcttgtccaacatccatactgtgagggcgacatggcagccaaagaaacccaaaacctggacattttcaccgcaggttacccggattctgccctgcttactcgatggcgattgcttcatcaggtcaaattctgcctccccagatctgggcatcctgtttgagctggggatctcctacataaggaactccaccggcgaacggggagaactatcgtgcggatgggtattcctgaagttgttcgatgcctccggtgtgccaatcccagccaagacgtacgagctattccttaatggcggtaccccttatgaaaagggaatagaagttgatccatccatatcaagaagggcccacggaagcgttttctaccaaatcatgaccatgaggcggcagcctcagctgctagtgaagttgcgctccctcaaccgacggagtaggaatgtgctgtccctcctacctgagaccctcatagggaatatgtgctccattcatctgctgatcttttacagacagatcttgggcgacgtcctcctaaaggacaggatgtccttacagagcaccgatttgatcagtcacccaatgctggctacatttccaatgctgttggaacagccagatgtcatggacgctctgagaagctcatgggccggtaaagagtctactctcaagagaagcgaaaagagagacaaagaatttctcaagagtacgttccttctggtctaccacgattgtgtacttccactgctgcacagtacccgactgcccccttttagatgggccgaagaagaaacagagaccgccagatggaaggtcatcacagatttcctcaagcagaatcaagaaaatcagggcgcacttcaagccctgctcagtcccgatggtgtccatgagccattcgacctgtcagagcaaacatacgattttctaggcgagatgagaaaaaatgccgtatag

SEQ ID NO: 46026 - DNA, 2034 bp, Artificial Sequence
  derived and/or modified sequence
atgctggccagaagacagagagaccccctgcaggccctgagaagaagaaaccaggagctgaagcagcaggtggacagcctgctgagcgagagccagctgaaggaggccctggagcccaacaagagacagcacatctaccagagatgcatccagctgaagcaggccatcgacgagaacaagaacgccctgcagaagctgagcaaggccgacgagagcgcccccgtggccaactacaaccagagaaaggaggaggagcacaccctgctggacaagctgacccagcagctgcagggcctggccgtgaccatcagcagagagaacatcaccgaggtgggcgcccccaccgaggaggaggaggagagcgagagcgaggacagcgaggacagcggcggcgaggaggaggacgccgaggaggaggaggaggagaaggaggagaacgagagccacaagtggagcaccggcgaggagtacatcgccgtgggcgacttcaccgcccagcaggtgggcgacctgaccttcaagaagggcgagatcctgctggtgatcgagaagaagcccgacggctggtggatcgccaaggacgccaagggcaacgagggcctggtgcccagaacctacctggagccctacagcgaggaggaggagggccaggagagcagcgaggagggcagcgaggaggacgtggaggccgtggacgagaccgccgacggcgccgaggtgaagcagagaaccgacccccactggagcgccgtgcagaaggccatcagcgagcagatcaacaccgtggacgtgctgaccaccatgggcgccatccccgccggcttcagacccagcaccctgagccagctgctggaggagggcaaccagttcagagccaactacttcctgcagcccgagctgatgcccagccagctggccttcagagacctgatgtgggacgccaccgagggcaccatcagaagcagacccagcagaatcagcctgatcctgaccctgtggagctgcaagatgatccccctgcccggcatgagcatccaggtgctgagcagacacgtgagactgtgcctgttcgacggcaacaaggtgctgagcaacatccacaccgtgagagccacctggcagcccaagaagcccaagacctggaccttcagcccccaggtgaccagaatcctgccctgcctgctggacggcgactgcttcatcagaagcaacagcgccagccccgacctgggcatcctgttcgagctgggcatcagctacatcagaaacagcaccggcgagagaggcgagctgagctgcggctgggtgttcctgaagctgttcgacgccagcggcgtgcccatccccgccaagacctacgagctgttcctgaacggcggcaccccctacgagaagggcatcgaggtggaccccagcatcagcagaagagcccacggcagcgtgttctaccagatcatgaccatgagaagacagccccagctgctggtgaagctgagaagcctgaacagaagaagcagaaacgtgctgagcctgctgcccgagaccctgatcggcaacatgtgcagcatccacctgctgatcttctacagacagatcctgggcgacgtgctgctgaaggacagaatgagcctgcagagcaccgacctgatcagccaccccatgctggccaccttccccatgctgctggagcagcccgacgtgatggacgccctgagaagcagctgggccggcaaggagagcaccctgaagagaagcgagaagagagacaaggagttcctgaagagcaccttcctgctggtgtaccacgactgcgtgctgcccctgctgcacagcaccagactgccccccttcagatgggccgaggaggagaccgagaccgccagatggaaggtgatcaccgacttcctgaagcagaaccaggagaaccagggcgccctgcaggccctgctgagccccgacggcgtgcacgagcccttcgacctgagcgagcagacctacgacttcctgggcgagatgagaaagaacgccgtgtag

SEQ ID NO: 46027 - protein, 614 aa, Artificial Sequence
  derived and/or modified sequence
MLARRQRDPLQALRRRNQELKQQVDSLLSESQLKEALEPNKRQHIYQRVGAPTEEEEESESEDSEDSGGEEEDAEEEEEEKEENESHKWSTGEEYIAVGDFTAQQVGDLTFKKGEILLVIEKKPDGWWIAKDAKGNEGLVPRTYLEPYSEEEEGQESSEEGSEEDVEAVDETADGAEVKQRTDPHWSAVQKAISEINTVDVLTTMGAIPAGFRPSTLSQLLEEGNQFRANYFLQPELMPSQLAFRDLMWDATEGTIRSRPSRISLILTLWSCKMIPLPGMSIQVLSRHVRLCLFDGNKVLSNIHTVRATWQPKKPKTWTFSPQVTRILPCLLDGDCFIRSNSASPDLGILFELGISYIRNSTGERGELSCGWVFLKLFDASGVPIPAKTYELFLNGGTPYEKGIEVDPSISRRAHGSVFYQIMTMRRQPQLLVKLRSLNRRSRNVLSLLPETLIGNMCSIHLLIFYRQILGDVLLKDRMSLQSTDLISHPMLATFPMLLEQPDVMDALRSSWAGKESTLKRSEKRDKEFLKSTFLLVYHDCVLPLLHSTRLPPFRWAEEETETARWKVITDFLKQNQENQGALQALLSPDGVHEPFDLSEQTYDFLGEMRKNAV

SEQ ID NO: 46028 - DNA, 1845 bp, Artificial Sequence
  derived and/or modified sequence
atgctggcacggagacagagggatcctctccaagcacttcggagaaggaaccaggagcttaagcagcaggtggacagcctactaagtgaatcacagctcaaggaggccctggagcctaacaaacgacagcatatctatcagcgtgtaggggctcccactgaggaagaggaggaatctgagagtgaggactctgaggacagcggcggggaggaggaggacgcggaagaggaggaggaagaaaaagaggagaatgagtcccataagtggtcaaccggggaagagtatatcgccgtgggggacttcaccgcacaacaagtcggagatttaacattcaagaaaggggaaatactgctcgtgatcgagaaaaagccagacggttggtggattgccaaggatgctaagggaaacgaaggtctggtgccccggacctaccttgaaccctacagcgaggaggaggagggccaggagtcaagtgaggaaggctccgaagaggacgtcgaggccgtggacgagactgctgatggagcagaggtaaagcagcgtaccgatccgcactggagcgccgtccagaaggccataagcgagattaacaccgttgacgtccttacaactatgggggcaatccccgccggttttcgcccatcgactttatcacagttactcgaggaaggcaaccaatttcgcgcaaattacttcctgcagcctgagttgatgccatcccagctcgccttcagagatctcatgtgggatgccactgaaggaaccatccggtctcgaccaagtcgaatatccctcatcctgactctctggagctgcaagatgattcctctgcccggaatgtccatccaagttctcagccggcatgtgcgtctctgtctgttcgacggaaataaagttctgtctaacattcacacggtcagagccacgtggcaacctaagaagcccaagacctggacgttttcacctcaggtgactcgcatattaccgtgcctgctggatggagactgctttatccgatctaacagtgcaagcccggatctgggaatcctctttgagctgggaatttcctacatccgcaactcaaccggcgagcgcggcgagctatcctgcggctgggtattcctgaagctcttcgatgccagcggggtacctatccctgccaaaacatatgagttgtttttgaatggggggaccccgtatgagaaaggcatcgaggttgaccccagcatttccaggcgggctcatgggagcgtgttctatcaaatcatgaccatgcgcagacagcctcagctgttggtgaagttacgcagcctcaaccggcgcagccgcaacgtgttgagcctgctgccggagaccctcattggcaatatgtgcagcattcatctcctgatcttctatcgccagattctgggcgatgtgctccttaaagaccgcatgagcctgcagtctacagaccttatctctcatcctatgctggcaaccttcccaatgctgctggaacagcccgatgtgatggatgcgctgagatcctcttgggctggcaaagagtcgaccttaaaaagaagcgagaaacgcgacaaagagtttctgaagtctacatttctgctggtgtatcacgattgtgttcttcccctgctgcacagcactagactgccgccattccggtgggcagaagaggagacagagaccgcgcgttggaaggtaataaccgactttctgaaacagaaccaagaaaatcagggcgcattacaggccttattgagccccgatggggtgcacgagcctttcgacctgtctgaacaaacctacgatttccttggcgagatgcgcaagaatgcggtctag

SEQ ID NO: 46029 - DNA, 1845 bp, Artificial Sequence
  derived and/or modified sequence
atgctggcccggcggcagagggaccccctgcaggccctgcggcggaggaaccaggagctgaagcagcaggtggacagcctgctgtctgagagccagctgaaggaggccctggagcccaacaagaggcagcacatctaccagagggtgggcgcccccacagaggaggaggaggagagcgagagcgaggacagtgaagattctggaggagaggaggaggatgctgaggaggaggaggaggagaaggaggagaatgaaagccacaagtggagcactggagaggagtacatcgctgtgggggacttcaccgcccagcaggtgggggacctgaccttcaagaagggggagatcctgctggtgattgagaagaagccagatggctggtggatcgccaaggatgccaagggaaatgaaggcctggtgcccaggacctacctggagccctacagcgaggaggaggagggccaggagagcagcgaggagggcagcgaggaggatgtggaggccgtggatgaaacagcagatggagctgaggtgaagcagaggacagacccccactggagcgctgtgcagaaggccatcagcgagatcaacacagtggatgtgctgaccaccatgggcgccatcccagctggcttccggcccagcaccctgagccagctgctggaggagggcaaccagttccgggccaactacttcctgcagcctgagctgatgcccagccagctggccttccgggacctgatgtgggatgccacagagggcaccatccgcagccggcccagccgcatcagcctcatcctgaccctgtggagctgcaagatgatccccctgcccggcatgagcatccaggtgctgagccgccacgtgcggctgtgcctgtttgatggcaacaaggtgctgagcaacatccacacagtgcgggccacctggcagcccaagaagcccaagacctggaccttcagcccccaggtgacccgcatcctgccctgcctgctggatggagactgcttcatccgcagcaacagcgccagcccagacctgggcatcctgtttgagctgggcatctcctacatccggaacagcactggagagcggggggagctgagctgtggctgggtgttcctgaagctgtttgatgccagcggcgtgcccatcccagccaagacctatgagctgttcctgaatggaggcaccccctatgagaagggcatcgaggtggaccccagcatcagccggcgggcccacggctctgtgttctaccagatcatgaccatgaggcggcagccccagctgctggtgaagctgcggagcctgaacagaagaagcagaaatgtgctgagcctgctgcctgagaccctcatcggcaacatgtgcagcatccacctgctgatcttctaccggcagatcctgggagatgtgctgctgaaggacaggatgagcctgcagagcacagacctgatcagccaccccatgctggccaccttccccatgctgctggagcagccagatgtgatggatgccctgcggagctcctgggccggcaaggagagcaccctgaagaggtctgagaagagggacaaggagttcctgaagagcaccttcctgctggtgtaccatgactgtgtgctgcccctgctgcacagcacccggctgccccccttccgctgggccgaggaggagacagaaacagcccgctggaaggtgatcacagacttcctgaagcagaaccaggagaaccagggcgccctgcaggccctgctgagcccagatggagtgcatgagccctttgacctgtctgagcagacctatgacttcctgggggagatgaggaagaatgctgtgtag

SEQ ID NO: 46030 - DNA, 1845 bp, Artificial Sequence
  derived and/or modified sequence
atgctggcccggcggcagcgggaccccctgcaggccctgcggcggcgtaaccaagagctgaagcagcaggtggactccctgctgtcagagagccagttgaaggaagcacttgaacccaataagcgccaacacatctatcagcgcgtgggcgctccaacggaggaggaagaggagagtgagtctgaggacagcgaggattccgggggcgaggaggaggacgcagaagaggaggaggaagaaaaggaggagaatgagtctcacaaatggagcactggagaggaatatattgctgttggcgattttacagcacagcaggtaggagatctgacctttaaaaagggcgaaatcctccttgtcatcgagaaaaagcctgacggttggtggatcgcaaaggatgctaaaggcaacgaggggctcgtccctagaacgtacctggaaccgtactccgaagaggaggagggtcaagagtcaagtgaagaagggtctgaggaggacgttgaggcagtggacgagacggccgatggggccgaggttaagcagcggacggacccccattggagcgccgtacagaaagcaatatcagaaatcaacacagtcgatgtcctgactacaatgggagcaatccccgccggattcagacccagtactttgtcccagctcctcgaggaaggaaatcaattccgggccaactacttcctacagcctgagctgatgccttcccagctggcatttcgagacctgatgtgggatgcaaccgaaggcaccattcggtcacggccatcacggatttccctgatcttgacactgtggagctgcaaaatgatcccacttcctggcatgtccatccaggtcctgtcacgccatgtgaggttgtgcctatttgacgggaataaagtgctttccaacatccatacagtcagagctacttggcagcctaagaaacctaagacatggacgttctcccctcaggtgacccgtatcctcccttgcctgctagacggtgattgttttatcagaagtaactctgctagtcctgatttgggaatcctgtttgaactcggaatctcatacattagaaactctacaggggagcgaggcgaattgagttgcggctgggtgttcctgaagctcttcgatgcctccggcgtgcctatccctgctaaaacctacgagctgtttttgaatggaggaacaccctacgaaaaaggaatagaggtagatccatctatatctcgtagggctcacggtagcgtcttttatcaaattatgactatgcgcaggcagccacaattactagtgaagttacggagtctcaatagaaggtccaggaacgtactgtcattgctgcccgaaactctgatagggaacatgtgcagtattcaccttctgatattttatcgtcaaattttaggcgacgtgctactgaaagatcggatgagtcttcaatcgactgatctcataagccaccctatgctggccactttccccatgctcttggaacaaccggacgtcatggacgcactgcgatctagttgggccgggaaagaaagtactctgaaaagatcagagaagcgtgataaagagtttctaaagagtacctttctcctagtctaccatgactgtgtcctccccctccttcatagcacaagactcccgcctttccgctgggccgaagaggaaacagagacagctagatggaaagtgattaccgactttctgaagcaaaaccaggaaaatcagggagctctgcaagccctactatcccccgatggcgtgcacgaaccttttgatttgtccgagcagacctatgatttcctcggcgagatgcggaaaaatgccgtgtag

SEQ ID NO: 46031 - DNA, 1932 bp, Artificial Sequence
  derived and/or modified sequence
ggagatgctggcgagacgacagcgagatcctctccaggccctgcggcgccgcaatcaggagctgaagcaacaggttgatagtttgctttctgagagccaactgaaagaagctctagaacccaataaaagacaacatatttatcaaagagttggggcacctactgaagaagaggaagaaagtgaaagtgaagatagtgaagacagtggtggggaggaagaagatgcagaggaggaagaggaagagaaagaggaaaatgaatctcacaaatggtcaaccggtgaagaatacatcgctgttggagattttactgctcagcaagttggagatcttacatttaagaaaggggaaattctccttgtaattgaaaaaaaacctgatggttggtggatagctaaggatgccaaaggaaatgaaggtcttgttcccagaacctacctagagccttatagtgaagaagaagaaggccaagagtcaagtgaagagggcagtgaagaagatgtagaggcggtggatgaaacagcagatggagcagaagttaagcaaagaactgatccccactggagtgctgttcagaaagcgatttcagagataaacactgttgatgtgttaactacgatgggagctattcctgcagggttcaggccttccacgctctcacagcttctggaggaagggaatcaatttcgagcaaattacttcttacaaccagagctcatgccttcacaactggccttcagagatctgatgtgggatgctacagaaggcactattaggtcgagaccaagtcgtatttcattgattctgacattatggagctgtaaaatgattcctcttccaggaatgagcatacaggttctcagcagacatgtacgcctctgtctatttgatggtaataaggttctgagcaacattcatacagtcagagccacatggcaacctaaaaagcccaaaacatggaccttttctccccaggttactcgcatcttaccatgtttgcttgatggtgattgctttatcaggtctaattctgcatctccagatcttggaatattatttgaacttggaatttcttatattcgcaattcaactggtgaaagaggagagttaagctgtggctgggtgtttcttaaactttttgatgccagtggagttcctattccagcaaaaacttatgagcttttcttgaatggtggtactccttatgaaaaaggtattgaagtggacccttcaatatccagaagagcacacggcagtgttttctaccagattatgacaatgagaaggcagcctcaacttctagtgaaactgagatccttgaacagaagatcaagaaatgtactaagtctactgccagaaacattaattggaaatatgtgttctattcacttgttgatattttatcgacaaattcttggagatgtgctcctgaaagacaggatgagcttgcaaagtactgatttaattagccatcccatgctggccaccttccccatgctcttggagcagcctgatgtgatggatgctctcaggagttcgtgggctggaaaagaaagcacattaaaaagatcagagaagagagacaaagagttcctgaagtccacgtttctcctggtttaccatgactgcgtgctcccacttctccactccacacgcctacccccattcaggtgggcagaagaagagactgagactgcacggtggaaagttatcactgacttccttaagcaaaaccaagaaaaccagggcgccctccaagctctgctgtcaccagacggagttcatgaaccttttgacctttcagagcagacctatgacttcttgggtgaaatgagaaagaatgcagtgtgacagtggcagcctctagccctcagcttcccacggaatcagatggatcctccacgattacgtgaataaaatgatggaaccaaaaa

SEQ ID NO: 46032 - DNA, 1845 bp, Artificial Sequence
  derived and/or modified sequence
atgctggcccgaaggcagagagatcctctgcaggccctgaggcgcaggaaccaagagctgaagcagcaggtcgattcactcctttccgaatcgcaacttaaagaagcgctggagcctaataaaaggcagcatatctaccagcgagtcggagctcctaccgaggaagaggaagagtccgaatcagaagactctgaggacagtggaggagaggaggaagatgccgaagaagaggaggaggagaaagaggagaacgaaagtcataagtggtcaaccggcgaggagtacatcgctgtgggcgatttcactgcacagcaggtcggcgaccttacattcaagaaaggcgagattttgctggtgattgagaagaagcctgatgggtggtggattgcaaaggacgctaagggaaacgagggcctcgttccacggacctacctggagccgtatagtgaggaggaggagggtcaagaatccagcgaggaaggatctgaggaagatgtagaggccgtcgatgagaccgctgatggggctgaagtgaaacagagaactgacccgcactggagcgcagttcagaaagccattagcgaaataaacactgtggatgtgcttactacaatgggcgctatccctgccggattcaggcccagcaccctcagccaactgctggaggaaggtaaccagttccgggctaactattttcttcagcctgagctgatgccgtcccagttggcatttagagatttgatgtgggacgctaccgaaggaaccatcaggtcccggccaagtagaattagcttgatcctcaccctgtggtcttgtaaaatgatccctcttccgggaatgtcgatacaggtgctttcacgccatgttcgtttatgcttattcgacggcaataaagtgctttcgaatatccatactgtgagggccacatggcaacctaaaaagcctaagacatggacgttttcgcctcaggtgacaaggatcctcccttgtttacttgacggggactgtttcattaggtctaatagcgcttcgcccgatttggggattctgtttgagctggggatttcctatatccgcaactctactggggaaaggggcgaactttcttgcggatgggtatttctcaaactgttcgacgctagcggcgtgccaataccggcaaaaacgtatgagcttttcctcaacggcggaaccccatacgaaaaggggatagaagtcgacccctccatctcccggagagcccacgggagtgtgttttaccagattatgaccatgcggaggcagcctcagttgctcgtgaaattgagaagcttaaaccgccgatctagaaatgtcctttcactcctgccagagacgttaattggaaatatgtgcagcattcacctgctcatcttttatagacagatcttgggcgatgtcttgctgaaggatcgtatgtccctgcaaagtactgacttgatctctcatcctatgctggctacgttcccgatgctgctggagcaacctgatgtgatggatgccctgagatcatcctgggccggtaaagaaagtacgctaaagcgttccgaaaagcgagataaggagttcctgaaatccacttttctcctggtgtatcatgactgcgtgctcccattgctccattccacccgactgcctccctttagatgggccgaagaggagaccgaaactgctaggtggaaagtaatcaccgatttccttaaacagaatcaggagaatcaaggggctttacaggcactcctgtctcccgatggggtgcacgaaccattcgacctgtcagaacagacctatgacttcctgggcgaaatgaggaagaacgccgtctag

SEQ ID NO: 46033 - DNA, 1845 bp, Artificial Sequence
  derived and/or modified sequence
atgctggccagaagacagagagaccccctgcaggccctgagaagaagaaaccaggagctgaagcagcaggtggacagcctgctgagcgagagccagctgaaggaggccctggagcccaacaagagacagcacatctaccagagagtgggcgcccccaccgaggaggaggaggagagcgagagcgaggacagcgaggacagcggcggcgaggaggaggacgccgaggaggaggaggaggagaaggaggagaacgagagccacaagtggagcaccggcgaggagtacatcgccgtgggcgacttcaccgcccagcaggtgggcgacctgaccttcaagaagggcgagatcctgctggtgatcgagaagaagcccgacggctggtggatcgccaaggacgccaagggcaacgagggcctggtgcccagaacctacctggagccctacagcgaggaggaggagggccaggagagcagcgaggagggcagcgaggaggacgtggaggccgtggacgagaccgccgacggcgccgaggtgaagcagagaaccgacccccactggagcgccgtgcagaaggccatcagcgagatcaacaccgtggacgtgctgaccaccatgggcgccatccccgccggcttcagacccagcaccctgagccagctgctggaggagggcaaccagttcagagccaactacttcctgcagcccgagctgatgcccagccagctggccttcagagacctgatgtgggacgccaccgagggcaccatcagaagcagacccagcagaatcagcctgatcctgaccctgtggagctgcaagatgatccccctgcccggcatgagcatccaggtgctgagcagacacgtgagactgtgcctgttcgacggcaacaaggtgctgagcaacatccacaccgtgagagccacctggcagcccaagaagcccaagacctggaccttcagcccccaggtgaccagaatcctgccctgcctgctggacggcgactgcttcatcagaagcaacagcgccagccccgacctgggcatcctgttcgagctgggcatcagctacatcagaaacagcaccggcgagagaggcgagctgagctgcggctgggtgttcctgaagctgttcgacgccagcggcgtgcccatccccgccaagacctacgagctgttcctgaacggcggcaccccctacgagaagggcatcgaggtggaccccagcatcagcagaagagcccacggcagcgtgttctaccagatcatgaccatgagaagacagccccagctgctggtgaagctgagaagcctgaacagaagaagcagaaacgtgctgagcctgctgcccgagaccctgatcggcaacatgtgcagcatccacctgctgatcttctacagacagatcctgggcgacgtgctgctgaaggacagaatgagcctgcagagcaccgacctgatcagccaccccatgctggccaccttccccatgctgctggagcagcccgacgtgatggacgccctgagaagcagctgggccggcaaggagagcaccctgaagagaagcgagaagagagacaaggagttcctgaagagcaccttcctgctggtgtaccacgactgcgtgctgcccctgctgcacagcaccagactgccccccttcagatgggccgaggaggagaccgagaccgccagatggaaggtgatcaccgacttcctgaagcagaaccaggagaaccagggcgccctgcaggccctgctgagccccgacggcgtgcacgagcccttcgacctgagcgagcagacctacgacttcctgggcgagatgagaaagaacgccgtgtag

SEQ ID NO: 46034 - protein, 169 aa, Artificial Sequence
  derived and/or modified sequence
MAGIKALISLSFGGAIGLMFLMLGCALPIYNKYWPLFVLFFYILSPIPYCIARRLVDDTDAMSNACKELAIFLTTGIVVSAFGLPIVFARAHLMGRLPFFSKMGTAESEGRETLTQQLPLPAAAMRRLLPASRVSTQPVLRLADSAESLLGRPALWALGFLLCPPSQAQ

SEQ ID NO: 46035 - DNA, 510 bp, Artificial Sequence
  derived and/or modified sequence
atggccggaatcaaagcgctgattagtctgtccttcggcggtgccatcggccttatgtttctcatgctcggttgtgctttgcctatttataacaaatactggccgctgttcgtcctgttcttttatatactctcccccataccctattgtattgccagacggctcgtggacgacaccgacgcgatgtccaacgcgtgcaaagaactcgctatttttttgacaaccggcatcgtggtcagcgcgtttgggctgccaattgttttcgcccgagcccacctcatgggcagactgccgttcttcagtaagatgggtacggccgagagtgaaggtcgcgagaccctgacacagcagctcccccttccggctgcagctatgcgtcggctccttcctgcgtctagagtatcgacccagcctgtcctgcggctcgccgactctgcggagagcctgctcggtcggcctgccctgtgggcattggggtttctcctctgtccacccagccaagcccagtag

SEQ ID NO: 46036 - DNA, 510 bp, Artificial Sequence
  derived and/or modified sequence
atggccggcatcaaggccctgatcagcctgagctttggaggagccatcggcctgatgttcctgatgctgggctgtgccctgcccatctacaacaagtactggcccctgtttgtgctcttcttctacatcctgagccccatcccctactgcatcgcccggcggctggtggatgacacagatgccatgagcaatgcctgcaaggagctggccatcttcctgaccactggaattgtggtgtctgccttcggcctgcccatcgtgtttgcccgggcccacctgatgggccgcctgcccttcttcagcaagatgggcacagctgagagcgagggccgggagaccctgacccagcagctgcccctgcctgctgctgccatgaggcggctgctgcctgccagccgggtgtccacccagcctgtgctgcggctggccgacagcgctgagagcctgctgggccgcccagccctgtgggccctgggcttcctgctgtgcccccccagccaggcccagtag

SEQ ID NO: 46037 - DNA, 1389 bp, Artificial Sequence
  derived and/or modified sequence
tcgggtcgtggagccaggagcgacgtcaccgccatggcaggcatcaaagctttgattagtttgtcctttggaggagcaatcggactgatgtttttgatgcttggatgtgcccttccaatatacaacaaatactggcccctctttgttctatttttttacatcctttcacctattccatactgcatagcaagaagattagtggatgatacagatgctatgagtaacgcttgtaaggaacttgccatctttcttacaacgggcattgtcgtgtcagcttttggactccctattgtatttgccagagcacatctgatggggcgcctacccttcttcagcaagatgggaacagctgagtctgaaggaagagaaacactgacacagcagctgcctctcccagcagccgccatgagaagattgttacctgcaagcagagtgtccactcaacccgtgctgaggctggcagacagtgctgagtcacttctgggcaggcctgctctgtgggctctaggattcctgctttgccctccctctcaggcacaatgacaactactgctcagtgccagacactgcaccatgtaggcaacacgtggcagtgatgattagtcacaaaatcacatttatattcattctaatgaaactgccattgcaaaattataactgagacagtgaaagaagtctgacctaaccaactccatcttgcttctaacctccaagctgtccttgttcattcccgggactcattttgggaggaacttagttaatagcttacagtttaaaacaaagacaatcacagacctttcccaaaacaaacccccttcttgcctggaaactagactgcctttgtaggattaacaaattagccgaaagattagaaattatggtttaggagtcatgcagctggagatgacaagattctgacactcctccaattgctcctggggataacattactattctaaggcctaacatcagtgcttgagatgttttgtagaccctgcccttgatggatcagctggtactacccagaccgataaactggctcgtcttatcttgtggcccccacccaggagctgactcaatgcaagaagactgttctgactccctatgatttcatctccaacccaaccaagcggcactgtcaactcactggcctccccctacccaccaaattatccttaaaaactcagatccccaaatgctcagggaaactgattatgattaccccaaagcttggagtaataataaaactggcctgtctcccgcacagccagctctctgtgaattactctttctttactgcaattcccctgtttgtctaggcagtggagaaggtgaacccactgggcggttacactaacattcacaacaatcttgcaacacagtattgtt

SEQ ID NO: 46038 - DNA, 510 bp, Artificial Sequence
  derived and/or modified sequence
atggccggcatcaaggccctgatcagcctgagcttcggcggcgccatcgggcttatgttcctgatgctggggtgtgcactgcccatttataacaagtactggcccctgttcgtgctgttcttctacattctttccccaattccatattgtattgctcggcgattggtggatgatacagacgccatgtccaatgcctgcaaggagctcgctatcttcctcacaactggtattgtggtgtctgccttcggcctgccgatcgtattcgcccgagctcatctgatgggccggctcccatttttcagtaagatgggaactgctgagtccgaaggcagggaaaccctaacacagcaactgcccttgccggccgcagccatgcgacgactgctgcctgctagccgcgtgagcactcaacccgtccttcggcttgctgattccgcagaatctctgcttgggcgccccgctctgtgggcactcgggtttctgctgtgcccaccaagtcaggcccagtag

SEQ ID NO: 46039 - DNA, 510 bp, Artificial Sequence
  derived and/or modified sequence
atggctgggatcaaggccctgataagcctgagcttcgggggagcgatcgggctgatgttccttatgctgggctgcgccctgcccatttacaataaatactggccccttttcgttctcttcttctatatcctctccccgataccttactgcatcgccaggcgcctcgtagatgacactgacgctatgtctaacgcctgtaaggagttagctatctttctcaccacaggcattgttgtttccgcattcggcctgccaatagtcttcgctcgcgctcatcttatgggtagacttcctttttttagcaagatggggaccgccgaatccgaaggacgggaaaccctgacacagcaactgcctctcccagcagccgcaatgagaaggcttctgcccgcatcccgcgtaagcacccagccagtcttgcggctggcagattcagccgagtccctgctgggaaggcccgcactgtgggcgctgggtttcctcttgtgtcccccatcccaggctcagtag

SEQ ID NO: 46040 - DNA, 510 bp, Artificial Sequence
  derived and/or modified sequence
atggccggcatcaaggccctgatcagcctgagcttcggcggcgccatcggcctgatgttcctgatgctgggctgcgccctgcccatctacaacaagtactggcccctgttcgtgctgttcttctacatcctgagccccatcccctactgcatcgccagaagactggtggacgacaccgacgccatgagcaacgcctgcaaggagctggccatcttcctgaccaccggcatcgtggtgagcgccttcggcctgcccatcgtgttcgccagagcccacctgatgggcagactgcccttcttcagcaagatgggcaccgccgagagcgagggcagagagaccctgacccagcagctgcccctgcccgccgccgccatgagaagactgctgcccgccagcagagtgagcacccagcccgtgctgagactggccgacagcgccgagagcctgctgggcagacccgccctgtgggccctgggcttcctgctgtgcccccccagccaggcccagtag

SEQ ID NO: 46041 - protein, 415 aa, Artificial Sequence
  derived and/or modified sequence
MASPGSDSYIVRVKAVVMTRDDSSGGWFPQEGGGISRVGVCKVMHPEGNGRSGFLIHGERQKDKLVVLECYVRKDLVYTKANPTFHHWKVDNRKFGLTFQSPADARAFDRGVRKAIEDLIEGSTTSSSTIHNEAELGDDDVFTTATDSSSNSSQKREQPTRTISSPTSCEHRRIYTLGHLHDSYPTDHYHLDQPMPRPYRQVSFPDDDEEIVRINPREKIWMTGYEDYRHAPVRGKYPDPSEDADSSYVRFAKGEVPKHDYNYPYVDSSDFGLGEDPKGRGGSVIKTQPSRGKSRRRKEDGERSRCVYCRDMFNHEENRRGHCQDAPDSVRTCIRRVSCMWCADSMLYHCMSDPEGDYTDPCSCDTSDEKFCLRWMALIALSFLAPCMCCYLPLRACYHCGVMCRCCGGKHKAAA

SEQ ID NO: 46042 - DNA, 1248 bp, Artificial Sequence
  derived and/or modified sequence
atggccagccccggcagcgacagctacatcgtgagagtgaaggccgtggtgatgaccagagacgacagcagcggcggctggttcccccaggagggcggcggcatcagcagagtgggcgtgtgcaaggtgatgcaccccgagggcaacggcagaagcggcttcctgatccacggcgagagacagaaggacaagctggtggtgctggagtgctacgtgagaaaggacctggtgtacaccaaggccaaccccaccttccaccactggaaggtggacaacagaaagttcggcctgaccttccagagccccgccgacgccagagccttcgacagaggcgtgagaaaggccatcgaggacctgatcgagggcagcaccaccagcagcagcaccatccacaacgaggccgagctgggcgacgacgacgtgttcaccaccgccaccgacagcagcagcaacagcagccagaagagagagcagcccaccagaaccatcagcagccccaccagctgcgagcacagaagaatctacaccctgggccacctgcacgacagctaccccaccgaccactaccacctggaccagcccatgcccagaccctacagacaggtgagcttccccgacgacgacgaggagatcgtgagaatcaaccccagagagaagatctggatgaccggctacgaggactacagacacgcccccgtgagaggcaagtaccccgaccccagcgaggacgccgacagcagctacgtgagattcgccaagggcgaggtgcccaagcacgactacaactacccctacgtggacagcagcgacttcggcctgggcgaggaccccaagggcagaggcggcagcgtgatcaagacccagcccagcagaggcaagagcagaagaagaaaggaggacggcgagagaagcagatgcgtgtactgcagagacatgttcaaccacgaggagaacagaagaggccactgccaggacgcccccgacagcgtgagaacctgcatcagaagagtgagctgcatgtggtgcgccgacagcatgctgtaccactgcatgagcgaccccgagggcgactacaccgacccctgcagctgcgacaccagcgacgagaagttctgcctgagatggatggccctgatcgccctgagcttcctggccccctgcatgtgctgctacctgcccctgagagcctgctaccactgcggcgtgatgtgcagatgctgcggcggcaagcacaaggccgccgcctag

SEQ ID NO: 46043 - DNA, 1248 bp, Artificial Sequence
  derived and/or modified sequence
atggctagccccggatccgattcatatatcgtacgggtaaaagctgttgtcatgacaagagacgacagttcaggtggttggtttccacaggagggcgggggcatatcccgggttggcgtgtgcaaggtgatgcatccggaaggtaacggccgcagcggttttctgattcacggagaaagacagaaggataagctggtggtcctggaatgttacgttagaaaggacctggtgtacacaaaagcgaacccaacatttcaccactggaaagtcgataaccgtaagttcgggctgacattccagagccctgccgacgctcgcgcatttgaccgcggcgtaagaaaggccatcgaggacctgatagaggggagtacaacaagctcatccacgatccacaacgaggcagaattaggagacgacgatgtgttcacgaccgccacagacagtagctcgaactctagccagaaacgtgaacagccaacgaggaccatcagcagccctacttcgtgtgagcacagaaggatttacacactggggcatctacacgattcatatcctaccgaccactaccacctggaccaacccatgccaagaccctaccgccaggtctcattccccgatgatgacgaggaaatcgtgcgaattaatccccgggagaaaatttggatgacaggttatgaagactaccggcacgcccctgtccgcggaaaataccctgacccaagtgaagacgctgactcctcctatgtcagattcgcaaaaggagaagtgccgaagcatgattataattatccatatgtagacagttcggattttggcctcggtgaggaccccaagggaaggggggggtccgtgatcaagactcagccttctaggggcaaaagtagaaggagaaaggaagacggggaacgatctcggtgcgtgtattgccgcgacatgttcaatcatgaagagaatcggcggggccattgtcaggacgctcctgacagtgtgcgtacctgtattcgccgcgtgagttgtatgtggtgtgccgattctatgctctatcattgtatgtcagatccagagggcgattataccgatccctgcagttgcgacacttccgacgaaaagttctgccttagatggatggcactgatagccctgagctttcttgccccgtgtatgtgctgctacttgcctttgagagcctgttatcactgtggagtaatgtgccgttgctgcggcgggaagcataaagccgctgcttag

SEQ ID NO: 46044 - DNA, 1248 bp, Artificial Sequence
  derived and/or modified sequence
atggccagccctggcagtgacagctacatcgtgcgggtgaaggctgtggtgatgaccagagatgacagcagcggcggctggttcccccaggagggcggcggcatcagccgggtgggcgtgtgcaaggtgatgcaccctgagggcaatggccgcagcggcttcctgattcatggagagcggcagaaggacaagctggtggtgctggagtgctacgtgaggaaggacctggtgtacaccaaggccaaccccaccttccaccactggaaggtggacaacaggaagtttggcctgaccttccagagccctgcagatgcccgggcctttgacagaggagtgaggaaggccattgaagatctcatcgagggcagcaccaccagcagcagcaccatccacaatgaggccgagctgggagatgatgatgtgttcaccacagccacagacagcagcagcaacagcagccagaagcgggagcagcccaccaggaccatcagcagccccaccagctgtgagcaccggcgcatctacaccctgggccacctgcatgacagctaccccacagaccactaccacctggaccagcccatgccccggccctaccggcaggtgtccttcccagatgatgatgaggagatcgtgcgcatcaacccccgggagaagatctggatgacaggctatgaggactacagacatgcccctgtgcggggcaagtacccagaccccagtgaagatgctgacagcagctatgtgcgctttgccaagggggaggtgcccaagcatgactacaactacccctacgtggacagcagtgactttggcctgggggaggaccccaagggccggggcggcagcgtcatcaagacccagcccagccggggcaagagcagaagaagaaaagaagatggagagaggagccgctgtgtgtactgccgggacatgttcaaccatgaagaaaatagaagaggccactgccaggatgccccagattctgtgaggacctgcatcagaagagtgtcctgcatgtggtgtgccgacagcatgctgtaccactgcatgtctgaccctgagggggactacacagacccctgcagctgtgacaccagtgatgagaagttctgcctgcgctggatggccctgattgccctgtccttcctggccccctgcatgtgctgctacctgcccctgcgggcctgctaccactgcggcgtgatgtgccgctgctgcggcggcaagcacaaggccgccgcctag

SEQ ID NO: 46045 - DNA, 1248 bp, Artificial Sequence
  derived and/or modified sequence
atggccagccccggcagcgacagctacatcgtgcgggtgaaggccgtcgtgatgaccagggatgactctagtggggggtggttccctcaggaggggggcggcatctcgagggtgggagtctgcaaagtgatgcatcccgaaggcaatggccgctccggcttcctgatccatggggaacggcaaaaagataagctggtcgtgttggaatgttacgttcggaaggacttagtgtataccaaagccaatcccacctttcaccattggaaagtggacaatcggaagtttggactgacattccaatcacccgcagatgcgcgtgcctttgaccggggggttcgcaaggctatcgaagatctgatagagggttcaactacttctagcagcactattcataatgaggctgaactgggcgatgatgatgtttttacaacagcaactgacagttcctccaacagttcacagaaacgcgaacaacccacgcgcactattagcagtcccacgagctgtgaacaccgaagaatctacaccctcgggcatttgcatgattcttaccccactgaccactatcacctcgaccagccgatgccacgaccatatcgccaagtttccttcccagatgatgacgaggagattgtgcgcattaacccccgtgagaaaatttggatgactggctacgaggattatcgtcacgccccagtccggggtaaatatccagacccctctgaggacgcggattcgtcatatgtgagattcgccaaaggggaggtccctaaacacgactataattatccctatgtggattcaagcgacttcggattgggggaggatccaaagggccgaggggggtcagttattaagacacaacctagcagggggaaaagcagacgccgtaaggaggatggcgaaaggtccagatgcgtctattgccgggacatgttcaaccatgaagagaatagaaggggccactgtcaagatgctccagatagcgtgcgcacctgcatccgacgtgtctcctgcatgtggtgtgcagacagcatgctctaccattgcatgtctgatccggagggcgactatactgacccatgctcctgtgatacttccgatgagaagttctgtctgcgctggatggccctcatagcgttatctttcctggccccctgtatgtgttgttacctgcctttgcgagcatgctatcattgcggtgtcatgtgccggtgctgcggaggtaagcacaaagcagccgcctag

SEQ ID NO: 46046 - DNA, 1248 bp, Artificial Sequence
  derived and/or modified sequence
atggcaagccccggaagcgattcctacatcgtccgcgtcaaagctgtagtgatgaccagagacgacagctcgggtggatggtttccccaggagggcggtggtatatcaagagtcggggtgtgtaaggtgatgcaccctgaagggaacggacgttccggtttcctgatacacggcgagcgtcagaaagataaactggtggtgttagagtgttacgtccggaaagacctggtgtacacaaaggccaaccccacttttcatcattggaaggtggataataggaagttcggtttgacatttcaatccccggctgacgccagagcctttgatcgcggagttagaaaagccatagaggacctgattgagggcagcaccacctcatcatctactatccataacgaagcagagctgggtgacgatgacgtctttactaccgccacggactcctccagcaactcctcccagaagcgcgaacagcccacacggacaatctctagccctacatcttgcgagcacaggaggatttatacattagggcacttacacgactcatatcctacagatcattaccatctcgaccagcctatgccacgcccatatcgccaagtgtcctttcccgacgatgacgaagagattgttcggatcaacccaagagagaagatatggatgacgggttatgaggattacagacacgctcctgtgcgcggaaaatacccagacccttcggaagacgcagatagttcgtacgtaagattcgcgaagggcgaagttcccaaacatgactacaattatccatacgttgactctagcgattttgggctaggtgaggatcccaagggtcgaggaggatcggttatcaagacgcagcccagcagggggaaatcccgccgacgtaaggaagatggagaacggtcacgatgcgtgtactgtagagacatgtttaaccacgaggaaaatagacgcggtcattgccaagatgcaccggactccgtgagaacttgcattcgtcgggtcagttgcatgtggtgcgccgactctatgctctaccactgtatgagcgatcctgaaggcgattataccgacccctgcagttgcgacacttccgacgagaagttttgcctccgatggatggctttgatagcccttagctttttggccccttgcatgtgttgctatctacccctgagagcttgttatcattgcggcgtgatgtgccgttgttgtggtgggaaacataaggccgctgcatag

SEQ ID NO: 46047 - DNA, 1800 bp, Artificial Sequence
  derived and/or modified sequence
aataatgctaatacccagcactcgggctccacaatgtagaggaaatggcatcgcctggcagtgacagctatattgtgcgtgtcaaggctgtggttatgaccagagatgactccagcgggggatggttcccacaggaaggaggcgggatcagtcgcgtcggggtctgtaaggtcatgcaccccgaaggcaatggacgaagcggctttctcatccatggtgaacgacagaaagacaaactggtggtattggaatgctatgtaagaaaggacttggtctacaccaaagccaatccaacgtttcatcactggaaggtcgataataggaagtttggacttactttccaaagccctgctgatgcccgagcctttgacaggggagtaaggaaagcaatcgaagaccttatagaaggttcaacaacgtcatcttccaccatccataatgaagctgagcttggcgatgatgacgtttttacaacagctacagacagttcttctaattcctctcagaagagagagcaacctactcggacaatctcctctcccacatcctgtgagcaccggaggatttataccctgggccacctccacgactcataccccacagaccactatcacctcgatcagccgatgccaaggccctaccgccaggtgagcttcccggacgacgacgaggagatcgtgcgcatcaacccccgggagaagatctggatgacggggtacgaggattaccggcacgcacccgtcaggggcaagtacccggacccctcggaggacgcggactcctcctacgtgcgcttcgccaagggcgaggtccccaagcatgactacaactacccctacgtggactcctcagactttggcctaggcgaggaccccaaaggccgcgggggcagcgtgatcaagacgcagccctcccggggcaagtcgcggcggcggaaggaggacggagagcgctcgcggtgcgtgtactgcagggacatgttcaaccacgaggagaaccgccggggccactgccaggacgcgcccgactccgtgagaacttgcatccgccgggtgagctgcatgtggtgcgcggacagcatgctctatcactgtatgtcggaccccgagggagactatacagacccttgctcgtgcgatactagcgacgagaagttttgcctccggtggatggctcttattgccttgtctttcctggccccctgtatgtgctgttacctgccccttcgggcctgctaccactgcggagtgatgtgcaggtgctgtggcgggaagcacaaagcggccgcgtgactcagtttccctcccttctccctccatccgcagccacaggggaactcgtctcttacatactctcatcttctcccccgctcccttccactccaaggagcgaggagggcaagcggcctcccagctccctggtacctcgaggcaccattccagccagggacgctgccgggtagactctccactccccctgccgcccacactgcagcagccacatccatacacacacgctcgcacagtgttctgaggaaggaaccttcgccacagactcctgtactattaacaatctgtaaccaagctaactgtctcatccatgtgttgatttcctgtttcctcctcccccgcctcttccagttcaaaggagtctgcaattggaactgctgattttcggtgggttttgtagttgatttttccaagagcgtcgaagactctctttctcttggttcaccttgcctgtcgctagcaagcatctggttcagcggaaatgggatgtgagaatgatgaaacccgacag

SEQ ID NO: 46048 - protein, 13 aa, Artificial Sequence
  derived and/or modified sequence
MLYLQGWSMPAVA

SEQ ID NO: 46049 - protein, 554 aa, Artificial Sequence
  derived and/or modified sequence
MLYLQGWSMPAVAEVKLRDDQYTLEHMHAFGMYNYLHCDSWYQDSVYYIDTLGRIMNLTVMLDTALGKPREVFRLPTDLTACDNRLCASIHFSSSTWVTLSDGTGRLYVIGTGERGNSASEKWEIMFNEELGDPFIIIHSISLLNAEEHSIATLLLRIEKEELDMKGSGFYVSLEWVTISKKNQDNKKYEIIKRDILRGKSVPHYAAIEPDGNGLMIVSYKSLTFVQAGQDLEENMDEDISEKIKEPLYYWQQTEDDLTVTIRLPEDSTKEDIQIQFLPDHINIVLKDHQFLEGKLYSSIDHESSTWIIKESNSLEISLIKKNEGLTWPELVIGDKQGELIRDSAQCAAIAERLMHLTSEELNPNPDKEKPPCNAQELEECDIFFEESSSLCRFDGNTLKTTHVVNLGSNQYLFSVIVDPKEMPCFCLRHDVDALLWQPHSSKQDDMWEHIATFNALGYVQASKRDKKFFACAPNYSYAALCECLRRVFIYRQPAPMSTVLYNRKEGRQVGQVAKQQVASLETNDPILGFQATNERLFVLTTKNLFLIKVNTEN

SEQ ID NO: 46050 - DNA, 39 bp, Artificial Sequence
  derived and/or modified sequence
atgctttatctccagggttggagcatgcctgctgtggca

SEQ ID NO: 46051 - DNA, 1665 bp, Artificial Sequence
  derived and/or modified sequence
atgctgtacctgcagggctggagcatgcccgccgtggccgaggtgaagctgagagacgaccagtacaccctggagcacatgcacgccttcggcatgtacaactacctgcactgcgacagctggtaccaggacagcgtgtactacatcgacaccctgggcagaatcatgaacctgaccgtgatgctggacaccgccctgggcaagcccagagaggtgttcagactgcccaccgacctgaccgcctgcgacaacagactgtgcgccagcatccacttcagcagcagcacctgggtgaccctgagcgacggcaccggcagactgtacgtgatcggcaccggcgagagaggcaacagcgccagcgagaagtgggagatcatgttcaacgaggagctgggcgaccccttcatcatcatccacagcatcagcctgctgaacgccgaggagcacagcatcgccaccctgctgctgagaatcgagaaggaggagctggacatgaagggcagcggcttctacgtgagcctggagtgggtgaccatcagcaagaagaaccaggacaacaagaagtacgagatcatcaagagagacatcctgagaggcaagagcgtgccccactacgccgccatcgagcccgacggcaacggcctgatgatcgtgagctacaagagcctgaccttcgtgcaggccggccaggacctggaggagaacatggacgaggacatcagcgagaagatcaaggagcccctgtactactggcagcagaccgaggacgacctgaccgtgaccatcagactgcccgaggacagcaccaaggaggacatccagatccagttcctgcccgaccacatcaacatcgtgctgaaggaccaccagttcctggagggcaagctgtacagcagcatcgaccacgagagcagcacctggatcatcaaggagagcaacagcctggagatcagcctgatcaagaagaacgagggcctgacctggcccgagctggtgatcggcgacaagcagggcgagctgatcagagacagcgcccagtgcgccgccatcgccgagagactgatgcacctgaccagcgaggagctgaaccccaaccccgacaaggagaagcccccctgcaacgcccaggagctggaggagtgcgacatcttcttcgaggagagcagcagcctgtgcagattcgacggcaacaccctgaagaccacccacgtggtgaacctgggcagcaaccagtacctgttcagcgtgatcgtggaccccaaggagatgccctgcttctgcctgagacacgacgtggacgccctgctgtggcagccccacagcagcaagcaggacgacatgtgggagcacatcgccaccttcaacgccctgggctacgtgcaggccagcaagagagacaagaagttcttcgcctgcgcccccaactacagctacgccgccctgtgcgagtgcctgagaagagtgttcatctacagacagcccgcccccatgagcaccgtgctgtacaacagaaaggagggcagacaggtgggccaggtggccaagcagcaggtggccagcctggagaccaacgaccccatcctgggcttccaggccaccaacgagagactgttcgtgctgaccaccaagaacctgttcctgatcaaggtgaacaccgagaactag

SEQ ID NO: 46052 - DNA, 1665 bp, Artificial Sequence
  derived and/or modified sequence
atgctgtacctccagggctggtctatgccagctgttgcagaagtgaagctgcgggatgatcagtatacccttgagcacatgcacgcgttcggaatgtataactatctgcactgcgacagttggtatcaagatagcgtgtattacattgacaccctcggccgaattatgaatctcaccgtgatgcttgatacagccttggggaagccacgcgaggtctttcgcctgcctactgatcttaccgcctgcgataacagattgtgcgcctcaattcatttttccagctccacttgggtaactctctctgacggaaccggaaggctctacgtgattgggactggcgagagaggcaattcagcctcagagaagtgggagattatgttcaacgaggagttaggagatcccttcattattattcacagtatcagtctgctgaatgctgaggaacattcaattgctactctcctgttgcgcattgagaaggaggagctggatatgaaaggcagtggattttacgtgagcctcgaatgggtcaccataagcaagaaaaatcaggacaacaagaaatatgaaattataaagcgcgatatcctaaggggaaagagcgtccctcactatgccgctattgaaccagacgggaatggcctaatgatcgtgtcttataaatctctgacttttgtccaagccggccaggatctggaggagaatatggacgaggacatatctgagaagattaaagagccactctattattggcagcagacggaagacgatcttacggtgaccatccggttgcccgaggattccaccaaggaagacatccaaatccagttcttacccgatcatataaatattgtgctgaaggaccaccagttcctagaaggtaagctgtattccagcattgatcacgaatcttctacctggatcataaaggaatccaattccctggaaatctctctgatcaagaagaatgaaggcttaacgtggcccgagctggtgatcggggacaaacaaggagaactgattagagattccgcccaatgcgccgcaatcgccgagagactcatgcatctgacaagtgaagagctgaacccaaatcccgacaaagaaaagccaccctgcaatgcccaagagctggaagagtgcgacattttttttgaagagtctagctccctgtgtcgattcgacgggaatacactgaaaaccacacatgtcgtgaacctgggttctaaccaatacctcttcagcgtaatcgtggaccctaaggagatgccttgtttttgtctgcggcatgatgtggatgccctcctgtggcagccgcatagttcaaagcaggacgacatgtgggagcacatcgctacatttaacgccctgggatatgtgcaagcttcaaaacgggacaagaagtttttcgcgtgcgccccaaattattcatacgctgccctgtgtgaatgcctaagaagggtgttcatctatagacagcccgcacctatgagcaccgtcctgtataatcggaaggaggggcgtcaggtcggccaggtagctaaacagcaagtggcttcgctggagaccaacgacccaatccttgggttccaagcgaccaatgaacgactttttgtcctgacaaccaagaatctgtttttgattaaagttaacactgagaactag

SEQ ID NO: 46053 - DNA, 1665 bp, Artificial Sequence
  derived and/or modified sequence
atgctgtacctgcagggctggagcatgcctgctgtggccgaggtgaagctgagagatgaccagtacaccctggagcacatgcacgccttcggcatgtacaactacctgcactgtgacagctggtaccaggacagcgtgtactacatcgacaccctgggccgcatcatgaacctgactgtgatgctggacacagccctgggcaagccccgggaggtgttccggctgcccacagacctgacagcctgtgacaaccggctgtgtgccagcatccacttcagcagcagcacctgggtgaccctgagtgatggcaccggccgcctgtatgtgattggcaccggggagcggggcaacagcgccagcgagaagtgggagatcatgtttaatgaggagctgggggaccccttcatcatcatccacagcatcagcctgctgaatgctgaggagcacagcatcgccaccctgctgctgcgcatcgagaaggaggagctggacatgaagggcagcggcttctacgtgtccctggagtgggtgaccatcagcaagaagaaccaggacaacaagaagtatgagatcatcaagagggacatcctgcggggcaagtctgtgccccactacgccgccatcgagccagatggaaatggcctgatgattgtgtcctacaagagcctgacctttgtgcaggccggccaggacctggaggagaacatggatgaggacatcagcgagaagatcaaggagcccctgtactactggcagcagacagaagatgacctgactgtgaccatccggctgcctgaggacagcaccaaggaggacatccagatccagttcctgcctgaccacatcaacatcgtgctgaaggaccaccagttcctggagggcaagctgtacagcagcattgaccacgagagcagcacctggatcatcaaggagagcaacagcctggagatcagcctcatcaagaagaatgaaggcctgacctggccagagctggtgattggagacaagcagggcgagctgatccgggacagcgcccagtgtgccgccatcgccgagcggctgatgcacctgaccagcgaggagctgaaccccaacccagacaaggagaagccaccctgcaatgcccaggagctggaggagtgtgacatcttctttgaggagagcagcagcctgtgccgctttgatggcaacaccctgaagaccacccacgtggtgaacctgggcagcaaccagtacctgttctctgtgattgtggaccccaaggagatgccctgcttctgcctgcggcatgatgtggatgccctgctgtggcagccccacagcagcaagcaggatgacatgtgggagcacatcgccaccttcaatgccctgggctacgtgcaggccagcaagagggacaagaagttctttgcctgtgcccccaactacagctatgctgccctgtgtgaatgtctgcggcgggtcttcatctaccggcagcctgcccccatgagcacagtgctgtacaacaggaaggagggccggcaggtgggccaggtggccaagcagcaggtggccagcctggagaccaatgaccccatcctgggcttccaggccaccaatgaaagactctttgtgctgaccaccaagaacctcttcctgatcaaggtgaacacagaaaattag

SEQ ID NO: 46054 - DNA, 1665 bp, Artificial Sequence
  derived and/or modified sequence
atgctgtacctgcagggctggagcatgcccgccgtggccgaggtgaagctgcgggacgaccagtataccctcgaacacatgcacgctttcgggatgtacaactatctgcactgcgattcatggtaccaagattcagtgtactacatcgatactctggggcggattatgaacctgacagtcatgctggacaccgcactgggcaaaccgcgcgaggtttttaggctgcctactgaccttacagcctgtgataatcgcctgtgcgccagtatccacttcagctccagcacatgggtgactctatctgatggaaccgggaggctgtatgtgattggaactggagaacggggtaatagcgcctctgagaagtgggaaattatgttcaatgaagagttgggcgaccctttcatcatcatccatagcatttccctattgaatgctgaagaacattctatcgctacacttctgctgaggatagagaaagaggagctcgacatgaagggttccgggttctacgtgtctctggagtgggtgaccatcagcaaaaaaaaccaggataataaaaagtacgaaattataaagcgcgacatcttacggggcaagtccgtcccgcactacgccgcaatcgaacccgatggcaacggcttaatgattgtcagctacaagtctctgacatttgtacaggccggacaggacctggaagaaaatatggatgaggacatcagcgagaagatcaaagaacccctatactattggcaacaaaccgaggatgatctgacagttacaatcaggttgccagaagattcaaccaaggaggacattcaaatccagtttctacccgatcatattaatattgtattgaaggaccatcaatttttggaaggtaaattgtattccagtatcgaccatgagagttcgacttggatcatcaaggagtccaatagtctggagattagcctgatcaaaaagaatgaaggtttaacatggcctgagctggtgatcggggataagcagggagagctcatccgggacagcgcgcagtgcgccgctatcgctgaaaggctcatgcatttgacaagtgaagagctgaatccaaaccccgacaaggagaaacctccttgcaacgcacaggaactggaagagtgtgacatcttcttcgaagaatccagcagtctgtgtagattcgacggcaacactctgaaaaccactcacgtagtgaacctgggctcgaaccagtacctcttctcagtgatcgtggacccaaaggaaatgccctgcttctgtctgcgccacgatgttgacgcgcttctctggcagccccattccagtaaacaggacgatatgtgggaacacatcgccacctttaacgcgctaggttacgtgcaagcgtcaaagcgcgataagaaattcttcgcctgcgccccaaattattcatatgccgctctgtgtgagtgtctgcggagggtgttcatctatcggcagcccgctcctatgtcaacggtgttgtacaatcggaaagagggcaggcaggtcggacaagtggctaagcagcaagtcgcatcactcgagaccaatgaccccatcctggggttccaggccactaacgaacgcctcttcgtgctgacaaccaagaacctatttcttatcaaagtgaacacagagaattag

SEQ ID NO: 46055 - DNA, 2098 bp, Artificial Sequence
  derived and/or modified sequence
agtacttcatagactttatcatacttcgtagcatccagtatgttttctttgctaagattattgattttgtattgaagggtcccatgtccatcgttttcaatgctttatctccagggttggagcatgcctgctgtggcagaggtaaaacttcgagatgatcaatatacactggaacacatgcatgcttttggaatgtataattacctgcactgtgattcatggtatcaagacagtgtctactatattgatacccttggaagaattatgaatttaacagtaatgctggacactgccttaggaaaaccacgagaggtgtttcgacttcctacagatttgacagcatgtgacaaccgtctttgtgcatctatccatttctcatcttctacctgggttaccttgtcagatggaactggaagattgtatgtcattggaacaggtgaacgtggaaatagcgcttctgaaaaatgggagattatgtttaatgaagaacttggggatccttttattataattcacagtatctcactgctaaatgctgaagaacattctatagctaccctacttcttcgaatagagaaagaggaattggatatgaaaggaagtggtttctatgtttctctggagtgggtcactatcagtaagaaaaatcaagataataaaaaatatgaaattattaagcgtgatattctccgtggaaagtcagtgccacattatgctgctattgagcctgatggaaatggtctaatgattgtatcctacaagtctttaacatttgttcaggctggtcaagatcttgaagaaaatatggatgaagacatatcagagaaaatcaaagaacctctgtattactggcaacagactgaagatgatttgacagtaaccatacggcttccagaagacagtactaaggaggacattcaaatacagtttttgcctgatcacatcaacattgtactgaaggatcaccagtttttagaaggaaaactctattcatctattgatcatgaaagcagtacatggataattaaagagagtaatagcttggagatttccttgattaagaagaatgaaggactgacctggccagagctagtaattggagataaacaaggggaacttataagagattcagcccagtgtgctgcaatagctgaacgtttgatgcatttgacctctgaagaactgaatccaaatccagataaagaaaaaccaccttgcaatgctcaagagttagaagaatgtgatattttctttgaagagagctccagtttatgcagatttgatggcaatacattaaaaactactcatgtggtgaatcttggaagcaaccagtaccttttctctgtcatagtggatcctaaagaaatgccctgcttctgtttgcgccatgatgttgatgccctactctggcaaccacactccagcaaacaagatgatatgtgggagcacatcgcaactttcaatgctttaggctatgtccaagcatcaaagagagacaaaaaattttttgcctgtgctccaaattactcgtatgcagccctttgtgagtgccttcgtcgagtattcatctatcgtcagcctgctcccatgtccactgtactttacaacagaaaggaaggcaggcaagtaggacaggttgctaagcagcaagtagcaagcctagaaaccaatgatcctattttaggatttcaggcaacaaatgagagattatttgttcttactaccaaaaacctctttttaataaaagtaaatacagagaattaattattctaacatattggcctctttgtactggaaaagtattcagtggtacctggaggtctggacagttatactgtaacctcttaagttttaatgtgctaaatatatcttgtatgattttttattttttaataacattggaaatatattcaagagattatgattctgtaaagctgtggaatgaagctgcagatttagagaacattggcttctgaaaaaaaaaaagagtgaagatagtactagcaagtatacttattttttaaaacaggctagaatctcatgttttatatgaaagatgtacaattcagtgtttaaaaataaaaatatttattgtgta

SEQ ID NO: 46056 - DNA, 1665 bp, Artificial Sequence
  derived and/or modified sequence
atgttgtacctccaaggctggagtatgcccgctgtcgcagaagtgaaactccgggatgaccaatacactctggaacacatgcatgctttcggaatgtataactatttgcactgtgattcttggtaccaggattcggtgtactatatcgatacgcttggcaggataatgaacttaactgtaatgctggataccgctttagggaagccgcgagaagtctttagactcccaacagatttaacagcctgcgataaccggttatgcgcttccattcatttttcctcatccacctgggtgacgctgtccgatggcacggggagactgtacgtgattggaaccggggagaggggaaactcagcctcagagaagtgggagatcatgttcaacgaggagctcggtgatccatttattataattcatagcataagtttgctcaatgcggaagaacactccatcgctactttactgctgcggattgagaaggaggagctcgatatgaaaggaagcggtttctacgtgagtctagagtgggtaacgataagtaaaaagaatcaagataacaagaaatacgagatcatcaagcgcgacatactcagagggaagtccgtacctcactacgctgcaattgaacctgacggcaacggattgatgattgtaagctataaatccttaacttttgtccaggccggacaagacctggaggaaaacatggacgaagatatcagtgagaaaatcaaggagcccctgtactattggcagcagacagaagacgacctgacagtgactatccgactaccagaggactcaaccaaagaagatatccagatccagtttttgcccgatcatatcaatatcgtgttaaaagatcatcaattcctggaaggaaaactttatagcagtattgatcacgagtcgtccacttggatcatcaaggaatcaaattcgctggaaatcagcctcataaagaagaacgaagggctgacctggcccgaactcgtgataggggacaaacaaggggaactcattcgggactctgctcagtgcgcggctatcgctgagcggctgatgcacctaacctctgaggaactaaatccgaatcctgataaagaaaagcccccttgcaacgcgcaggagctggaggagtgcgacatcttcttcgaagagtccagttcgctctgtaggtttgatggaaatacactgaaaaccactcatgtggtaaatttgggttcaaaccaatacctgttctcagttattgtggatccaaaagagatgccctgtttctgcctgaggcacgatgtagacgcactgctttggcagccccactcaagcaaacaagatgacatgtgggagcacatcgcgacatttaatgcacttggctacgtccaggcatccaaacgggacaagaaattcttcgcttgcgcccctaattattcatatgccgctctgtgtgagtgccttcgacgcgtctttatctaccggcagcctgcacctatgtcaaccgtgctgtacaatcgtaaagagggcaggcaggttggccaagtcgccaaacaacaagtggcttctctagagacgaatgacccaatcttgggcttccaggccacaaatgaacggctcttcgtgctgacgacaaaaaacctgttccttattaaggtgaataccgaaaattag

SEQ ID NO: 46057 - protein, 530 aa, Artificial Sequence
  derived and/or modified sequence
MTRDFKPGDLIFAKMKGYPHWPARVDEVPDGAVKPPTNKLPIFFFGTHETAFLGPKDIFPYSENKEKYGKPNKRKGFNEGLWEIDNNPKVKFSSQQAATKQSNASSDVEVEEKETSVSKEDTDHEEKASNEDVTKAVDITTPKAARRGRKRKAEKQVETEEAGVVTTATASVNLKVSPKRGRPAATEVKIPKPRGRPKMVKQPCPSESDIITEEDKSKKKGQEEKQPKKQPKKDEEGQKEEDKPRKEPDKKEGKKEVESKRKNLAKTGVTSTSDSEEEGDDQEGEKKRKGGRNFQTAHRRNMLKGQHEKEAADRKRKQEEQMETEQQNKDEGKKPEVKKVEKKRETSMDSRLQRIHAEIKNSLKIDNLDVNRCIEALDELASLQVTMQQAQKHTEMITTLKKIRRFKVSQVIMEKSTMLYNKFKNMFLVGEGDSVITQVLNKSLAEQRQHEEANKTKDQGKKGPNKKLEKEQTGSKTLNGGSDAQDGNQPQHNGESNEDSKDNHEASTKKKPSSEERETEISLKDSTLDN

SEQ ID NO: 46058 - DNA, 3393 bp, Artificial Sequence
  derived and/or modified sequence
cagtgctagcgggcgccgagcgggagccgcgcgggagcagcgcagctacggcggcggcagcggcggcgcggttgcgattccgagccgttgagacgcctctgcggcagctggtggcgcaggtggcttgcgtggacgcgggtagaggcgaccggccagcaaccgcagcgtcggcgcccgcggccccggcaggcgcgtcgggacgccccgaggcatcctcccccgcccgcgggcccggtagctgggcccgcgtccgccgcccgcatccccgcgccgccgcatctcctcgccgcctcccgggcttcggacccccggtctcgcccccgaaacatgactcgcgatttcaaacctggagacctcatcttcgccaagatgaaaggttatccccattggccagctcgagtagacgaagttcctgatggagctgtaaagccacccacaaacaaactacccattttcttttttggaactcatgagactgcttttttaggaccaaaggatatatttccttactcagaaaataaggaaaagtatggcaaaccaaataaaagaaaaggttttaatgaaggtttatgggagatagataacaatccaaaagtgaaattttcaagtcaacaggcagcaactaaacaatcaaatgcatcatctgatgttgaagttgaagaaaaggaaactagtgtttcaaaggaagataccgaccatgaagaaaaagccagcaatgaggatgtgactaaagcagttgacataactactccaaaagctgccagaagggggagaaagagaaaggcagaaaaacaagtagaaactgaggaggcaggagtagtgacaacagcaacagcatctgttaatctaaaagtgagtcctaaaagaggacgacctgcagctacagaagtcaagattccaaaaccaagaggcagacccaaaatggtaaaacagccctgtccttcagagagtgacatcattactgaagaggacaaaagtaagaaaaaggggcaagaggaaaaacaacctaaaaagcagcctaagaaggatgaagagggccagaaggaagaagataagccaagaaaagagccggataaaaaagaggggaagaaagaagttgaatcaaaaaggaaaaatttagctaaaacaggggttacttcaacctccgattctgaagaagaaggagatgatcaagaaggtgaaaagaagagaaaaggtgggaggaactttcagactgctcacagaaggaatatgctgaaaggccaacatgagaaagaagcagcagatcgaaaacgcaagcaagaggaacaaatggaaactgagcagcagaataaagatgaaggaaagaagccagaagttaagaaagtggagaagaagcgagaaacatcaatggattctcgacttcaaaggatacatgctgagattaaaaattcactcaaaattgataatcttgatgtgaacagatgcattgaggccttggatgaacttgcttcacttcaggtcacaatgcaacaagctcagaaacacacagagatgattactacactgaaaaaaatacggcgattcaaagttagtcaggtaatcatggaaaagtctacaatgttgtataacaagtttaagaacatgttcttggttggtgaaggagattccgtgatcacccaagtgctgaataaatctcttgctgaacaaagacagcatgaggaagcgaataaaaccaaagatcaagggaagaaagggccaaacaaaaagctagagaaggaacaaacagggtcaaagactctaaatggaggatctgatgctcaagatggtaatcagccacaacataacggggagagcaatgaagacagcaaagacaaccatgaagccagcacgaagaaaaagccatccagtgaagagagagagactgaaatatctctgaaggattctacactagataactaggttgacatacctggaatatagagaacacttgagaagtttgtaatggttttcatttgaaatagactgctgaaagttttaaatttttataagcataggtttgatgttgaaaacttgttttgagggagaaaatccctttgttttaaagtaaagtaaacattatcgctaagtgtacttgtgcagtattaacagctacattatacagtaaatgtgggataaaatccatttagaaaatgttaaactgcttttccagacatggttgtagcatattttcaattagtgtgtgtatgttaatgtgtaattgatagtagaacaaagttacatttttaaaactgctacttgtataaaccttgcctcttttcccaaatactgtgggttttgtgcatagtttttacaaaccttggatttaccagactgtcttttcactgtttgtgggttttgtagaagttacacatttttatggtagataaaatgttacttctatacaagtactcactccctttttatcaaaagttaattttaatctcacagtctacattgtgctacattatccagcttctttggaacaatgtgtgctctgtatggttttttttggtatgacaactaattaagcaactgacatggaactgagaattctacaaactataaaacattaatttttgaaggtaatttagttttgtggctgggcattcagtgaagtcttaggacttctttgcagacaactgactgggtatatataggaatgaatctggctttagggttaaatcatttaaggtccttttataggcaggcactagtaactaaaactgaaaactaagtaagtttatttttgaggaatgttgttaaaaatgtctttaggaagtcactaaaacttaattggaagaaaaaatcatgatgcttatacaataaatatgaataaatgttatataaggaaactcacctatttgaaatcatggctatattgtttttattttctagattccaaaaatacaaacactagttgttccagcattgtactttgataagtctgtacattgacgtgtatggactaaatccagggtaaaatcaatgttacaaaatttaagggtatgttaactaaaggatagcatttctaagatattttgaatattagggtcatttggcacttctcagcaagtaggatacttctcatgttttgaaattatatgaatatggaaaaaaatggcttaagaccagcgtctctgtatgacattgtgtggttgaccctctgagataactgttttcatctacagaattgcatttttgcttttaaagaggtcttataatggaactaggaatcaccgttttgagagaacctgcatatataccagtcattatctgtttggtccttatacagttttaacttacttagatttattctagttaagccataagttcaacgtgtaaacttgttttcattaaagaatttttctatcaaaaaaaaaaaaaaaaaaaaaa

SEQ ID NO: 46059 - DNA, 3396 bp, Artificial Sequence
  derived and/or modified sequence
cagtgctagcgggcgccgagcgggagccgcgcgggagcagcgcagctacggcggcggcagcggcggcgcggttgcgattccgagccgttgagacgcctctgcggcagctggtggcgcaggtggcttgcgtggacgcgggtagaggcgaccggccagcaaccgcagcgtcggcgcccgcggccccggcagcaggcgcgtcgggacgccccgaggcatcctcccccgcccgcgggcccggtagctgggcccgcgtccgccgcccgcatccccgcgccgccgcatctcctcgccgcctcccgggcttcggacccccggtctcgcccccgaaacatgactcgcgatttcaaacctggagacctcatcttcgccaagatgaaaggttatccccattggccagctcgagtagacgaagttcctgatggagctgtaaagccacccacaaacaaactacccattttcttttttggaactcatgagactgcttttttaggaccaaaggatatatttccttactcagaaaataaggaaaagtatggcaaaccaaataaaagaaaaggttttaatgaaggtttatgggagatagataacaatccaaaagtgaaattttcaagtcaacaggcagcaactaaacaatcaaatgcatcatctgatgttgaagttgaagaaaaggaaactagtgtttcaaaggaagataccgaccatgaagaaaaagccagcaatgaggatgtgactaaagcagttgacataactactccaaaagctgccagaagggggagaaagagaaaggcagaaaaacaagtagaaactgaggaggcaggagtagtgacaacagcaacagcatctgttaatctaaaagtgagtcctaaaagaggacgacctgcagctacagaagtcaagattccaaaaccaagaggcagacccaaaatggtaaaacagccctgtccttcagagagtgacatcattactgaagaggacaaaagtaagaaaaaggggcaagaggaaaaacaacctaaaaagcagcctaagaaggatgaagagggccagaaggaagaagataagccaagaaaagagccggataaaaaagaggggaagaaagaagttgaatcaaaaaggaaaaatttagctaaaacaggggttacttcaacctccgattctgaagaagaaggagatgatcaagaaggtgaaaagaagagaaaaggtgggaggaactttcagactgctcacagaaggaatatgctgaaaggccaacatgagaaagaagcagcagatcgaaaacgcaagcaagaggaacaaatggaaactgagcagcagaataaagatgaaggaaagaagccagaagttaagaaagtggagaagaagcgagaaacatcaatggattctcgacttcaaaggatacatgctgagattaaaaattcactcaaaattgataatcttgatgtgaacagatgcattgaggccttggatgaacttgcttcacttcaggtcacaatgcaacaagctcagaaacacacagagatgattactacactgaaaaaaatacggcgattcaaagttagtcaggtaatcatggaaaagtctacaatgttgtataacaagtttaagaacatgttcttggttggtgaaggagattccgtgatcacccaagtgctgaataaatctcttgctgaacaaagacagcatgaggaagcgaataaaaccaaagatcaagggaagaaagggccaaacaaaaagctagagaaggaacaaacagggtcaaagactctaaatggaggatctgatgctcaagatggtaatcagccacaacataacggggagagcaatgaagacagcaaagacaaccatgaagccagcacgaagaaaaagccatccagtgaagagagagagactgaaatatctctgaaggattctacactagataactaggttgacatacctggaatatagagaacacttgagaagtttgtaatggttttcatttgaaatagactgctgaaagttttaaatttttataagcataggtttgatgttgaaaacttgttttgagggagaaaatccctttgttttaaagtaaagtaaacattatcgctaagtgtacttgtgcagtattaacagctacattatacagtaaatgtgggataaaatccatttagaaaatgttaaactgcttttccagacatggttgtagcatattttcaattagtgtgtgtatgttaatgtgtaattgatagtagaacaaagttacatttttaaaactgctacttgtataaaccttgcctcttttcccaaatactgtgggttttgtgcatagtttttacaaaccttggatttaccagactgtcttttcactgtttgtgggttttgtagaagttacacatttttatggtagataaaatgttacttctatacaagtactcactccctttttatcaaaagttaattttaatctcacagtctacattgtgctacattatccagcttctttggaacaatgtgtgctctgtatggttttttttggtatgacaactaattaagcaactgacatggaactgagaattctacaaactataaaacattaatttttgaaggtaatttagttttgtggctgggcattcagtgaagtcttaggacttctttgcagacaactgactgggtatatataggaatgaatctggctttagggttaaatcatttaaggtccttttataggcaggcactagtaactaaaactgaaaactaagtaagtttatttttgaggaatgttgttaaaaatgtctttaggaagtcactaaaacttaattggaagaaaaaatcatgatgcttatacaataaatatgaataaatgttatataaggaaactcacctatttgaaatcatggctatattgtttttattttctagattccaaaaatacaaacactagttgttccagcattgtactttgataagtctgtacattgacgtgtatggactaaatccagggtaaaatcaatgttacaaaatttaagggtatgttaactaaaggatagcatttctaagatattttgaatattagggtcatttggcacttctcagcaagtaggatacttctcatgttttgaaattatatgaatatggaaaaaaatggcttaagaccagcgtctctgtatgacattgtgtggttgaccctctgagataactgttttcatctacagaattgcatttttgcttttaaagaggtcttataatggaactaggaatcaccgttttgagagaacctgcatatataccagtcattatctgtttggtccttatacagttttaacttacttagatttattctagttaagccataagttcaacgtgtaaacttgttttcattaaagaatttttctatcaaaaaaaaaaaaaaaaaaaaaa

SEQ ID NO: 46060 - DNA, 1593 bp, Artificial Sequence
  derived and/or modified sequence
atgacacgtgatttcaagccgggagacctcatatttgcaaaaatgaaagggtaccctcactggccagctcgggttgacgaagtccctgacggagccgtgaaaccacctacaaacaaactgccaatcttcttttttggaactcacgaaactgcttttcttggccccaaagatatatttccctactctgagaataaagagaagtacgggaagcctaataaaaggaagggcttcaatgaaggtctgtgggaaatcgataataatcctaaagttaaattctcctcacaacaggctgccaccaagcagagcaatgcctcaagtgatgtagaggtcgaggaaaaggaaacctcagtgagcaaagaagacacagaccacgaagagaaggcttccaacgaggatgtgacaaaagccgtggatatcactacaccaaaggcagccaggcggggaaggaagaggaaagcagagaagcaggttgaaaccgaggaagcgggagtggtgacaactgccaccgctagcgtgaacctcaaagtaagtcccaaaaggggacgcccagctgcaacggaagtgaagattcccaaacctcgcggcaggccaaaaatggtgaagcagccttgcccctcggaatcagacataatcacagaggaagacaaatctaagaagaaaggccaagaagaaaagcagcccaaaaagcaacctaaaaaggacgaggagggccaaaaggaagaagacaagccacggaaagagcctgataaaaaggaaggaaagaaggaagtagaatcaaagaggaagaaccttgccaagaccggggtaactagtactagcgacagcgaggaagagggcgacgaccaggaaggggagaaaaagcgaaaaggtggacggaactttcagaccgctcaccgtcggaatatgttgaaaggacagcacgaaaaggaggcggcagacagaaaacgaaaacaggaagagcagatggaaacggaacagcagaataaggacgaaggcaagaaaccggaggttaaaaaggtggaaaaaaagagagaaacaagtatggacagccgactgcagcgcatccacgcagaaatcaaaaactcactgaagattgataacctggatgtgaataggtgtattgaagctctggacgagctcgcttcactgcaggtgacgatgcaacaagcccagaaacacacagagatgattaccacgctcaaaaagattcgcaggttcaaagtcagccaggtgatcatggagaagagcacgatgttatataataagtttaagaatatgtttctggtgggggagggggactccgtcatcacgcaggtccttaataaaagcttagctgaacagcgccaacatgaagaggctaacaaaaccaaggaccaaggaaaaaaagggcctaacaagaagctcgagaaagaacagaccgggagcaaaacactgaatggcgggtccgacgcccaagacggcaaccagccacaacataatggagagagcaacgaagacagcaaagacaaccacgaggctagtacgaagaagaaaccatctagtgaggaaagagaaaccgaaatctccttgaaggattcaactttggacaactag

SEQ ID NO: 46061 - DNA, 1593 bp, Artificial Sequence
  derived and/or modified sequence
atgacccgggacttcaaacctggcgaccttatcttcgccaaaatgaaggggtatccccactggcctgcccgggtggacgaagttcccgatggcgccgtaaaaccccccacgaacaagctgcccatcttcttcttcgggactcatgagaccgcgttcttgggcccaaaggatatatttccgtattctgaaaacaaggaaaaatacggcaagcccaataaaaggaagggcttcaacgaaggtctgtgggagatagacaacaatccgaaagtgaaattctcaagccagcaggctgcgactaaacaaagcaatgcaagctccgatgtcgaggttgaagagaaggaaacctcagtgagcaaagaggatacggatcacgaagaaaaggcctccaatgaggatgtgactaaagcagtggacattaccacacccaaagccgcaaggcgggggcgcaaacgcaaggcagaaaagcaagtggaaaccgaagaggccggagtagttacaactgcgaccgcctctgtaaatttgaaggtgtcacctaagcgcggtcgccccgctgctactgaagtaaagattccaaaaccccgcggtcggccaaagatggtaaagcaaccatgcccatctgagagtgatataattactgaagaagacaagagtaagaagaaagggcaagaggagaaacagcctaagaagcagccgaagaaagatgaggagggccagaaggaagaggacaagcctaggaaagaaccggacaaaaaggaaggaaagaaggaagtggagtccaaacgaaagaaccttgccaagacaggcgtcacgagtaccagtgactccgaggaggagggtgacgatcaggagggtgaaaagaaaaggaaggggggccgtaacttccagacggcccacagaagaaatatgctaaaggggcaacatgagaaggaggcggccgatagaaaacggaaacaggaggagcagatggagactgaacagcagaataaagacgagggcaagaagccagaggtgaagaaggtggagaagaagcgcgagacctctatggacagcaggctgcagagaatccatgcggaaataaaaaattcgttaaaaattgataacctggacgtgaatcgctgcattgaagctctggatgaactcgcgtcccttcaggtgaccatgcagcaggctcaaaagcacaccgaaatgattactactttaaagaaaatccggaggttcaaggtcagccaggtgattatggaaaagtcaaccatgctgtacaacaaatttaaaaatatgtttctcgtcggtgagggagactctgtgattacccaggtcctgaataaaagcctagcagagcaacggcaacacgaggaggcaaacaaaacaaaggatcagggcaagaagggacctaacaagaagctggagaaagagcagacaggcagtaagacactcaacggtgggtccgacgcccaagatggcaatcagccacaacacaatggcgagtcaaacgaagatagcaaggataaccatgaagctagcaccaagaaaaaaccgagctccgaagagcgggaaacggagatcagcttaaaagactcaactctggacaattag

SEQ ID NO: 46062 - DNA, 1593 bp, Artificial Sequence
  derived and/or modified sequence
atgacccgggacttcaagccaggggacctgatctttgccaagatgaagggctacccccactggccagcccgggtggatgaggtgcctgatggagctgtgaagccacccaccaacaagctgcccatcttcttcttcggcacccatgaaacagccttcctgggccccaaggacatcttcccctacagcgagaacaaggagaagtatggcaagcccaacaagaggaagggcttcaatgaaggcctgtgggagattgacaacaaccccaaggtgaagttcagcagccagcaggccgccaccaagcagagcaatgccagcagtgatgtggaggtggaggagaaggagacctctgtgtccaaggaggacacagaccacgaggagaaggccagcaatgaagatgtgaccaaggctgtggacatcaccacccccaaggccgcccggcggggcaggaagaggaaggccgagaagcaggtggagacagaggaggccggcgtggtgaccacagccacagcctctgtgaacctgaaggtgagccccaagaggggccggcctgctgccacagaggtgaagatccccaagccccggggccggcccaagatggtgaagcagccctgccccagcgagagtgacatcatcacagaggaggacaagagcaagaagaagggccaggaggagaagcagcccaagaagcagcccaagaaggatgaggagggccagaaggaggaggacaagcccaggaaggagccagacaagaaggagggcaagaaggaggtggagagcaagaggaagaacctggccaagacaggagtgaccagcaccagtgacagcgaggaggagggagatgaccaggagggggagaagaagaggaaaggaggcaggaacttccagacagcccacagaagaaacatgctgaagggccagcacgagaaggaggccgctgacaggaagaggaagcaggaggagcagatggagacagagcagcagaacaaggatgagggcaagaagccagaggtgaagaaggtggagaagaagcgggagacctccatggacagccggctgcagagaattcatgctgagatcaagaacagcctgaagattgacaacctggatgtgaaccgctgcatcgaggccctggatgagctggccagcctgcaggtgaccatgcagcaggcccagaagcacacagagatgatcaccaccctgaagaagatccgccgcttcaaggtgtcccaggtgatcatggagaagagcaccatgctgtacaacaagttcaagaacatgttcctggtgggggagggggacagcgtcatcacccaggtgctgaacaagagcctggccgagcagaggcagcacgaggaggccaacaagaccaaggaccagggcaagaagggccccaacaagaagctggagaaggagcagacaggcagcaagaccctgaatggaggcagtgatgcccaggacggcaaccagccccagcacaatggagagagcaatgaagacagcaaggacaaccacgaggccagcaccaagaagaagcccagcagcgaggagcgggagacagagatcagcctgaaggacagcaccctggacaactag

SEQ ID NO: 46063 - DNA, 1593 bp, Artificial Sequence
  derived and/or modified sequence
atgacccgggacttcaagcccggcgacctgatcttcgccaagatgaaggggtaccctcactggccggcaagggtggacgaagtgccggacggggcagtcaaaccccctaccaataagctccccattttttttttcggcacccatgagaccgcttttctgggtccaaaggacatcttcccttattctgagaataaggagaaatacggcaagccaaacaaacgtaaagggttcaatgaagggctttgggaaatagataataacccaaaggtgaagttctcgtctcaacaagccgcaacaaagcaatcgaacgcgtcttccgatgttgaggtcgaggagaaggagaccagcgtatcaaaggaagacaccgatcacgaggagaaagcatctaatgaagacgttacaaaagcggtggacatcacaactccaaaggctgcccggaggggccggaagcggaaggctgagaagcaggtggagaccgaggaggccggcgtcgttaccaccgcaactgcctccgtcaatctgaaggtgtcacctaaacgcggaagaccagctgctaccgaagtcaagatccccaaacctagaggccgtccgaagatggtgaaacagccgtgcccaagcgagtcagatataattactgaggaggacaaaagcaaaaaaaagggacaggaggaaaaacagccaaagaagcaaccgaagaaggacgaggagggccagaaggaggaggacaaacctaggaaggagcccgataagaaggaggggaaaaaggaagtggaatccaagcggaagaacctcgccaagaccggggtgacgagtacctccgacagtgaagaagagggggacgaccaggagggcgaaaagaagcgtaagggtgggaggaactttcagaccgcacacaggcgtaatatgctcaaaggacaacacgaaaaggaggctgcggaccggaaacggaaacaggaggagcagatggaaaccgagcaacagaacaaagatgagggcaagaaacccgaggtcaaaaaagtagaaaaaaagagggagacgtctatggattccaggcttcagcgcatccacgctgaaatcaagaattcactgaaaatcgacaatctggacgtgaaccgatgtatcgaagcgcttgatgagctagctagcttgcaggtaaccatgcagcaggcccagaagcatacggagatgatcactacactcaaaaaaattcgcaggtttaaggtttcccaagtgattatggagaagtctacaatgttatacaataaatttaagaacatgtttctggttggagaaggcgattctgtgatcactcaagttctgaataaatctctcgcagagcagcggcagcacgaggaagctaacaaaacaaaggatcaaggcaaaaaaggaccaaacaaaaaactggaaaaagaacagactggatcaaagacactcaacgggggatccgacgcccaggacggcaatcaacctcagcacaatggcgagtctaatgaagactctaaagataaccacgaagcatctacaaagaagaaacccagctcggaagaaagggaaaccgaaatctctctaaaggacagcactctggacaactag

SEQ ID NO: 46064 - DNA, 1593 bp, Artificial Sequence
  derived and/or modified sequence
atgacccgggacttcaagcccggcgacctgatcttcgccaagatgaaaggatacccacactggcccgcccgcgtggacgaagtgcctgatggcgcggtaaagcctcctactaataagcttccaatcttttttttcggaactcacgaaactgcttttctggggccgaaagacattttcccttattctgagaacaaagaaaagtatggcaagcccaataaacggaaaggcttcaatgaaggcctgtgggagatcgacaataaccctaaggtcaaatttagttcccagcaggctgccaccaaacaatctaacgcgtcctccgacgtggaggttgaagaaaaggaaacgagtgtgtctaaagaggacacagaccacgaagaaaaggcaagtaatgaagatgtaacaaaagctgttgatatcacaacacctaaagccgcacggcggggacgtaaacgcaaagccgagaagcaggtggagactgaggaagcaggcgttgtcaccaccgccaccgcctctgtaaacctcaaagtgagccccaagaggggtcgccctgcagccacagaggttaaaattcccaagccacgtggtcggcctaaaatggtgaaacaaccgtgcccaagtgaaagcgatattatcaccgaagaagacaagagcaaaaagaaaggacaggaggaaaagcagcctaaaaaacagcctaagaaggacgaggagggacagaaggaagaggacaaaccaagaaaagagccagataagaaggaaggtaaaaaggaagtcgaatccaaaagaaaaaacctcgctaaaaccggagtaacttctacctctgactccgaagaagagggggacgatcaagagggagagaagaagcgcaagggcggtaggaacttccagaccgcccacagaagaaacatgctcaagggtcagcacgaaaaagaggctgccgaccgaaagcgtaagcaggaggaacagatggaaacagagcaacagaacaaagatgaaggcaagaagcccgaggtgaagaaggtggaaaaaaagcgggagacatctatggacagccggttgcagagaatccatgcagaaatcaaaaattctctaaagatcgataatttagacgttaacaggtgtatcgaagccctagatgagttagcgtccttgcaggtcactatgcagcaggcccaaaagcatacggaaatgatcaccaccctgaagaagattcgtcggttcaaggtgagccaggtgatcatggaaaaatcaaccatgctctataataagttcaaaaacatgtttctcgttggcgaaggggattccgtgattacacaggttttgaataagtctcttgcagagcagcgtcagcatgaagaagccaacaagacaaaggaccaagggaaaaaaggccctaataagaagctcgagaaggaacagacagggtcaaagaccctcaatggcggatccgacgcccaagacggcaatcaaccacagcacaatggggagtccaatgaagacagcaaagataaccacgaggcgtccacgaagaagaaaccctcctcagaggagagagaaactgagatctccctgaaggattcaactctcgacaactag

SEQ ID NO: 46065 - DNA, 3391 bp, Artificial Sequence
  derived and/or modified sequence
agttggtcgcgccccagtgctagcgggcgccgagcgggagccgcgcgggagcagcgcagctacggcggcggcagcggcggcgcggttgcgattccgagccgttgagacgcctctgcggcagctggtggcgcaggtggcttgcgtggacgcgggtagaggcgaccggccagcaaccgcagcgtcggcgcccgcggccccggcagcaggcgcgtcgggacgccccgaggcatcctcccccgcccgcgggcccggtagctgggcccgcgtccgccgcccgcatccccgcgccgccgcatctcctcgccgcctcccgggcttcggacccccggtctcgcccccgaaacatgactcgcgatttcaaacctggagacctcatcttcgccaagatgaaaggttatccccattggccagctcgagtagacgaagttcctgatggagctgtaaagccacccacaaacaaactacccattttcttttttggaactcatgagactgcttttttaggaccaaaggatatatttccttactcagaaaataaggaaaagtatggcaaaccaaataaaagaaaaggttttaatgaaggtttatgggagatagataacaatccaaaagtgaaattttcaagtcaacaggcagcaactaaacaatcaaatgcatcatctgatgttgaagttgaagaaaaggaaactagtgtttcaaaggaagataccgaccatgaagaaaaagccagcaatgaggatgtgactaaagcagttgacataactactccaaaagctgccagaagggggagaaagagaaaggcagaaaaacaagtagaaactgaggaggcaggagtagtgacaacagcaacagcatctgttaatctaaaagtgagtcctaaaagaggacgacctgcagctacagaagtcaagattccaaaaccaagaggcagacccaaaatggtaaaacagccctgtccttcagagagtgacatcattactgaagaggacaaaagtaagaaaaaggggcaagaggaaaaacaacctaaaaagcagcctaagaaggatgaagagggccagaaggaagaagataagccaagaaaagagccggataaaaaagaggggaagaaagaagttgaatcaaaaaggaaaaatttagctaaaacaggggttacttcaacctccgattctgaagaagaaggagatgatcaagaaggtgaaaagaagagaaaaggtgggaggaactttcagactgctcacagaaggaatatgctgaaaggccaacatgagaaagaagcagcagatcgaaaacgcaagcaagaggaacaaatggaaactgagcagcagaataaagatgaaggaaagaagccagaagttaagaaagtggagaagaagcgagaaacatcaatggattctcgacttcaaaggatacatgctgagattaaaaattcactcaaaattgataatcttgatgtgaacagatgcattgaggccttggatgaacttgcttcacttcaggtcacaatgcaacaagctcagaaacacacagagatgattactacactgaaaaaaatacggcgattcaaagttagtcaggtaatcatggaaaagtctacaatgttgtataacaagtttaagaacatgttcttggttggtgaaggagattccgtgatcacccaagtgctgaataaatctcttgctgaacaaagacagcatgaggaagcgaataaaaccaaagatcaagggaagaaagggccaaacaaaaagctagagaaggaacaaacagggtcaaagactctaaatggaggatctgatgctcaagatggtaatcagccacaacataacggggagagcaatgaagacagcaaagacaaccatgaagccagcacgaagaaaaagccatccagtgaagagagagagactgaaatatctctgaaggattctacactagataactaggttgacatacctggaatatagagaacacttgagaagtttgtaatggttttcatttgaaatagactgctgaaagttttaaatttttataagcataggtttgatgttgaaaacttgttttgagggagaaaatccctttgttttaaagtaaagtaaacattatcgctaagtgtacttgtgcagtattaacagctacattatacagtaaatgtgggataaaatccatttagaaaatgttaaactgcttttccagacatggttgtagcatattttcaattagtgtgtgtatgttaatgtgtaattgatagtagaacaaagttacatttttaaaactgctacttgtataaaccttgcctcttttcccaaatactgtgggttttgtgcatagtttttacaaaccttggatttaccagactgtcttttcactgtttgtgggttttgtagaagttacacatttttatggtagataaaatgttacttctatacaagtactcactccctttttatcaaaagttaattttaatctcacagtctacattgtgctacattatccagcttctttggaacaatgtgtgctctgtatggttttttttggtatgacaactaattaagcaactgacatggaactgagaattctacaaactataaaacattaatttttgaaggtaatttagttttgtggctgggcattcagtgaagtcttaggacttctttgcagacaactgactgggtatatataggaatgaatctggctttagggttaaatcatttaaggtccttttataggcaggcactagtaactaaaactgaaaactaagtaagtttatttttgaggaatgttgttaaaaatgtctttaggaagtcactaaaacttaattggaagaaaaaatcatgatgcttatacaataaatatgaataaatgttatataaggaaactcacctatttgaaatcatggctatattgtttttattttctagattccaaaaatacaaacactagttgttccagcattgtactttgataagtctgtacattgacgtgtatggactaaatccagggtaaaatcaatgttacaaaatttaagggtatgttaactaaaggatagcatttctaagatattttgaatattagggtcatttggcacttctcagcaagtaggatacttctcatgttttgaaattatatgaatatggaaaaaaatggcttaagaccagcgtctctgtatgacattgtgtggttgaccctctgagataactgttttcatctacagaattgcatttttgcttttaaagaggtcttataatggaactaggaatcaccgttttgagagaacctgcatatataccagtcattatctgtttggtccttatacagttttaacttacttagatttattctagttaagccataagttcaacgtgtaaacttgttttcattaaagaatttttctatcaaa

SEQ ID NO: 46066 - DNA, 3364 bp, Artificial Sequence
  derived and/or modified sequence
gggcgccgagcgggagccgcgcgggagcagcgcagctacggcggcggcagcggcggcgcggttgcgattccgagccgttgagacgcctctgcggcagctggtggcgcaggtggcttgcgtggacgcgggtagaggcgaccggccagcaaccgcagcgtcggcgcccgcggccccggcaggcgcgtcgggacgccccgaggcatcctcccccgcccgcgggcccggtagctgggcccgcgtccgccgcccgcatccccgcgccgccgcatctcctcgccgcctcccgggcttcggacccccggtctcgcccccgaaacatgactcgcgatttcaaacctggagacctcatcttcgccaagatgaaaggttatccccattggccagctcgagtagacgaagttcctgatggagctgtaaagccacccacaaacaaactacccattttcttttttggaactcatgagactgcttttttaggaccaaaggatatatttccttactcagaaaataaggaaaagtatggcaaaccaaataaaagaaaaggttttaatgaaggtttatgggagatagataacaatccaaaagtgaaattttcaagtcaacaggcagcaactaaacaatcaaatgcatcatctgatgttgaagttgaagaaaaggaaactagtgtttcaaaggaagataccgaccatgaagaaaaagccagcaatgaggatgtgactaaagcagttgacataactactccaaaagctgccagaagggggagaaagagaaaggcagaaaaacaagtagaaactgaggaggcaggagtagtgacaacagcaacagcatctgttaatctaaaagtgagtcctaaaagaggacgacctgcagctacagaagtcaagattccaaaaccaagaggcagacccaaaatggtaaaacagccctgtccttcagagagtgacatcattactgaagaggacaaaagtaagaaaaaggggcaagaggaaaaacaacctaaaaagcagcctaagaaggatgaagagggccagaaggaagaagataagccaagaaaagagccggataaaaaagaggggaagaaagaagttgaatcaaaaaggaaaaatttagctaaaacaggggttacttcaacctccgattctgaagaagaaggagatgatcaagaaggtgaaaagaagagaaaaggtgggaggaactttcagactgctcacagaaggaatatgctgaaaggccaacatgagaaagaagcagcagatcgaaaacgcaagcaagaggaacaaatggaaactgagcagcagaataaagatgaaggaaagaagccagaagttaagaaagtggagaagaagcgagaaacatcaatggattctcgacttcaaaggatacatgctgagattaaaaattcactcaaaattgataatcttgatgtgaacagatgcattgaggccttggatgaacttgcttcacttcaggtcacaatgcaacaagctcagaaacacacagagatgattactacactgaaaaaaatacggcgattcaaagttagtcaggtaatcatggaaaagtctacaatgttgtataacaagtttaagaacatgttcttggttggtgaaggagattccgtgatcacccaagtgctgaataaatctcttgctgaacaaagacagcatgaggaagcgaataaaaccaaagatcaagggaagaaagggccaaacaaaaagctagagaaggaacaaacagggtcaaagactctaaatggaggatctgatgctcaagatggtaatcagccacaacataacggggagagcaatgaagacagcaaagacaaccatgaagccagcacgaagaaaaagccatccagtgaagagagagagactgaaatatctctgaaggattctacactagataactaggttgacatacctggaatatagagaacacttgagaagtttgtaatggttttcatttgaaatagactgctgaaagttttaaatttttataagcataggtttgatgttgaaaacttgttttgagggagaaaatccctttgttttaaagtaaagtaaacattatcgctaagtgtacttgtgcagtattaacagctacattatacagtaaatgtgggataaaatccatttagaaaatgttaaactgcttttccagacatggttgtagcatattttcaattagtgtgtgtatgttaatgtgtaattgatagtagaacaaagttacatttttaaaactgctacttgtataaaccttgcctcttttcccaaatactgtgggttttgtgcatagtttttacaaaccttggatttaccagactgtcttttcactgtttgtgggttttgtagaagttacacatttttatggtagataaaatgttacttctatacaagtactcactccctttttatcaaaagttaattttaatctcacagtctacattgtgctacattatccagcttctttggaacaatgtgtgctctgtatggttttttttggtatgacaactaattaagcaactgacatggaactgagaattctacaaactataaaacattaatttttgaaggtaatttagttttgtggctgggcattcagtgaagtcttaggacttctttgcagacaactgactgggtatatataggaatgaatctggctttagggttaaatcatttaaggtccttttataggcaggcactagtaactaaaactgaaaactaagtaagtttatttttgaggaatgttgttaaaaatgtctttaggaagtcactaaaacttaattggaagaaaaaatcatgatgcttatacaataaatatgaataaatgttatataaggaaactcacctatttgaaatcatggctatattgtttttattttctagattccaaaaatacaaacactagttgttccagcattgtactttgataagtctgtacattgacgtgtatggactaaatccagggtaaaatcaatgttacaaaatttaagggtatgttaactaaaggatagcatttctaagatattttgaatattagggtcatttggcacttctcagcaagtaggatacttctcatgttttgaaattatatgaatatggaaaaaaatggcttaagaccagcgtctctgtatgacattgtgtggttgaccctctgagataactgttttcatctacagaattgcatttttgcttttaaagaggtcttataatggaactaggaatcaccgttttgagagaacctgcatatataccagtcattatctgtttggtccttatacagttttaacttacttagatttattctagttaagccataagttcaacgtgtaaacttgttttcattaaagaatttttctatcaaa

SEQ ID NO: 46067 - DNA, 1593 bp, Artificial Sequence
  derived and/or modified sequence
atgactcgggacttcaaaccaggcgacctcatcttcgcaaaaatgaagggctatccacactggcccgcacgggttgacgaggtccccgatggagccgttaagccgcctacaaataagctgcctattttcttcttcggtacccatgaaaccgctttcctgggcccaaaggacatcttcccctactctgaaaataaagagaagtacgggaagcccaacaaaaggaaaggctttaacgaaggtttgtgggagattgataacaatcctaaggtaaagttttcgtcccagcaggctgcaacaaagcagagtaatgcgagtagcgatgtggaggtcgaagaaaaagagacgtccgttagcaaggaggatacagatcacgaggaaaaggctagcaacgaggatgtcaccaaggctgtggacataactactcctaaagcagcccgaaggggacgtaaaagaaaagccgagaaacaggtggaaactgaggaggcaggcgtggtgaccacagctactgcttccgttaatcttaaggtgagccccaaacgaggcagaccagcagccacggaggtgaaaatccctaagccgagaggccgaccaaaaatggtgaaacagccttgtccgtcggagtctgacattataaccgaagaagataagagcaagaaaaagggtcaagaggaaaagcagcccaaaaagcagcccaagaaagacgaagaagggcaaaaggaggaggataaacccagaaaggagccggataaaaaggaaggaaagaaggaggtagaatcaaagcgcaagaatctggctaagactggagtcacaagcacgtccgactctgaggaggagggtgacgaccaggagggggaaaagaaacggaaggggggtcgcaactttcaaaccgctcatcggagaaacatgctcaagggacaacacgagaaagaggcagccgacagaaaacgcaaacaagaggaacagatggagaccgagcagcaaaataaggatgagggtaagaaacccgaagtcaagaaagtcgagaagaagcgtgaaacttcaatggattctaggctgcaaagaatacacgctgaaatcaaaaattcgctgaaaatcgacaacttggatgtcaatcgttgcatcgaggctctcgacgagctcgcctccctgcaggtgacaatgcagcaggcccagaagcacacggagatgatcactacattgaaaaagattcgaaggttcaaagtttcgcaggtaataatggagaagtctacaatgctatacaataagttcaaaaacatgttcttggttggcgaaggtgactcagtgattactcaagtgctgaataagagtctggcagaacaaaggcagcatgaagaggctaacaagaccaaagaccagggaaaaaagggccctaacaaaaaactggaaaaggaacagaccggcagcaaaaccctcaatggaggatccgatgcacaggacgggaatcaaccgcaacataacggcgaatccaatgaagatagtaaggataatcacgaggcttcgaccaagaaaaaaccttcctccgaggaacgcgagaccgaaatcagtctgaaggattcaacattggacaattag

SEQ ID NO: 46068 - DNA, 1593 bp, Artificial Sequence
  derived and/or modified sequence
atgacaagggatttcaagccgggagacctcatatttgctaagatgaaaggctacccccactggcccgctagagtagatgaggtgcccgacggagccgtgaagcctccaacaaacaaactccccattttcttcttcggcacccatgagacagccttcctgggtcccaaggacatcttcccatattccgagaataaagaaaaatatgggaagccaaacaaacgcaagggtttcaacgaaggcctgtgggagatcgacaacaatccaaaagtgaaattctcttcccaacaggcagcgacaaagcagagcaacgcgagcagcgatgttgaggtcgaggaaaaggagacatctgtgtccaaggaggataccgaccacgaagagaaagcttccaatgaggatgtcacgaaggcggtcgacataaccacgcctaaggctgcccgaagggggagaaaacgcaaagccgagaagcaggtagaaacggaggaggcaggggtggtcaccaccgcaaccgcctcagtgaatttaaaagtgagcccaaaaagggggagacctgccgcaaccgaggtaaagatacccaaaccgcgtggcagacccaaaatggttaaacagccatgtccttccgagagtgatatcatcactgaagaagacaagagcaaaaaaaaagggcaggaagagaagcagcccaaaaagcagccaaagaaagacgaagaaggccagaaggaagaggataagcccaggaaagagccagataaaaaggaaggaaaaaaagaagtggagtctaaaaggaaaaacctggccaagacaggagtgaccagcacttctgacagcgaggaagagggagatgatcaagaaggcgaaaagaagagaaaggggggacggaacttccagactgctcaccgtagaaacatgctgaaaggacagcatgagaaagaggctgccgacagaaagagaaagcaggaagaacagatggagaccgagcagcagaacaaagacgaggggaaaaagccagaagtcaagaaggtcgagaaaaaacgggagacgtccatggactctaggctgcaacggattcatgctgaaatcaaaaactccctgaagatagataatctcgatgtgaatagatgcatcgaagctttagatgaattggccagtctccaagttaccatgcagcaagcacagaagcacactgagatgatcaccactctgaaaaaaatcaggcggttcaaggtgtcccaggttatcatggagaagagcaccatgctttacaacaaatttaaaaatatgtttctcgtcggcgaaggcgacagcgtcataacacaggtgttaaacaaaagcctggcggagcagcgacagcacgaggaagcgaataaaacaaaagaccagggaaaaaagggccctaataaaaagctggagaaagagcagacaggctcaaagaccctgaatggcggatcggatgcccaagatggaaatcagcctcagcacaacggtgaatctaatgaagattctaaagacaaccacgaggctagcacaaagaagaagcctagcagcgaagagagggagactgagattagtctaaaagattcaactctggataactag

SEQ ID NO: 46069 - DNA, 1593 bp, Artificial Sequence
  derived and/or modified sequence
atgaccagagacttcaagcccggcgacctgatcttcgccaagatgaagggctacccccactggcccgccagagtggacgaggtgcccgacggcgccgtgaagccccccaccaacaagctgcccatcttcttcttcggcacccacgagaccgccttcctgggccccaaggacatcttcccctacagcgagaacaaggagaagtacggcaagcccaacaagagaaagggcttcaacgagggcctgtgggagatcgacaacaaccccaaggtgaagttcagcagccagcaggccgccaccaagcagagcaacgccagcagcgacgtggaggtggaggagaaggagaccagcgtgagcaaggaggacaccgaccacgaggagaaggccagcaacgaggacgtgaccaaggccgtggacatcaccacccccaaggccgccagaagaggcagaaagagaaaggccgagaagcaggtggagaccgaggaggccggcgtggtgaccaccgccaccgccagcgtgaacctgaaggtgagccccaagagaggcagacccgccgccaccgaggtgaagatccccaagcccagaggcagacccaagatggtgaagcagccctgccccagcgagagcgacatcatcaccgaggaggacaagagcaagaagaagggccaggaggagaagcagcccaagaagcagcccaagaaggacgaggagggccagaaggaggaggacaagcccagaaaggagcccgacaagaaggagggcaagaaggaggtggagagcaagagaaagaacctggccaagaccggcgtgaccagcaccagcgacagcgaggaggagggcgacgaccaggagggcgagaagaagagaaagggcggcagaaacttccagaccgcccacagaagaaacatgctgaagggccagcacgagaaggaggccgccgacagaaagagaaagcaggaggagcagatggagaccgagcagcagaacaaggacgagggcaagaagcccgaggtgaagaaggtggagaagaagagagagaccagcatggacagcagactgcagagaatccacgccgagatcaagaacagcctgaagatcgacaacctggacgtgaacagatgcatcgaggccctggacgagctggccagcctgcaggtgaccatgcagcaggcccagaagcacaccgagatgatcaccaccctgaagaagatcagaagattcaaggtgagccaggtgatcatggagaagagcaccatgctgtacaacaagttcaagaacatgttcctggtgggcgagggcgacagcgtgatcacccaggtgctgaacaagagcctggccgagcagagacagcacgaggaggccaacaagaccaaggaccagggcaagaagggccccaacaagaagctggagaaggagcagaccggcagcaagaccctgaacggcggcagcgacgcccaggacggcaaccagccccagcacaacggcgagagcaacgaggacagcaaggacaaccacgaggccagcaccaagaagaagcccagcagcgaggagagagagaccgagatcagcctgaaggacagcaccctggacaactag

SEQ ID NO: 46070 - protein, 296 aa, Artificial Sequence
  derived and/or modified sequence
MLFMKMDLLNYQYLDKMNNNIGILCYEGEAALRGEPRIQTLPVASALSSHRTGPPPISPSKRKFSMEPGDEDLDCDNDHVSKMSRIFNPHLNKTANGDCRRDPRERSRSPIERAVAPTMSLHGSHLYTSLPSLGLEQPLALTKNSLDASRPAGLSPTLTPGERQQNRPSVITCASAGARNCNLSHCPIAHSGCAAPGPASYRRPPSAATTCDPVVEEHFRRSLGKNYKEPEPAPNSVSITGSVDDHFAKALGDTWLQIKAAKDGASSSPESASRRGQPASPSAHMVSHSHSPSVVS

SEQ ID NO: 46071 - DNA, 891 bp, Artificial Sequence
  derived and/or modified sequence
atgctgttcatgaagatggacctgctgaactaccagtacctggacaagatgaacaacaacatcggcatcctgtgctacgagggcgaggccgccctgagaggcgagcccagaatccagaccctgcccgtggccagcgccctgagcagccacagaaccggccccccccccatcagccccagcaagagaaagttcagcatggagcccggcgacgaggacctggactgcgacaacgaccacgtgagcaagatgagcagaatcttcaacccccacctgaacaagaccgccaacggcgactgcagaagagaccccagagagagaagcagaagccccatcgagagagccgtggcccccaccatgagcctgcacggcagccacctgtacaccagcctgcccagcctgggcctggagcagcccctggccctgaccaagaacagcctggacgccagcagacccgccggcctgagccccaccctgacccccggcgagagacagcagaacagacccagcgtgatcacctgcgccagcgccggcgccagaaactgcaacctgagccactgccccatcgcccacagcggctgcgccgcccccggccccgccagctacagaagaccccccagcgccgccaccacctgcgaccccgtggtggaggagcacttcagaagaagcctgggcaagaactacaaggagcccgagcccgcccccaacagcgtgagcatcaccggcagcgtggacgaccacttcgccaaggccctgggcgacacctggctgcagatcaaggccgccaaggacggcgccagcagcagccccgagagcgccagcagaagaggccagcccgccagccccagcgcccacatggtgagccacagccacagccccagcgtggtgagctag

SEQ ID NO: 46072 - DNA, 891 bp, Artificial Sequence
  derived and/or modified sequence
atgctttttatgaagatggacctactcaattatcagtatctggataagatgaacaataacatcggaatcctgtgctatgagggggaggccgccctccggggggaaccacggatccaaaccctccccgtggcctctgcactgtcatcccaccgaactggcccccctcctatttcaccttccaagcgtaaattctcaatggagcctggtgacgaagatttagattgtgacaatgaccacgttagtaagatgtctcgcatcttcaacccacacttaaataagacagcaaatggagactgccgacgagaccctcgggagaggtcccggtcgccaattgagagggccgttgcgcccacaatgtctctgcatggatcacatctgtacacaagcctcccgtcacttggccttgagcaaccacttgccctgacaaaaaattcgctggacgcctcccggcccgcaggcctgtctcccaccttgacccccggcgagagacagcaaaatcggccttctgtgattacatgcgcctcagccggggccaggaactgcaacctgagccattgtcccatcgctcactccgggtgtgctgcaccaggacccgctagctacagacggccaccatcagcagcaacaacctgtgacccggtcgtggaagaacacttccgtcgatccctcggcaagaactataaggagcctgaacctgctcccaactcagtctcaatcacggggtcagtggatgatcattttgctaaggctctgggcgacacatggctccaaatcaaggccgccaaggacggggccagttcgtccccggagtccgcttccagaaggggccagcctgccagcccatccgcccacatggtttcacacagccacagtccctccgtcgtctcctag

SEQ ID NO: 46073 - DNA, 891 bp, Artificial Sequence
  derived and/or modified sequence
atgctgttcatgaagatggacctgctgaactaccagtacctggacaagatgaacaacaacatcggcatcctgtgctatgaaggagaggccgccctgcggggggagccccgcatccagaccctgcctgtggccagcgccctgagcagccacaggacaggccccccacccatcagccccagcaagaggaagttctccatggagcctggagatgaggacctggactgtgacaatgaccacgtgtccaagatgagccgcatcttcaacccccacctgaacaagacagccaacggggactgccggcgggacccccgggagaggagccgcagccccatcgagagagctgtggcccccaccatgagcctgcacggcagccacctgtacaccagcctgcccagcctgggcctggagcagcccctggccctgaccaagaacagcctggatgccagcaggcctgctggcctgagccccaccctgaccccaggagagcggcagcagaaccggcccagcgtcatcacctgtgccagcgctggggccaggaactgcaacctgagccactgccccatcgcccacagcggctgtgccgcccctggccctgccagctaccgccggccccccagcgctgccaccacctgtgaccctgtggtggaggagcacttccgccgcagcctgggcaagaactacaaggagcctgagcccgcccccaacagcgtgtccatcaccggctctgtggatgaccactttgccaaggccctgggggacacctggctgcagatcaaggccgccaaggatggagccagcagcagccctgagagcgccagccggcggggccagcctgccagccccagcgcccacatggtgagccacagccacagccccagcgtggtgtcctag

SEQ ID NO: 46074 - DNA, 891 bp, Artificial Sequence
  derived and/or modified sequence
atgctgttcatgaagatggacctgctgaactaccagtacctggacaaaatgaacaacaatatcggcatcttatgctatgagggtgaggccgctttgcgaggcgagcccagaatccaaactttacctgtggcttccgccctgtcaagtcaccgtactggtccacccccgattagtccatcgaagcggaagtttagcatggagcccggcgatgaggatctggactgtgataacgaccacgtttccaagatgagcagaatattcaatccacacctgaataaaaccgccaatggggactgtcggcgtgaccctcgagagagaagccgatctccaatagaacgcgctgttgctcccacaatgagtctccacggaagccacctctacacctctctgccctccctcggcctggagcagccgttggccttaacaaagaatagcctcgacgcttcccgcccagctggtctctcacccacactaaccccaggtgagcggcagcagaacaggccatcagtgattacttgcgcgtccgcaggggctagaaactgcaacctttcacactgtccaatcgctcattctggctgcgcggctccaggacccgcctcttatcgtagacccccatcagctgctactacctgtgacccggtggttgaagagcacttcagacgctctctggggaagaactataaagaacctgagcccgcaccaaactcagtgtccatcactggctcggttgatgaccactttgcgaaagctctgggggatacctggctgcagattaaggccgcgaaggacggggccagctcttcccccgagtccgccagtaggcgcgggcaacctgcctcgcccagcgctcacatggtgtcacattcccattcacctagcgtggtgagctag

SEQ ID NO: 46075 - DNA, 891 bp, Artificial Sequence
  derived and/or modified sequence
atgctattcatgaaaatggatttgctgaactaccagtacctggacaagatgaacaataacatcggcatcttgtgttatgagggggaggccgctctaaggggtgaaccccgtatccagacactccctgtggcatccgctctttcgtcgcaccggaccggtccccctcctatctcacccagcaagagaaagttcagtatggagcccggagacgaagatctagattgtgataatgatcacgtttctaagatgtcacgtatcttcaatcctcatctcaacaaaacagccaacggtgactgccggcgagatcctcgggagcgatccaggtcacctattgagcgagctgtggctcctaccatgtcgctacacggctctcacctgtatacatcacttcctagcctggggctggaacagccccttgctctgaccaaaaacagccttgatgcctctcgacccgcaggtctgtcccccactctgacccccggtgagcgacaacagaaccgcccttccgtgatcacctgcgcctctgccggagccaggaattgcaacctgagccactgccccattgcccacagcggatgtgctgcccctggccctgcatcttaccgccgacctccgagcgctgccactacctgcgatccggtcgtggaggagcacttcaggcggagcctaggaaaaaattataaggagccagagccggcacccaactctgtctcaatcacggggtctgtcgacgaccatttcgctaaggctctaggtgacacgtggcttcagatcaaggccgctaaggacggtgcgtcatcttctccggagagtgctagcaggcgcggacaaccagcctcccctagcgcccatatggtttctcacagtcacagtccgtctgttgtgtcttag

SEQ ID NO: 46076 - DNA, 1377 bp, Artificial Sequence
  derived and/or modified sequence
atgccaagcatagccctcatgtcagcgctgccggcttgcagcgggctgtgagaggggccggcgccgctttgtcctaggaaacgggctgcgcgtttctctttttcactcttttccatttccaggaaggacttgtaaggacttctgaaacgctgttttcatactcgatcggggatacagtacatacaccgtctaccagtaagcccttgaagggtttcgtgtgagctcgatttttttgtgcctgatttttttttttttaacttttgcatactttgttttgatagtctgaggctgggcctctgcctttgtgaagttgaagagccaggagctactcagcaacaattgatttttgaaacttaactcttttggggcaaaagcaaagagctggttttctttgctagcccaataaatgctatttatgaagatggacctgttgaactatcagtacttggacaagatgaacaacaatatcggcattctgtgctacgaaggcgaagctgctctcaggggagaacccagaatacagaccctgccggtggcctctgccctcagcagtcaccgcaccggccctcccccaatcagccccagcaagaggaagttcagcatggagccaggtgacgaggacctagactgtgacaacgaccacgtctccaaaatgagtcgcatcttcaacccccatctgaacaagactgccaatggagactgccgcagagacccccgggagcggagccgcagccccatcgagcgcgctgtggcccccaccatgagcctgcacggcagccacctgtacacctccctccccagccttggcctggagcagcccctcgcactgaccaagaacagcctggacgccagcaggccagccggcctctcgcccacactgaccccgggggagcggcagcagaaccggccctccgtgatcacctgtgcctcggctggcgcccgcaactgcaacctctcgcactgccccatcgcgcacagcggctgtgccgcgcccgggcctgccagctaccggaggccaccgagcgctgccaccacctgtgaccccgtggtggaggagcatttccgcaggagcctgggcaagaattacaaggagcccgagccggcacccaactccgtgtccatcacgggctccgtggacgaccactttgccaaagctctgggtgacacgtggctccagatcaaagcggccaaggacggagcatccagcagccctgagtccgcctctcgcaggggccagcccgccagcccctctgcccacatggtcagccacagtcactccccctctgtggtctcctgaagggagcgcctcctccaacaacacgtggatctgcatggtttgcctgagctttgaacagtcagtacttaaaaaaaaaaaaa

SEQ ID NO: 46077 - protein, 210 aa, Artificial Sequence
  derived and/or modified sequence
MIKVRNKTANGDCRRDPRERSRSPIERAVAPTMSLHGSHLYTSLPSLGLEQPLALTKNSLDASRPAGLSPTLTPGERQQNRPSVITCASAGARNCNLSHCPIAHSGCAAPGPASYRRPPSAATTCDPVVEEHFRRSLGKNYKEPEPAPNSVSITGSVDDHFAKALGDTWLQIKAAKDGASSSPESASRRGQPASPSAHMVSHSHSPSVVS

SEQ ID NO: 46078 - DNA, 633 bp, Artificial Sequence
  derived and/or modified sequence
atgatcaaggtgagaaacaagaccgccaacggcgactgcagaagagaccccagagagagaagcagaagccccatcgagagagccgtggcccccaccatgagcctgcacggcagccacctgtacaccagcctgcccagcctgggcctggagcagcccctggccctgaccaagaacagcctggacgccagcagacccgccggcctgagccccaccctgacccccggcgagagacagcagaacagacccagcgtgatcacctgcgccagcgccggcgccagaaactgcaacctgagccactgccccatcgcccacagcggctgcgccgcccccggccccgccagctacagaagaccccccagcgccgccaccacctgcgaccccgtggtggaggagcacttcagaagaagcctgggcaagaactacaaggagcccgagcccgcccccaacagcgtgagcatcaccggcagcgtggacgaccacttcgccaaggccctgggcgacacctggctgcagatcaaggccgccaaggacggcgccagcagcagccccgagagcgccagcagaagaggccagcccgccagccccagcgcccacatggtgagccacagccacagccccagcgtggtgagctag

SEQ ID NO: 46079 - DNA, 633 bp, Artificial Sequence
  derived and/or modified sequence
atgataaaagtgaggaataaaactgccaatggggattgccgacgggaccccagagagaggagccggagccccattgaacgcgcagtagcccccaccatgtcgctgcatggcagccacctttatacatccttgccatccctggggctcgagcagccattggcactgaccaagaacagtctggatgctagtaggcctgctggactttcccccacactcacacccggggaaaggcagcagaatagaccgagtgtgataacatgtgcatccgccggcgcgagaaactgcaacctgagccactgccctatcgcacacagcggctgtgccgcaccgggccccgcctcatataggagaccgccaagcgcggctacaacctgtgacccagtggttgaggaacattttagacgtagtttgggcaagaattacaaggaacccgaaccagctccaaattcagtcagcattactggctcggtcgacgaccacttcgccaaagcgctcggagacacttggctgcagataaaagcggcgaaagacggcgcctcttccagccctgagtccgcctctcgccgcggacagcctgcatctccctccgctcacatggtttctcacagccacagccctagtgtggtctcctag

SEQ ID NO: 46080 - DNA, 633 bp, Artificial Sequence
  derived and/or modified sequence
atgatcaaggtgaggaacaagacagccaacggggactgccggcgggacccccgggagaggagccgcagccccatcgagagagctgtggcccccaccatgagcctgcacggcagccacctgtacaccagcctgcccagcctgggcctggagcagcccctggccctgaccaagaacagcctggatgccagcaggcctgctggcctgagccccaccctgaccccaggagagcggcagcagaaccggcccagcgtcatcacctgtgccagcgctggggccaggaactgcaacctgagccactgccccatcgcccacagcggctgtgccgcccctggccctgccagctaccgccggccccccagcgctgccaccacctgtgaccctgtggtggaggagcacttccgccgcagcctgggcaagaactacaaggagcctgagcccgcccccaacagcgtgtccatcaccggctctgtggatgaccactttgccaaggccctgggggacacctggctgcagatcaaggccgccaaggatggagccagcagcagccctgagagcgccagccggcggggccagcctgccagccccagcgcccacatggtgagccacagccacagccccagcgtggtgtcctag

SEQ ID NO: 46081 - DNA, 633 bp, Artificial Sequence
  derived and/or modified sequence
atgatcaaggtgcggaacaagaccgccaacggcgactgccggcgggatcctcgcgaaaggtcgagatccccgatcgagagggcagtggctcccacgatgtccctccatgggtcacacctttacacctctcttccctctctgggactggagcagcctctcgctcttacgaagaactccctggacgcttcaagacccgccgggttgagtcccaccttgacccccggtgaaaggcagcagaaccgcccttccgttattacatgtgcgagtgccggcgcccggaactgtaacctgagtcattgcccaatcgcacacagcggctgcgccgctccgggcccggcctcataccgtcggcccccttctgctgctaccacgtgcgatcctgtagtggaagaacactttcgacggtccctgggaaaaaactacaaagagcccgagcccgccccaaatagtgttagcatcacaggatctgtggacgatcactttgcaaaagccttgggcgacacctggcttcagatcaaagctgcgaaagacggtgcatcttcctcaccagaatccgccagtcgacgcggccagccagctagtcccagcgcgcacatggtctcacatagccattcaccctctgtggtaagctag

SEQ ID NO: 46082 - DNA, 633 bp, Artificial Sequence
  derived and/or modified sequence
atgatcaaggtgcggaataagaccgctaacggcgactgccggcgagaccctcgggagcgcagccgctcccccattgagagggcagtggcacctaccatgtctctacacgggtctcacctatacacttccctgccctctttggggctggaacagcctctggctctgacgaagaacagcctggatgcttctaggccggctgggctttcccctactctcacccctggggagaggcagcagaatagacccagtgtgataacttgcgcatctgccggagcgcgaaattgtaacctatcacattgtcctattgcccattctgggtgcgctgctcctgggccagccagctacagaagaccaccgtctgcagccacaacatgcgaccccgtggtagaggagcattttcgacggagccttgggaaaaactacaaagagccggaacctgcgcctaatagtgtctctattacaggatctgtggacgaccatttcgccaaagccttgggtgacacctggctacagatcaaggccgctaaggacggtgcgagttcaagccccgaatctgcttcaagacgcggtcagcctgcctctcctagcgcccatatggtgtcccacagccactctccttcggtcgtttcctag

SEQ ID NO: 46083 - DNA, 938 bp, Artificial Sequence
  derived and/or modified sequence
atccagttttgtgcctgagactgcttgccaagtttgtgaggcccaaggctttcttgtgggaggacgctgggctgtcttcatgctctttggcaatgattaaagtgaggaacaagactgccaatggagactgccgcagagacccccgggagcggagccgcagccccatcgagcgcgctgtggcccccaccatgagcctgcacggcagccacctgtacacctccctccccagccttggcctggagcagcccctcgcactgaccaagaacagcctggacgccagcaggccagccggcctctcgcccacactgaccccgggggagcggcagcagaaccggccctccgtgatcacctgtgcctcggctggcgcccgcaactgcaacctctcgcactgccccatcgcgcacagcggctgtgccgcgcccgggcctgccagctaccggaggccaccgagcgctgccaccacctgtgaccccgtggtggaggagcatttccgcaggagcctgggcaagaattacaaggagcccgagccggcacccaactccgtgtccatcacgggctccgtggacgaccactttgccaaagctctgggtgacacgtggctccagatcaaagcggccaaggacggagcatccagcagccctgagtccgcctctcgcaggggccagcccgccagcccctctgcccacatggtcagccacagtcactccccctctgtggtctcctgaagggagcgcctcctccaacaacacgtggatctgcatggtttgcctgagctttgaacagtcagtacttaaaaaaaaaaaaatcatgggggtggggtggggggaagggaagggatggtttatttgcaaaaaccatgttgttgggatttgtgttctgtttttgtacttgcttggtatccgtacaagggggccctcaaacatgatagcaggaactac

SEQ ID NO: 46084 - protein, 206 aa, Artificial Sequence
  derived and/or modified sequence
MNKTANGDCRRDPRERSRSPIERAVAPTMSLHGSHLYTSLPSLGLEQPLALTKNSLDASRPAGLSPTLTPGERQQNRPSVITCASAGARNCNLSHCPIAHSGCAAPGPASYRRPPSAATTCDPVVEEHFRRSLGKNYKEPEPAPNSVSITGSVDDHFAKALGDTWLQIKAAKDGASSSPESASRRGQPASPSAHMVSHSHSPSVVS

SEQ ID NO: 46085 - DNA, 621 bp, Artificial Sequence
  derived and/or modified sequence
atgaacaagaccgccaacggcgactgcagaagagaccccagagagagaagcagaagccccatcgagagagccgtggcccccaccatgagcctgcacggcagccacctgtacaccagcctgcccagcctgggcctggagcagcccctggccctgaccaagaacagcctggacgccagcagacccgccggcctgagccccaccctgacccccggcgagagacagcagaacagacccagcgtgatcacctgcgccagcgccggcgccagaaactgcaacctgagccactgccccatcgcccacagcggctgcgccgcccccggccccgccagctacagaagaccccccagcgccgccaccacctgcgaccccgtggtggaggagcacttcagaagaagcctgggcaagaactacaaggagcccgagcccgcccccaacagcgtgagcatcaccggcagcgtggacgaccacttcgccaaggccctgggcgacacctggctgcagatcaaggccgccaaggacggcgccagcagcagccccgagagcgccagcagaagaggccagcccgccagccccagcgcccacatggtgagccacagccacagccccagcgtggtgagctag

SEQ ID NO: 46086 - DNA, 621 bp, Artificial Sequence
  derived and/or modified sequence
atgaacaagaccgcaaacggcgattgccgtagggacccacgggagaggagtcgcagtccaatagagcgggccgttgctcccacgatgagccttcatggctctcatctatacacttcactgccctccctcgggctcgaacagcctctggccctgacaaagaactctctcgatgccagccgtccagctggactcagtccgaccctgactcccggagagcgtcagcagaatcgaccctccgtgattacatgcgcttcagccggtgcccggaactgtaatctgtcccactgccccatagcgcatagcggttgtgccgcacccggaccagcctcttatagacgacccccatccgccgctacaacttgcgaccccgtcgtggaggagcacttcagacgatcacttggcaaaaattacaaagaacctgagccagcccctaactcggtctccatcaccgggagcgtcgacgatcatttcgcaaaggcacttggcgacacttggctgcaaattaaggccgcaaaggatggagcatctagctctccggagtccgcgtcccggcgaggccaaccagcgagcccatccgcacacatggttagccattctcattccccgtccgtggtgtcttag

SEQ ID NO: 46087 - DNA, 621 bp, Artificial Sequence
  derived and/or modified sequence
atgaacaagacagccaacggggactgccggcgggacccccgggagaggagccgcagccccatcgagagagctgtggcccccaccatgagcctgcacggcagccacctgtacaccagcctgcccagcctgggcctggagcagcccctggccctgaccaagaacagcctggatgccagcaggcctgctggcctgagccccaccctgaccccaggagagcggcagcagaaccggcccagcgtcatcacctgtgccagcgctggggccaggaactgcaacctgagccactgccccatcgcccacagcggctgtgccgcccctggccctgccagctaccgccggccccccagcgctgccaccacctgtgaccctgtggtggaggagcacttccgccgcagcctgggcaagaactacaaggagcctgagcccgcccccaacagcgtgtccatcaccggctctgtggatgaccactttgccaaggccctgggggacacctggctgcagatcaaggccgccaaggatggagccagcagcagccctgagagcgccagccggcggggccagcctgccagccccagcgcccacatggtgagccacagccacagccccagcgtggtgtcctag

SEQ ID NO: 46088 - DNA, 621 bp, Artificial Sequence
  derived and/or modified sequence
atgaacaagaccgccaacggcgactgccggcgggacccccgggagcgctctaggtcccccattgaaagagcagtggcacccaccatgtccctacacggaagccatctgtatacgtcgttacctagtttgggcctcgaacagcctcttgcactgacaaaaaacagcctggacgccagtcgtccagccggattgagcccaaccctgacccccggcgagcgccaacagaaccgccctagtgtaatcacttgtgcaagcgcaggtgcaagaaactgtaatctcagccattgcccaatcgctcactcagggtgcgccgcacctgggcccgcctcttatagacgccctcccagcgcagcgactacctgtgatcccgtggttgaggagcatttcagaaggagtctgggtaagaattacaaagagccagagcctgcccccaacagcgtcagtatcacaggatccgtggatgatcatttcgcaaaagcgctgggtgacacctggttgcagattaaggctgcgaaggacggcgcctcgtcgtcacccgaaagtgcctccagacgcgggcagcctgcctcaccttccgcccatatggtctctcatagccattctcccagcgtggtcagttag

SEQ ID NO: 46089 - DNA, 621 bp, Artificial Sequence
  derived and/or modified sequence
atgaacaaaacagcaaatggagactgtaggagagatcctagagagaggtctcggagcccaatcgaaagagcagtggcacccactatgagtttgcacggtagtcacctttacacttctctgcctagcctcggcttagaacagccgctggcactcacgaaaaattctcttgacgcctcaaggcctgcaggcctgagtcctaccctgacccctggagaaaggcagcagaatagaccgagtgtcattacatgcgccagtgctggggctcggaactgcaatctgtcacactgtccaatagctcactccggctgcgcagctcctgggccagcctcctacagaaggcccccaagtgccgcaaccacctgtgaccccgtggtagaggaacactttcgacgctcattgggtaagaattacaaagagcctgaacctgccccaaatagcgtgagcattaccggaagtgtagatgaccatttcgccaaggcgctgggggacacgtggctgcaaattaaggctgctaaagatggcgcttcttccagccccgagagcgcgtctaggagaggacagccagcctcccccagcgcacacatggtctctcattcccacagcccctctgtggtttcatag

SEQ ID NO: 46090 - DNA, 1025 bp, Artificial Sequence
  derived and/or modified sequence
agtgcccgcctaggatggggatgaggcccggggcggggccgggtgccgtgcagcctcagcggctctgataggcctggcacggagccactcagagtcctttgggtgttcgcggggatgccgtgggctctctcgggcacagtcctgaccaggagcggaggcgacttccatctcccgggcaggatgcgtgcggttttctgccgtccccgggagcacatgacgcctgggaagcagtggccgggaggtgattcatccgggcgagcggggcctggaaaacaatgtctgtcttgaagctccgggaaccaggaaaatgagctggaaatgaacaagactgccaatggagactgccgcagagacccccgggagcggagccgcagccccatcgagcgcgctgtggcccccaccatgagcctgcacggcagccacctgtacacctccctccccagccttggcctggagcagcccctcgcactgaccaagaacagcctggacgccagcaggccagccggcctctcgcccacactgaccccgggggagcggcagcagaaccggccctccgtgatcacctgtgcctcggctggcgcccgcaactgcaacctctcgcactgccccatcgcgcacagcggctgtgccgcgcccgggcctgccagctaccggaggccaccgagcgctgccaccacctgtgaccccgtggtggaggagcatttccgcaggagcctgggcaagaattacaaggagcccgagccggcacccaactccgtgtccatcacgggctccgtggacgaccactttgccaaagctctgggtgacacgtggctccagatcaaagcggccaaggacggagcatccagcagccctgagtccgcctctcgcaggggccagcccgccagcccctctgcccacatggtcagccacagtcactccccctctgtggtctcctgaagggagcgcctcctccaacaacacgtggatctgcatggtttgcctgagctttgaacagtcagtacttaaaaaaaaaaaaatcatgg

SEQ ID NO: 46091 - DNA, 1116 bp, Artificial Sequence
  derived and/or modified sequence
atgcccgggtgtccctgtccgggatgcgggatggcagggcctagactcctgtttttgaccgcgctggctctcgaacttctagagcgcgccggtggttcacagcccgcgcttaggtcacgggggacagccacagcctgccgactggacaacaaggagagtgagtcttggggcgcacttctgagtggtgagcggttagacacctggatttgctctctcttgggatctcttatggttggcctgagcggggtctttcctctgttggtcattcctcttgaaatgggaactatgctacggtcagaggctggagcctggcggttgaaacagcttctcagctttgccctaggcgggctcctgggaaacgtgtttttgcacttgctgcccgaagcttgggcttacacttgtagcgcatctccaggaggcgaggggcaatccctccagcagcagcagcagttgggcctctgggtcatagccgggatcttaacttttttagcacttgaaaagatgttcctggactctaaggaggaaggaacctctcaggctccaaacaaggaccctactgccgcagcggcggcattgaacggaggccactgccttgctcagccggccgccgaacctggacttggggctgtcgtgaggagcatcaaggttagcggctaccttaatttgctggccaacacaattgacaatttcacacatgggctggcagttgctgcaagcttcttagtatctaagaagattgggttattgactactatggccatcttgctgcatgagatcccccatgaagtgggtgactttgcgattctcttgagggcaggctttgaccgctggtcagccgctaaacttcagctgtctactgcgctcgggggactgctcggagccgggttcgcaatctgtacacagagcccaaaaggcgttgtcggctgctcgccagccgcggaagagacagctgcttgggtgctgcccttcacaagcggaggcttcctgtatattgctctagtaaatgtcctccctgatctcctcgaagaggaagacccttggaggtcccttcagcagctgcttctcctttgcgccggaatcgttgtcatggtgctgttttccctgttcgtggactag

SEQ ID NO: 46092 - DNA, 1116 bp, Artificial Sequence
  derived and/or modified sequence
atgcctggctgcccctgccccggctgcggcatggccggcccccggctgctcttcctgacagccctggccctggagctgctggagcgggccggcggcagccagcctgccctgcggagccggggcacagccacagcctgccgcctggacaacaaggagagcgagagctggggcgccctgctgtctggagagcggctggacacctggatctgcagcctgctgggcagcctgatggtgggcctgtctggagtcttccccctgctggtgatccccctggagatgggcaccatgctgcggtctgaggccggggcctggaggctgaagcagctgctgagctttgccctgggcggcctgctgggcaatgtgttcctgcacctgctgcctgaggcctgggcctacacctgcagcgccagccctggaggagagggccagagcctgcagcagcagcagcagctgggcctgtgggtgattgctggcatcctgaccttcctggccctggagaagatgttcctggacagcaaggaggagggcaccagccaggcccccaacaaggaccccacagctgctgctgctgccctgaatggaggccactgcctggcccagcctgctgctgagcccggcctgggcgctgtggtgcgcagcatcaaggtgtctggctacctgaacctgctggccaacaccatcgacaacttcacccacggcctggccgtggccgccagcttcctggtgtccaagaagattggcctgctgaccaccatggccatcctgctgcacgagatcccccatgaggtgggggactttgccatcctgctgcgggccggctttgaccgctggagcgctgccaagctgcagctgagcacagccctgggcggcctgctgggcgccggctttgccatctgcacccagagccccaagggcgtggtgggctgcagccctgctgctgaggagacagctgcctgggtgctgcccttcaccagcggcggcttcctgtacatcgccctggtgaatgtgctgcctgacctgctggaggaggaggacccctggaggagcctgcagcagctgctgctgctgtgtgccggcatcgtggtgatggtgctcttcagcctgtttgtggactag

SEQ ID NO: 46093 - DNA, 1116 bp, Artificial Sequence
  derived and/or modified sequence
atgcccggctgcccctgccccggctgcggcatggccggcccccggctcctgttcctgactgcccttgctctcgagcttctcgaaagagccggcgggtcacagccagccctgagatctcgtggtactgctaccgcttgccggctcgacaacaaggagagtgagtcctggggtgcactccttagcggagaaaggctggatacctggatttgtagtctgctggggtcacttatggtcgggttaagcggagtgttccctctgcttgttattcccctagagatgggcaccatgttgcgcagtgaggccggcgcgtggagattgaagcagcttctgtccttcgccctgggaggtcttctgggcaacgtgttcctccacctgctccctgaggcttgggcatacacatgttctgcctctcccggcggcgaagggcagtcgcttcagcagcaacagcagctgggtttatgggtcattgcaggcattctcacctttctagctctggaaaagatgttcctcgacagcaaagaagaaggtacatcacaggccccaaataaagacccaacagcagccgccgctgccctaaacggcggtcactgcctggcacagccagcggcggagccaggactcggcgcagttgtgaggagtatcaaggtgtccgggtacctgaatctgcttgctaataccattgacaacttcacacatggactggcagtcgccgcaagtttcctggtgagcaaaaaaatcggcctcctcactactatggcaatactcctgcacgaaatcccacacgaggtcggggacttcgcaattctgcttcgggcagggttcgaccgctggtctgcggccaaactgcagcttagtaccgccttaggtggattgttgggagccggcttcgcaatctgcacacaatcccccaaaggagtggtgggctgctcacccgccgctgaggagaccgctgcctgggttttgcctttcacatccgggggattcctgtatattgcgctagtgaatgtcctgcctgacctgctggaagaagaagatccttggaggagcctgcagcagctgctcctcctctgcgctggaatcgtagtgatggtgctgttttccttatttgtggactag

SEQ ID NO: 46094 - DNA, 1116 bp, Artificial Sequence
  derived and/or modified sequence
atgccaggctgtccttgtcccggttgcggtatggccggtcctagactactctttctaactgccctggccctagagctcctggagcgggcaggcggttcacaacccgctctacggtcaagggggaccgccacagcttgcaggcttgataataaggagagcgaatcgtggggagcacttctgagcggcgaacgtttggatacatggatttgctcattgctgggtagcttaatggtgggactgagtggggtcttcccactgctcgtgattcctctcgagatgggcaccatgctgagatctgaggccggtgcctggcggttaaaacagctcttatccttcgccctggggggtctattgggaaatgtattcttacacctacttcccgaggcgtgggcctacacatgtagcgcaagtccaggcggtgaaggccagtctctccaacagcaacagcagctgggtttgtgggtgatcgcgggaattctcacctttctcgcgctggaaaaaatgttcctcgattccaaagaagagggaaccagccaggcgccaaacaaagatccgaccgctgccgctgccgcattaaacggtgggcattgccttgctcagccagctgccgaacctgggctgggggctgtggtccgcagcatcaaggtgagcggctacctgaacctgctggccaacactatcgataattttactcacggcctggctgtggccgcaagtttcctggtgagtaagaagattgggcttcttacaactatggcgatcttactgcacgaaataccccacgaagtaggggattttgccatacttctgagagccggatttgacaggtggagcgccgctaagctccagctctctactgccttggggggactgctcggggcaggctttgcgatttgcacccaatcaccaaaaggtgtagtaggatgtagtccagcagcagaagaaactgccgcatgggtactgccttttaccagtggcggttttttatatattgcacttgtcaatgtgcttccggacctcctggaagaggaggatccctggcggtccttgcagcagctgctcttattatgcgctgggatagttgtcatggttttgttttccctctttgtggattag

SEQ ID NO: 46095 - DNA, 2291 bp, Artificial Sequence
  derived and/or modified sequence
gggccgcccggatcgccgccgccgccgccgcacgtacgtggcatgcctggatgtccctgccctggctgtggcatggcgggcccaaggctcctcttcctcactgcccttgccctggagctcttggaaagggctgggggttcccagccggccctccggagccgggggactgcgacggcctgtcgcctggacaacaaggaaagcgagtcctggggggctctgctgagcggagagcggctggacacctggatctgctccctcctgggttccctcatggtggggctcagtggggtcttcccgttgcttgtcattcccctagagatggggaccatgctgcgctcagaagctggggcctggcgcctgaagcagctgctcagcttcgccctggggggactcttgggcaatgtgtttctgcatctgctgcccgaagcctgggcctacacgtgcagcgccagccctggtggtgaggggcagagcctgcagcagcagcaacagctggggctgtgggtcattgctggcatcctgaccttcctggcgttggagaagatgttcctggacagcaaggaggaggggaccagccaggcccccaacaaagaccccactgctgctgccgccgcgctcaatggaggccactgtctggcccagccggctgcagagcccggcctcggtgccgtggtccggagcatcaaagtcagcggctacctcaacctgctggccaacaccatcgataacttcacccacgggctggctgtggctgccagcttccttgtgagcaagaagatcgggctcctgacaaccatggccatcctcctgcatgagatcccccatgaggtgggcgactttgccatcctgctccgggccggctttgaccgatggagcgcagccaagctgcaactctcaacagcgctggggggcctactgggcgctggcttcgccatctgtacccagtcccccaagggagtagttgggtgttctcccgctgcagaggagacggcagcctgggtcctgcccttcacctctggcggctttctctacatcgccttggtgaacgtgctccctgacctcttggaagaagaggacccgtggcgctccctgcagcagctgcttctgctctgtgcgggcatcgtggtaatggtgctgttctcgctcttcgtggattaactttccctgatgccgacgcccctgccccctgcagcaataagatgctcggattcactctgtgaccgcatatgtgagaggcagagagggcgagtggctgcgagagagaatgagcctcccgccagacaggagggaggtgcgtgtggatgtatgtggtgtgcacatgtggccagaggtgtgtgcgcgagaccgacactgtgatccctgtgctgggtccggggcccagtgtagcgcctgtccccagccatgctgtggttacctctccttgccgccctgtcaccttcacctcccggagtaagcagcgaggaagagcagcactggtcccaagcagaggccttgccctgctgggaccccgggagtgagagcagcccaaggatccagggtgcagggaactccagagctgcccacctcccactgccccctcagcacacacacagtccccaggcggcctaggggccaaggctggggcggctttggtcccttttcctggcccttccttccccacttctaagccaaagaaaggagaggcaggtgctcctgtaccccagccccactcagcactgacagtccccagctcctagtagtgagctgggaggcgcttcctaagaccctttcctcagggctgccctgggagctcattcctggccaacacgccctggcagcaccagcagctcttgccacctccagctgccaaacagcagcctgccgggcagggagcagccccaggccagagaggcctcccggtccagctcagggatgctcctgccagcacaggggccagggactcctggagcaggcacatagtgagcccgggcagccctgcccagctcaggcccctttccttccccattgaggttggggtaggtgggggcggtgagggctccacgttgtcagcgctcaggaatgtgctccggcagagtgctgaagccataatccccaaccatttcccttggctgacgcccaggtactcagctggcccactccacagccaggcctggccctgcccttcaccgtggatgttttcagaagtggccatcgagaggtctggatggttttatagcaactttgctgtgattccgtttgtatctgtaaatatttgttctatagataagatacaaataaatattatccacata

SEQ ID NO: 46096 - DNA, 1116 bp, Artificial Sequence
  derived and/or modified sequence
atgcccggctgcccctgccccggctgcggcatggccggccccagactgctgttcctgaccgccctggccctggagctgctggagagagccggcggcagccagcccgccctgagaagcagaggcaccgccaccgcctgcagactggacaacaaggagagcgagagctggggcgccctgctgagcggcgagagactggacacctggatctgcagcctgctgggcagcctgatggtgggcctgagcggcgtgttccccctgctggtgatccccctggagatgggcaccatgctgagaagcgaggccggcgcctggagactgaagcagctgctgagcttcgccctgggcggcctgctgggcaacgtgttcctgcacctgctgcccgaggcctgggcctacacctgcagcgccagccccggcggcgagggccagagcctgcagcagcagcagcagctgggcctgtgggtgatcgccggcatcctgaccttcctggccctggagaagatgttcctggacagcaaggaggagggcaccagccaggcccccaacaaggaccccaccgccgccgccgccgccctgaacggcggccactgcctggcccagcccgccgccgagcccggcctgggcgccgtggtgagaagcatcaaggtgagcggctacctgaacctgctggccaacaccatcgacaacttcacccacggcctggccgtggccgccagcttcctggtgagcaagaagatcggcctgctgaccaccatggccatcctgctgcacgagatcccccacgaggtgggcgacttcgccatcctgctgagagccggcttcgacagatggagcgccgccaagctgcagctgagcaccgccctgggcggcctgctgggcgccggcttcgccatctgcacccagagccccaagggcgtggtgggctgcagccccgccgccgaggagaccgccgcctgggtgctgcccttcaccagcggcggcttcctgtacatcgccctggtgaacgtgctgcccgacctgctggaggaggaggacccctggagaagcctgcagcagctgctgctgctgtgcgccggcatcgtggtgatggtgctgttcagcctgttcgtggactag

SEQ ID NO: 46097 - protein, 928 aa, Artificial Sequence
  derived and/or modified sequence
MLKSKTFLKKTRAGGVMKIVREHYLRDDIGCGAPGCAACGGAHEGPALEPQPQDPASSVCPQPHYLLPDTNVLLHQIVSAWRPGTWASVASSLRLPGSLETYVEQEQGENANDRNDRAIRVAAKWYNEHLKKMSADNQLQVIFITNDRRNKEKAIEEGIPAFTCEEYVKSLTANPELIDRLACLSEEGNEIESGKIIFSEHLPLSKLQQGIKSGTYLQGTFRASRENYLEATVWIHGDNEENKEIILQGLKHLNRAVHEDIVAVELLPKSQWVAPSSVVLHDEGQNEEDVEKEEETERMLKTAVSEKMLKPTGRVVGIIKRNWRPYCGMLSKSDIKESRRHLFTPADKRIPRIRIETRQASTLEGRRIIVAIDGWPRNSRYPNGHFVRNLGDVGEKETETEVLLLEHDVPHQPFSQAVLSFLPKMPWSITEKDMKNREDLRHLCICSVDPPGCTDIDDALHCRELENGNLEVGVHIADVSHFIRPGNALDQESARRGTTVYLCEKRIDMVPELLSSNLCSLKCDVDRLAFSCIWEMNHNAEILKTKFTKSVINSKASLTYAEAQLRIDSANMNDDITTSLRGLNKLAKILKKRRIEKGALTLSSPEVRFHMDSETHDPIDLQTKELRETNSMVEEFMLLANISVAKKIHEEFSEHALLRKHPAPPPSNYEILVKAARSRNLEIKTDTAKSLAESLDQAESPTFPYLNTLLRILATRCMMQAVYFCSGMDNDFHHYGLASPIYTHFTSPIRRYADVIVHRLLAVAIGADCTYPELTDKHKLADICKNLNFRHKMAQYAQRASVAFHTQLFFKSKGIVSEEAYILFVRKNAIVVLIPKYGLEGTVFFEEKDKPNPQLIYDDEIPSLKIEDTVFHVFDKVKVKIMLDSSNLQHQKIRMSLVEPQIPGISIPTDTSNMDLNGPKKKKMKLGK

SEQ ID NO: 46098 - DNA, 2787 bp, Artificial Sequence
  derived and/or modified sequence
atgctcaaaagcaagactttcctcaagaaaacgcgggcagggggggtgatgaagatcgtgcgggagcactatctcagagacgatattggctgtggggcccccggatgcgccgcttgtgggggcgcacacgagggtccggctctcgaaccacagccccaagatcctgcgagctcagtgtgtccacagccccactacctcctacctgacaccaacgtgctgctccatcagattgtgtcggcctggcggcccggaacgtgggcatccgtcgccagttcattgagactgccagggtctctcgaaacatatgttgagcaggagcagggggaaaatgccaacgaccgcaacgaccgcgcaattcgagtggccgccaaatggtacaatgagcacctgaagaagatgtcagcggacaaccagctgcaggttatcttcatcacgaatgataggcgtaataaggaaaaggctatagaggagggcatccctgccttcacctgcgaagagtatgtaaaatcactcaccgcaaatccagaactgattgacaggctggcctgtctctcagaggaggggaacgaaatcgagagtggtaagatcatcttttcagagcacctgcctctgtctaaactgcagcaggggatcaaatctggaacctatctgcagggaacattcagggcctcaagagaaaactatctcgaggccacggtgtggattcatggcgataacgaagagaacaaagagatcatcttgcagggtctcaaacatttaaacagagctgtccatgaggatatcgtcgcagtggagttgctgcccaaatcccagtgggttgccccctcatccgtagtgctgcatgacgaggggcaaaacgaagaggacgtggagaaagaagaggagacggaaagaatgctgaaaacagctgtatcggagaaaatgctgaagccaactggcagggtcgtggggatcatcaaacggaactggcgcccttactgtgggatgctctcaaagtctgacatcaaggagtctagaagacatctctttacgccagccgataagaggatcccccgcatcaggattgagaccaggcaggcctctaccctcgaaggccgccgcattattgtagccattgacggatggccccgcaatagcaggtatcccaacggacactttgttcgaaacctcggggatgtgggtgagaaagagacggaaactgaggttttactgctggagcacgacgttccgcatcagcctttttctcaggccgtgctctccttcctgcctaaaatgccctggtccataacagagaaggacatgaaaaatcgcgaagatctccgacacctctgtatctgttcagtggacccccctggctgcactgacatagatgacgctctgcattgccgagagctggaaaatggaaacttggaagtgggtgttcatatcgccgacgtgtcacactttatccggcccggaaacgcactggatcaggagagcgcccgacgtggaacaacagtctatttgtgtgaaaaaaggatagacatggtgcccgagctgctgtcctctaatctgtgcagtctaaaatgcgacgttgatagactggccttttcctgcatatgggagatgaatcacaatgccgagattctgaaaacaaagttcacgaagtccgtaatcaactccaaagcttctctcacctacgctgaagcacagctccgcatcgattccgcgaacatgaacgacgacattaccacttctcttagaggcttaaataagctcgcaaagattctcaagaagcgcagaattgagaagggggccttgaccttgtccagtccagaggtgcgatttcatatggattctgaaacccatgaccctatcgatcttcagacaaaagagctgcgtgagacaaactcgatggtggaagagttcatgctcctggccaatataagcgtagccaagaagattcatgaggaattctctgagcatgccctgctgcgaaagcatcccgccccacctccctctaattatgaaatcctggttaaggccgcccgatctaggaacctggagataaagacagatacagctaagtcccttgccgaatctctggatcaagccgaatcccctaccttcccgtatctgaatactctgctgcggatccttgccactcgttgtatgatgcaggcggtgtacttctgcagtggcatggacaacgattttcatcactatgggcttgccagccccatctatacacatttcacttcaccaataaggaggtacgccgatgtgattgtacatagactgctggctgtcgctataggagccgattgcacctatcccgagttgactgataaacacaagctcgctgacatctgcaagaatctcaattttaggcacaagatggcccagtatgctcagagagcctctgtggccttccatactcagcttttcttcaagtccaagggaattgttagtgaagaggcatacatcctctttgtccgcaagaacgccattgtcgttctgatacccaagtatggcctggaggggaccgtgttttttgaggagaaagataagcctaatccccagctgatttatgacgacgaaattccctccctgaaaattgaggatacagtgtttcatgtattcgataaagtaaaggtcaagatcatgctcgattccagcaacctgcagcaccagaagattcgcatgtcattggtcgaaccacagatcccgggaatttctatacctacagatactagcaatatggacctgaatggtccaaagaagaaaaagatgaaattggggaaatag

SEQ ID NO: 46099 - DNA, 2787 bp, Artificial Sequence
  derived and/or modified sequence
atgctgaagagcaagaccttcctgaagaagaccagggctggaggagtgatgaagatcgtgcgggagcactacctgagagatgacatcggctgtggggcccctggctgtgccgcctgtggcggggcccacgagggccctgccctggagccccagccccaggaccctgccagctctgtgtgcccccagccccactacctgctgcctgacaccaacgtgctgctgcaccagatcgtgtctgcctggaggcctggcacctgggcctctgtggccagcagcctgcggctgcccggcagcctggagacctacgtggagcaggagcagggagaaaatgccaatgacagaaatgaccgggccatccgggtggccgccaagtggtacaatgagcacctgaagaagatgtctgctgacaaccagctgcaggtgatcttcatcaccaatgacagaagaaacaaggagaaggccatcgaggagggcatcccagccttcacctgtgaggagtatgtgaagagcctgacagccaaccctgagctgattgaccggctggcctgcctgtctgaggagggcaatgaaattgaaagtggcaagatcatcttcagcgagcacctgcccctgagcaagctgcagcagggcatcaagagcggcacctacctgcagggcaccttccgggccagccgggagaactacctggaggccaccgtgtggatccacggggacaatgaggagaacaaggagatcatcctgcagggcctgaagcacctgaacagagctgtgcatgaagatattgtggccgtggagctgctgcccaagagccagtgggtggcccccagctctgtggtgctgcatgatgagggccagaatgaggaggatgtggagaaggaggaggagacagagaggatgctgaagacagctgtgtctgagaagatgctgaagcccaccggccgggtggtgggcatcatcaagaggaactggaggccctactgcggcatgctgagcaagagtgacatcaaggagagcagaagacacctgttcaccccagctgacaagaggatcccccgcatcagaattgagacccggcaggccagcaccctggagggccgccgcatcatcgtggccattgatggctggcccaggaacagccgctacccaaatggccactttgtgaggaacctgggagatgtgggggagaaggagacagaaacagaggtgctgctgctggagcatgatgtgccccaccagcccttcagccaggccgtgctgtccttcctgcccaagatgccctggagcatcacagagaaggacatgaagaaccgggaggacctgcggcacctgtgcatctgcagcgtggaccccccaggctgcacagacattgatgatgccctgcactgccgggagctggagaatggaaacctggaggtgggcgtgcacatcgcagatgtgagccacttcatccggcctggaaatgccctggaccaggagagcgcccggcggggcaccaccgtgtacctgtgtgagaagagaattgacatggtgcctgagctgctgagcagcaacctgtgcagcctgaagtgtgatgtggaccggctggccttcagctgcatctgggagatgaaccacaatgctgagatcctgaagaccaagttcaccaagagcgtcatcaacagcaaggccagcctgacctatgcagaggcccagctgagaattgattctgccaacatgaatgatgacatcaccaccagcctgcggggcctgaacaagctggccaagatcctgaagaagagaagaattgaaaaaggagccctgaccctgagcagccctgaggtgcgcttccacatggattctgagacccatgaccccatcgacctgcagaccaaggagctgcgggagaccaacagcatggtggaggagttcatgctgctggccaacatctctgtggccaagaagatccacgaggagttcagcgagcacgccctgctgaggaagcacccagcccccccacccagcaactatgagatcctggtgaaggccgcccggagcaggaacctggagatcaagacagacacagccaagagcctggccgagagcctggaccaggccgagagccccaccttcccctacctgaacaccctgctgcgcatcctggccacccgctgcatgatgcaggccgtgtacttctgcagcggcatggacaatgacttccaccactacggcctggccagccccatctacacccacttcaccagccccatccgccgctatgcagatgtgattgtgcaccggctgctggccgtggccatcggggctgactgcacctacccagagctgacagacaagcacaagctggccgacatctgcaagaacctgaacttccgccacaagatggcccagtatgcccagagggcctctgtggccttccacacccagctgttcttcaagagcaaaggaattgtgtctgaggaggcctacatcctgtttgtgaggaagaatgccatcgtggtgctgatccccaagtatggcctggagggcaccgtcttctttgaggagaaggacaagcccaacccccagctgatctatgatgatgagatccccagcctgaagattgaagatactgtgttccacgtgtttgacaaggtgaaggtgaagatcatgctggacagcagcaacctgcagcaccagaagatccgcatgagcctggtggagccccagatccctggcatcagcatccccacagacaccagcaacatggacctgaatggccccaagaagaagaagatgaagctgggcaagtag

SEQ ID NO: 46100 - DNA, 2787 bp, Artificial Sequence
  derived and/or modified sequence
atgctgaagagcaagaccttcctgaagaagacccgggccggcggcgtgatgaaaattgtccgcgagcattacctgcgggatgacataggttgtggcgcccccggctgcgcagcttgcgggggagctcacgagggccctgcgctcgagcctcagccccaggacccagcgagcagtgtttgcccacagcctcactatttgctgcctgatacaaacgttctgctgcaccagatcgtttcagcctggaggcccggaacatgggcttccgtggcttcttcgctacggttgcccggcagcttggagacatacgtcgaacaggaacagggggagaacgcaaacgaccgcaacgacagggctattagagtggccgctaaatggtacaacgagcacctgaaaaaaatgtcagccgataaccaactgcaggttatctttatcacaaacgatcggcggaataaggagaaagctattgaagaggggattcctgccttcacatgtgaggagtacgtaaaatccctcacagcgaatccggagctgatagatcgtttggcttgtctgtctgaggaagggaatgagatcgagtccggaaagatcatattcagtgagcacctgcccctgtctaaactgcagcagggaatcaagagtggtacatatttacaagggacattccgagcctctcgcgagaactacctggaagccactgtgtggatacacggcgataacgaggagaacaaggagataattctgcagggcctaaagcacttaaatcgcgccgtccatgaggatattgtggctgtcgaattgctcccaaaatcacaatgggtggccccaagctccgtcgtgttgcatgacgagggacaaaacgaggaggatgtggaaaaggaggaggagactgagagaatgcttaaaacagccgtctctgagaagatgctgaaacccacaggtcgggtggtgggcataattaaaagaaattggaggccatattgcggtatgctttctaagtcagatataaaggagagccgtcggcatctgttcacgcccgctgataagcgaattccccgtattcgcatcgaaacaagacaggccagcacacttgagggtagacgcatcattgtggccatagatggctggcccaggaatagccgctatccaaacggacacttcgttagaaatctgggtgacgtgggagagaaagagacagagacagaggtgttgctactagagcatgacgtgccacaccagccattttcccaggccgttcttagcttcttgccgaagatgccatggtcaattaccgagaaagacatgaaaaaccgcgaagacctgaggcatttgtgcatctgttctgtcgatcccccgggctgcaccgatatcgatgatgccctccattgtagagagcttgagaacggtaacctggaagtgggggttcacattgccgacgtatcccatttcatccggccaggcaatgctctcgaccaggaatccgcgagacggggaaccaccgtgtatctgtgtgagaaaaggatcgacatggttcccgagctgctttcatccaacttgtgttccctaaagtgcgatgtcgaccggctggcattttcctgtatttgggagatgaatcacaacgccgagatcctgaaaaccaagtttacaaagagcgtcattaatagcaaggcatccctgacctacgctgaagcgcagctgcggattgactctgcaaacatgaacgacgatataaccacttcactgagaggactaaataaactggccaaaattttgaagaagagaagaatagagaagggcgctcttacgctgtcatcacctgaggtgagatttcatatggatagcgagacccacgaccctatcgacctccaaactaaggagttgagagaaaccaactctatggttgaagaatttatgttactggctaatatctcggttgctaagaagatacacgaggaattctcggagcacgctctgctgcgaaagcaccctgcccctccaccatctaattacgaaatcttagtgaaggcagcaagaagcagaaacctggagattaagaccgacacagccaagagtttggccgagtccctggatcaggcagagtctccaacgtttccctatctgaatactcttctccggattttagccacacgctgtatgatgcaggcggtttatttctgcagtggcatggataacgatttccaccattacggtctggcctcccctatttacacacacttcacctccccgatacgacggtatgcagatgtgattgtacacaggctgcttgctgttgccattggtgcagactgtacatatcctgaactgaccgataagcacaaattggcggacatatgcaagaacctgaactttagacacaagatggcccagtatgctcaacgagcctccgtggcattccatacccagttgttctttaagtcaaaggggattgttagcgaggaagcatatatcctgttcgtgaggaaaaacgccatagtggtactgatcccaaaatatgggctggaagggactgtcttcttcgaggaaaaggacaagccaaacccacagctgatttacgatgacgaaattccctctttaaagatcgaggacactgtgtttcacgtctttgacaaggttaaggtgaaaatcatgttggactcttctaatctccagcatcagaagattcggatgagtctggtggagccccagatccccgggatcagtatcccgacggatacgtcaaacatggatctcaacgggcctaagaaaaagaagatgaagctgggtaaatag

SEQ ID NO: 46101 - DNA, 2787 bp, Artificial Sequence
  derived and/or modified sequence
atgctcaagtctaagacttttctaaagaagacaagagcgggtggggtcatgaagatagtacgggagcattacctgagggacgatatcgggtgtggggctccaggatgcgctgcatgcggaggagctcacgaaggaccggcactagagccacagccccaggatcccgcaagtagtgtatgcccgcagccacactatctgctgccagacactaatgtgcttcttcaccagatagtctctgcgtggcggcctggcacttgggcttcggtggcctctagtctccggttacccggaagcttagagacatacgtggaacaggaacagggagaaaatgctaacgaccggaatgatagagcaatccgcgtcgcagccaagtggtacaacgaacaccttaaaaagatgtccgccgacaaccagttgcaggttatatttatcactaatgaccggaggaataaggaaaaggcaatcgaggagggaatccctgctttcacttgtgaagaatatgttaagtcgcttaccgcaaatcctgaactaattgatcgcctggcttgccttagtgaggagggaaatgaaatcgagtctggaaagatcatcttttcagaacatcttcctctgtccaagcttcagcaaggcattaaaagcggcacctaccttcagggaacctttcgcgctagccgggaaaactatcttgaagccaccgtgtggatacacggggacaatgaagaaaacaaggagataatcctgcagggactgaaacacctgaacagagcggtgcatgaggatatcgtggctgtggagcttttaccaaagagtcagtgggttgccccaagctccgttgttctgcatgacgagggacagaacgaagaagatgttgagaaggaggaggagaccgagaggatgttgaaaacagcggtgagcgaaaaaatgctgaaaccaacaggccgagttgttggtattatcaaacggaattggaggccttactgcggaatgcttagtaagtcagacattaaagagagtagaagacacttgtttacccctgccgacaagcggatcccacgcataagaatcgagacacgccaggctagtaccctcgaaggacgcagaatcatcgtggctatcgacgggtggcccaggaacagtaggtatcccaatggacatttcgtgcgcaatctgggcgatgttggagaaaaagagaccgaaaccgaggtcctgctgcttgaacacgatgtgccccaccagccgttctcacaggccgttctgagctttctcccaaagatgccctggtctataaccgaaaaagatatgaaaaatcgagaggatcttaggcacctgtgcatttgtagcgttgacccccctggatgtactgatatcgacgacgctctacattgccgcgaactggagaatggaaacctcgaggttggcgttcatatcgctgacgtttcccactttattcgtccaggcaatgcccttgaccaggaatctgccaggcggggaaccactgtgtatctctgtgagaaacggatagacatggtaccggaactgctgagctctaatctatgctccctgaagtgtgacgtagatcgcctggctttcagctgtatttgggaaatgaaccacaacgctgagatcctgaaaactaagtttactaaatccgtgataaattccaaagcatctctcacatacgcagaggcccaactgcgcatcgattccgcgaatatgaacgacgacatcacaacatccctgagaggactgaataagttagccaagattctgaagaagagaaggatcgagaaaggtgctctgacactgtcaagccctgaggtgaggtttcacatggactccgaaactcatgatcctatcgacctgcagaccaaagagctccgggagacaaacagtatggtggaagaattcatgctgctggctaatatttccgtggctaaaaagatccatgaggagttttcagagcacgccctactgagaaagcacccagcaccgccaccttcaaattacgaaatccttgtgaaggctgcccgtagcagaaacctcgagataaagacagacaccgcaaagagtctggcagagtcccttgaccaggccgagagtccgactttcccctacctgaacacccttctgaggattctggccactagatgtatgatgcaggcagtgtacttctgtagcggaatggacaatgactttcatcactatggactggcctcgccgatttatacccacttcacctcccctattagacggtatgcagatgttatcgttcatagactgctagctgtagccattggggctgattgtacttacccagaactcacggacaagcataaactcgcagacatctgtaagaatctcaacttccggcacaaaatggcccagtacgctcagcgcgcttccgtggcattccacacgcagctatttttcaagtcgaaagggattgtgagcgaggaagcctacatattatttgttagaaaaaacgccatagtggtgttgatccctaaatacggtctagaagggacggtttttttcgaggagaaagataaacccaatccacagctgatttacgatgacgagattccatccctgaaaattgaggacaccgtattccacgtattcgacaaggtgaaagtgaaaatcatgttagattcctccaatctgcaacatcagaagataagaatgagccttgtcgagcctcaaatccccggaatatcaatacctaccgatacgtctaatatggatctgaacgggcctaagaagaagaagatgaagctgggaaaatag

SEQ ID NO: 46102 - DNA, 2787 bp, Artificial Sequence
  derived and/or modified sequence
atgctgaagagcaagaccttcctgaagaagaccagagccggcggcgtgatgaagatcgtgagagagcactacctgagagacgacatcggctgcggcgcccccggctgcgccgcctgcggcggcgcccacgagggccccgccctggagccccagccccaggaccccgccagcagcgtgtgcccccagccccactacctgctgcccgacaccaacgtgctgctgcaccagatcgtgagcgcctggagacccggcacctgggccagcgtggccagcagcctgagactgcccggcagcctggagacctacgtggagcaggagcagggcgagaacgccaacgacagaaacgacagagccatcagagtggccgccaagtggtacaacgagcacctgaagaagatgagcgccgacaaccagctgcaggtgatcttcatcaccaacgacagaagaaacaaggagaaggccatcgaggagggcatccccgccttcacctgcgaggagtacgtgaagagcctgaccgccaaccccgagctgatcgacagactggcctgcctgagcgaggagggcaacgagatcgagagcggcaagatcatcttcagcgagcacctgcccctgagcaagctgcagcagggcatcaagagcggcacctacctgcagggcaccttcagagccagcagagagaactacctggaggccaccgtgtggatccacggcgacaacgaggagaacaaggagatcatcctgcagggcctgaagcacctgaacagagccgtgcacgaggacatcgtggccgtggagctgctgcccaagagccagtgggtggcccccagcagcgtggtgctgcacgacgagggccagaacgaggaggacgtggagaaggaggaggagaccgagagaatgctgaagaccgccgtgagcgagaagatgctgaagcccaccggcagagtggtgggcatcatcaagagaaactggagaccctactgcggcatgctgagcaagagcgacatcaaggagagcagaagacacctgttcacccccgccgacaagagaatccccagaatcagaatcgagaccagacaggccagcaccctggagggcagaagaatcatcgtggccatcgacggctggcccagaaacagcagataccccaacggccacttcgtgagaaacctgggcgacgtgggcgagaaggagaccgagaccgaggtgctgctgctggagcacgacgtgccccaccagcccttcagccaggccgtgctgagcttcctgcccaagatgccctggagcatcaccgagaaggacatgaagaacagagaggacctgagacacctgtgcatctgcagcgtggacccccccggctgcaccgacatcgacgacgccctgcactgcagagagctggagaacggcaacctggaggtgggcgtgcacatcgccgacgtgagccacttcatcagacccggcaacgccctggaccaggagagcgccagaagaggcaccaccgtgtacctgtgcgagaagagaatcgacatggtgcccgagctgctgagcagcaacctgtgcagcctgaagtgcgacgtggacagactggccttcagctgcatctgggagatgaaccacaacgccgagatcctgaagaccaagttcaccaagagcgtgatcaacagcaaggccagcctgacctacgccgaggcccagctgagaatcgacagcgccaacatgaacgacgacatcaccaccagcctgagaggcctgaacaagctggccaagatcctgaagaagagaagaatcgagaagggcgccctgaccctgagcagccccgaggtgagattccacatggacagcgagacccacgaccccatcgacctgcagaccaaggagctgagagagaccaacagcatggtggaggagttcatgctgctggccaacatcagcgtggccaagaagatccacgaggagttcagcgagcacgccctgctgagaaagcaccccgcccccccccccagcaactacgagatcctggtgaaggccgccagaagcagaaacctggagatcaagaccgacaccgccaagagcctggccgagagcctggaccaggccgagagccccaccttcccctacctgaacaccctgctgagaatcctggccaccagatgcatgatgcaggccgtgtacttctgcagcggcatggacaacgacttccaccactacggcctggccagccccatctacacccacttcaccagccccatcagaagatacgccgacgtgatcgtgcacagactgctggccgtggccatcggcgccgactgcacctaccccgagctgaccgacaagcacaagctggccgacatctgcaagaacctgaacttcagacacaagatggcccagtacgcccagagagccagcgtggccttccacacccagctgttcttcaagagcaagggcatcgtgagcgaggaggcctacatcctgttcgtgagaaagaacgccatcgtggtgctgatccccaagtacggcctggagggcaccgtgttcttcgaggagaaggacaagcccaacccccagctgatctacgacgacgagatccccagcctgaagatcgaggacaccgtgttccacgtgttcgacaaggtgaaggtgaagatcatgctggacagcagcaacctgcagcaccagaagatcagaatgagcctggtggagccccagatccccggcatcagcatccccaccgacaccagcaacatggacctgaacggccccaagaagaagaagatgaagctgggcaagtag

SEQ ID NO: 46103 - DNA, 5232 bp, Artificial Sequence
  derived and/or modified sequence
aagggaagaacctccggggttaggcgtattctagattgacgccttttgctggaagagcgctgctggggttaggattctgcgcggcgaggcaagatgctcaagtccaagacgttcttaaaaaagacccgggcgggcggcgtgatgaagatcgtgcgcgagcactacctgcgagacgacatcggctgcggtgcgcccgggtgcgcagcgtgtggaggggcgcacgaggggccggccctggagccgcagccccaggacccggcgagcagcgtctgcccgcaaccgcactacttgctgcccgacactaatgtgttactgcaccagattgtaagtgcctggaggccggggacctgggcttctgtggcctccagcctgcgactcccaggcagcttagaaacctatgtagaacaagaacagggagaaaatgctaatgacaggaatgatagagcgattcgagtagcagcaaaatggtacaatgaacatttgaaaaaaatgtcagcagacaaccagctgcaagttatcttcataacaaatgacaggagaaacaaagagaaagccatagaagaaggaataccagctttcacttgtgaagaatatgtaaagagcctaactgctaaccccgaactcatagatcgtcttgcttgtttgtctgaagaagggaatgaaatagaaagtggaaaaataatattttcagagcatcttcccttaagtaagctacagcaaggcataaaatctggtacataccttcaaggaacatttagagctagcagggaaaattacttggaagctacagtatggattcatggcgacaatgaagaaaataaagagataatcttacagggacttaaacatttaaacagagctgttcacgaagatattgtggctgtggagcttctccccaagagtcagtgggtagcaccatcttctgtggttttacatgatgaaggtcaaaatgaagaagatgtggagaaagaagaagagacagaacgaatgcttaagactgctgtaagcgagaaaatgttgaagcctacaggtagagttgtaggaataataaaaaggaattggagaccatattgtggcatgctttccaagtctgacattaaggagtcaagaagacatctctttacacctgctgataagagaatccctcgaattcgcatagaaaccagacaggcttccacattagaaggacggagaattattgttgctattgatggttggcccagaaattccagatatccaaatggacactttgtgagaaatttaggtgatgttggagagaaagagactgaaacagaagttttgttacttgaacacgatgttccccatcagcctttttcacaggctgttcttagttttctgccaaagatgccctggagcattactgaaaaggacatgaaaaaccgagaagacctgaggcatctgtgtatttgtagtgtagacccaccaggatgtactgatatagacgatgctctacattgtcgagaactcgaaaatggaaatttggaggttggtgttcatattgctgatgtgagccattttattaggccaggaaatgccttggatcaagaatcagccagaagaggaacaactgtgtatctttgtgaaaagaggattgacatggttccagagttgcttagctctaacttgtgttccttaaaatgtgacgtggacaggctggcattttcatgtatttgggaaatgaatcacaatgctgaaatcttaaaaacgaagtttaccaaaagtgttattaattcaaaggcatctctgacgtatgctgaagctcagttgagaattgattcagcaaacatgaatgatgatattaccactagtctccgtggactgaataaactagccaaaattctgaagaaaagaaggattgaaaaaggggctttgactctatcctctcctgaagttcgattccacatggacagtgaaactcacgatcctatagatctgcagaccaaggaacttagggaaacaaattccatggttgaagaatttatgttacttgccaatatttctgttgcaaaaaaaattcatgaggaattttctgaacatgctctgcttcgaaaacatcctgctccacctccatcaaattatgaaattcttgttaaggcagccaggtcaaggaatttggaaattaagactgatacagccaagtctttggctgagtctttggatcaggccgaatctcctacttttccatatctaaacactctgttgagaatattagccactcgctgtatgatgcaagctgtgtacttctgttctggaatggataatgattttcatcactatggcttagcgtctccaatatacacacattttacttcacccattagaagatacgcagatgtcattgttcatcggcttttggctgtggctattggggctgactgtacttatccagagttgacagacaaacacaagcttgcagatatatgtaaaaatctaaatttccggcacaaaatggctcaatatgcccaacgtgcatcagtggcttttcatacccagttattcttcaaaagcaaaggaatagtaagtgaagaagcctatattttatttgtaagaaagaatgccattgtggtattaattccaaagtatggtttagaagggacagtcttttttgaagaaaaggacaaaccaaacccacagcttatttatgatgatgagataccctcacttaaaatagaagatacagtgttccatgtatttgataaagttaaagtgaaaatcatgttagactcatctaatcttcaacatcagaagatccgaatgtccctggtagaaccacagataccaggaataagcattcctactgatacttcaaacatggaccttaatggaccaaagaaaaagaagatgaagcttggaaaatagctatattcaacaaaaatcttcaaagactggtttcttttttaaaagaaaaaacttgaaagaacacttctaagcctaagtgtgtgatacagtttgttacttttaagtacattttaataatttcagacatctgcatttttattgaacagttgactgtatctgacccatcatactactatacttctgggttgaacagaattatttatgcagaataattcaattgaatatccatcacttaaatacagtgacaggacagcaacttcagggatctgtaaagatcatttaaatggagtgctcatctcattgaggagcagattaattttgcgtaagtactttgattatttaatatttgtaagaaaaaactttcattttcctacagaggaaaatagaacaattttagaagcaaggaacaatctcttttctaagtcttggaagctgtcagtgttgaggatgtaatctcctttgccatctttaattcacctaacttacactaggtgttctcttactgtctttaaaagcttcctgtattttattagtggtccttgaaaaactgtgaatgtttgggaattggtagaaaggcaaaaagtaggatattttgacctgactggaaagatggttgtgtttttattgccaggtaataagtgtgatcattgttgaacttcagctccagtgtctctccagaataagacattggcattcaaatgtctatatcttgttacttacaaaataaaaaacagattaattagtggcttttaaattgtagttatatcagtgtatatacacgaggggaactgtataaagacatactaaagggaacagattaaaataagtattattaataaaatttggtgtgccagactgactacttcccttgctaatcacagagattagtaatgattaaattaatatcttcaggaatattttgggatagggttgccttaaaacattttacttggcttattcaatttctaaagcacttacgttgtgccaggttccactcaagtaaattatctctgccttcaaggagcttgcagtatagtgagaaaagcctgccaagtaaatcagcaggtatactaaataggtagtcatttaggcactcaataaatgttgactaatttttccagtttcctattactgaggaaaacctccatacactgaggcagaaacttgtgtcagttggaggaaaatagacttgagtagtctttggtccaggtaaaatgggtcagtgacactgaaacagtagagtaggagtcaaaaaaccttttctgtgaagtgctagaacattttagactttgttggctatggtctgtattgcaactatagtacacaactctgccgttgatagtgtgtaaggagccatatacaatatgtaaacaaatcaacatgactgtgtttcaacaaggcctgatttgttaagtttcatatatagtcatatgtcacttaatgacagggatatgttctgagacatgtcacttggcaatttcatcattgtgtgaaaatcatgatgtagttacacaaacctagatggtataccctatggtatcctatatgggatagcctattgctcctaacctacaaacctgtatggcatattactgtactgattactgtaggcggttgtaacacagtgctaagtatttgtgtatctaaacatatctaaacatagaaaaggtacagtaaaaatatatatatagatatatataagatataaaatggtacacctatttaggacatttaccatgaacaagttggcaggactggaagctggctctgggtgagtcagtaagtggttagtgaatgtgaaggccatgatattactgtgcactactgtagacttttataaacactatatacttaggctacataaagtaatttcactatgatgttaccatggctgtgtccccaggcaataggaatttttcagctccattgtaatcttacgggatcatcatcgtatatttggccattgttgaccaaaagttatgcagcacatcattataattttgatgtgtcacaaaacattactcatttgatttcccccacccccgccaaccatttaaaaaagtttgccggctaggtgcggtggctcatgcctgtaatcctagcattttgggaggacgaggcgggtggatcactcgatgtcaggagtttgagaccagcctggccaacatggtaaaacgccgtctctactaaaaatacaaaaacttagctgggtgtaacggcggatgcctgtaatcccagctacttgggaggctgaggcaggagaatcgcttgaacctgggaggcggaagttgcagtgagccgagattgcaccactgcagttcagcctggatgatgagagtgagactccatcgc

SEQ ID NO: 46104 - protein, 722 aa, Artificial Sequence
  derived and/or modified sequence
MEKNGNNRKLRVCVATCNRADYSKLAPIMFGIKTEPEFFELDVVVLGSHLIDDYGNTYRMIEQDDFDINTRLHTIVRGEDEAAMVESVGLALVKLPDVLNRLKPDIMIVHGDRFDALALATSAALMNIRILHIEGGEVSGTIDDSIRHAITKLAHYHVCCTRSAEQHLISMCEDHDRILLAGCPSYDKLLSAKNKDYMSIIRMWLGDDVKSKDYIVALQHPVTTDIKHSIKMFELTLDALISFNKRTLVLFPNIDAGSKEMVRVMRKKGIEHHPNFRAVKHVPFDQFIQLVAHAGCMIGNSSCGVREVGAFGTPVINLGTRQIGRETGENVLHVRDADTQDKILQALHLQFGKQYPCSKIYGDGNAVPRILKFLKSIDLQEPLQKKFCFPPVKENISQDIDHILETLSALAVDLGGTNLRVAIVSMKGEIVKKYTQFNPKTYEERINLILQMCVEAAAEAVKLNCRILGVGISTGGRVNPREGIVLHSTKLIQEWNSVDLRTPLSDTLHLPVWVDNDGNCAALAERKFGQGKGLENFVTLITGTGIGGGIIHQHELIHGSSFCAAELGHLVVSLDGPDCSCGSHGCIEAYASGMALQREAKKLHDEDLLLVEGMSVPKDEAVGALHLIQAAKLGNAKAQSILRTAGTALGLGVVNILHTMNPSLVILSGVLASHYIHIVKDVIRQQALSSVQDVDVVVSDLVDPALLGAASMVLDYTTRRIY

SEQ ID NO: 46105 - protein, 753 aa, Artificial Sequence
  derived and/or modified sequence
METYGYLQRESCFQGPHELYFKNLSKRNKQIMEKNGNNRKLRVCVATCNRADYSKLAPIMFGIKTEPEFFELDVVVLGSHLIDDYGNTYRMIEQDDFDINTRLHTIVRGEDEAAMVESVGLALVKLPDVLNRLKPDIMIVHGDRFDALALATSAALMNIRILHIEGGEVSGTIDDSIRHAITKLAHYHVCCTRSAEQHLISMCEDHDRILLAGCPSYDKLLSAKNKDYMSIIRMWLGDDVKSKDYIVALQHPVTTDIKHSIKMFELTLDALISFNKRTLVLFPNIDAGSKEMVRVMRKKGIEHHPNFRAVKHVPFDQFIQLVAHAGCMIGNSSCGVREVGAFGTPVINLGTRQIGRETGENVLHVRDADTQDKILQALHLQFGKQYPCSKIYGDGNAVPRILKFLKSIDLQEPLQKKFCFPPVKENISQDIDHILETLSALAVDLGGTNLRVAIVSMKGEIVKKYTQFNPKTYEERINLILQMCVEAAAEAVKLNCRILGVGISTGGRVNPREGIVLHSTKLIQEWNSVDLRTPLSDTLHLPVWVDNDGNCAALAERKFGQGKGLENFVTLITGTGIGGGIIHQHELIHGSSFCAAELGHLVVSLDGPDCSCGSHGCIEAYASGMALQREAKKLHDEDLLLVEGMSVPKDEAVGALHLIQAAKLGNAKAQSILRTAGTALGLGVVNILHTMNPSLVILSGVLASHYIHIVKDVIRQQALSSVQDVDVVVSDLVDPALLGAASMVLDYTTRRIY

SEQ ID NO: 46106 - DNA, 2262 bp, Artificial Sequence
  derived and/or modified sequence
atggagacctatgggtatcttcaacgtgaatcctgtttccaggggccacacgagctctatttcaaaaacctgagcaagcgtaacaaacagataatggagaagaacggcaacaatagaaaattaagagtgtgcgtcgcgacttgcaacagagcagattacagtaaactcgcgccgatcatgtttggcatcaagactgagcctgaattctttgagctcgacgtggtcgttctaggttcacatctaatcgatgactacgggaatacttatcggatgatcgagcaggacgacttcgacatcaatacaagactccacactatcgtgaggggtgaagatgaagccgccatggtcgagtcagttggccttgcactggtgaagctgcccgatgttctgaatcggctcaagcccgacatcatgatcgttcatggcgaccgctttgatgcgctggcgctggcaacctccgccgcgcttatgaacattcggatcctgcacatagaaggcggtgaggtttccggcacgatcgacgactccatccgccacgctatcacaaaactcgcgcactaccacgtctgctgcacaagaagtgccgagcagcacctgatcagtatgtgcgaggatcatgatcgtatcctgctcgccggctgcccatcttatgataaactcctgagcgcgaaaaataaggactatatgagcataatcagaatgtggttgggagacgatgtgaagagtaaagattatatcgtcgccctgcaacatcccgtgacaacggacataaagcactccatcaaaatgtttgagttgaccctcgatgccctgatcagcttcaataagaggacgttggtgctctttcccaatatcgacgccggcagcaaagagatggtcagggtgatgcgtaagaagggcatagaacatcatcccaatttcagggctgtgaaacatgtccccttcgatcagtttatacaattagtggctcacgcagggtgcatgatcggcaatagttcctgtggagtccgggaggtgggggcattcggcacacccgtgattaaccttggaacgcgccagatcggacgagagaccggagagaatgtacttcacgttagagacgccgacacgcaagataagattttacaggccctccacctccaattcggcaagcagtacccatgttcaaaaatctatggggacgggaatgccgtgcctagaatactgaagttcctcaagtccatcgacctgcaagaaccgctgcagaagaaattctgttttccacctgttaaagagaacatctcccaggatattgatcacatcctcgaaacattgagcgcactggctgtggatttgggggggacgaacttacgagtggcaatcgtctctatgaagggggagatagtaaagaaatatacccaattcaatcctaagacctatgaggaaaggataaatctgatcctgcagatgtgtgttgaggcagctgccgaagctgtcaaactgaattgccggatactgggagtcggaatcagcactgggggtagagtgaacccccgtgagggcattgttttgcacagtactaaattgatccaggagtggaactccgtggatcttagaactcctctttctgacacacttcatctccctgtttgggtagacaacgatggcaactgtgctgctctggccgagcgaaaattcgggcaaggcaaagggctcgagaactttgtgacacttattactggcacaggcataggtggagggatcattcaccaacatgaattaatccacgggagctcattctgcgcggccgagctaggccatctggtagtaagcctcgatgggcctgattgcagttgtggctcgcatgggtgtatcgaggcgtacgcctcaggcatggctctgcagagggaagcgaagaaactgcacgacgaagatctgctgttggtggaaggaatgtccgttcccaaagacgaggctgtgggagcattacacctgatccaggcggccaagctgggcaatgctaaagcacaatcgatcttgcggacggcgggtaccgccctgggccttggggtggtaaatatcctgcacacaatgaatcctagcctagtgatcctgtccggcgtccttgccagtcactacatccatatcgtcaaggatgtaatccggcaacaggccctaagctctgtgcaggatgtagatgttgtggtctccgatctggtggaccctgctttgctgggagcagctagcatggtgctagattatacgaccagacgtatctactag

SEQ ID NO: 46107 - DNA, 5314 bp, Artificial Sequence
  derived and/or modified sequence
gtgggcgtggctgggcgagcgaggagtggggacaaggtcgagcgacgagtcgtctacccgcgcgcccgagcgcggaaaccgaggggcaggctcgcgctctgcctgcttcgtggcgcttggttcgtccctcgcccgaggagcgcggtggcggcgtgggagggagcctctgacggcgtctggaactctattttaagaacctctcaaaacgaaacaagcaaatcatggagaagaatggaaataaccgaaagctgcgggtttgtgttgctacttgtaaccgtgcagattattctaaacttgccccgatcatgtttggcattaaaaccgaacctgagttctttgaacttgatgttgtggtacttggctctcacctgatagatgactatggaaatacatatcgaatgattgaacaagatgactttgacattaacaccaggctacacacaattgtgaggggagaagatgaggcagccatggtggagtcagtaggcctggccctagtgaagctgccagatgtccttaatcgcctgaagcctgatatcatgattgttcatggagacaggtttgatgccctggctctggccacatctgctgccttgatgaacatccgaatccttcacattgaaggtggggaagtcagtgggaccattgatgactctatcagacatgccataacaaaactggctcattatcatgtgtgctgcacccgcagtgcagagcagcacctgatatccatgtgtgaggaccatgatcgcatccttttggcaggctgcccttcctatgacaaacttctctcagccaagaacaaagactacatgagcatcattcgcatgtggctaggtgatgatgtaaaatctaaagattacattgttgcactacagcaccctgtgaccactgacattaagcattccataaaaatgtttgaattaacattggatgcacttatctcatttaacaagcggaccctagtcctgtttccaaatattgacgcagggagcaaagagatggttcgagtgatgcggaagaagggcattgagcatcatcccaactttcgtgcagttaaacacgtcccatttgaccagtttatacagttggttgcccatgctggctgtatgattgggaacagcagctgtggggttcgagaagttggagcttttggaacacctgtgatcaacctgggaacacgtcagattggaagagaaacaggggagaatgttcttcatgtccgggatgctgacacccaagacaaaatattgcaagcactgcaccttcagtttggtaaacagtacccttgttcaaagatatatggggatggaaatgctgttccaaggattttgaagtttctcaaatctatcgatcttcaagagccactgcaaaagaaattctgctttcctcctgtgaaggagaatatctctcaagatattgaccatattcttgaaactctaagtgccttggccgttgatcttggcgggacgaacctccgagttgcaatagtcagcatgaagggtgaaatagttaagaagtatactcagttcaatcctaaaacctatgaagagaggattaatttaatcctacagatgtgtgtggaagctgcagcagaagctgtaaaactgaactgcagaattttgggagtaggcatttccacaggtggccgtgtaaatcctcgggaaggaattgtgctgcattcaaccaaactgatccaagagtggaactctgtggaccttaggacccccctttctgacactttgcatctccctgtgtgggtagacaatgatggcaactgtgctgccctggcggaaaggaaatttggccaaggaaagggactggaaaactttgttacacttatcacaggcacaggaatcggtggtggaattatccatcagcatgaattgatccacggaagctccttctgtgctgcagaactgggccaccttgttgtgtctctggatgggcctgattgttcctgtggaagccatgggtgcattgaagcatacgcctctggaatggccttgcagagggaggcaaaaaagctccatgatgaggacctgctcttggtggaagggatgtcagtgccaaaagatgaggctgtgggtgcgctccatctcatccaagctgcgaaacttggcaatgcgaaggcccagagcatcctaagaacagctggaacagctttgggtcttggggttgtgaacatcctccataccatgaatccctcccttgtgatcctctccggagtcctggccagtcactatatccacattgtcaaagacgtcattcgccagcaggccttgtcctccgtgcaggacgtggatgtggtggtttcggatttggttgaccccgccctgctgggtgctgccagcatggttctggactacacaacacgcaggatctactagacctccaggaacagacatggaccttctctccagagctcctgagtggaatcaagttcttgtctttaggatgaccgtttcttaacaatcaaatctggtattgaactgcaggtgactttggcagagaaatgttttcacttttggtctcctcttccagagtcacctttccccactcctatttttgtagatgctattctttctgatgtcttcttactaggggtcattttagctcaaaccctgtaagttacagtcacaattttctgtgccaaagcagctacaataatagagaggaagccttcttagaactctgcttactaatgtattaataccactgagaccttcaggccttgcctgggatatcacttcatcctgaagtttgcattaataatccttccaggccgggcacagtggctcacgcctgtaatcccagcactttgggaggccgaggcgggcggatcacgaggtcaggagatcgagaccgccctggctaacatggtgaaacatggtgaaaccccgtctctactaaaaatacaaaaaattagctgggtgtggtggcgggtcccagctactcgggaggctgaggcaggagaatggcatgaaccagggaggcggagctggcagtgaactgagaccgcaccactgcactccagcctgggtgacagagcaagactccatctcaaaaataataataataaataataataataataataataataataataatccttccagctgggcgcagtggctcacgcctgtaatcccaacattttgggaggccgagatgggcggatcacctgaggtcaggagttcaagaccagcctggccaacatggtgaaaccccatctctactaaaatacaaaaattagccgggcgtggtggcatgtgcctgtagtcccagctactcgggaggctgaggcaggagaattgcttgaacccgggaggcggaggttgcagtgagccgagatcatgccactgcactccaccctgggtgacagagcgagactccgtctacacacacacacacacacacacacacatccttcctcctctaaccccaaactaagatcacagaaggtgatccagtcagagaacagagggaaatcttaccaggaagggcttaagtacacttttttttaaaacagctttattgtttttaaagcctacaatttgataagccttgacatatgtatacctgtgaaagcatcaccacaatcaagacactggacatatctatcactcccccatctcagatatcccccctaatcctggataccatttgttgaaagatgttattactctagctgaacttacaagagactttagaccagggatctaaattacagtggccttagtgaccttgtccttatcttcttaggacagctgagaagccactgggacttagagcctttaaaaggagattaactgtcccaaaaggatctttgctactgaccagcagacacttcttccttcagtagcctttcatactgtgttgagtaacaccctagggtgtccattaaagttttgagttttacctagagcccagagccatgaatcaggattctgtctacatgattcgtgttttcattggtgtcaaaatacaaaagccaaagttctggctatgaattgttaacttggaagaaatactaactgccaccacttattaagtgcctactgtgtgccaggctctgaactaggtgcttcatatacattatcctaaattatctcaacatatgaggtaggtgttttaatttttattttatagaacttggtgtgtttgactgttaagctatggggctagagagagggtttgatcccaggtccctctgtgcttttgctgctgagccacacaacctctcatttcaaaaacactttcaaaatgctaacatattctaattcactctaggccaccaaaaactttaatactaatatctgatttgtaaatgacttaatgtatccttgaccctatcagctgaatttaatgaaatattcctctctgctgtgaaattttaccagtatagtatttggtctagtgacaggtgttctatttttttgagacgggtctcactctgtcacccaggctggagtgcagtggctcaatgcaacctctgccccccaagttcaagtgattctcctgcctcagcctcttgagtagctgggattacaggcacatgcaccacgcccggctgatttttttttgtatttttagtagacagggtttcaccatgttggccaggctggtcttgaactcctgacctcaggtgatccgcccgcctctgcctcccaaagtgctgggattacaggtgtaagccatcacacctggccctagtgacaggtttttatgggtacttttagatgatctaagaaatcatgtgcatatatctttcagatttctattttgggaaaatgaaggtttctacaacatattgtttcagtgttcaaataaactgaaggactcaacattacatttgaactatatccttcctagtgggttagtgtgaaaaagagtttggctgattcctaaaactctgccagccctgcagtaatctccagggcctggttattgttcagacattccatggtgattcctgggaaggaagcttggctgctcagtttctgagtctggggtgagataatgttctgggaagggacatctgttctttggtgtaatctctcatggtgaaatctgctctgtacatcagacaattgcattgctaccaagtttcataccaaatatttgaaaggatggtattgaatctaaaaccaaatattagtttttattaaactcatgggaaggctaatatattccaacgtaaattattacatatggttaagtaattgcatgttaatttattttaatgtaaatatttttgttactgttctgagccaaattctaaagaaaaaataaatacatttccttgttgaaa

SEQ ID NO: 46108 - DNA, 5298 bp, Artificial Sequence
  derived and/or modified sequence
agtctggaattcagatgcctattggtgactgctccgtggcagctaaaccaagaaaacagctgctctgctcattatttcaaaccacactagggtacagagctcgtgcttcgggatggaaacctatggttatctgcagagggagtcatgctttcaaggacctcatgaactctattttaagaacctctcaaaacgaaacaagcaaatcatggagaagaatggaaataaccgaaagctgcgggtttgtgttgctacttgtaaccgtgcagattattctaaacttgccccgatcatgtttggcattaaaaccgaacctgagttctttgaacttgatgttgtggtacttggctctcacctgatagatgactatggaaatacatatcgaatgattgaacaagatgactttgacattaacaccaggctacacacaattgtgaggggagaagatgaggcagccatggtggagtcagtaggcctggccctagtgaagctgccagatgtccttaatcgcctgaagcctgatatcatgattgttcatggagacaggtttgatgccctggctctggccacatctgctgccttgatgaacatccgaatccttcacattgaaggtggggaagtcagtgggaccattgatgactctatcagacatgccataacaaaactggctcattatcatgtgtgctgcacccgcagtgcagagcagcacctgatatccatgtgtgaggaccatgatcgcatccttttggcaggctgcccttcctatgacaaacttctctcagccaagaacaaagactacatgagcatcattcgcatgtggctaggtgatgatgtaaaatctaaagattacattgttgcactacagcaccctgtgaccactgacattaagcattccataaaaatgtttgaattaacattggatgcacttatctcatttaacaagcggaccctagtcctgtttccaaatattgacgcagggagcaaagagatggttcgagtgatgcggaagaagggcattgagcatcatcccaactttcgtgcagttaaacacgtcccatttgaccagtttatacagttggttgcccatgctggctgtatgattgggaacagcagctgtggggttcgagaagttggagcttttggaacacctgtgatcaacctgggaacacgtcagattggaagagaaacaggggagaatgttcttcatgtccgggatgctgacacccaagacaaaatattgcaagcactgcaccttcagtttggtaaacagtacccttgttcaaagatatatggggatggaaatgctgttccaaggattttgaagtttctcaaatctatcgatcttcaagagccactgcaaaagaaattctgctttcctcctgtgaaggagaatatctctcaagatattgaccatattcttgaaactctaagtgccttggccgttgatcttggcgggacgaacctccgagttgcaatagtcagcatgaagggtgaaatagttaagaagtatactcagttcaatcctaaaacctatgaagagaggattaatttaatcctacagatgtgtgtggaagctgcagcagaagctgtaaaactgaactgcagaattttgggagtaggcatttccacaggtggccgtgtaaatcctcgggaaggaattgtgctgcattcaaccaaactgatccaagagtggaactctgtggaccttaggacccccctttctgacactttgcatctccctgtgtgggtagacaatgatggcaactgtgctgccctggcggaaaggaaatttggccaaggaaagggactggaaaactttgttacacttatcacaggcacaggaatcggtggtggaattatccatcagcatgaattgatccacggaagctccttctgtgctgcagaactgggccaccttgttgtgtctctggatgggcctgattgttcctgtggaagccatgggtgcattgaagcatacgcctctggaatggccttgcagagggaggcaaaaaagctccatgatgaggacctgctcttggtggaagggatgtcagtgccaaaagatgaggctgtgggtgcgctccatctcatccaagctgcgaaacttggcaatgcgaaggcccagagcatcctaagaacagctggaacagctttgggtcttggggttgtgaacatcctccataccatgaatccctcccttgtgatcctctccggagtcctggccagtcactatatccacattgtcaaagacgtcattcgccagcaggccttgtcctccgtgcaggacgtggatgtggtggtttcggatttggttgaccccgccctgctgggtgctgccagcatggttctggactacacaacacgcaggatctactagacctccaggaacagacatggaccttctctccagagctcctgagtggaatcaagttcttgtctttaggatgaccgtttcttaacaatcaaatctggtattgaactgcaggtgactttggcagagaaatgttttcacttttggtctcctcttccagagtcacctttccccactcctatttttgtagatgctattctttctgatgtcttcttactaggggtcattttagctcaaaccctgtaagttacagtcacaattttctgtgccaaagcagctacaataatagagaggaagccttcttagaactctgcttactaatgtattaataccactgagaccttcaggccttgcctgggatatcacttcatcctgaagtttgcattaataatccttccaggccgggcacagtggctcacgcctgtaatcccagcactttgggaggccgaggcgggcggatcacgaggtcaggagatcgagaccgccctggctaacatggtgaaacatggtgaaaccccgtctctactaaaaatacaaaaaattagctgggtgtggtggcgggtcccagctactcgggaggctgaggcaggagaatggcatgaaccagggaggcggagctggcagtgaactgagaccgcaccactgcactccagcctgggtgacagagcaagactccatctcaaaaataataataataaataataataataataataataataataataatccttccagctgggcgcagtggctcacgcctgtaatcccaacattttgggaggccgagatgggcggatcacctgaggtcaggagttcaagaccagcctggccaacatggtgaaaccccatctctactaaaatacaaaaattagccgggcgtggtggcatgtgcctgtagtcccagctactcgggaggctgaggcaggagaattgcttgaacccgggaggcggaggttgcagtgagccgagatcatgccactgcactccaccctgggtgacagagcgagactccgtctacacacacacacacacacacacacacatccttcctcctctaaccccaaactaagatcacagaaggtgatccagtcagagaacagagggaaatcttaccaggaagggcttaagtacacttttttttaaaacagctttattgtttttaaagcctacaatttgataagccttgacatatgtatacctgtgaaagcatcaccacaatcaagacactggacatatctatcactcccccatctcagatatcccccctaatcctggataccatttgttgaaagatgttattactctagctgaacttacaagagactttagaccagggatctaaattacagtggccttagtgaccttgtccttatcttcttaggacagctgagaagccactgggacttagagcctttaaaaggagattaactgtcccaaaaggatctttgctactgaccagcagacacttcttccttcagtagcctttcatactgtgttgagtaacaccctagggtgtccattaaagttttgagttttacctagagcccagagccatgaatcaggattctgtctacatgattcgtgttttcattggtgtcaaaatacaaaagccaaagttctggctatgaattgttaacttggaagaaatactaactgccaccacttattaagtgcctactgtgtgccaggctctgaactaggtgcttcatatacattatcctaaattatctcaacatatgaggtaggtgttttaatttttattttatagaacttggtgtgtttgactgttaagctatggggctagagagagggtttgatcccaggtccctctgtgcttttgctgctgagccacacaacctctcatttcaaaaacactttcaaaatgctaacatattctaattcactctaggccaccaaaaactttaatactaatatctgatttgtaaatgacttaatgtatccttgaccctatcagctgaatttaatgaaatattcctctctgctgtgaaattttaccagtatagtatttggtctagtgacaggtgttctatttttttgagacgggtctcactctgtcacccaggctggagtgcagtggctcaatgcaacctctgccccccaagttcaagtgattctcctgcctcagcctcttgagtagctgggattacaggcacatgcaccacgcccggctgatttttttttgtatttttagtagacagggtttcaccatgttggccaggctggtcttgaactcctgacctcaggtgatccgcccgcctctgcctcccaaagtgctgggattacaggtgtaagccatcacacctggccctagtgacaggtttttatgggtacttttagatgatctaagaaatcatgtgcatatatctttcagatttctattttgggaaaatgaaggtttctacaacatattgtttcagtgttcaaataaactgaaggactcaacattacatttgaactatatccttcctagtgggttagtgtgaaaaagagtttggctgattcctaaaactctgccagccctgcagtaatctccagggcctggttattgttcagacattccatggtgattcctgggaaggaagcttggctgctcagtttctgagtctggggtgagataatgttctgggaagggacatctgttctttggtgtaatctctcatggtgaaatctgctctgtacatcagacaattgcattgctaccaagtttcataccaaatatttgaaaggatggtattgaatctaaaaccaaatattagtttttattaaactcatgggaaggctaatatattccaacgtaaattattacatatggttaagtaattgcatgttaatttattttaatgtaaatatttttgttactgttctgagccaaattctaaagaaaaaataaatacatttccttgttgaaa

SEQ ID NO: 46109 - DNA, 1133 bp, Artificial Sequence
  derived and/or modified sequence
aactctattttaagaacctctcaaaacgaaacaagcaaatcatggagaagaatggaaataaccgaaagctgcgggtttgtgttgctacttgtaaccgtgcagattattctaaacttgccccgatcatgtttggcattaaaaccgaacctgagttctttgaacttgatgttgtggtacttggctctcacctgatagatgactatggaaatacatatcgaatgattgaacaagatgactttgacattaacaccaggctacacacaattgtgaggggagaagatgaggcagccatggtggagtcagtaggcctggccctagtgaagctgccagatgtccttaatcgcctgaagcctgatatcatgattgttcatggagacaggtttgatgccctggctctggccacatctgctgccttgatgaacatccgaatccttcacattgaaggtggggaagtcagtgggaccattgatgactctatcagacatgccataacaaaactggctcattatcatgtgtgctgcacccgcagtgcagagcagcacctgatatccatgtgtgaggaccatgatcgcatccttttggcaggctgcccttcctatgacaaacttctctcagccaagaacaaagactacatgagcatcattcgcatgtggctaggtgatgatgtaaaatctaaagattacattgttgcactacagcaccctgtgaccactgacattaagcattccataaaaatgtttgaattaacattggatgcacttatctcatttaacaagcggaccctagtcctgtttccaaatattgacgcagggagcaaagagatggttcgagtgatgcggaagaagggcattgagcatcatcccaactttcgtgcagttaaacacgtcccatttgaccagtttatacagttggttgcccatgctggctgtatgattgggaacagcagctgtggggttcgagaagttggagctctgactaggctttatacatacgtgagttgttataagcacacacacacacacacacacacacatccttcctcctctaaccccaaactaagatcacagaaggtgatccagtcagagaacagagggaaatcttaccaggaagggcttaagtacacttttttttaa

SEQ ID NO: 46110 - DNA, 3657 bp, Artificial Sequence
  derived and/or modified sequence
aactctattttaagaacctctcaaaacgaaacaagcaaatcatggagaagaatggaaataaccgaaagctgcgggtttgtgttgctacttgtaaccgtgcagattattctaaacttgccccgatcatgtttggcattaaaaccgaacctgagttctttgaacttgatgttgtggtacttggctctcacctgatagatgactatggaaatacatatcgaatgattgaacaagatgactttgacattaacaccaggctacacacaattgtgaggggagaagatgaggcagccatggtggagtcagtaggcctggccctagtgaagctgccagatgtccttaatcgcctgaagcctgatatcatgattgttcatggagacaggtttgatgccctggctctggccacatctgctgccttgatgaacatccgaatccttcacattgaaggtggggaagtcagtgggaccattgatgactctatcagacatgccataacaaaactggctcattatcatgtgtgctgcacccgcagtgcagagcagcacctgatatccatgtgtgaggaccatgatcgcatccttttggcaggctgcccttcctatgacaaacttctctcagccaagaacaaagactacatgagcatcattcgcatgtggctaggtgatgatgtaaaatctaaagattacattgttgcactacagcaccctgtgaccactgacattaagcattccataaaaatgtttgaattaacattggatgcacttatctcatttaacaagcggaccctagtcctgtttccaaatattgacgcagggagcaaagagatggttcgagtgatgcggaagaagggcattgagcatcatcccaactttcgtgcagttaaacacgtcccatttgaccagtttatacagttggttgcccatgctggctgtatgattgggaacagcagctgtggggttcgagaagttggagcttttggaacacctgtgatcaacctgggaacacgtcagattggaagagaaacaggggagaatgttcttcatgtccgggatgctgacacccaagacaaaatattgcaagcactgcaccttcagtttggtaaacagtacccttgttcaaagatatatggggatggaaatgctgttccaaggattttgaagtttctcaaatctatcgatcttcaagagccactgcaaaagaaattctgctttcctcctgtgaaggagaatatctctcaagatattgaccatattcttgaaactctaagtgccttggccgttgatcttggcgggacgaacctccgagttgcaatagtcagcatgaagggtgaaatagttaagaagtatactcagttcaatcctaaaacctatgaagagaggattaatttaatcctacagatgtgtgtggaagctgcagcagaagctgtaaaactgaactgcagaattttgggagtaggcatttccacaggtggccgtgtaaatcctcgggaaggaattgtgctgcattcaaccaaactgatccaagagtggaactctgtggaccttaggacccccctttctgacactttgcatctccctgtgtgggtagacaatgatggcaactgtgctgccctggcggaaaggaaatttggccaaggaaagggactggaaaactttgttacacttatcacaggcacaggaatcggtggtggaattatccatcagcatgaattgatccacggaagctccttctgtgctgcagaactgggccaccttgttgtgtctctggatgggcctgattgttcctgtggaagccatgggtgcattgaagcatacgcctctggaatggccttgcagagggaggcaaaaaagctccatgatgaggacctgctcttggtggaagggatgtcagtgccaaaagatgaggctgtgggtgcgctccatctcatccaagctgcgaaacttggcaatgcgaaggcccagagcatcctaagaacagctggaacagctttgggtcttggggttgtgaacatcctccataccatgaatccctcccttgtgatcctctccggagtcctggccagtcactatatccacattgtcaaagacgtcattcgccagcaggccttgtcctccgtgcaggacgtggatgtggtggtttcggatttggttgaccccgccctgctgggtgctgccagcatggttctggactacacaacacgcaggatctactagacctccaggaacagacatggaccttctctccagagctcctgagtggaatcaagttcttgtctttaggatgaccgtttcttaacaatcaaatctggtattgaactgcaggtgactttggcagagaaatgttttcacttttggtctcctcttccagagtcacctttccccactcctatttttgtagatgctattctttctgatgtcttcttactaggggtcattttagctcaaaccctgtaagttacagtcacaattttctgtgccaaagcagctacaataatagagaggaagccttcttagaactctgcttactaatgtattaataccactgagaccttcaggccttgcctgggatatcacttcatcctgaagtttgcattaataatccttccaggccgggcacagtggctcacgcctgtaatcccagcactttgggaggccgaggcgggcggatcacgaggtcaggagatcgagaccgccctggctaacatggtgaaacatggtgaaaccccgtctctactaaaaatacaaaaaattagctgggtgtggtggcgggtcccagctactcgggaggctgaggcaggagaatggcatgaaccccaggctggagtgcagtggctcaatgcaacctctgccccccaagttcaagtgattctcctgcctcagcctcttgagtagctgggattacaggcacatgcaccacgcccggctgatttttttttgtatttttagtagacagggtttcaccatgttggccaggctggtcttgaactcctgacctcaggtgatccgcccgcctctgcctcccaaagtgctgggattacaggtgtaagccatcacacctggccctagtgacaggtttttatgggtacttttagatgatctaagaaatcatgtgcatatatctttcagatttctattttgggaaaatgaaggtttctacaacatattgtttcagtgttcaaataaactgaaggactcaacattacatttgaactatatccttcctagtgggttagtgtgaaaaagagtttggctgattcctaaaactctgccagccctgcagtaatctccagggcctggttattgttcagacattccatggtgattcctgggaaggaagcttggctgctcagtttctgagtctggggtgagataatgttctgggaagggacatctgttctttggtgtaatctctcatggtgaaatctgctctgtacatcagacaattgcattgctaccaagtttcataccaaatatttgaaaggatggtattgaatctaaaaccaaatattagtttttattaaactcatgggaaggctaatatattccaacgtaaattattacatatggttaagtaattgcatgttaatttattttaatgtaaatatttttgttactgttctgagccaaattctaaagaaaaaataaatacatttccttgttg

SEQ ID NO: 46111 - DNA, 2262 bp, Artificial Sequence
  derived and/or modified sequence
atggagacctacggctacctgcagcgggagagctgcttccagggcccccatgagctgtacttcaagaacctgagcaagaggaacaagcagatcatggagaagaatggaaacaacaggaagctgcgggtgtgtgtggccacctgcaacagagctgactacagcaagctggcccccatcatgtttggcatcaagacagagcctgagttctttgagctggatgtggtggtgctgggcagccacctgattgatgattatggcaacacctacaggatgattgagcaggatgactttgacatcaacacccggctgcacaccatcgtgcggggggaggatgaagctgccatggtggagagcgtgggcctggccctggtgaagctgcctgatgtgctgaaccggctgaagccagacatcatgattgtgcatggagacagatttgatgccctggccctggccaccagcgctgccctgatgaacatccgcatcctgcacatcgagggcggggaggtgtctggcaccattgatgacagcatcagacatgccatcaccaagctggcccactaccacgtgtgctgcaccaggtctgctgagcagcacctgatctccatgtgtgaggaccatgaccgcatcctgctggccggctgccccagctatgacaagctgctgagcgccaagaacaaggactacatgagcatcatccgcatgtggctgggagatgatgtgaagagcaaggactacatcgtggccctgcagcaccctgtgaccacagacatcaagcacagcatcaagatgtttgagctgaccctggatgccctgatctccttcaacaagaggaccctggtgctcttccccaacattgatgctggcagcaaggagatggtgcgggtgatgaggaagaagggcatcgagcaccaccccaacttccgggctgtgaagcacgtgccctttgaccagttcatccagctggtggcccatgctggctgcatgattggcaacagcagctgtggggtgcgggaggtgggcgccttcggcacccctgtgatcaacctgggcacccggcagatcggccgggagaccggggagaatgtgctgcacgtgagagatgctgacacccaggacaagatcctgcaggccctgcacctgcagtttgggaagcagtacccctgcagcaagatctatggagatggaaatgctgtgccccgcatcctgaagttcctgaagagcattgacctgcaggagcccctgcagaagaagttctgcttcccccctgtgaaggagaacatcagccaggacatcgaccacatcctggagaccctgagcgccctggccgtggacctgggcggcaccaacctgcgggtggccatcgtgtccatgaagggggagatcgtgaagaagtacacccagttcaaccccaagacctatgaggagcgcatcaacctgatcctgcagatgtgtgtggaggccgctgctgaggccgtgaagctgaactgccgcatcctgggcgtgggcatcagcactggaggccgggtgaacccccgggagggcatcgtgctgcacagcaccaagctgatccaggagtggaacagcgtggacctgcggacccccctgagtgacaccctgcacctgcctgtgtgggtggacaatgatggcaactgtgccgccctggccgagaggaagtttggccagggcaagggcctggagaactttgtgaccctcatcactggaactggaattggaggcggcatcatccaccagcacgagctgattcatggcagcagcttctgtgccgctgagctgggccacctggtggtgtccctggatggccctgactgcagctgtggcagccacggctgcatcgaggcctatgccagcggcatggccctgcagcgggaggccaagaagctgcatgatgaggacctgctgctggtggagggcatgtctgtgcccaaggatgaggccgtgggcgccctgcacctgatccaggccgccaagctgggcaatgccaaggcccagagcatcctgaggacagctggaacagccctgggcctgggcgtggtgaacatcctgcacaccatgaaccccagcctggtgatcctgtctggagtgctggccagccactacatccacatcgtgaaggatgtgatccggcagcaggccctgagctctgtgcaggatgtggatgtggtggtgtctgacctggtggaccctgccctgctgggcgccgcctccatggtgctggactacaccacccggcgcatctactag

SEQ ID NO: 46112 - DNA, 2262 bp, Artificial Sequence
  derived and/or modified sequence
atggagacctacggctacctgcagcgggagagctgcttccagggcccacatgagctgtactttaaaaatcttagcaagcgcaataaacagatcatggagaaaaatggaaataatcgcaagctgcgagtgtgcgtggctacctgtaatcgcgcagactacagcaaactcgcacccatcatgtttggcataaagacagagcccgaattcttcgagctggacgtcgtggtgctgggatcacacttgattgacgactacgggaacacataccgcatgattgaacaggatgattttgacatcaatacccggttgcatactattgtgagaggcgaggacgaggccgcaatggtggagagtgtgggcttggccctggtgaagttgccagacgtactgaaccgcttgaagcctgatattatgatcgtccatggcgatcggttcgatgcactcgctctggccactagcgccgccctcatgaacattagaattctccacatcgagggcggggaagtgagtgggaccattgacgattcaattaggcacgcgattaccaaactggctcactaccatgtctgttgtaccagatctgcagagcagcacctgatcagtatgtgcgaagatcacgatagaattctcctggccggttgtccaagttatgacaagttgctgtcggctaaaaacaaagactatatgtctataatacggatgtggctcggggacgatgtaaaatctaaggactacattgttgccctccagcaccccgtcaccacagacatcaaacactccatcaaaatgtttgaattgactttggatgcactgatctccttcaataagaggacactggtattattccccaatatcgatgcaggttccaaagaaatggtgcgggttatgagaaagaaaggcattgagcaccaccctaactttagggcggtcaagcacgtgccattcgaccagtttatacaactcgtggctcatgcgggctgcatgatcggaaatagttcatgtggcgtgagagaagtgggcgcttttggaacacccgtaattaatttaggcacacgtcagatcgggcgggagaccggggagaacgtgttgcacgtcagagatgctgacacacaggacaagatcctccaggccctgcacttgcagttcggcaagcagtatccttgttctaaaatttatggcgatggcaacgcggttccccgaatcctgaaattccttaagagcatagatctgcaggagccactccagaagaagttttgctttcctcctgtaaaggaaaacatcagccaagatatcgatcatattttggaaactctctctgctctagctgtggacctgggcggcaccaatctgcgggttgccatcgtgtccatgaagggcgagatcgtgaagaaatatacacagtttaatcctaaaacgtacgaggagaggatcaacttaattcttcagatgtgcgtcgaagccgcagctgaggccgtgaagctaaattgccgcattctcggcgtaggcatctccactggcgggagagtaaaccctagggaaggcattgtccttcacagtactaagctgattcaagagtggaactcagtcgatttgcgaacgcccttatctgatactcttcacctccccgtctgggtcgataatgacggtaactgcgctgcccttgcagaacgcaaatttggccaaggaaagggactcgagaacttcgtcacactgattaccggcacaggaatcggcggcgggatcatccaccagcacgagcttatacacggcagctcattctgtgcagccgaattaggacacctggtcgtctccctcgacggacctgactgctcctgcggctcccatggttgtatagaggcatacgctagcggcatggccctccaaagagaggctaaaaagctgcacgatgaggacctcctgctggtcgagggtatgagcgttcctaaagatgaggctgtcggcgctctacacttgatccaggctgccaaactaggaaatgcgaaggctcagtctattttgcgcacagccggtacggcattgggcctgggggtggtcaatatcctacacaccatgaatcccagtttggtaattctgagcggtgtactagcttcgcactacattcacattgtcaaggacgtcatcagacagcaagcactgagtagtgtacaggacgtcgatgtggttgtatctgatctcgttgaccctgcactgctgggggcagcatctatggtattagattacactacacgccgcatttactag

SEQ ID NO: 46113 - DNA, 2262 bp, Artificial Sequence
  derived and/or modified sequence
atggagacctatggctacctgcagagggaatcatgtttccagggaccccacgagctgtacttcaagaatcttagcaagcgcaacaaacagattatggaaaagaatggaaacaaccgcaaactgcgagtttgcgttgcaacctgtaaccgtgctgattatagtaagctagcgcctatcatgtttgggatcaagactgagccagagttctttgagttggatgtagtcgtattggggtctcacctcatcgacgattatgggaacacttatcggatgatagagcaagacgatttcgacatcaataccagattacatactatcgtgagaggagaggacgaggcggctatggtagagtctgttggccttgcgctggtcaagcttcctgatgtgctgaataggttgaagccggacattatgatagtccatggggacaggttcgatgctctcgctcttgctacctctgcagcacttatgaacatccgtatactgcatatcgagggaggggaagtctctggaactatcgacgattccatacggcatgcaatcacaaagctggcccactatcacgtttgttgcactcgaagcgctgaacagcatttgatctcaatgtgcgaggatcatgatcgcatactccttgcaggctgcccttcgtatgataagctcctcagcgctaaaaacaaggattacatgtccatcatcagaatgtggctcggggacgatgtaaaatcaaaggactatatcgtagccctgcaacaccccgtgactactgatataaagcattccatcaaaatgtttgagctaactctggatgccctcatttccttcaacaagcgcaccctggtgttattcccgaacatcgatgccggatccaaggaaatggtccgcgtaatgagaaaaaaagggatagaacaccatcccaattttcgcgcagtgaagcacgtccctttcgatcagttcattcagttggttgctcatgcaggatgcatgataggcaattcctcctgtggagtgcgagaggttggggcttttggcacgccagtcataaacctcggaactagacaaattggcagggagacaggtgagaatgtactccatgtaagagatgccgatacacaggataagatcctgcaggccctccacctacagtttgggaagcaatacccctgctctaagatctatggtgatggaaacgctgtcccacgtattcttaagtttttgaaatctatcgatctccaggagcccttacagaaaaagttttgtttccccccagttaaggaaaacatctctcaggacattgaccacatcctcgagacactgtccgccctcgccgtggacctgggtggaacaaatctgagggttgcgatagtatctatgaaaggagagatcgtgaagaaatacacacagtttaaccccaaaacctatgaggagaggatcaatctcatcctgcagatgtgcgtggaggcagccgcagaagctgtgaagctgaactgcagaatcctaggggtggggatttctactggtggacgtgtcaacccgagagagggaatagtgttacacagcactaaactgatccaggagtggaattcggtggacctcagaactccattaagtgataccctgcatctgccagtgtgggtggataacgatggcaactgcgccgctctggccgagcgcaagtttggacaggggaaaggattagaaaactttgtgacactgatcacagggacagggataggaggcggtatcatacaccagcatgagctgatacatggctcttccttctgtgccgcagaacttgggcacctggttgtgtcccttgatggtcctgactgttcttgtggctcgcatggttgcattgaggcctacgcatccggcatggccctccagcgggaagctaagaaattgcacgacgaagatctgctgttggttgaaggtatgagcgtaccaaaagacgaggctgtcggagcgctgcatttgattcaggccgcaaagttggggaacgctaaggcgcagtctatactgagaaccgccggaacagccctgggactgggcgttgtcaacatcctacacaccatgaatccatccctggtcatactgtctggggtactagcatcacactacatacacatcgtgaaggacgtaatccgacagcaggccctgtcgtctgtgcaggacgtcgacgtcgtggtgtcggaccttgtggatcctgccctgttaggagctgcttccatggttcttgattacactacacgtaggatctattag

SEQ ID NO: 46114 - DNA, 2262 bp, Artificial Sequence
  derived and/or modified sequence
atggagacctacggctacctgcagagagagagctgcttccagggcccccacgagctgtacttcaagaacctgagcaagagaaacaagcagatcatggagaagaacggcaacaacagaaagctgagagtgtgcgtggccacctgcaacagagccgactacagcaagctggcccccatcatgttcggcatcaagaccgagcccgagttcttcgagctggacgtggtggtgctgggcagccacctgatcgacgactacggcaacacctacagaatgatcgagcaggacgacttcgacatcaacaccagactgcacaccatcgtgagaggcgaggacgaggccgccatggtggagagcgtgggcctggccctggtgaagctgcccgacgtgctgaacagactgaagcccgacatcatgatcgtgcacggcgacagattcgacgccctggccctggccaccagcgccgccctgatgaacatcagaatcctgcacatcgagggcggcgaggtgagcggcaccatcgacgacagcatcagacacgccatcaccaagctggcccactaccacgtgtgctgcaccagaagcgccgagcagcacctgatcagcatgtgcgaggaccacgacagaatcctgctggccggctgccccagctacgacaagctgctgagcgccaagaacaaggactacatgagcatcatcagaatgtggctgggcgacgacgtgaagagcaaggactacatcgtggccctgcagcaccccgtgaccaccgacatcaagcacagcatcaagatgttcgagctgaccctggacgccctgatcagcttcaacaagagaaccctggtgctgttccccaacatcgacgccggcagcaaggagatggtgagagtgatgagaaagaagggcatcgagcaccaccccaacttcagagccgtgaagcacgtgcccttcgaccagttcatccagctggtggcccacgccggctgcatgatcggcaacagcagctgcggcgtgagagaggtgggcgccttcggcacccccgtgatcaacctgggcaccagacagatcggcagagagaccggcgagaacgtgctgcacgtgagagacgccgacacccaggacaagatcctgcaggccctgcacctgcagttcggcaagcagtacccctgcagcaagatctacggcgacggcaacgccgtgcccagaatcctgaagttcctgaagagcatcgacctgcaggagcccctgcagaagaagttctgcttcccccccgtgaaggagaacatcagccaggacatcgaccacatcctggagaccctgagcgccctggccgtggacctgggcggcaccaacctgagagtggccatcgtgagcatgaagggcgagatcgtgaagaagtacacccagttcaaccccaagacctacgaggagagaatcaacctgatcctgcagatgtgcgtggaggccgccgccgaggccgtgaagctgaactgcagaatcctgggcgtgggcatcagcaccggcggcagagtgaaccccagagagggcatcgtgctgcacagcaccaagctgatccaggagtggaacagcgtggacctgagaacccccctgagcgacaccctgcacctgcccgtgtgggtggacaacgacggcaactgcgccgccctggccgagagaaagttcggccagggcaagggcctggagaacttcgtgaccctgatcaccggcaccggcatcggcggcggcatcatccaccagcacgagctgatccacggcagcagcttctgcgccgccgagctgggccacctggtggtgagcctggacggccccgactgcagctgcggcagccacggctgcatcgaggcctacgccagcggcatggccctgcagagagaggccaagaagctgcacgacgaggacctgctgctggtggagggcatgagcgtgcccaaggacgaggccgtgggcgccctgcacctgatccaggccgccaagctgggcaacgccaaggcccagagcatcctgagaaccgccggcaccgccctgggcctgggcgtggtgaacatcctgcacaccatgaaccccagcctggtgatcctgagcggcgtgctggccagccactacatccacatcgtgaaggacgtgatcagacagcaggccctgagcagcgtgcaggacgtggacgtggtggtgagcgacctggtggaccccgccctgctgggcgccgccagcatggtgctggactacaccaccagaagaatctactag

SEQ ID NO: 46115 - protein, 678 aa, Artificial Sequence
  derived and/or modified sequence
MLLEAERRRGGGAAGARLLERYRRVPGVRALRADSVLIIETVPGFPPAPPAPGAAQIRAAEVLVYGAPPGRVSRLLERFDPPAAPRRRGSPERARPPPPPPPPAPPRPPPAAPSPPAAPGPRGGGASPGARRSDFLQKTGSNSFTVHPRGLHRGAGARLLSNGHSAPEPRAGPANRLAGSPPGSGQWKPKVESGDPSLHPPPSPGTPSATPASPPASATPSQRQCVSAATSTNDSFEIRPAPKPVMETIPLGDLQARALASLRANSRNSFMVIPKSKASGAPPPEGRQSVELPKGDLGPASPSQELGSQPVPGGDGAPALGKSPLEVEAQWAVEEGACPRTATALADRAIRWQRPSSPPPFLPAASEEAEPAEGLRVPGLAKNSREYVRPGLPVTFIDEVDSEEAPQAAKLPYLPHPARPLHPARPGCVAELQPRGSNTFTVVPKRKPGTLQDQHFSQANREPRPREAEEEEASCLLGPTLKKRYPTVHEIEVIGGYLALQKSCLTKAGSSRKKMKISFNDKSLQTTFEYPSESSLEQEEEVDQQEEEEEEEEEEEEEEEGSGSEEKPFALFLPRATFVSSVRPESSRLPEGSSGLSSYTPKHSVAFSKWQEQALEQAPREAEPPPVEAMVRCGGVERWGESDTRASPCVHILSSHFQLTPASQNDLSDFRSEPALYF

SEQ ID NO: 46116 - protein, 711 aa, Artificial Sequence
  derived and/or modified sequence
MAALGRPGSGPRAAVPAWKREILERKRAKLAALGGGAGPGAAEPEQRVLAESLGPLRENPFMLLEAERRRGGGAAGARLLERYRRVPGVRALRADSVLIIETVPGFPPAPPAPGAAQIRAAEVLVYGAPPGRVSRLLERFDPPAAPRRRGSPERARPPPPPPPPAPPRPPPAAPSPPAAPGPRGGGASPGARRSDFLQKTGSNSFTVHPRGLHRGAGARLLSNGHSAPEPRAGPANRLAGSPPGSGQWKPKVESGDPSLHPPPSPGTPSATPASPPASATPSQRQCVSAATSTNDSFEIRPAPKPVMETIPLGDLQARALASLRANSRNSFMVIPKSKASGAPPPEGRQSVELPKGDLGPASPSQELGSQPVPGGDGAPALGKSPLEVEAQWAVEEGACPRTATALADRAIRWQRPSSPPPFLPAASEEAEPAEGLRVPGLAKNSREYVRPGLPVTFIDEVDSEEAPQAAKLPYLPHPARPLHPARPGCVAELQPRGSNTFTVVPKRKPGTLQDQHFSQANREPRPREAEEEEASCLLGPTLKKRYPTVHEIEVIGGYLALQKSCLTKAGSSRKKMKISFNDKSLQTTFEYPSESSLEQEEEVDQQEEEEEEEEEEEEEEEGSGSEEKPFALFLPRATFVSSVRPESSRLPEGSSGLSSYTPKHSVAFSKWQEQALEQAPREAEPPPVEAMLTPASQNDLSDFRSEPALYF

SEQ ID NO: 46117 - DNA, 2037 bp, Artificial Sequence
  derived and/or modified sequence
atgctgctggaggccgagagaagaagaggcggcggcgccgccggcgccagactgctggagagatacagaagagtgcccggcgtgagagccctgagagccgacagcgtgctgatcatcgagaccgtgcccggcttcccccccgccccccccgcccccggcgccgcccagatcagagccgccgaggtgctggtgtacggcgccccccccggcagagtgagcagactgctggagagattcgacccccccgccgcccccagaagaagaggcagccccgagagagccagaccccccccccccccccccccccccgccccccccagacccccccccgccgcccccagcccccccgccgcccccggccccagaggcggcggcgccagccccggcgccagaagaagcgacttcctgcagaagaccggcagcaacagcttcaccgtgcaccccagaggcctgcacagaggcgccggcgccagactgctgagcaacggccacagcgcccccgagcccagagccggccccgccaacagactggccggcagcccccccggcagcggccagtggaagcccaaggtggagagcggcgaccccagcctgcaccccccccccagccccggcacccccagcgccacccccgccagcccccccgccagcgccacccccagccagagacagtgcgtgagcgccgccaccagcaccaacgacagcttcgagatcagacccgcccccaagcccgtgatggagaccatccccctgggcgacctgcaggccagagccctggccagcctgagagccaacagcagaaacagcttcatggtgatccccaagagcaaggccagcggcgcccccccccccgagggcagacagagcgtggagctgcccaagggcgacctgggccccgccagccccagccaggagctgggcagccagcccgtgcccggcggcgacggcgcccccgccctgggcaagagccccctggaggtggaggcccagtgggccgtggaggagggcgcctgccccagaaccgccaccgccctggccgacagagccatcagatggcagagacccagcagccccccccccttcctgcccgccgccagcgaggaggccgagcccgccgagggcctgagagtgcccggcctggccaagaacagcagagagtacgtgagacccggcctgcccgtgaccttcatcgacgaggtggacagcgaggaggccccccaggccgccaagctgccctacctgccccaccccgccagacccctgcaccccgccagacccggctgcgtggccgagctgcagcccagaggcagcaacaccttcaccgtggtgcccaagagaaagcccggcaccctgcaggaccagcacttcagccaggccaacagagagcccagacccagagaggccgaggaggaggaggccagctgcctgctgggccccaccctgaagaagagataccccaccgtgcacgagatcgaggtgatcggcggctacctggccctgcagaagagctgcctgaccaaggccggcagcagcagaaagaagatgaagatcagcttcaacgacaagagcctgcagaccaccttcgagtaccccagcgagagcagcctggagcaggaggaggaggtggaccagcaggaggaggaggaggaggaggaggaggaggaggaggaggaggaggagggcagcggcagcgaggagaagcccttcgccctgttcctgcccagagccaccttcgtgagcagcgtgagacccgagagcagcagactgcccgagggcagcagcggcctgagcagctacacccccaagcacagcgtggccttcagcaagtggcaggagcaggccctggagcaggcccccagagaggccgagcccccccccgtggaggccatggtgagatgcggcggcgtggagagatggggcgagagcgacaccagagccagcccctgcgtgcacatcctgagcagccacttccagctgacccccgccagccagaacgacctgagcgacttcagaagcgagcccgccctgtacttctag

SEQ ID NO: 46118 - DNA, 2136 bp, Artificial Sequence
  derived and/or modified sequence
atggccgccctgggcagacccggcagcggccccagagccgccgtgcccgcctggaagagagagatcctggagagaaagagagccaagctggccgccctgggcggcggcgccggccccggcgccgccgagcccgagcagagagtgctggccgagagcctgggccccctgagagagaaccccttcatgctgctggaggccgagagaagaagaggcggcggcgccgccggcgccagactgctggagagatacagaagagtgcccggcgtgagagccctgagagccgacagcgtgctgatcatcgagaccgtgcccggcttcccccccgccccccccgcccccggcgccgcccagatcagagccgccgaggtgctggtgtacggcgccccccccggcagagtgagcagactgctggagagattcgacccccccgccgcccccagaagaagaggcagccccgagagagccagaccccccccccccccccccccccccgccccccccagacccccccccgccgcccccagcccccccgccgcccccggccccagaggcggcggcgccagccccggcgccagaagaagcgacttcctgcagaagaccggcagcaacagcttcaccgtgcaccccagaggcctgcacagaggcgccggcgccagactgctgagcaacggccacagcgcccccgagcccagagccggccccgccaacagactggccggcagcccccccggcagcggccagtggaagcccaaggtggagagcggcgaccccagcctgcaccccccccccagccccggcacccccagcgccacccccgccagcccccccgccagcgccacccccagccagagacagtgcgtgagcgccgccaccagcaccaacgacagcttcgagatcagacccgcccccaagcccgtgatggagaccatccccctgggcgacctgcaggccagagccctggccagcctgagagccaacagcagaaacagcttcatggtgatccccaagagcaaggccagcggcgcccccccccccgagggcagacagagcgtggagctgcccaagggcgacctgggccccgccagccccagccaggagctgggcagccagcccgtgcccggcggcgacggcgcccccgccctgggcaagagccccctggaggtggaggcccagtgggccgtggaggagggcgcctgccccagaaccgccaccgccctggccgacagagccatcagatggcagagacccagcagccccccccccttcctgcccgccgccagcgaggaggccgagcccgccgagggcctgagagtgcccggcctggccaagaacagcagagagtacgtgagacccggcctgcccgtgaccttcatcgacgaggtggacagcgaggaggccccccaggccgccaagctgccctacctgccccaccccgccagacccctgcaccccgccagacccggctgcgtggccgagctgcagcccagaggcagcaacaccttcaccgtggtgcccaagagaaagcccggcaccctgcaggaccagcacttcagccaggccaacagagagcccagacccagagaggccgaggaggaggaggccagctgcctgctgggccccaccctgaagaagagataccccaccgtgcacgagatcgaggtgatcggcggctacctggccctgcagaagagctgcctgaccaaggccggcagcagcagaaagaagatgaagatcagcttcaacgacaagagcctgcagaccaccttcgagtaccccagcgagagcagcctggagcaggaggaggaggtggaccagcaggaggaggaggaggaggaggaggaggaggaggaggaggaggaggagggcagcggcagcgaggagaagcccttcgccctgttcctgcccagagccaccttcgtgagcagcgtgagacccgagagcagcagactgcccgagggcagcagcggcctgagcagctacacccccaagcacagcgtggccttcagcaagtggcaggagcaggccctggagcaggcccccagagaggccgagcccccccccgtggaggccatgctgacccccgccagccagaacgacctgagcgacttcagaagcgagcccgccctgtacttctag

SEQ ID NO: 46119 - DNA, 2037 bp, Artificial Sequence
  derived and/or modified sequence
atgctgctggaggctgagcgcagaagaggaggaggggccgccggcgcacggttactcgagagatatcgccgtgtgcccggggtgagggcactgcgcgccgactctgtactaatcattgaaaccgtgcccggtttccctcctgctccccctgcaccgggggccgcccaaattcgggctgctgaggtactcgtgtacggagcaccacccggccgcgttagtcgccttctcgaaaggtttgacccaccggccgcaccccggcggcgggggtccccagagagagcccgtccccccccaccgcctccacccccagctccgcctagacctccacctgctgccccttccccaccagcggcgcccggccccaggggcggaggagcttccccaggagccaggcggtcggacttcctccagaaaaccggtagcaacagttttacggtccacccccgcggcttgcacagaggagccggcgcacgccttctaagcaatggccacagcgcacccgagccacgcgccggccctgctaatcgcttggccgggtccccccccggctcaggccagtggaagccgaaggtggaaagtggagacccctctttgcacccccccccttcacccggcacccccagtgctacacccgcctcgccacctgcctctgccaccccgagccagcgacagtgtgtgtcagccgctacatctactaatgactcctttgagattagaccggcccctaaacccgtgatggagactattcccctcggagacttgcaggccagggccctggctagcctgcgggctaactcacgcaacagcttcatggttatccccaaatctaaggccagtggagccccacctccagaggggcgccagagcgtcgaactaccaaaaggggacctaggtcccgctagccccagccaagaactgggtagccaacccgtaccagggggggacggagctcccgcattgggcaaatcacccttagaagtagaggcccagtgggcagtggaggagggagcgtgtccccggacagccacggctcttgccgaccgagctataaggtggcaaaggccaagctcccccccaccattcctgcccgccgcttctgaagaagcagagcccgccgaaggcttgcgggtacctggattagctaaaaattcacgggagtatgtacggcccggcctgccagttacttttatcgacgaggttgattctgaagaagccccccaagctgcaaaactcccttacctgcctcatccggctcggcctctgcacccagcgcgccccgggtgcgtggctgagctgcagcctcggggtagcaacacattcacagtagttccgaaaagaaagcccgggaccctgcaagatcaacacttcagtcaagctaatagggagcctaggcccagagaagcagaggaagaggaggctagctgcctgttaggcccaaccttgaaaaagcgataccccaccgtccacgagatcgaagtgataggcggctacctggctctccaaaaatcatgtttgacgaaggccggcagctcccggaagaagatgaaaatctctttcaatgacaagtcgcttcagactacctttgagtacccgtccgagtctagcctcgaacaggaggaggaggtggatcaacaggaggaagaggaagaagaggaggaagaagaggaagaagaggaggaaggctctgggtccgaggagaagccattcgcattgttcctgccccgggcgacatttgtaagcagtgtgagacccgagagtagtcgcctccccgagggttcctccgggctgagctcctacaccccgaaacactccgtcgcttttagcaagtggcaggagcaggcgttggaacaggcgcctagggaagcagagcctccccccgtggaagcaatggtcaggtgcggaggagtggagcggtggggggagtccgataccagggcatccccttgcgtgcacatcctgtcatcccatttccaactcacacccgcatctcaaaatgacctgtctgacttcagatctgagcccgccctgtatttctag

SEQ ID NO: 46120 - DNA, 2136 bp, Artificial Sequence
  derived and/or modified sequence
atggcagccttggggagaccaggaagtgggccccgggcagccgtcccggcctggaaacgggaaatcctcgagcgcaagagagcgaagttggctgccttaggtggcggggctggtcctggcgctgctgagccagaacagcgcgtgctggctgaatctttggggcccctgcgcgagaatccttttatgctcctggaggcggagcgtcgacgtggcggcggagcagccggtgctcgcctccttgagaggtataggcgcgttccaggtgtgcgggcgctcagggccgacagtgtgttgatcatcgagacggtgcctggctttccaccagcacctccagcccccggcgctgcccagatcagggctgccgaagtgctggtctacggtgcccctcctggtagggtcagccggctgcttgaacgattcgaccccccggcagcgccccgccgccgagggagtccggaacgagctaggccccccccccccccaccccctcctgcccctcccagaccaccccccgcggctccatctccacccgctgccccaggacctaggggcggtggcgccagtcccggggctcgcagaagtgattttctacaaaaaaccggcagcaattccttcacggtgcacccaagagggctgcaccggggtgccggggctcggctgctgtccaatgggcattctgccccagagccacgcgctggtcctgccaacaggctcgctggttccccgcctggaagtggacagtggaagccgaaggtggaatcgggagatccgtcccttcatccacctcccagtcccggtacaccctccgccacccccgcaagcccacctgcctctgccacaccttcccagagacagtgcgtttctgccgctacatccacgaatgatagcttcgaaatcagaccagctcccaagcctgtcatggaaacaattcccctgggagatctccaggcccgggctctggcatccctcagggctaattctcgcaactcttttatggttattccaaagagcaaggcctcgggggctcctccccccgaaggtcgtcagtcagtggagctgcctaagggcgatttgggacccgcaagtccctcgcaagagcttggaagccagcctgtgcccgggggagacggtgcgccagccctcggcaaatcacccctggaggtggaagcccaatgggcggtcgaagagggtgcctgtcctcggactgcgaccgctcttgcagaccgagccattagatggcagcgcccctcaagccccccacccttccttcccgctgcctctgaggaagctgaaccagcagagggtctgagagtgccaggtctcgctaagaactccagggaatacgtgcgtcccggactccctgtgacttttatagacgaggtggattcggaagaagccccgcaggccgctaagcttccatacctgccgcatccggctagacctctgcatcctgccagaccagggtgcgttgcagaacttcagcctaggggttccaacacctttactgtggtacccaagaggaaaccaggtaccctgcaagatcagcacttcagccaggcgaatagagaacctagacccagggaagccgaggaggaggaggccagctgtctgctgggcccgactttaaagaagcgctatcctaccgtgcatgagattgaagtgattggcggttacctggcacttcagaaaagttgtttaacaaaggccggctctagtcggaaaaaaatgaagatcagcttcaacgacaaaagcctgcagacaaccttcgagtacccatctgagtccagtctggagcaggaggaggaggtggatcagcaggaagaggaagaggaggaggaagaagaagaagaggaagaagaagagggctctggcagcgaggagaagccgttcgccttatttctgccccgcgcaacatttgtgtcctccgtgaggccagaatcatcacggctgcccgaagggagcagcggactctcctcgtacactcctaagcacagcgtagcattttccaagtggcaggagcaggcactggaacaggctcccagagaagccgaaccaccacctgttgaggctatgctgactcctgccagtcagaacgatctatccgattttaggagtgaaccggccttgtacttctag

SEQ ID NO: 46121 - DNA, 2037 bp, Artificial Sequence
  derived and/or modified sequence
atgctgctggaggccgagcggcggcggggcggcggggccgccggggcccggctgctggagcgctacagaagagtgcctggggtgcgggccctgcgggctgacagcgtgctgatcattgaaacagtgcccggcttccccccagcccccccagcccctggggccgcccagatccgggctgctgaggtgctggtgtatggagcccctcctggccgggtgtcccggctgctggagagatttgatcctcctgctgcccccaggagaagaggcagccctgagcgggcccggcccccacctcctcctcctcctccagccccaccccggcccccacctgctgcccccagccccccagctgcccctggcccccggggcggcggggccagccctggggccaggagaagtgacttcctgcagaagacaggcagcaacagcttcaccgtgcacccccggggcctgcacagaggagctggggcccggctgctgagcaatggccacagcgcccctgagcccagggctggccctgccaaccggctggccggcagccccccaggcagcggccagtggaagcccaaggtggagagcggggaccccagcctgcaccccccacccagccctggcacccccagcgccaccccagccagccccccagccagcgccacccccagccagaggcagtgtgtgtctgctgccaccagcaccaatgacagctttgagatccggcctgcccccaagcctgtgatggagaccatccccctgggggacctgcaggcccgggccctggccagcctgcgggccaacagcagaaattccttcatggtgatccccaagagcaaggccagcggggcccctcctcctgagggccggcagagcgtggagctgcccaagggggacctgggccctgccagccccagccaggagctgggcagccagcctgtgcctggaggagatggagccccagccctgggcaagagccccctggaggtggaggcccagtgggccgtggaggagggcgcctgccccaggacagccacagccctggccgaccgggccatccgctggcagaggcccagcagccccccacccttcctgcctgctgccagcgaggaggccgagcctgctgagggcctgcgggtgcccggcctggccaagaacagccgggagtatgtgcggcccggcctgcctgtgaccttcattgatgaggtggacagcgaggaggccccccaggccgccaagctgccctacctgccccacccagcccggcccctgcacccagcccggcccggctgtgtggccgagctgcagccccggggcagcaacaccttcaccgtggtgcccaagaggaagccaggcaccctgcaggaccagcacttcagccaggccaaccgggagccccggccccgggaggccgaggaggaggaggccagctgcctgctgggccccaccctgaagaagcgctaccccaccgtgcatgaaattgaagtcatcggcggctacctggccctgcagaagagctgcctgaccaaggccggcagcagcaggaagaagatgaagatctccttcaatgacaagagcctgcagaccacctttgagtaccccagcgagagcagcctggagcaggaggaggaggtggaccagcaggaggaggaggaggaggaggaggaggaggaggaggaggaggaggagggcagcggcagcgaggagaagccctttgccctcttcctgccccgggccacctttgtgtcctctgtgcggcctgagagcagccggctgcctgagggcagcagcggcctgagcagctacacccccaagcacagcgtggccttcagcaagtggcaggagcaggccctggagcaggccccccgggaggccgagcccccacctgtggaggccatggtgcgctgtggcggcgtggagcgctggggcgagagtgacacccgggccagcccctgtgtgcacatcctgagcagccacttccagctgaccccagccagccagaatgacctgagtgacttccgctctgagcccgccctgtacttctag

SEQ ID NO: 46122 - DNA, 2136 bp, Artificial Sequence
  derived and/or modified sequence
atggccgccctgggccggcccggcagcggccccagggctgctgtgcctgcctggaagcgggagatcctggagaggaagagggccaagctggccgccctgggcggcggggccggccctggagctgctgagcctgagcagagggtgctggccgagagcctgggccccctgcgggagaaccccttcatgctgctggaggccgagaggagaagaggaggaggagctgctggggcccggctgctggagcgctaccgccgggtgcctggggtgcgggccctgcgggctgacagcgtgctgatcatcgagaccgtgcccggcttccccccagcccccccagcccctggagctgcccagatccgggctgctgaggtgctggtgtatggagcccctcctggccgggtgtcccggctgctggagagatttgaccccccagctgccccccggcggcggggcagccctgagcgggcccggcccccacctcctcctcctcctccagccccacccaggcctcctcctgctgcccccagccccccagctgcccctggcccccggggcggcggggccagccctggggcccggcggagtgacttcctgcagaagacaggcagcaacagcttcaccgtgcacccccggggcctgcacagaggagctggggcccggctgctgagcaatggccacagcgcccctgagccccgggccggccctgccaaccggctggccggcagccccccaggcagcggccagtggaagcccaaggtggagagcggggaccccagcctgcaccccccacccagccctggcaccccatctgccaccccagccagccccccagccagcgccacccccagccagaggcagtgtgtgtctgctgccaccagcaccaatgacagctttgagatccggcctgcccccaagcctgtgatggagaccatccccctgggggacctgcaggcccgggccctggccagcctgcgggccaacagcaggaacagcttcatggtgatccccaagagcaaggccagcggggcccctcctcctgagggccggcagagcgtggagctgcccaagggggacctgggccctgccagccccagccaggagctgggcagccagcctgtgcctggaggagatggagccccagccctgggcaagagccccctggaggtggaggcccagtgggccgtggaggagggcgcctgccccaggacagccacagccctggccgaccgggccatccgctggcagaggcccagcagccccccacccttcctgcctgctgccagcgaggaggccgagcctgctgagggcctgcgggtgcccggcctggccaagaacagccgggagtatgtgcggcccggcctgcctgtgaccttcattgatgaggtggacagcgaggaggccccccaggccgccaagctgccctacctgccccacccagcccggcccctgcacccagcccggcccggctgtgtggccgagctgcagccccggggcagcaacaccttcaccgtggtgcccaagaggaagccaggcaccctgcaggaccagcacttcagccaggccaaccgggagccccggccccgggaggccgaggaggaggaggccagctgcctgctgggccccaccctgaagaagcgctaccccaccgtgcatgaaattgaggtgattggaggctacctggccctgcagaagagctgcctgaccaaggccggcagcagcaggaagaagatgaagatctccttcaatgacaagagcctgcagaccacctttgagtaccccagcgagagcagcctggagcaggaggaggaggtggaccagcaggaggaggaggaggaggaggaggaggaggaggaggaggaggaggagggcagcggcagcgaggagaagccctttgccctcttcctgccccgggccacctttgtgtcctctgtgcggcctgagagcagccggctgcctgagggcagcagcggcctgagcagctacacccccaagcacagcgtggccttcagcaagtggcaggagcaggccctggagcaggccccccgggaggccgagcccccacctgtggaggccatgctgaccccagccagccagaatgacctgagtgacttccgctctgagcccgccctgtacttctag

SEQ ID NO: 46123 - DNA, 2037 bp, Artificial Sequence
  derived and/or modified sequence
atgctgctggaggccgagcggcggcggggcggcggcgccgccggcgcaaggctactggaacggtaccgcagagtccctggagttagggccttgagagcggactccgtgctcatcatcgaaaccgtcccagggtttccccccgccccccctgcaccaggtgccgctcagatccgggctgctgaggttctggtgtacggagcccccccaggtcgggtaagcaggctcctggagcgcttcgacccacccgctgcaccccggagaaggggctccccagagcgggctcggcctcctcccccacctcctccccccgcccctcctcgtcccccgccagcagcaccctcccccccggccgcccccggtcctcgtggaggaggggcgtcacctggggcccgcaggagtgactttctgcagaaaactggctcaaattcttttactgtacatccccgtggcctgcatcggggtgccggagctaggctcttatctaacggtcatagtgcccccgagccacgcgcagggccggctaatcgcctagccggatcaccccctggatccggccagtggaaacccaaagtggagtctggcgatcctagcctgcacccacctccgtcgccaggcaccccctctgcaacccccgcatccccacccgcaagcgctacgccttcccagcgccagtgcgtaagcgctgctacgagcacaaacgacagcttcgagatcaggccagcccccaaacctgttatggaaacaattcctctcggagacctacaggcccgcgccctcgcatcactgcgtgctaatagcagaaattcatttatggtcataccaaaatctaaagcctccggggccccccccccagaggggcggcaatccgtggagttacctaagggtgaccttgggcccgcttccccctcccaggaactcggatctcagccagttccgggaggggacggcgcacccgcactcggcaagtcacccctggaagtggaggcccaatgggctgttgaagagggagcctgcccacggacagccaccgccctagctgaccgggctattagatggcaacgcccatcctcgccaccccctttccttcctgcagcctccgaagaggccgagccggccgagggcctgagagtccctggactggccaaaaactctcgcgagtatgtcagacccggacttcctgtgaccttcatcgacgaggtggattcagaggaggccccccaggccgctaagctgccgtatttacctcatccggcccgcccactgcatccggcacgccctggatgtgtcgccgagctccaacccagagggagcaataccttcacggtggtccctaagcggaagccgggtaccctccaggatcagcacttttctcaggcaaatagggaaccaaggccccgggaggccgaagaggaagaagcaagctgtctcctgggacccactctcaagaagagatatccgaccgtccatgagatagaggtaatagggggctacctggcactccagaagtcttgcctgaccaaggccggcagcagccggaaaaagatgaagatatccttcaatgacaagtctctacagacaacttttgagtacccgtccgagtcaagtctggaacaagaggaagaggtggaccaacaggaggaggaagaggaggaggaggaggaggaagaagaggaggaggagggatcaggcagtgaagagaaaccgtttgcactgttccttccaagagccacttttgttagttcagtgaggccagaatcgtcaagactgccggaaggctcctctgggctttcctcttacactcccaaacactccgtggcgttttcaaagtggcaggaacaagccctagagcaggccccacgggaagctgaacctccacctgtggaggcaatggtccgatgcggcggcgtagagcgatggggggaaagcgatacacgagccagcccctgcgttcatatcctcagctctcactttcagctgacacctgcatcacaaaacgacctcagtgactttagaagcgagccggcactctatttctag

SEQ ID NO: 46124 - DNA, 2136 bp, Artificial Sequence
  derived and/or modified sequence
atggccgccctgggccggcccggcagcggcccccgggccgccgtgcccgcttggaagcgggaaattctggagcgaaagcgcgcgaaacttgcggctctgggaggcggcgccggtcctggggccgccgagcccgagcaaagggtgctggctgagtccctcggaccacttagagagaaccccttcatgctgttggaagccgagaggcgcagaggtgggggagccgcaggtgcacgcctactagagagatatcgcagagtgcctggcgtccgcgctctgagagccgactccgtcctcattatcgagactgtgccggggtttcccccagctcccccagctccaggcgctgctcagattagggcggctgaggtactggtttatggagctccacctgggcgcgtgagccggcttctcgaaaggtttgaccctccagccgcacctcggcgcaggggcagccccgagagggctaggcctcctccacctcctcctccacctgctccgcctcgcccgccccctgccgctcccagcccccccgctgctcccggaccccgtggtggtggcgccagtcccggggctcgacggtctgacttcctccagaagaccggcagtaattccttcacagttcatccaagaggacttcataggggggctggagcgagactgctgtctaatggtcattcagccccagagccccgggcagggccagcaaacaggctcgcaggctcccctccagggtcaggccaatggaagccgaaggtagaatccggagatccaagtttgcaccccccaccttctccagggaccccaagcgcaacccctgctagtcctcccgcaagtgccaccccttcacagcgccaatgcgtaagcgccgcaacctcaaccaacgactccttcgaaattagaccagcccccaaacctgtgatggagacaattccgctcggcgatctccaggccagagccctagcgagcctgagagccaacagcagaaacagctttatggtgattcccaaaagcaaagcctcaggtgcccctcctcctgaggggagacagtctgtggaactgcccaagggagatcttggtcccgcctcgcccagtcaggagctggggtcacagcccgttcccggaggagatggagcacctgcgttagggaaatcgccattggaggtggaggcccagtgggcagtcgaggagggcgcctgccccagaacggcgacagctttagctgatagagcaattcgatggcagcgcccgagttctccccccccttttcttcccgccgcctcagaagaggctgagcccgccgaaggactgcgggtgccggggctggccaagaactctagagagtatgtcaggcctggcttacctgtcacctttatcgacgaggtggactctgaagaggccccacaagcggctaagctcccgtacttgccacatcctgccagacctctgcatcctgctcggcccggctgtgttgccgagttgcagcccagaggatccaatacattcactgtggttcccaaacgcaaacctggtacattacaggatcagcatttcagccaggcaaatcgggagcccagacctcgggaggccgaggaagaggaggcatcttgtctgctgggccctacgctgaagaagaggtacccgacagttcacgagattgaggtgattggaggctatttggctctgcagaagtcatgcctcaccaaagctggctccagccggaagaaaatgaagatcagttttaacgacaaaagcctccagaccaccttcgagtacccttccgaatccagtcttgagcaggaagaggaggtggaccagcaagaagaggaagaagaagaggaagaagaggaggaagaggaagaggagggctctggatccgaagaaaagccttttgccctattcctgccaagggcaacgttcgtgagttctgtccgtcccgagagtagtcgcctgcctgaaggatccagcgggctgtctagctatactcccaagcactctgtcgctttcagcaagtggcaggaacaagctcttgagcaggctcctcgtgaagccgagccacctcctgtagaggccatgctgacgcctgcctcccagaatgatctttccgacttccggagtgaacccgccctatacttctag

SEQ ID NO: 46125 - DNA, 2037 bp, Artificial Sequence
  derived and/or modified sequence
atgctgctggaagctgagaggaggaggggcggtggcgctgcaggggctagactgctggagcggtacagaagagtccctggcgtgcgggcactgagagcggactcggttcttattatcgagacagtgcctggatttccccctgcaccacccgctcccggtgctgcccagataagggccgctgaggtgttagtgtatggggcaccgccaggaagggttagtaggctcctggagaggttcgaccctccagcggcacctcggcgaaggggctctcctgaaagagctaggcctcctcctcctccccctcccccagcccctcctcgaccccctcctgccgctccctctccacctgccgctccaggccctaggggaggcggtgcctcccctggtgccagaaggtccgattttctccagaagactggaagcaatagctttacagttcacccacgagggcttcacagaggcgctggcgcaaggctgttgtccaacggacatagcgcacctgaaccacgtgcagggccagccaatcgtcttgcgggaagccccccaggctctggccagtggaaacccaaggtggagtcgggcgatccctccctacatcctcccccttctcctggaactccgtctgcaaccccagcgagtcccccagcatccgccactccctctcagaggcagtgcgtcagcgcggcaacgtctaccaatgacagcttcgaaatcaggcctgcccctaaacccgtaatggaaaccattcccctgggagatctacaagcgagagctctggcttccctgagggctaactcccgtaattcttttatggtgattccaaagtccaaggcaagtggcgcaccaccacccgaagggaggcagagcgtagaactgcccaaaggcgatctcggcccagcatccccgtctcaggagctgggctcccaacctgtgccagggggagacggagcacccgctttgggaaagagcccactcgaggttgaagcccagtgggcggtcgaagagggcgcatgcccccgaactgcaacagcactcgctgaccgggctatccgatggcagaggccctcctcccccccaccatttctgccggctgcatcagaggaagccgaacccgctgagggattaagggtgccagggctcgcaaagaacagccgcgagtatgtgcgccctgggctgccagtgacctttattgatgaggttgactcggaagaggctccccaagctgcgaaactgccttatctgccccatccagcccgacctttacaccctgctagaccaggttgcgtcgcagagctccaacccagaggctcaaacaccttcactgtcgtgcccaaacgaaaaccgggtacactgcaggaccagcatttttcacaggccaatagagagccgcgaccacgggaggctgaagaggaagaagcatcttgcctactgggccctaccctgaaaaaacgctaccccaccgttcacgaaatcgaagtgattggtggttaccttgcacttcagaaaagctgcctgaccaaggccggaagcagccgcaagaaaatgaagatcagttttaacgataagtctctgcagaccacattcgagtacccctccgaatcaagtcttgagcaggaagaggaggtggaccagcaggaggaagaggaggaagaggaggaggaggaggaagaagaggaagaagggtcaggcagtgaagagaaaccattcgctcttttcctacctcgcgcaacatttgtgagtagtgtgcgccctgagagtagtcgattaccggaaggttctagcggtctgagcagctacacccctaagcactcagttgcattcagcaagtggcaggagcaggcgctggagcaggcacctcgcgaagcagagcccccaccggttgaggctatggttagatgcgggggagtggagaggtggggagagagcgacacacgtgcctcaccgtgcgtgcacatcctcagttctcactttcaacttaccccggcttctcagaatgacctgagcgacttccggagtgagcctgcactgtatttctag

SEQ ID NO: 46126 - DNA, 2136 bp, Artificial Sequence
  derived and/or modified sequence
atggccgcactcgggagaccaggctcagggcctagagcagcagtcccagcttggaagcgggaaattctggaacgaaagagagctaaattagccgctctaggcggaggagcaggacctggcgctgccgaaccggaacagagagttttggccgaatctctgggcccactgagagagaacccttttatgcttctggaagcagaacggaggcggggagggggagcggctggcgctagactgctggagcgttaccgcagggtgcctggagtcagggccctaagggcagatagcgtgctgattatagaaaccgtccccggatttcctcccgcacctccagctccaggcgctgcccagatccgcgctgcagaagttctggtgtatggcgcaccaccaggacgcgtgagccggctccttgaacgttttgaccccccagctgctccgagacgcagggggtctcccgagagggcgcgtccgccacccccacctccccctcctgccccaccaaggcccccaccggcagccccttctcctccggcagcaccaggcccacggggagggggagcaagccccggtgccagaaggtctgacttccttcagaagactgggtccaactctttcacagtgcatccgagggggctgcatcgcggagcaggcgctcggctccttagcaatgggcacagtgcacccgagccacgggctggacccgctaatagattggccggatcacctcccggtagcggccagtggaagccgaaggtcgagtctggtgatcctagcctgcatccccctccgagccctggaactccatccgcaactccggcaagcccccctgcgtccgctaccccgagtcagcggcagtgtgtttctgccgcaactagcacgaatgattcgtttgaaatacgcccagcccctaaacctgttatggagacaataccacttggagacttacaggcaagggctctggcctccttaagagccaactcccgtaactcatttatggtgatcccaaaaagtaaggcttctggcgctccacctccggaggggcgacagtcagtcgaactgcccaaaggagacctgggccctgctagcccctcgcaagaactgggcagtcagcctgtccctggcggtgatggagccccagccctgggaaagagtccgctcgaggtggaagcacagtgggcagtggaagagggggcttgccctagaactgccaccgccctcgccgaccgcgcaattcggtggcagcgtcccagcagtcccccacctttcctacctgcagcgagcgaagaggccgaacctgcggaaggcttaagagttccaggccttgccaaaaattcaagggaatacgttaggcccggactccctgtgaccttcatcgatgaggttgattctgaggaggccccacaagcggcaaaacttccttacctgcctcatcccgcaaggcctctccacccggcaagaccaggatgcgtggctgaactacagcctcgtggcagcaacaccttcactgtcgtcccaaagcggaaacccggaaccctgcaggatcagcacttttcccaggctaacagagagccacgacctagggaggccgaggaggaagaggctagctgtttgttgggccctacgttaaagaagaggtatccaaccgtccacgaaatagaggtcattgggggataccttgctttgcagaaatcatgcctcactaaagctggaagttccagaaagaagatgaaaattagctttaatgataagtctctgcaaaccactttcgaatacccctcagaaagttctcttgagcaggaagaggaggtggatcagcaggaggaagaagaagaagaggaagaggaagaggaagaagaggaagaggggtcagggtccgaggagaagccgtttgccctgttcctgcctagggcgaccttcgtttcgtctgtgagacccgaatccagtaggctgccagagggctcatcaggcctcagtagttacacccccaaacacagtgtggccttcagcaagtggcaggaacaagctctggaacaagcacctagggaggccgagcctccgccagtggaggcaatgctgacaccagcgtcccagaatgacctgtccgatttcaggtccgagcccgcactgtatttttag

SEQ ID NO: 46127 - DNA, 2532 bp, Artificial Sequence
  derived and/or modified sequence
atgctgctggaggccgagcggcggcgcggcgggggcgcggcgggggcgcggctgctggagcggtaccgccgcgtgcctggcgtgcgcgccctccgcgccgacagcgtcctcatcatcgagacggtgcccggcttcccgcccgcgccgcccgccccgggggccgcgcagatccgcgccgccgaggtgctggtgtacggggcgccgcccggccgcgtcagccgcctactggagaggttcgacccgcccgccgcgccgcgccgccgcgggagccccgagcgcgcccgccccccgccgccgccgccgccgcccgcgccgccccggcccccgcccgcggcccccagcccgcccgccgcgcccgggccccgcggtggcggggcgagccccggggcccggcgcagcgacttcctccagaagaccggcagcaactccttcaccgtccacccccggggtctgcaccgcggcgcgggcgcccgcctgctctccaacgggcactcggcccctgagccccgggccggccctgccaaccgcctcgcgggctccccgcctgggtcgggacagtggaagccaaaggtggagtcgggggatccctccctccacccgccccccagccccgggaccccgagtgccactccagcctcaccccctgccagtgccactcctagccagcgccagtgcgtctccgcagccaccagcaccaacgactccttcgagatacggccggcccccaagccagttatggagaccatccccttgggggacctccaggcccgggcgctggccagcctccgcgcaaactctcgaaattctttcatggtcatccccaagagcaaggcctccggggctcctcctcctgaggggaggcagtccgtggagctgccaaagggagacctgggcccggcctccccgagccaggagctcggatcccagccggtgcctggaggggatggtgcgcctgccctcgggaagagccccctggaggtcgaggcacagtgggcagtcgaggagggggcctgtcccaggacagccaccgccctcgctgaccgggctattaggtggcagaggccgtcctcaccgccccccttcctgccggctgcttcggaagaagctgagcctgctgagggcctcagggttcctggcttggccaagaatagccgggaatatgtgaggccggggctgcctgtcaccttcatcgatgaggtagactcggaggaggccccccaagcagccaaactaccctacctcccgcaccctgccaggcctctgcaccctgccaggcccgggtgcgtggcagagcttcagccccggggcagcaacaccttcacagtggtgcccaagaggaagccagggactctgcaggaccagcacttcagtcaggccaacagggagcctcggccacgggaggccgaggaggaggaggctagttgcctcctggggcccacgttgaagaagcgctaccccaccgtgcatgagatcgaggtgattggcggctacctggccctgcagaagtcctgcctcaccaaggctggctcctcaagaaagaagatgaagatctccttcaacgacaaaagcctgcagaccacatttgagtacccttccgagagctccctagagcaggaggaagaggtggaccagcaggaggaggaggaggaggaggaggaggaagaggaagaggaggaagagggatccggctcagaggagaagccctttgcactcttcctgccccgggccacgtttgtgagcagcgtgagacccgagagctctcggctgccagagggtagctcaggcctgtccagctacaccccgaagcactctgtggccttcagcaagtggcaggagcaggcgctggagcaggccccgagggaggcagagcccccgcccgtggaggccatggtgagatgcgggggagtggagcgctggggggagtctgacacccgggcgagcccatgtgtccacattctgtcctctcactttcagctcacacccgccagtcagaatgacctctcggacttccgcagcgagccagccctgtatttctgagcccagcactgccaggaccaaggctgagcccagctgtgggagtcccggaagctgggcagtagccagggactactgcacccgcttctgccttgtttggcctcactgtatcccacccacccctcctggccctggaagcagctagggtgcctcctgccatcggggccaggtctgggtctcactccccggccctgatttgggagggtccaagggggaagtggggtggggaactgcctgtgggtgagtgccaggggcctgctgggtggtggccatctgcgacccggcagggggctgtgcagattctgcacctggccattccctgtcctgtctcctcagcctgcctcacagtggccatggggtgtcggggtgaagggctgtcccagctacttgtcctctgcaggaccctaagcccctgcccgcagcccacatgccctctgtgatgagtggcgtctttcctgcctctgatgatggactcaataaacagcactggacaaggct

SEQ ID NO: 46128 - DNA, 2718 bp, Artificial Sequence
  derived and/or modified sequence
gggggcgtggccgcggcgcccaggctggccgcggcggcggctgccactccggccctcagtccagccgtccgctgccgcgttcgcagcatggccgccctggggcggccgggctcggggccgcgcgctgcggtgcccgcttggaagcgtgagatcctggagcggaagcgggccaagctagccgcgctgggcgggggcgcggggcccggggcggcggagcccgagcagcgggtgctggccgagagcctgggcccgctgcgcgagaacccgttcatgctgctggaggccgagcggcggcgcggcgggggcgcggcgggggcgcggctgctggagcggtaccgccgcgtgcctggcgtgcgcgccctccgcgccgacagcgtcctcatcatcgagacggtgcccggcttcccgcccgcgccgcccgccccgggggccgcgcagatccgcgccgccgaggtgctggtgtacggggcgccgcccggccgcgtcagccgcctactggagaggttcgacccgcccgccgcgccgcgccgccgcgggagccccgagcgcgcccgccccccgccgccgccgccgccgcccgcgccgccccggcccccgcccgcggcccccagcccgcccgccgcgcccgggccccgcggtggcggggcgagccccggggcccggcgcagcgacttcctccagaagaccggcagcaactccttcaccgtccacccccggggtctgcaccgcggcgcgggcgcccgcctgctctccaacgggcactcggcccctgagccccgggccggccctgccaaccgcctcgcgggctccccgcctgggtcgggacagtggaagccaaaggtggagtcgggggatccctccctccacccgccccccagccccgggaccccgagtgccactccagcctcaccccctgccagtgccactcctagccagcgccagtgcgtctccgcagccaccagcaccaacgactccttcgagatacggccggcccccaagccagttatggagaccatccccttgggggacctccaggcccgggcgctggccagcctccgcgcaaactctcgaaattctttcatggtcatccccaagagcaaggcctccggggctcctcctcctgaggggaggcagtccgtggagctgccaaagggagacctgggcccggcctccccgagccaggagctcggatcccagccggtgcctggaggggatggtgcgcctgccctcgggaagagccccctggaggtcgaggcacagtgggcagtcgaggagggggcctgtcccaggacagccaccgccctcgctgaccgggctattaggtggcagaggccgtcctcaccgccccccttcctgccggctgcttcggaagaagctgagcctgctgagggcctcagggttcctggcttggccaagaatagccgggaatatgtgaggccggggctgcctgtcaccttcatcgatgaggtagactcggaggaggccccccaagcagccaaactaccctacctcccgcaccctgccaggcctctgcaccctgccaggcccgggtgcgtggcagagcttcagccccggggcagcaacaccttcacagtggtgcccaagaggaagccagggactctgcaggaccagcacttcagtcaggccaacagggagcctcggccacgggaggccgaggaggaggaggctagttgcctcctggggcccacgttgaagaagcgctaccccaccgtgcatgagatcgaggtgattggcggctacctggccctgcagaagtcctgcctcaccaaggctggctcctcaagaaagaagatgaagatctccttcaacgacaaaagcctgcagaccacatttgagtacccttccgagagctccctagagcaggaggaagaggtggaccagcaggaggaggaggaggaggaggaggaggaagaggaagaggaggaagagggatccggctcagaggagaagccctttgcactcttcctgccccgggccacgtttgtgagcagcgtgagacccgagagctctcggctgccagagggtagctcaggcctgtccagctacaccccgaagcactctgtggccttcagcaagtggcaggagcaggcgctggagcaggccccgagggaggcagagcccccgcccgtggaggccatgctcacacccgccagtcagaatgacctctcggacttccgcagcgagccagccctgtatttctgagcccagcactgccaggaccaaggctgagcccagctgtgggagtcccggaagctgggcagtagccagggactactgcacccgcttctgccttgtttggcctcactgtatcccacccacccctcctggccctggaagcagctagggtgcctcctgccatcggggccaggtctgggtctcactccccggccctgatttgggagggtccaagggggaagtggggtggggaactgcctgtgggtgagtgccaggggcctgctgggtggtggccatctgcgacccggcagggggctgtgcagattctgcacctggccattccctgtcctgtctcctcagcctgcctcacagtggccatggggtgtcggggtgaagggctgtcccagctacttgtcctctgcaggaccctaagcccctgcccgcagcccacatgccctctgtgatgagtggcgtctttcctgcctctgatgatggactcaataaacagcactggacaaggct

SEQ ID NO: 46129 - protein, 239 aa, Artificial Sequence
  derived and/or modified sequence
MSGVVPTAPEQPAGEMENQTKPPDPRPDAPPEYNSHFLPGPPGTAVPPPTGYPGGLPMGYYSPQQPSTFPLYQPVGGIHPVRYQPGKYPMPNQSVPITWMPGPTPMANCPPGLEYLVQLEVQCPPGVTIGFVAEHWNLCRAVYSIQNEKKENVMRVRGPCSTYGCGSDSVFEVKSLDGISNIGSIIRKWNGLLSAMADADHFDIHFPLDLDVKMKAMIFGACFLIDFMYFERSPPQRSR

SEQ ID NO: 46130 - protein, 224 aa, Artificial Sequence
  derived and/or modified sequence
MENQTKPPDPRPDAPPEYNSHFLPGPPGTAVPPPTGYPGGLPMGYYSPQQPSTFPLYQPVGGIHPVRYQPGKYPMPNQSVPITWMPGPTPMANCPPGLEYLVQLEVQCPPGVTIGFVAEHWNLCRAVYSIQNEKKENVMRVRGPCSTYGCGSDSVFEVKSLDGISNIGSIIRKWNGLLSAMADADHFDIHFPLDLDVKMKAMIFGACFLIDFMYFERSPPQRSR

SEQ ID NO: 46131 - DNA, 720 bp, Artificial Sequence
  derived and/or modified sequence
atgagcggagtcgtgccaactgcgcctgaacagcccgccggggagatggaaaaccaaaccaaaccacccgaccctagacccgacgctcccccagagtataatagccatttcctccccggccctcccgggacagcagtccctccccctaccgggtatcctggcggactcccaatgggctattatagtccacagcaaccttcaaccttccccttgtatcaacctgtgggtgggattcatccagttcgctaccagccaggcaaatacccgatgccaaaccaatcagtgccaattacctggatgccgggaccaacccctatggcaaactgcccacccgggctggaatatctggtgcagctcgaagtgcagtgcccccccggggtcacaatcggtttcgttgctgagcattggaatctctgccgggccgtgtacagtatccagaatgaaaagaaggagaacgtgatgagagtgcgcggaccgtgcagcacctatggttgtggtagtgattcagtatttgaggtgaagagcctggatggcatatctaatatcggctcaatcatcagaaaatggaacggactcctgagcgctatggctgacgccgaccattttgatattcattttcccctggacctcgacgttaagatgaaggcgatgatttttggcgcgtgctttttaatcgacttcatgtacttcgaacgctcccctccccagcgaagcagatag

SEQ ID NO: 46132 - DNA, 297 bp, Artificial Sequence
  derived and/or modified sequence
atgtcaggagtggtccccaccgcacctgaacagcctgccggagagatggagaaccagaccaaacctccagacccaagacccgacgctcctcctgagtataactcccactttctgccaggacctcccggcactgcagttcctccaccaactggatatccagggggccttccaatgggatactacagccctcaacaacccagcaccttccctctgtatcaaccagtgggtggaattcaccctgtgaggtatcagcccggaaagtacccgatgccgaaccagagtgtccctattacctag

SEQ ID NO: 46133 - DNA, 720 bp, Artificial Sequence
  derived and/or modified sequence
atgtctggagtggtgcccacagcccctgagcagcctgctggggagatggagaaccagaccaagcccccagaccccaggccagatgcccctcctgagtacaacagccacttcctgcccggccccccaggcacagctgtgcccccacccaccggctacccaggcggcctgcccatgggctactacagcccccagcagcccagcaccttccccctgtaccagcctgtgggcggcatccaccctgtgcgctaccagcccgggaagtaccccatgcccaaccagagcgtgcccatcacctggatgcctggccccacccccatggccaactgccccccaggcctggagtacctggtgcagctggaggtgcagtgccccccaggagtgaccatcggctttgtggccgagcactggaacctgtgcagagctgtgtacagcatccagaatgagaagaaggaaaatgtgatgagggtgcggggcccctgcagcacctacggctgcggcagtgacagcgtgtttgaggtgaagagcctggatggcatcagcaacatcggcagcatcatcaggaagtggaatggcctgctgagcgccatggctgatgctgaccactttgacatccacttccccctggacctggatgtgaagatgaaggccatgatctttggagcctgcttcctgattgacttcatgtactttgagaggagccccccccagaggagcaggtag

SEQ ID NO: 46134 - DNA, 297 bp, Artificial Sequence
  derived and/or modified sequence
atgtctggagtggtgcccacagcccctgagcagcctgctggggagatggagaaccagaccaagcccccagaccccaggccagatgcccctcctgagtacaacagccacttcctgcccggccccccaggcacagctgtgcccccacccaccggctacccaggcggcctgcccatgggctactacagcccccagcagcccagcaccttccccctgtaccagcctgtgggcggcatccaccctgtgcgctaccagcccgggaagtaccccatgcccaaccagagcgtgcccatcacctag

SEQ ID NO: 46135 - DNA, 720 bp, Artificial Sequence
  derived and/or modified sequence
atgagcggcgtggtgcccaccgcccccgagcagcccgccggcgagatggagaatcagactaaaccacctgatccccggcccgatgcgcctcctgaatataatagtcacttcctccccggccctcctgggacagccgtacctcctcctacaggataccctggtgggctgcctatgggctattactcccctcagcagccatcgacatttcctctttaccaacccgttggagggatccatccggttcggtaccagccaggcaaataccctatgcctaaccagtctgttccaatcacgtggatgcccgggccgacccctatggccaattgccccccgggtcttgaatatctcgtacagctggaagttcagtgccccccaggcgtcacaatagggtttgtcgccgagcactggaatctgtgccgggctgtttattcaattcagaatgagaagaaggaaaatgtgatgagggtcaggggcccctgcagcacctacggttgtggttctgacagtgtgtttgaagttaaaagtctggatggaatctctaacattggcagtattatccgcaagtggaacgggctgctctcggcaatggctgatgctgatcactttgacattcatttccccctagacctggatgtgaaaatgaaggccatgatattcggcgcctgctttctgatcgactttatgtactttgaacgaagcccacctcagcgctcccgatag

SEQ ID NO: 46136 - DNA, 297 bp, Artificial Sequence
  derived and/or modified sequence
atgagcggcgtggtgcccaccgcccccgagcagcccgccggcgagatggagaatcaaacaaaacctccagatccacgcccagatgcgccgccagagtataactcgcacttcctcccgggaccgcccggaactgcagtgcctcctccgaccggatacccgggcggacttcccatggggtactactcaccgcagcagccaagcacgttccctctttaccaacctgtgggtgggatccatcccgtgcgataccagccaggtaagtacccaatgccaaaccagtctgtcccgatcacatag

SEQ ID NO: 46137 - DNA, 3033 bp, Artificial Sequence
  derived and/or modified sequence
cgagacggggaagccgcgcgcggggaaggagggtccaggcgtgccggacccgcccccagaacccgcgcctagccctcccttccgcgcgcttactttgtttataacttgaaaaatcctctccgtctcccttccctgcctcctttcctttccctttcctctgccagtacaactagacccggcgtctggcgtccccggtgcccagcattctgcggggcaggcggattaattggaattcttcaaaatgtcaggtgtggtacccacagcccctgaacagcctgcaggtgaaatggaaaatcaaacaaaaccaccagatccaaggcctgatgctcctcctgaatacaattctcattttttaccaggaccccctggaacagctgtccctccacctactggctacccaggaggcttgcctatgggatactacagtccacagcaacccagtaccttccctttgtaccagccagttggtggtatccatcctgtccggtatcagcctggcaaatatcctatgccaaatcagtctgttccaataacatggatgccagggccaactcctatggcaaactgccctcctggtctggaatacttagttcagctggaggtgcagtgtcctcctggtgtcaccattggctttgttgcggaacattggaacctgtgcagggcggtgtacagcatccaaaatgagaagaaagaaaatgtgatgagagttcgtgggccatgctcaacctatggctgtggttcagattctgtttttgaggtcaaatcccttgatggcatatccaacatcggcagtattatccggaagtggaatggtttgttatcagcaatggcagatgctgaccattttgacattcacttcccactagacctggatgtgaagatgaaagccatgatttttggagcttgcttcctcattgacttcatgtattttgaaagatctccaccacaacgttcaagatagagagacacagcaagccatcaactatggttaattttgaaaaatggaaaagttggattgggcttacagtcagcactcagttatttgcaagtgtatttctttgctttgtagagtatttttattgggtgttaactttgacagctgagagtgggcttgcaagaacacaatctaaaagtgtgtttcaattgagtatctctctagtagaataggagttcatcctgaaaagctgtgactcattaacccagtaaacatatacaaagtaagcttaaaacactataaacatgagataagggaaaatgaatccagagttctcatattaataggtagtgaaacaataaggctttttagagcagactttgttggcataaaataacctggcttctatccctaaccctttcctacctttcctctccgtcaacatgtcctcatactgaagacaaacttgtttcaatgatagtcttcatttttaaaaacaaaaaggcaggcagacagaaataatgatgttttcttgcactaagaaggtactacttgtacacatatatcaaaacctcattctgcaaagtttttgaaggtttcaatgggaaatttgattttattacaaaataaaacattttttaatgttaaagtttatatattccatgcttgttttctcattcactggcatggatgatcaggagctgcctatatatgaaggcagaatcagactatcaggaaaggagctggccagggccacagccagtcaagatctctgagcaacttagagacattggtgtcattatatgaagcttgcatttaatacatttatacataatacatttgtacatttaattcataacgtctcttggtcacagatgccttatatataaaataagttgccagatctctaagattgcctagtacacctttgtatctcatttgatgtgatacccagaagagatcattgttttttgtttttgtttttgtttttttcaagaagatccttcgtgatcaccatgctgttctcatggtaagaactggagttatgtttttaaatttggaaatatgacattttatgtagcactttataaaaagtgaaagcgacaaattccaccgctgcttaatactgctttgcttctttttattgacatgatagataaatatgtatctacacagagtaataataataaaacacagtaaacattctatttctctatggtctacagcatgccagtaaataatatgtaggaccaataataaattatcaattacacatttttgtgttaactaattaaaagcatagtgtataagtgagtacactctaattaacttgcttctgttgcactttagttttctacctgcatatggactgcattttttttttttaacacagtcagtatgtagaatgggatgtattcttctgctgctgcttattaaataaagaaagcctgagtgttcttagatggggttattctgagatgagggtcttagcctacagttctttttgaaatgaaaggtgctttgttttttaattatattcatcttttcagggtaaatttgtttttctgagtttctcgtaatgctcatttttacatgctgctactagcttttttttttaaaaaaagtaaaagttgctgctttctaaaatattaattgccttatatttgaaagtgccattgcaatcgtaagtagactatgtatttcctataatgatgtctgatatttaaataggaaatcagacaaacaatattcagaaagtttaagcatataaactttttatttttaacttgcctaaatccctgtattccaaaacctgctgcatcataataaatatatctatatatatttagcataagacgtgatatttttaatttcttttttaaaaaattatatttgtctcttagagttaaaattttctttatataatattgtcatatgtcatagttttaatacaattcacatgatttctatgtttcttaatgatattttgttgtgtaaaattgatcggattgattaaaaaacaaattctctggaatttgtgcgttcatgctttttcgtattctttatggcttttaaataaatatacaatggttaatagt

SEQ ID NO: 46138 - DNA, 593 bp, Artificial Sequence
  derived and/or modified sequence
aacatttcttgactttttttaaatctcattctactacaatataaactgcagcacagtaggtggcagagtgtctgtctgcttcattgctgtactctcaacatctgtattagtgcctcgtacataataggtgctcaataagtatttttttaattaatgaagggacaaatgtaaggtaactggaggttaaaaaaattacagaaatccttacctgtgttactgagtagcaatactatttattatgtatgtattttaaaggcattaacattttttatttttcaggattaattggaattcttcaaaatgtcaggtgtggtacccacagcccctgaacagcctgcaggtgaaatggaaaatcaaacaaaaccaccagatccaaggcctgatgctcctcctgaatacaattctcattttttaccaggaccccctggaacagctgtccctccacctactggctacccaggaggcttgcctatgggatactacagtccacagcaacccagtaccttccctttgtaccagccagttggtggtatccatcctgtccggtatcagcctggcaaatatcctatgccaaatcagtctgttccaataac

SEQ ID NO: 46139 - DNA, 2839 bp, Artificial Sequence
  derived and/or modified sequence
ataacttgaaaaatcctctccgtctcccttccctgcctcctttcctttccctttcctctgccagtacaactagacccggcgtctggcgtccccggtgcccagcattctgcggggcaggcggtgtggtacccacagcccctgaacagcctgcaggtgaaatggaaaatcaaacaaaaccaccagatccaaggcctgatgctcctcctgaatacaattctcattttttaccaggaccccctggaacagctgtccctccacctactggctacccaggaggcttgcctatgggatactacagtccacagcaacccagtaccttccctttgtaccagccagttggtggtatccatcctgtccggtatcagcctggcaaatatcctatgccaaatcagtctgttccaataacatggatgccagggccaactcctatggcaaactgccctcctggtctggaatacttagttcagctggaggtgcagtgtcctcctggtgtcaccattggctttgttgcggaacattggaacctgtgcagggcggtgtacagcatccaaaatgagaagaaagaaaatgtgatgagagttcgtgggccatgctcaacctatggctgtggttcagattctgtttttgaggtcaaatcccttgatggcatatccaacatcggcagtattatccggaagtggaatggtttgttatcagcaatggcagatgctgaccattttgacattcacttcccactagacctggatgtgaagatgaaagccatgatttttggagcttgcttcctcattgacttcatgtattttgaaagatctccaccacaacgttcaagatagagagacacagcaagccatcaactatggttaattttgaaaaatggaaaagttggattgggcttacagtcagcactcagttatttgcaagtgtatttctttgctttgtagagtatttttattgggtgttaactttgacagctgagagtgggcttgcaagaacacaatctaaaagtgtgtttcaattgagtatctctctagtagaataggagttcatcctgaaaagctgtgactcattaacccagtaaacatatacaaagtaagcttaaaacactataaacatgagataagggaaaatgaatccagagttctcatattaataggtagtgaaacaataaggctttttagagcagactttgttggcataaaataacctggcttctatccctaaccctttcctacctttcctctccgtcaacatgtcctcatactgaagacaaacttgtttcaatgatagtcttcatttttaaaaacaaaaaggcaggcagacagaaataatgatgttttcttgcactaagaaggtactacttgtacacatatatcaaaacctcattctgcaaagtttttgaaggtttcaatgggaaatttgattttattacaaaataaaacattttttaatgttaaagtttatatattccatgcttgttttctcattcactggcatggatgatcaggagctgcctatatatgaaggcagaatcagactatcaggaaaggagctggccagggccacagccagtcaagatctctgagcaacttagagacattggtgtcattatatgaagcttgcatttaatacatttatacataatacatttgtacatttaattcataacgtctcttggtcacagatgccttatatataaaataagttgccagatctctaagattgcctagtacacctttgtatctcatttgatgtgatacccagaagagatcattgttttttgtttttgtttttgtttttttcaagaagatccttcgtgatcaccatgctgttctcatggtaagaactggagttatgtttttaaatttggaaatatgacattttatgtagcactttataaaaagtgaaagcgacaaattccaccgctgcttaatactgctttgcttctttttattgacatgatagataaatatgtatctacacagagtaataataataaaacacagtaaacattctatttctctatggtctacagcatgccagtaaataatatgtaggaccaataataaattatcaattacacatttttgtgttaactaattaaaagcatagtgtataagtgagtacactctaattaacttgcttctgttgcactttagttttctacctgcatatggactgcattttttttttttaacacagtcagtatgtagaatgggatgtattcttctgctgctgcttattaaataaagaaagcctgagtgttcttagatggggttattctgagatgagggtcttagcctacagttctttttgaaatgaaaggtgctttgttttttaattatattcatcttttcagggtaaatttgtttttctgagtttctcgtaatgctcatttttacatgctgctactagcttttttttttaaaaaaagtaaaagttgctgctttctaaaatattaattgccttatatttgaaagtgccattgcaatcgtaagtagactatgtatttcctataatgatgtctgatatttaaataggaaatcagacaaacaatattcagaaagtttaagcatataaactttttatttttaacttgcctaaatccctgtattccaaaacctgctgcatcataataaatatatctatatatatttagcataagacgtgatatttttaatttcttttttaaaaaattatatttgtctcttagagttaaaattttctttatataatattgtcatatgtcatagttttaatacaattcacatgatttctatgtttcttaatgatattttgttgtgtaaaattgatcggattgattaaaaaacaaattctctgg

SEQ ID NO: 46140 - DNA, 720 bp, Artificial Sequence
  derived and/or modified sequence
atgagtggcgttgttcccaccgctccagaacagccggcaggggaaatggaaaaccagacaaagccaccagaccctcgtcccgatgctccaccagaatataattcccattttttacccggaccgccaggtacagctgtccctcctcctaccggctatcccggtggcctgcccatgggctactatagtcctcagcaaccatccacctttcctctgtatcaaccagtcgggggtatccatccagttcgctatcagccgggaaagtatcctatgcccaaccagagtgttccaattacatggatgcctggacccacaccgatggcgaattgcccacctggtcttgagtacctcgttcagctggaggttcagtgccccccaggggtcactattggctttgtggcggagcactggaatttgtgcagggccgtatattccattcagaatgaaaagaaggagaatgtgatgagggtacgcggtccgtgctccacttacggatgcggctcagatagcgtgtttgaagtcaaaagtctagatgggatctcaaatatcggctctatcattcgaaagtggaatggcttgctttctgcaatggctgacgctgaccattttgatatccatttcccccttgacctggatgtgaagatgaaggctatgatctttggcgcttgttttctgattgacttcatgtacttcgagcgcagccctccccagcgatcaagatag

SEQ ID NO: 46141 - DNA, 297 bp, Artificial Sequence
  derived and/or modified sequence
atgtcaggggtggtgccaaccgccccagagcaacccgcaggggaaatggagaatcagactaaaccacctgatcctcgcccagatgcccctcctgagtataattctcacttcctgccgggacctccgggtacagccgtgcctccccctacaggataccccggtggattgcctatgggctattattctccccagcagccctcaaccttcccattgtatcagcctgtggggggaatccatcccgtacgctaccagcccggtaaatatcccatgcctaatcagagtgtacctattacctag

SEQ ID NO: 46142 - DNA, 720 bp, Artificial Sequence
  derived and/or modified sequence
atgagcggcgtggtgcccaccgcccccgagcagcccgccggcgagatggagaaccagaccaagccccccgaccccagacccgacgccccccccgagtacaacagccacttcctgcccggcccccccggcaccgccgtgcccccccccaccggctaccccggcggcctgcccatgggctactacagcccccagcagcccagcaccttccccctgtaccagcccgtgggcggcatccaccccgtgagataccagcccggcaagtaccccatgcccaaccagagcgtgcccatcacctggatgcccggccccacccccatggccaactgcccccccggcctggagtacctggtgcagctggaggtgcagtgcccccccggcgtgaccatcggcttcgtggccgagcactggaacctgtgcagagccgtgtacagcatccagaacgagaagaaggagaacgtgatgagagtgagaggcccctgcagcacctacggctgcggcagcgacagcgtgttcgaggtgaagagcctggacggcatcagcaacatcggcagcatcatcagaaagtggaacggcctgctgagcgccatggccgacgccgaccacttcgacatccacttccccctggacctggacgtgaagatgaaggccatgatcttcggcgcctgcttcctgatcgacttcatgtacttcgagagaagccccccccagagaagcagatag

SEQ ID NO: 46143 - DNA, 297 bp, Artificial Sequence
  derived and/or modified sequence
atgagcggcgtggtgcccaccgcccccgagcagcccgccggcgagatggagaaccagaccaagccccccgaccccagacccgacgccccccccgagtacaacagccacttcctgcccggcccccccggcaccgccgtgcccccccccaccggctaccccggcggcctgcccatgggctactacagcccccagcagcccagcaccttccccctgtaccagcccgtgggcggcatccaccccgtgagataccagcccggcaagtaccccatgcccaaccagagcgtgcccatcacctag

SEQ ID NO: 46144 - protein, 147 aa, Artificial Sequence
  derived and/or modified sequence
MHYYRYSNAKVSCWYKYLLFSYNIIFWNQCCGAYGPEDWDLNVYFNCSGASYSREKCGVPFSCCVPDPAQKVVNTQCGYDVRIQLKSKWDESIFTKGCIQALESWLPRNIYIVAGVFIAISLLQIFGIFLARTLISDIEAVKAGHHF

SEQ ID NO: 46145 - DNA, 444 bp, Artificial Sequence
  derived and/or modified sequence
atgcactactacagatacagcaacgccaaggtgagctgctggtacaagtacctgctgttcagctacaacatcatcttctggaaccagtgctgcggcgcctacggccccgaggactgggacctgaacgtgtacttcaactgcagcggcgccagctacagcagagagaagtgcggcgtgcccttcagctgctgcgtgcccgaccccgcccagaaggtggtgaacacccagtgcggctacgacgtgagaatccagctgaagagcaagtgggacgagagcatcttcaccaagggctgcatccaggccctggagagctggctgcccagaaacatctacatcgtggccggcgtgttcatcgccatcagcctgctgcagatcttcggcatcttcctggccagaaccctgatcagcgacatcgaggccgtgaaggccggccaccacttctag

SEQ ID NO: 46146 - DNA, 444 bp, Artificial Sequence
  derived and/or modified sequence
atgcattattataggtattctaatgctaaagtgtcatgctggtacaagtaccttctcttcagctataacatcatcttttggaatcagtgctgtggtgcctacgggcccgaggactgggatttgaatgtctacttcaactgtagcggagccagctacagccgagaaaaatgcggggtgcccttcagttgctgcgtcccagatccagcccagaaagtcgtcaatacccaatgcggttatgacgtacgcatacaactcaaatctaagtgggacgaatctatttttacgaagggatgtatccaggctctggagagctggctccctaggaacatttacatcgtggctggcgtgtttattgctattagcctgttgcaaatcttcggcatttttttggcccgaaccctaatttccgacatagaggcagttaaagccggacatcatttctag

SEQ ID NO: 46147 - DNA, 444 bp, Artificial Sequence
  derived and/or modified sequence
atgcactactaccgctacagcaatgccaaggtgtcctgctggtacaagtacctgctcttctcctacaacatcatcttctggaaccagtgctgcggggcctacggccctgaggactgggacctgaatgtgtacttcaactgcagcggggccagctacagccgggagaagtgtggggtgcccttcagctgctgcgtgcctgaccctgcccagaaggtggtgaacacccagtgtggctatgatgtgcgcatccagctgaagagcaagtgggatgagagcatcttcaccaagggctgcatccaggccctggagagctggctgcccaggaacatctacatcgtggccggggtcttcatcgccatcagcctgctgcagatcttcggcatcttcctggcccggaccctcatcagtgacatcgaggccgtgaaggccggccaccacttctag

SEQ ID NO: 46148 - DNA, 444 bp, Artificial Sequence
  derived and/or modified sequence
atgcactactaccggtacagcaacgccaaggtgagctgctggtacaagtaccttctgttctcctacaacataatcttctggaatcagtgctgcggcgcgtatgggcctgaggattgggatttgaacgtgtattttaactgcagcggggcatcgtactctcgcgagaaatgtggggtgcccttttcctgttgtgtgcctgacccggctcagaaggtagtcaacacccagtgcggctacgacgtgagaatccagcttaagtctaagtgggatgaatccatcttcacaaagggctgtattcaggctctcgagtcttggttacctcggaacatctacattgtcgccggtgtgttcatcgcgatctcccttcttcaaattttcggcatttttttggcgaggacattaatttcagatattgaggccgtgaaggctggccatcacttctag

SEQ ID NO: 46149 - DNA, 444 bp, Artificial Sequence
  derived and/or modified sequence
atgcattattatagatatagtaacgctaaagtgtcttgttggtacaaatacctactgttctcgtataatattattttctggaaccagtgctgcggtgcgtatgggcctgaagattgggacctgaatgtatacttcaattgcagcggtgcctcttattcccgggagaagtgtggggttccattctcgtgttgcgtccccgacccagcgcagaaggttgtaaatacccagtgcgggtacgacgtccgtatccagctcaaatctaaatgggatgaaagcatttttacaaaaggctgcatccaggcgttggagagttggctgcctagaaatatatatatagttgccggtgtttttatcgctatctccctcctgcagattttcgggatctttctggccaggactcttatctccgacatcgaggctgtcaaggccggacatcacttctag

SEQ ID NO: 46150 - DNA, 808 bp, Artificial Sequence
  derived and/or modified sequence
cgccgctcggacggcccgagtcgcgccctcccgccccgcgccgcggaacttgctctaacttcctcggccgagccgggccgcgccgccgctgccgccgccgcgcgcggattctgcttctcagaagatgcactattatagatactctaacgccaaggtcagctgctggtacaagtacctccttttcagctacaacatcatcttctggaaccagtgctgtggcgcatatggccctgaagactgggacctcaacgtctacttcaattgcagcggtgccagctacagccgagagaagtgcggggtccccttctcctgctgcgtgccagatcctgcgcaaaaagttgtgaacacacagtgtggatatgatgtcaggattcagctgaagagcaagtgggatgagtccatcttcacgaaaggctgcatccaggcgctggaaagctggctcccgcggaacatttacattgtggctggcgtcttcatcgccatctcgctgttgcagatatttggcatcttcctggcaaggacgctgatctcagacatcgaggcagtgaaggccggccatcacttctgaggagcagagttgagggagccgagctgagccacgctgggaggccagagcctttctctgccatcagccctacgtccagagggagaggagccgacacccccagagccagtgccccatcttaagcatcagcgtgacgtgacctctctgtttctgcttgctggtgctgaagaccaagggtcccccttgttacctgcccaaacttgtgactgcatccctctggagtctacccagagacagagaatg

SEQ ID NO: 46151 - protein, 664 aa, Artificial Sequence
  derived and/or modified sequence
MKTGLFFLCLLGTAAAIPTNARLLSDHSKPTAETVAPDNTAIPSLRAEAEENEKETAVSTEDDSHHKAEKSSVLKSKEESHEQSAEQGKSSSQELGLKDQEDSDGHLSVNLEYAPTEGTLDIKEDMSEPQEKKLSENTDFLAPGVSSFTDSNQQESITKREENQEQPRNYSHHQLNRSSKHSQGLRDQGNQEQDPNISNGEEEEEKEPGEVGTHNDNQERKTELPREHANSKQEEDNTQSDDILEESDQPTQVSKMQEDEFDQGNQEQEDNSNAEMEEENASNVNKHIQETEWQSQEGKTGLEAISNHKETEEKTVSEALLMEPTDDGNTTPRNHGVDDDGDDDGDDGGTDGPRHSASDDYFIPSQAFLEAERAQSIAYHLKIEEQREKVHENENIGTTEPGEHQEAKKAENSSNEEETSSEGNMRVHAVDSCMSFQCKRGHICKADQQGKPHCVCQDPVTCPPTKPLDQVCGTDNQTYASSCHLFATKCRLEGTKKGHQLQLDYFGACKSIPTCTDFEVIQFPLRMRDWLKNILMQLYEANSEHAGYLNEKQRNKVKKIYLDEKRLLAGDHPIDLLLRDFKKNYHMYVYPVHWQFSELDQHPMDRVLTHSELAPLRASLVPMEHCITRFFEECDPNKDKHITLKEWGHCFGIKEEDIDENLLF

SEQ ID NO: 46152 - protein, 141 aa, Artificial Sequence
  derived and/or modified sequence
MKTGLFFLCLLGTAAAIPTNARLLSDHSKPTAETVAPDNTAIPSLRAEAEENEKETAVSTEDDSHHKAEKSSVLKSKEESHEQSAEQGKSSSQELGLKDQEDSDGHLSVNLEYAPTEGTLDIKEDMSEPQEKKLSENTDFL

SEQ ID NO: 46153 - protein, 539 aa, Artificial Sequence
  derived and/or modified sequence
MSEPQEKKLSENTDFLAPGVSSFTDSNQQESITKREENQEQPRNYSHHQLNRSSKHSQGLRDQGNQEQDPNISNGEEEEEKEPGEVGTHNDNQERKTELPREHANSKQEEDNTQSDDILEESDQPTQVSKMQEDEFDQGNQEQEDNSNAEMEEENASNVNKHIQETEWQSQEGKTGLEAISNHKETEEKTVSEALLMEPTDDGNTTPRNHGVDDDGDDDGDDGGTDGPRHSASDDYFIPSQAFLEAERAQSIAYHLKIEEQREKVHENENIGTTEPGEHQEAKKAENSSNEEETSSEGNMRVHAVDSCMSFQCKRGHICKADQQGKPHCVCQDPVTCPPTKPLDQVCGTDNQTYASSCHLFATKCRLEGTKKGHQLQLDYFGACKSIPTCTDFEVIQFPLRMRDWLKNILMQLYEANSEHAGYLNEKQRNKVKKIYLDEKRLLAGDHPIDLLLRDFKKNYHMYVYPVHWQFSELDQHPMDRVLTHSELAPLRASLVPMEHCITRFFEECDPNKDKHITLKEWGHCFGIKEEDIDENLLF

SEQ ID NO: 46154 - protein, 56 aa, Artificial Sequence
  derived and/or modified sequence
MKTGLFFLCLLGTAAAIPTNARLLSDHSKPTAETVAPDNTAIPSLRAEAEENEKET

SEQ ID NO: 46155 - protein, 144 aa, Artificial Sequence
  derived and/or modified sequence
MKTGLFFLCLLGTAAAIPTNARLLSDHSKPTAETVAPDNTAIPSLRAEAEENEKETAVSTEDDSHHKAEKSSVLKSKEESHEQSAEQGKSSSQELGLKDQEDSDGHLSVNLEYAPTEGTLDIKEDMSEPQEKKLSENTDFLAPG

SEQ ID NO: 46156 - protein, 120 aa, Artificial Sequence
  derived and/or modified sequence
MKTGLFFLCLLGTAAAIPTNARLLSDHSKPTAETVAPDNTAIPSLRAEAEENEKETAVSTEDDSHHKAEKSSVLKSKEESHEQSAEQGKSSSQELGLKDQEDSDGHLSVNLEYAPTEGTL

SEQ ID NO: 46157 - protein, 127 aa, Artificial Sequence
  derived and/or modified sequence
MKTGLFFLCLLGTAAAIPTNARLLSDHSKPTAETVAPDNTAIPSLRAEAEENEKETAVSTEDDSHHKAEKSSVLKSKEESHEQSAEQGKSSSQELGLKDQEDSDGHLSVNLEYAPTEGTLDIKEDMS

SEQ ID NO: 46158 - protein, 89 aa, Artificial Sequence
  derived and/or modified sequence
MKTGLFFLCLLGTAAAIPTNARLLSDHSKPTAETVAPDNTAIPSLRAEAEENEKETAVSTEDDSHHKAEKSSVLKSKEESHEQSAEQGK

SEQ ID NO: 46159 - DNA, 270 bp, Artificial Sequence
  derived and/or modified sequence
atgaagaccggcctgttcttcctgtgcctgctgggcaccgccgccgctataccaacaaacgctcgcttactgagcgatcacagcaagccaaccgccgagacagtggccccagacaatactgcaatccctagcctccgcgcagaagccgaggagaatgaaaaagagactgccgtcagcaccgaggacgacagtcaccataaggccgagaaatccagtgtacttaagtccaaagaagagtcccacgaacagagtgctgagcagggaaagtag

SEQ ID NO: 46160 - DNA, 1995 bp, Artificial Sequence
  derived and/or modified sequence
atgaaaactgggttattttttctgtgtttactcgggacagcagcggcaattccaaccaatgcaagattactaagcgatcatagtaaacctactgctgaaaccgttgcccctgacaatacagcaattccttcactacgggctgaagctgaagagaacgagaaggagacagccgtgtctactgaagacgactcacaccacaaggctgagaaatcaagcgtcctgaaatccaaggaggaaagccatgaacagagcgcggagcagggcaagagtagctcacaagagctggggttaaaggatcaggaggatagcgatggtcatctttctgtaaacctggagtacgcgcctactgagggcacccttgatattaaagaggatatgtctgaaccccaggagaagaagctcagtgaaaatacagattttctcgctcctggcgttagttctttcaccgattctaaccagcaggagagcatcacgaagcgcgaagaaaaccaggagcaaccccgtaactatagtcatcaccagttgaaccggagctctaagcattcacaggggcttagggaccagggtaatcaagagcaagatcccaacatctcaaacggggaggaggaagaggaaaaggaacccggtgaggttggcacgcataacgacaatcaagagagaaagaccgaactcccgcgagagcacgctaattctaaacaggaggaggataatacccaaagtgatgatatcctggaagagagcgaccaaccgactcaagttagtaagatgcaggaagatgagttcgatcaggggaaccaggaacaggaggacaattctaacgctgaaatggaggaagagaatgcgagtaacgttaacaaacacatacaagaaacggaatggcagagccaggagggcaagaccggactcgaagcaatctccaaccacaaggagacggaagagaagaccgtgtcggaggccctgctaatggaaccaactgatgacggtaatacaacccccaggaaccacggcgttgacgatgacggagacgatgacggagatgatggcggtaccgacggcccaagacattcagcttctgatgactactttatcccatcccaggcattcttggaagctgagagggcccagtcaattgcctaccatctgaagatcgaagagcagcgcgagaaagtgcatgaaaacgagaatattggcacaaccgagccaggcgagcaccaggaagccaaaaaagccgaaaattccagtaatgaggaagaaacgtcgagtgagggcaacatgcgcgtgcatgcagtggactcttgcatgagcttccagtgtaagaggggccatatctgcaaggcggaccagcagggtaagccacattgcgtatgtcaggacccagtcacttgccccccaactaagcccctcgaccaggtttgcggtaccgataatcagacctacgccagcagttgtcacctctttgcgaccaagtgcaggttggagggcactaaaaaaggccatcaactccaactcgactactttggggcatgcaaatctatccctacgtgtacagatttcgaggtcattcagttcccattgaggatgagagactggcttaagaatatcctcatgcaactttacgaggctaattccgagcatgccggatatttgaatgagaagcagagaaataaggtgaagaaaatctatctcgacgagaagcgactgctcgccggagaccacccaatcgacctgcttttgcgcgattttaaaaaaaactatcacatgtacgtgtatcccgtacattggcagttctccgagttggaccagcaccccatggatcgggtgctcacccactcagaactcgccccactccgtgcatcgctggtccctatggaacactgtatcacccggttttttgaggaatgtgacccaaacaaggataagcatatcaccctgaaggaatgggggcactgtttcgggatcaaggaggaggacatagatgagaatttgctgttctag

SEQ ID NO: 46161 - DNA, 1995 bp, Artificial Sequence
  derived and/or modified sequence
atgaaaaccggactgttctttttgtgtttactgggtaccgcagccgctatacccaccaacgcacgtttgctgagtgatcattccaagccaactgctgagaccgtggccccagataacacagcaatcccttccctgagagctgaagctgaggaaaatgaaaaggaaacggctgtttcaaccgaggacgattcacaccataaggcggagaagagctctgttctaaagtccaaagaagagtcccacgaacagtcagctgagcagggtaagtcctcctcccaagagctcggcctgaaggatcaggaggactctgatggccatctctcagtgaatcttgaatatgctccaaccgaaggcaccctggatatcaaggaggacatgtctgagccccaggagaagaaactgtccgagaacacagacttcctggcgccaggggtgtctagctttaccgatagcaaccagcaggagagcatcactaaacgggaggagaaccaggagcaacctcgcaattactctcatcaccagctgaatcgctcctccaagcatagccaaggactgagagaccagggcaaccaggaacaagacccaaacatctctaacggtgaggaagaagaggaaaaagagcccggtgaggtgggcacccacaacgacaatcaggaacggaaaaccgagttaccgcgtgaacacgccaattcaaagcaagaggaggataacacacagagcgacgatatcctggaagaatctgatcaacccactcaagtctcaaagatgcaggaggacgagtttgaccaggggaaccaggaacaggaggacaacagtaatgcagaaatggaagaagaaaacgcgtctaacgtgaacaagcacatccaggagaccgagtggcagagccaggaaggcaaaacaggtttggaggccattagcaaccacaaggaaacggaggagaagacagtctccgaagccttgctcatggaaccgacagatgacggtaacacaacgcccagaaatcacggcgtggatgacgatggtgatgatgatggcgacgatggcggaacagacggccctcgtcactctgcctctgacgactatttcattccttctcaggccttcttggaggctgagcgggcacaatccatagcatatcaccttaaaatagaggagcaacgcgagaaggtgcatgagaatgagaacatcggcactaccgaacctggggaacatcaggaagccaaaaaagcggagaattctagcaatgaggaggaaacttcaagcgagggcaacatgcgagtccacgcagttgatagctgcatgagttttcagtgtaaaaggggccacatctgcaaggccgatcagcaaggaaaacctcactgcgtgtgtcaggaccctgtgacctgtccaccaaccaaaccgcttgaccaagtatgcggcaccgacaatcagacatacgccagtagctgtcatctcttcgcaaccaaatgtcggctggagggaactaaaaaggggcatcagttacagctggattacttcggtgcgtgtaaaagcatccccacatgtaccgatttcgaagtgatacaatttcctctccgcatgcgagattggttgaaaaatattttaatgcagctgtacgaagccaactccgagcatgccggatacctaaacgagaagcagcgaaataaggtcaagaagatttatctggatgagaagcgattactcgccggagaccatcctattgatctcctgctacgtgattttaagaagaactatcacatgtatgtttaccctgtgcattggcagttctctgagcttgatcagcatcctatggaccgcgtactgacccacagcgaactggctccgttgcgtgcgagtctggtccccatggagcactgcatcactagattctttgaagagtgcgatccgaataaggacaagcatataacgctgaaggagtggggccattgctttgggatcaaggaggaggacattgacgaaaatctcctgttctag

SEQ ID NO: 46162 - DNA, 426 bp, Artificial Sequence
  derived and/or modified sequence
atgaaaacagggctcttttttttgtgcttactcggaacagctgctgccattcctactaacgccaggcttttgtccgaccacagcaagccaaccgcagagactgtggcccctgacaacaccgcgataccaagcctgcgagcggaagctgaggaaaacgagaaagaaacagctgtgagcacagaggatgattcgcaccacaaggccgagaagtcatcagtgttgaaatcaaaggaggagtcccacgagcagtctgccgaacaaggtaagagttcctctcaagagctcgggttaaaggatcaggaagatagcgacggtcatttgtccgttaacctggagtatgctccaaccgagggaactcttgatataaaggaagatatgtcagagcctcaagagaaaaagctgagcgagaataccgacttcttatag

SEQ ID NO: 46163 - DNA, 1620 bp, Artificial Sequence
  derived and/or modified sequence
atgtccgagccccaggagaaaaagctgtctgagaacacggatttccttgcccctggcgtctccagttttactgattcgaaccagcaggagtctatcacaaaacgggaagagaaccaggagcaaccaaggaattactcacatcatcagttgaatcggagttccaagcacagccagggcttaagagaccaggggaatcaggaacaggacccaaatatcagtaacggcgaggaggaggaggaaaaagagcccggagaagtgggtacccacaacgacaatcaggagcggaaaacggaactgcccagggagcacgctaactcgaaacaagaggaggacaacacacagtccgacgatatattggaggagagtgaccagcccacccaagtgagcaagatgcaagaggacgagttcgatcagggcaaccaggaacaggaagacaactccaatgcagaaatggaggaggaaaacgcttccaatgtgaacaagcacatccaagagactgaatggcaaagccaagaaggaaagaccgggcttgaggccatctcaaatcacaaggagaccgaggaaaaaacggtgtcagaagcccttctcatggagcccaccgacgacggaaacaccacaccgaggaaccacggcgtggatgacgacggggatgacgacggagatgatggaggtacagatggtcctcgacacagcgcatccgacgattactttatcccatctcaggctttcctcgaggcagagcgtgctcaatctatcgcatatcacctgaaaatcgaagaacagagggaaaaggtccacgaaaacgagaatatcggtaccaccgaacccggagagcatcaggaggccaaaaaggcagaaaattcttccaatgaggaagaaacatcctccgagggcaatatgcgagtgcatgctgtcgatagttgtatgagtttccaatgtaagcgaggccatatctgcaaagcagatcagcagggcaaaccccattgcgtttgccaggatccagtcacgtgcccccctacgaaacctctcgaccaagtctgcggaaccgataatcagacttacgcctcttcatgtcatctgttcgccacaaaatgcagactggaaggcacaaaaaaaggtcaccagctgcagcttgactacttcggggcttgcaaaagcattcccacctgcacagattttgaagtcatccagttccctttgaggatgcgagactggctgaagaatattctgatgcaactctacgaagccaacagcgagcacgctggttacttgaatgaaaagcaacgaaataaagtaaaaaagatctatctggacgagaaaaggctgctggccggtgaccatccgatcgacctgctgctccgggatttcaagaagaactaccacatgtacgtgtaccctgtgcattggcagttttctgagctggaccagcacccaatggaccgggttcttacccacagcgaactggcgcctctgcgtgccagcctcgtccctatggaacactgcataaccaggttctttgaagaatgtgatcctaacaaagataaacacattactcttaaggagtggggacactgtttcggaattaaagaagaagacatcgacgagaacttgttgttctag

SEQ ID NO: 46164 - DNA, 171 bp, Artificial Sequence
  derived and/or modified sequence
atgaaaacaggcttattctttctgtgcctcctggggaccgcggcagcaatcccaaccaacgccaggcttctctctgaccacagcaaaccaaccgctgaaacagtggccccagacaacacagcgatcccatcgcttcgggcagaggccgaagagaatgagaaagagacatag

SEQ ID NO: 46165 - DNA, 1620 bp, Artificial Sequence
  derived and/or modified sequence
atgtccgagccacaagagaagaaactctccgagaacacagacttcctagcaccgggtgtgtcttctttcacggattccaatcagcaggagagcattactaagcgggaagagaaccaggagcagcccagaaattacagtcaccaccagctgaatcgaagcagcaaacacagccagggccttagggatcaggggaaccaggaacaggaccctaatatcagcaacggagaggaggaggaagaaaaggaacctggagaagtcgggacccataatgataatcaagagaggaaaaccgagctgcccagagaacatgcgaacagcaaacaggaggaggacaatactcagagcgacgacatattagaggagagtgaccaaccaacacaagttagtaagatgcaggaggatgagtttgaccaggggaaccaagaacaggaggacaacagtaacgcagagatggaggaggaaaatgcctccaacgtcaataagcacatccaggaaacagagtggcagtcccaagagggtaagacaggactggaagccattagcaaccataaagaaaccgaggagaagacagtgtctgaagccctcttaatggaacctaccgacgacgggaacacaacccctcggaatcacggggtcgatgatgacggagacgatgacggagatgacggcggtactgatggtcccagacatagtgctagtgacgactactttataccaagtcaagcattcctggaggctgagcgcgcacagtctattgcgtatcacttgaagattgaggagcagcgcgagaaggttcatgaaaatgaaaatatcggcaccaccgagcctggcgaacaccaagaggcaaagaaggcggagaatagttctaatgaggaagagacatcttctgagggcaacatgagagtccacgcagtggacagttgtatgagctttcaatgtaagcgcggtcatatatgtaaagctgatcagcaggggaaaccacattgcgtgtgccaggatcccgtcacctgcccacctaccaagccactggaccaggtctgtggtactgataaccagacctatgcgagctcctgccatctgtttgctaccaaatgtagactggaggggactaaaaagggccatcagctgcaactggattatttcggcgcttgtaagtctatccctacatgcaccgatttcgaggttatacagtttccattgagaatgagagattggctgaaaaacatattgatgcagctctatgaggccaatagtgagcacgccggttacctcaacgagaagcaacggaataaggtgaagaaaatttatttggacgagaagcgcctcctggccggtgatcacccaatcgacttgctgctccgtgacttcaagaaaaactaccacatgtatgtgtacccagtccactggcagttttcagagttagaccagcaccctatggatcgggtgctgactcacagtgagctggcaccactgagagcctccctggtcccgatggagcattgtataacccgtttttttgaagaatgtgacccaaataaagataagcacatcaccctgaaggagtgggggcactgctttggcatcaaggaggaggatatcgatgagaatctgctgttctag

SEQ ID NO: 46166 - DNA, 435 bp, Artificial Sequence
  derived and/or modified sequence
atgaagacaggattattttttctctgtctgctaggtaccgctgcagcaattcccacgaacgctcgtctgctttcagatcattcaaagcccaccgcagagaccgttgcccctgacaacacagcgattccttccctaagagcagaggcagaggagaatgagaaagagaccgccgtaagcacagaggatgattcccatcataaggccgagaagtccagtgttttgaagtcgaaagaagagtcacatgagcaaagtgcagaacaggggaagtcttcgtcccaggaacttgggctcaaagaccaggaggactctgatgggcacttatcagtgaatcttgaatatgcacctactgaaggtacactcgacatcaaagaggacatgtctgagccacaagaaaagaaattgagcgagaatacggattttctggcacccggttag

SEQ ID NO: 46167 - DNA, 363 bp, Artificial Sequence
  derived and/or modified sequence
atgaagacagggctgttttttctgtgtctgttgggcacagcggctgctatacccacaaacgctcggctactatccgatcatagtaaacccacagccgagaccgtagcacccgataatacggcaattccctccctgagagctgaagcagaagagaacgagaaggaaactgccgtgagcaccgaggacgatagccatcacaaagctgaaaagagttcggtactgaagagcaaagaagaatcgcacgaacagtccgcagagcaggggaagtctagtagtcaagaactgggcctgaaggaccaggaagacagtgatggccacctgtctgtgaatctggagtacgcccctacagaagggacactgtag

SEQ ID NO: 46168 - DNA, 384 bp, Artificial Sequence
  derived and/or modified sequence
atgaagacaggccttttctttctgtgcctcttaggcactgctgctgcaataccaacgaatgcgcgactgctgtctgaccattcgaaaccaacagccgagaccgttgccccagacaataccgctatcccctcactaagagctgaagctgaagagaacgagaaagaaacagccgtgtcgacagaggacgacagccatcacaaagctgaaaagtcctcagttctcaagagcaaggaggagtcccacgaacaatccgctgaacagggtaagtcatcgagtcaggaactggggttaaaagaccaggaggatagcgatggacatctgtcagtgaatcttgaatacgcacctactgagggtactctggacattaaagaggatatgtcatag

SEQ ID NO: 46169 - DNA, 2994 bp, Artificial Sequence
  derived and/or modified sequence
aaaaatgcataaagagccaagtgcttatattctggccaagttatgaggctctgagaacaagagcttgaggggaagactgttaaccccatccacgccaccagaattagctctttcccttttggtttgcaagcactgcctgtaaagccctcgcatgagaggccagcctgctagggaaatccaggaatctgcaacaaaaacgatgacagtctgaaatactctctggtgccaacctccaaattctcgtctgtcacttcagacccccactagttgacagagcagcagaatttcaactccagtagacttgaatatgcctctgggcaaagaagcagagctaacgaggaaagggatttaaagagtttttcttgggtgtttgtcaaacttttattccctgtctgtgtgcagaggggattcaacttcaatttttctgcagtggctctgggtccagccccttacttaaaggccataagatgttttattgaaagaaactttcaatatcaagtaatccaaccaaccttctaagataagccttttccttcaacacaaagaagtgcattttgccaaatctggaaagcatgaagactgggctttttttcctatgtctcttgggaactgcagctgcaatcccgacaaatgcaagattattatctgatcattccaaaccaactgctgaaacggtagcacctgacaacactgcaatccccagtttaagggctgaagctgaagaaaatgaaaaagaaacagcagtatccacagaagacgattcccaccataaggctgaaaaatcatcagtactaaagtcaaaagaggaaagccatgaacagtcagcagaacagggcaagagttctagccaagagctgggattgaaggatcaagaggacagtgatggtcacttaagtgtgaatttggagtatgcaccaactgaaggtacattggacataaaagaagatatgagtgagcctcaggagaaaaaactctcagagaacactgattttttggctcctggtgttagttccttcacagattctaaccaacaagaaagtatcacaaagagagaggaaaaccaagaacaacctagaaattattcacatcatcagttgaacaggagcagtaaacatagccaaggcctaagggatcaaggaaaccaagagcaggatccaaatatttccaatggagaagaggaagaagaaaaagagccaggtgaagttggtacccacaatgataaccaagaaagaaagacagaattgcccagggagcatgctaacagcaagcaggaggaagacaatacccaatctgatgatattttggaagagtctgatcaaccaactcaagtaagcaagatgcaggaggatgaatttgatcagggtaaccaagaacaagaagataactccaatgcagaaatggaagaggaaaatgcatcgaacgtcaataagcacattcaagaaactgaatggcagagtcaagagggtaaaactggcctagaagctatcagcaaccacaaagagacagaagaaaagactgtttctgaggctctgctcatggaacctactgatgatggtaataccacgcccagaaatcatggagttgatgatgatggcgatgatgatggcgatgatggcggcactgatggccccaggcacagtgcaagtgatgactacttcatcccaagccaggcctttctggaggccgagagagctcaatccattgcctatcacctcaaaattgaggagcaaagagaaaaagtacatgaaaatgaaaatataggtaccactgagcctggagagcaccaagaggccaagaaagcagagaactcatcaaatgaggaggaaacgtcaagtgaaggcaacatgagggtgcatgctgtggattcttgcatgagcttccagtgtaaaagaggccacatctgtaaggcagaccaacagggaaaacctcactgtgtctgccaggatccagtgacttgtcctccaacaaaaccccttgatcaagtttgtggcactgacaatcagacctatgctagttcctgtcatctattcgctactaaatgcagactggaggggaccaaaaaggggcatcaactccagctggattattttggagcctgcaaatctattcctacttgtacggactttgaagtgattcagtttcctctacggatgagagactggctcaagaatatcctcatgcagctttatgaagccaactctgaacacgctggttatctaaatgagaagcagagaaataaagtcaagaaaatttacctggatgaaaagaggcttttggctggggaccatcccattgatcttctcttaagggactttaagaaaaactaccacatgtatgtgtatcctgtgcactggcagtttagtgaacttgaccaacaccctatggatagagtcttgacacattctgaacttgctcctctgcgagcatctctggtgcccatggaacactgcataacccgtttctttgaggagtgtgaccccaacaaggataagcacatcaccctgaaggagtggggccactgctttggaattaaagaagaggacatagatgaaaatctcttgttttgaacgaagattttaaagaactcaactttccagcatcctcctctgttctaaccacttcagaaatatatgcagctgtgatacttgtagatttatatttagcaaaatgttagcatgtatgacaagacaatgagagtaattgcttgacaacaacctatgcaccaggtatttaacattaactttggaaacaaaaatgtacaattaagtaaagtcaacatatgcaaaatactgtacattgtgaacagaagtttaattcatagtaatttcactctctgcattgacttatgagataattaatgattaaactattaatgataaaaataatgcatttgtattgttcataatatcatgtgcacttcaagaaaatggaatgctactcttttgtggtttacgtgtattattttcaatatcttaataccctaataaagagtcc

SEQ ID NO: 46170 - DNA, 270 bp, Artificial Sequence
  derived and/or modified sequence
atgaaaaccgggctcttctttctttgcctgctgggcaccgccgcagcaatcccaactaacgctcggctcctctcggatcattccaaacctacagccgaaacggtcgcaccagacaacaccgcaatcccatccctccgcgcagaggcggaggagaatgagaaagaaacagcagtgtccacagaggacgactcacaccacaaggccgaaaaatctagcgtgctgaagagtaaggaagaaagccacgaacagtctgctgaacaggggaagtag

SEQ ID NO: 46171 - DNA, 1995 bp, Artificial Sequence
  derived and/or modified sequence
atgaaaaccggcctgttcttcttgtgtcttctgggtacagccgccgccattcctacaaatgctaggttacttagcgaccactctaagcctacagctgaaaccgtcgcccccgataacactgcaatcccatctctgcgcgctgaggctgaggagaacgagaaagagacagcggtttccacagaggatgacagtcaccacaaagctgagaaaagttctgtgcttaagtctaaggaagaatcgcacgagcagagtgccgaacagggtaagtcgtcttcccaagaattgggattaaaggaccaagaagacagtgacggccatctgtctgttaacctcgaatacgcaccaaccgaggggaccctggacatcaaagaggacatgtctgaaccacaagagaaaaaactgtctgaaaacactgattttctggccccaggagtctcctccttcactgacagtaatcaacaagagtcaataactaaaagagaagaaaaccaggagcagcccaggaattattctcaccaccaactaaaccggtccagcaaacactctcagggtctgcgtgatcaaggcaaccaggaacaggatccaaatatatctaatggagaggaagaggaggaaaaagagccgggagaggtggggactcacaacgataaccaggaaaggaaaaccgaacttccaagggagcacgccaacagtaaacaagaagaagataatacacagagcgatgacattttagaggaaagcgatcagcccacgcaggtgtccaaaatgcaggaagacgaatttgaccagggcaatcaagagcaggaggacaattcaaacgctgagatggaggaagagaacgccagtaatgtcaacaagcacatccaagagactgaatggcagtctcaggaaggcaagaccggacttgaagctatctctaatcacaaggaaacagaggaaaagacagtcagcgaagctttattgatggaaccgacggatgacggtaacacaacacctagaaatcacggcgtggatgacgacggcgacgacgatggtgacgacgggggcactgacgggcctcgccacagtgccagcgacgactattttatcccttcccaagccttcctggaggccgagcgcgcccaaagcatcgcttaccatctgaaaattgaagagcaaagggaaaaagtacacgagaacgagaacataggcaccacggagccaggggagcaccaggaagcgaaaaaagcagagaactcctctaatgaagaggaaactagcagcgagggaaacatgcgtgtgcacgctgttgactcttgcatgtcatttcagtgtaaaagaggacatatctgcaaggcagatcaacagggaaaaccccactgcgtgtgccaggatcctgtgacatgccccccaacaaagcctctggaccaggtgtgtggcactgataatcagacctacgcgtcaagttgccacctatttgctacgaaatgtcgcttggaagggaccaaaaagggacatcagttacagctggactatttcggcgcctgtaaatcaatccccacgtgtacggatttcgaagtgattcagtttcccctgcggatgagggattggctcaagaacatactgatgcagttatacgaggccaactccgagcatgccggatacctgaatgagaagcaaagaaacaaagtaaagaagatttatctagacgagaagcgcctgcttgccggagaccaccccatcgacctgcttctgagagatttcaagaaaaattatcacatgtacgtatatcctgtccactggcagttctctgagctagaccagcacccaatggatagagttctcactcactccgagctggcccccctcagggcctccctcgttccaatggaacattgtatcaccaggtttttcgaggagtgtgatcccaataaggataaacacataacgctcaaagaatggggccactgtttcggcatcaaggaagaggacattgatgagaatttgctcttttag

SEQ ID NO: 46172 - DNA, 950 bp, Artificial Sequence
  derived and/or modified sequence
ggctctgagaacaagagcttgaggggaagactgttaaccccatccacgccaccagaattagctctttcccttttggtttgcaagcactgcctgtaaagccctcgcatgagaggccagcctgctagggaaatccaggaatctgcaacaaaaacgatgacagtctgaaatactctctggtgccaacctccaaattctcgtctgtcacttcagacccccactagttgacagagcagcagaatttcaactccagtagacttgaatatgcctctgggcaaagaagcagagctaacgaggaaagggatttaaagagtttttcttgggtgtttgtcaaacttttattccctgtctgtgtgcagaggggattcaacttcaatttttctgcagtggctctgggtccagccccttacttaaaggccataagatgttttattgaaagaaactttcaatatcaagtaatccaaccaaccttctaagataagccttttccttcaacacaaagaagtgcattttgccaaatctggaaagcatgaagactgggctttttttcctatgtctcttgggaactgcagctgcaatcccgacaaatgcaagattattatctgatcattccaaaccaactgctgaaacggtagcacctgacaacactgcaatccccagtttaagggctgaagctgaagaaaatgaaaaagaaacagcagtatccacagaagacgattcccaccataaggctgaaaaatcatcagtactaaagtcaaaagaggaaagccatgaacagtcagcagaacagggcaagagttctagccaagagctgggattgaaggatcaagaggacagtgatggtcacttaagtgtgaatttggagtatgcaccaactgaaggtacattggacataaaagaagatatgagtgagcctcaggagaaaaaactctcagagaacactgattttttgg

SEQ ID NO: 46173 - DNA, 1995 bp, Artificial Sequence
  derived and/or modified sequence
atgaagactgggttgtttttcctttgcctactaggcactgccgctgcaattccaacaaacgctcgcttactcagcgatcactccaagccaactgcagaaactgtcgcccctgacaacaccgccatcccttccttgcgagccgaggccgaggagaatgagaaagaaaccgccgtctcgactgaggacgacagccatcacaaggccgagaaatcttctgtcctgaaaagtaaggaggaaagtcatgagcagtctgctgagcagggaaagtcaagcagccaggagcttggcctgaaggaccaggaagattccgatggacacttatcagttaacttggagtacgcccctacagagggaactctcgacattaaagaggacatgtccgaacctcaagagaagaagcttagtgaaaatactgactttctggccccgggagtcagctcattcactgactccaatcagcaggagagcataactaaaagggaggaaaatcaggaacagccgagaaattacagccatcatcaactgaaccgtagcagtaaacatagccaaggattgcgggaccaagggaatcaggagcaggaccccaatatcagcaatggagaggaagaggaggagaaggagcccggcgaagtgggcacccacaatgacaatcaggaacgcaaaactgaactgccaagagagcacgctaactcgaagcaggaagaggataacacacagagcgatgacatcctcgaggaatcggatcagcctacacaggtctcaaagatgcaagaagatgaatttgaccaaggcaaccaagagcaggaagataattccaacgccgagatggaagaagagaatgcctcaaacgttaataagcatatccaggaaaccgaatggcagagccaagaaggcaaaacaggactggaggccatcagtaaccataaagagaccgaagaaaaaacagtctccgaggccctactgatggagccaaccgatgatggtaacacgacaccaaggaaccacggggtcgacgacgatggggacgacgatggcgatgatggcggcacggatggacctaggcattccgccagcgacgactactttatccctagccaggcgtttttagaggctgagcgcgcccagtcaattgcctatcatctcaagatagaggaacagcgcgagaaagtgcacgaaaacgaaaatatcgggactactgaaccaggtgaacatcaagaagctaagaaagctgagaatagtagcaacgaggaagagacatcttcagagggaaatatgcgagtccatgcggtggacagttgcatgagcttccagtgtaaacgcggccacatttgtaaagccgaccagcaggggaagccgcactgcgtttgccaggacccagttacatgccccccaacaaagcccctggaccaagtatgcggcacagacaatcaaacttatgcaagtagctgccatctattcgccacaaagtgcaggctggaagggactaagaaaggccatcagttacagttagactacttcggagcctgtaaatcaatacccacatgtacagattttgaggttatacagttcccattgagaatgagagactggctaaagaacatccttatgcaattgtacgaagctaattctgagcatgccggttatctcaacgagaaacaacgaaataaagtgaaaaagatctacctcgatgagaagaggttgttggcgggggaccacccaattgacctcctgttgagagacttcaagaagaactaccacatgtacgtgtatcccgtccactggcaatttagcgagttggatcaacaccctatggaccgggtgcttactcactccgagctggcgccattacgtgccagcctagttcctatggagcactgcattacccgattttttgaggaatgcgaccccaacaaagacaagcatatcacattaaaggaatggggccattgttttggtataaaggaagaagatatcgacgaaaacctccttttttag

SEQ ID NO: 46174 - DNA, 426 bp, Artificial Sequence
  derived and/or modified sequence
atgaaaaccggattattttttctttgcttgttaggcacagccgcagcaatacccacaaacgcaagactactctcagatcactccaagccgaccgcagagacagtagctccagacaataccgccataccaagcttgcgtgcagaggccgaggaaaatgaaaaagaaactgctgtttctactgaggatgactcccatcacaaagccgaaaaatccagcgtcctgaagtcaaaagaggagtcccacgagcagagcgccgaacaaggaaaatcgagcagtcaggagctaggcctgaaagaccaggaggactctgacggtcacctgtctgttaacctagagtatgcccctacagagggcacactggacatcaaggaggacatgtccgagccccaggaaaagaagctctccgaaaacaccgattttttgtag

SEQ ID NO: 46175 - DNA, 1620 bp, Artificial Sequence
  derived and/or modified sequence
atgagtgaaccccaggagaagaagctctcggaaaatacagacttcctcgcgcccggagtgtcttcattcacagatagtaaccagcaggagtcgatcactaaacgcgaggaaaatcaagagcagccaaggaactatagtcaccatcagctgaacagaagcagcaaacatagccagggactgagagaccaggggaaccaggagcaggatccaaatattagcaacggcgaggaagaggaggaaaaggaaccaggggaagtggggactcacaacgacaaccaggaacgaaaaactgagctgccaagagagcacgcaaactccaaacaagaagaggacaacactcagtcagacgatatcctcgaggaaagcgatcagcctacccaggtctctaaaatgcaagaagacgaattcgatcagggaaatcaggaacaggaagataacagcaacgccgagatggaggaggaaaacgcatctaacgtgaacaagcatattcaagaaaccgagtggcaatcccaagagggcaagaccggcctagaagctataagcaaccacaaagagacagaggaaaagactgtgtctgaggctctgctgatggaacctacagatgatggcaatactactccccgtaaccacggtgtcgacgatgacggagacgacgacggagatgatggcggcaccgacggtccaagacattcagcttctgatgattattttatcccttcccaggcgtttctggaggctgaacgcgctcagagtattgcttatcatttaaaaattgaggaacaacgagagaaggtacacgagaatgaaaatatcggcactactgaaccaggagagcaccaagaagcgaagaaggccgagaacagtagcaatgaagaggagaccagttctgagggtaacatgagagttcacgccgtcgattcttgtatgagcttccagtgcaaaagaggccacatctgcaaagctgaccagcaggggaagcctcactgcgtttgtcaggatcctgttacatgccctccaactaaacccctggaccaggtatgtgggactgacaaccaaacttacgcttcaagttgccacctgttcgcgacaaaatgtaggctcgaggggaccaaaaaggggcaccagctgcagctagattacttcggggcctgtaaaagcatcccaacatgtacagattttgaggtcattcagttcccccttcgcatgagagactggttgaagaatatcctgatgcagctctatgaagccaatagtgagcatgcagggtatctgaatgagaaacaacgtaataaggtgaaaaagatctatcttgatgagaagaggcttcttgccggcgaccatccaatagatttgctgctgagagatttcaaaaaaaattatcatatgtacgtctatcctgtacattggcagttcagcgaattggaccagcatcccatggaccgagtcctgacacactctgagctggcgccccttcgtgcctctctggtccccatggagcattgcatcacacggttctttgaggagtgcgaccctaataaagacaagcacattacactgaaggagtggggccattgtttcggaattaaggaagaggatatagacgaaaatctgcttttttag

SEQ ID NO: 46176 - DNA, 171 bp, Artificial Sequence
  derived and/or modified sequence
atgaagaccggccttttttttctgtgcctcctcgggacagccgctgccattccaacaaatgcacgcctcctaagcgatcattctaagcctactgccgaaacagtcgcccccgataacaccgctattccatctctacgggccgaagccgaagaaaacgagaaagagacttag

SEQ ID NO: 46177 - DNA, 2463 bp, Artificial Sequence
  derived and/or modified sequence
actgcctgtaaagccctcgcatgagaggccagcctgctagggaaatccaggaatctgcaacaaaaacgatgacagtctgaaatactctctggtgccaacctccaaattctcgtctgtcacttcagacccccactagttgacagagcagcagaatttcaactccagtagacttgaatatgcctctgggcaaagaagcagagctaacgaggaaagggatttaaagagtttttcttgggtgtttgtcaaacttttattccctgtctgtgtgcagaggggattcaacttcaatttttctgcagtggctctgggtccagccccttacttaaagaagaggaaagccatgaacagtcagcagaacagggcaagagttctagccaagagctgggattgaaggatcaagaggacagtgatggtcacttaagtgtgaatttggagtatgcaccaactgaaggtacattggacataaaagaagatatgagtgagcctcaggagaaaaaactctcagagaacactgattttttggctcctggtgttagttccttcacagattctaaccaacaagaaagtatcacaaagagagaggaaaaccaagaacaacctagaaattattcacatcatcagttgaacaggagcagtaaacatagccaaggcctaagggatcaaggaaaccaagagcaggatccaaatatttccaatggagaagaggaagaagaaaaagagccaggtgaagttggtacccacaatgataaccaagaaagaaagacagaattgcccagggagcatgctaacagcaagcaggaggaagacaatacccaatctgatgatattttggaagagtctgatcaaccaactcaagtaagcaagatgcaggaggatgaatttgatcagggtaaccaagaacaagaagataactccaatgcagaaatggaagaggaaaatgcatcgaacgtcaataagcacattcaagaaactgaatggcagagtcaagagggtaaaactggcctagaagctatcagcaaccacaaagagacagaagaaaagactgtttctgaggctctgctcatggaacctactgatgatggtaataccacgcccagaaatcatggagttgatgatgatggcgatgatgatggcgatgatggcggcactgatggccccaggcacagtgcaagtgatgactacttcatcccaagccaggcctttctggaggccgagagagctcaatccattgcctatcacctcaaaattgaggagcaaagagaaaaagtacatgaaaatgaaaatataggtaccactgagcctggagagcaccaagaggccaagaaagcagagaactcatcaaatgaggaggaaacgtcaagtgaaggcaacatgagggtgcatgctgtggattcttgcatgagcttccagtgtaaaagaggccacatctgtaaggcagaccaacagggaaaacctcactgtgtctgccaggatccagtgacttgtcctccaacaaaaccccttgatcaagtttgtggcactgacaatcagacctatgctagttcctgtcatctattcgctactaaatgcagactggaggggaccaaaaaggggcatcaactccagctggattattttggagcctgcaaatctattcctacttgtacggactttgaagtgattcagtttcctctacggatgagagactggctcaagaatatcctcatgcagctttatgaagccaactctgaacacgctggttatctaaatgagaagcagagaaataaagtcaagaaaatttacctggatgaaaagaggcttttggctggggaccatcccattgatcttctcttaagggactttaagaaaaactaccacatgtatgtgtatcctgtgcactggcagtttagtgaacttgaccaacaccctatggatagagtcttgacacattctgaacttgctcctctgcgagcatctctggtgcccatggaacactgcataacccgtttctttgaggagtgtgaccccaacaaggataagcacatcaccctgaaggagtggggccactgctttggaattaaagaagaggacatagatgaaaatctcttgttttgaacgaagattttaaagaactcaactttccagcatcctcctctgttctaaccacttcagaaatatatgcagctgtgatacttgtagatttatatttagcaaaatgttagcatgtatgacaagacaatgagagtaattgcttgacaacaacctatgcaccaggtatttaacattaactttggaaacaaaaatgtacaattaagtaaagtcaacatatgcaaaatactgtacattgtgaacagaagtttaattcatagtaatttcactctctgcattgacttatgagataattaatgattaaactattaatgataaaaataatgcatttgtattgttcataatatcatgtgcacttcaagaaaatggaatgct

SEQ ID NO: 46178 - DNA, 1620 bp, Artificial Sequence
  derived and/or modified sequence
atgtctgagcctcaggaaaaaaaactgagcgagaatacggacttcctcgctcccggcgtgtcctcttttaccgattcgaatcagcaggaatccatcacaaagcgcgaggaaaaccaggagcagccacggaattactctcaccaccaacttaacagaagctccaaacactcccaaggcctccgtgaccagggcaaccaggaacaggatcctaatatctcgaacggagaggaggaggaagagaaagagccaggcgaagtgggcactcacaatgacaatcaagagcggaagaccgagctaccgcgggaacacgccaattcaaagcaagaagaggacaatacccagtcagacgacatacttgaggaaagtgaccaacccacacaagtctcaaaaatgcaagaggacgagttcgaccagggcaaccaggaacaggaagataactctaatgctgaaatggaggaagagaacgcaagcaacgttaacaagcacatccaagagacggaatggcagtcacaagaaggaaagacaggattggaggccatttcaaaccacaaagaaacagaggagaagacggtgtccgaggctctgttaatggaacctaccgatgacggcaacaccacacccaggaaccacggtgtagacgacgacggcgacgacgacggcgacgacggcgggacagacggcccaagacattccgccagcgacgattatttcataccctctcaagcatttctggaagccgaacgtgctcaaagcatagcataccacctcaaaattgaggaacagagagagaaagtccacgagaatgaaaacatagggaccacggaaccgggcgaacaccaagaggccaaaaaggccgaaaactcaagtaatgaggaggagacatctagcgaaggtaatatgcgagttcacgcagtggactcctgtatgtcgttccagtgtaaacggggacacatttgcaaggcggatcaacagggcaaaccacattgtgtgtgtcaggatcctgtgacatgtccaccaactaaacccctcgatcaggtttgtggcactgacaaccagacatatgccagcagctgccatctcttcgctactaagtgccgcctggaaggaaccaaaaagggacaccagcttcaactggactactttggggcctgcaagagcataccgacctgcactgactttgaagtgattcagtttccattgcggatgcgcgattggctcaaaaatatcctgatgcaactctatgaagctaactccgagcacgcaggttacctcaacgaaaaacaacgcaataaggtaaaaaagatttatcttgatgaaaagcgcctcctggcaggcgaccaccccatcgaccttctcctgcgagatttcaaaaaaaattatcatatgtatgtgtacccagtacactggcagttcagtgaacttgaccagcatcctatggacagggtcttaacgcactctgagctggccccactacgtgcgtccctcgtccccatggagcactgcataacccggttttttgaagaatgcgatcccaataaagataaacacattacactgaaagagtggggacattgctttgggatcaaagaggaagatatcgacgaaaatttacttttctag

SEQ ID NO: 46179 - DNA, 435 bp, Artificial Sequence
  derived and/or modified sequence
atgaaaaccggactgttctttttatgcctcttaggaactgcggcggctatccccactaacgcccggcttctgtccgatcattccaagccgaccgcagaaacagtagcccccgataataccgcaatccccagccttcgtgctgaagccgaagagaatgaaaaagaaacagccgtgagcaccgaagatgattcgcaccacaaggccgagaaaagttcagtactaaagagcaaagaagagtcccacgaacagagcgccgagcagggaaaatcatcaagtcaggaactggggttaaaagaccaagaagattcagatggccaccttagcgttaatctggagtacgccccaactgaaggcacactggacatcaaggaagacatgtccgagcctcaggaaaaaaaattaagcgagaataccgattttctagcacctggatag

SEQ ID NO: 46180 - DNA, 363 bp, Artificial Sequence
  derived and/or modified sequence
atgaagaccggactatttttcctctgtctgctgggaaccgcagctgctattcctaccaacgccagattgctgtccgatcattccaaaccgaccgcagaaacggtggcccctgacaatacggcaatcccatcgctcagggccgaggcagaagaaaatgaaaaggaaactgctgtctctaccgaagatgattctcaccataaggcagagaaaagctctgtgctgaagtctaaagaggaatcccatgaacaaagcgccgaacaaggaaagtcttcatctcaagaattaggcttgaaggaccaggaagactcagacggccacctgtcagtaaacttggaatatgcaccaaccgaaggaaccctgtag

SEQ ID NO: 46181 - DNA, 384 bp, Artificial Sequence
  derived and/or modified sequence
atgaagaccggactgttttttttatgccttcttggcactgccgcagccatacctacaaacgcccgcctgttgtctgaccatagtaagcccaccgccgagaccgtagccccagataacactgctattccaagcctgcgcgcagaggctgaggagaacgagaaggagaccgcagtttcaaccgaagatgattcccaccacaaagccgaaaaaagctccgttctgaagagcaaagaagaatcgcatgaacaaagtgccgagcaggggaagagctcaagccaggagttaggattgaaggatcaagaggattcagacggccatctgagcgttaacctcgagtacgcacctaccgagggaacacttgacataaaagaggacatgagttag

SEQ ID NO: 46182 - DNA, 270 bp, Artificial Sequence
  derived and/or modified sequence
atgaagactggcctgtttttcctgtgcctcctgggtacggctgccgccattcccacgaacgctcgacttctgtctgaccattccaagcccactgccgagaccgtggcccccgataatactgcaatcccgagtctgagagccgaagccgaggagaatgagaaagaaactgccgtctcaacagaagacgactctcaccacaaggcagagaaatcatcggtgctcaagtccaaagaggaaagtcacgaacaatccgctgagcaaggaaagtag

SEQ ID NO: 46183 - DNA, 1995 bp, Artificial Sequence
  derived and/or modified sequence
atgaaaacgggcttatttttcttatgtttgctagggaccgctgctgcaatccccaccaacgccaggttgctgtccgatcactctaaacctaccgccgaaactgtagctccagacaacaccgcgatccccagcctgcgggcagaggcagaagaaaacgaaaaagaaaccgcagtgagtacagaagatgactctcatcacaaggccgagaagtcctccgtgctgaagtcgaaggaggagtcacatgaacagtccgccgagcagggaaaatcatcatcacaagagcttggactcaaggatcaggaagacagcgatggccatttgtcggtcaacttggaatatgcacccacagagggaacattggatatcaaagaggatatgagtgaaccccaagagaaaaaactctcagagaacacagactttttagcgccaggcgtgtcatcatttaccgatagcaaccagcaggaatctattactaagcgcgaagaaaaccaggagcagccaagaaattatagccaccaccagttgaacagatcttccaagcacagtcagggtctgagagatcagggtaatcaggagcaggatccaaatatctcaaacggagaagaggaagaggaaaaagaaccaggtgaagtaggaacccacaacgacaatcaggagagaaagaccgaacttccacgggagcacgccaactctaagcaagaagaagataacacacagagcgacgacatcttggaagagagtgatcagcccacacaggtgagcaaaatgcaggaagacgaattcgaccaagggaatcaggaacaggaggataatagtaatgccgaaatggaggaagaaaatgctagtaatgtcaataagcatattcaggaaacagagtggcagtcccaggaagggaaaacaggacttgaagcaatcagcaaccataaggagaccgaagaaaagacagttagcgaagcgttgttgatggagcctacagatgacggcaatactacgccgcgcaaccacggtgtcgatgacgacggagatgatgacggggatgatggcggcacagacggacccaggcactcagcttcagatgactatttcattccctcacaagctttcctcgaagccgaacgggcccaatctattgcgtaccatctgaaaattgaggagcagagggagaaagtacatgagaatgagaatatcgggactacagagcccggcgagcatcaggaagccaaaaaggcagagaattcgagtaacgaggaagagactagttctgagggcaacatgagagtccatgctgttgactcttgcatgtcattccagtgtaaaaggggccacatctgtaaagcagaccaacagggaaaaccacactgtgtttgccaggaccctgtgacatgccctcctactaaaccactggaccaagtatgcggaactgacaaccaaacatatgcatccagctgtcatctgttcgcaaccaaatgcagactagagggtacaaagaagggccaccagctccaacttgattatttcggcgcttgcaaaagtatcccaacttgtaccgactttgaggttatccaatttccccttaggatgcgagactggctgaagaacatcctgatgcaattgtacgaggccaacagcgagcatgcagggtacctgaatgaaaaacaaaggaataaggtaaagaaaatatacctcgatgaaaagcgactactcgccggcgaccatcctatcgatctgctcctcagggactttaaaaaaaattatcatatgtacgtctatcccgttcactggcagttcagtgagctcgaccaacatcccatggaccgggtcttgacacattcagaacttgccccacttagagcttcgctagtacccatggagcactgcattacacgatttttcgaagagtgcgaccctaataaggacaaacacatcacattgaaagaatggggacactgttttggcataaaagaggaagatattgacgagaacctgctcttttag

SEQ ID NO: 46184 - DNA, 1995 bp, Artificial Sequence
  derived and/or modified sequence
atgaagacaggactgttcttcctttgcctgctaggcaccgctgcagctatcccaaccaacgcgagactcttatccgatcactctaaacctaccgccgaaactgtggcccccgacaacacagccatcccaagtctgcgcgccgaagccgaagagaatgaaaaagaaaccgccgtgagcacagaggatgactcccaccacaaagctgaaaaatccagtgtcctgaagtctaaagaagagtcacacgaacaaagcgctgagcagggcaagtcctccagtcaggaactggggctcaaggatcaagaggattccgatggtcacctgtccgtgaatctggaatatgccccaacagagggaacactcgatatcaaggaagacatgtccgagccccaggaaaaaaaacttagcgaaaatactgactttctcgcccccggcgtcagttcctttacggactcgaaccagcaagaatctataacaaagagagaggaaaatcaagagcagcctagaaattattcccaccatcagttaaatagatcatctaaacatagccaggggttgagagaccaggggaaccaggagcaggaccccaatatcagcaacggagaggaggaagaagaaaaggagccgggagaggtaggaacacacaacgataaccaggaaagaaagacggaactgcccagagaacacgcaaacagtaagcaggaagaggataatacgcagagtgacgacatattggaggaaagcgatcaacccacacaggtgagtaaaatgcaggaggatgagtttgatcagggtaatcaagagcaggaggataattctaacgcggagatggaggaggaaaacgcttctaatgtcaataaacacatccaggaaacagagtggcaaagccaggaaggaaagacaggtctggaggcaatatcaaaccacaaagaaacagaagagaaaaccgtttctgaagcactgttaatggagccgaccgacgacgggaatacaaccccccggaaccatggggtggatgacgatggggatgacgacggcgatgacgggggtacagatggcccaaggcatagcgctagcgatgattactttattccttctcaggcttttctagaagctgaacgcgcacagagtatcgcatatcatcttaagatcgaggaacaacgggagaaagtacatgaaaacgaaaatatcgggaccacggaaccaggtgaacatcaagaagctaagaaagctgagaatagtagcaacgaggaagagacatcttcagagggaaatatgcgagtccatgcggtggacagttgcatgagcttccagtgtaaacgcggccacatttgtaaagccgaccagcaggggaagccgcactgcgtttgccaggacccagttacatgccccccaacaaagcccctggaccaagtatgcggcacagacaatcaaacttatgcaagtagctgccatctattcgccacaaagtgcaggctggaagggactaagaaaggccatcagttacagctggattacttcggagcctgtaaatcgataccaacatgtactgattttgaagttattcaattccccctgagaatgcgagactggctcaagaatatcctgatgcagttgtacgaagctaatagcgagcacgccggctatcttaacgaaaaacagcgcaacaaagtgaagaaaatttatcttgatgagaaacgtttgttggcaggcgaccaccccatcgatcttctgctgcgagatttcaaaaagaattatcacatgtacgtataccccgtgcattggcaattttccgagcttgatcagcaccccatggatagggtgctcacccactctgaacttgccccactccgcgcctctttagttccgatggaacattgcatcacccgtttttttgaagaatgcgatccaaacaaagataaacacattaccctcaaggaatggggccattgtttcggcatcaaggaggaagacattgatgaaaacctgcttttctag

SEQ ID NO: 46185 - DNA, 568 bp, Artificial Sequence
  derived and/or modified sequence
actgcctgtaaagccctcgcatgagaggccagcctgctagggaaatccaggaatctgcaacaaaaacgatgacagtctgaaatactctctggtgccaacctccaaattctcgtctgtcacttcagacccccactagttgacagagcagcagaatttcaactccagtagacttgaatatgcctctgggcaaagaagcagagctaacgaggaaagggatttaaagagtttttcttgggtgtttgtcaaacttttattccctgtctgtgtgcagaggggattcaacttcaatttttctgcagtggctctgggtccagccccttacttaaagttattcaatctcctgagcctaacagcaatgtagaaacggaactttttgcttttccaaaagatctggaaagcatgaagactgggctttttttcctatgtctcttgggaactgcagctgcaatcccgacaaatgcaagattattatctgatcattccaaaccaactgctgaaacggtagcacctgacaacactgcaatccccagtttaagggctgaagctgaagaaaatgaaaaagaaacag

SEQ ID NO: 46186 - DNA, 426 bp, Artificial Sequence
  derived and/or modified sequence
atgaaaaccggattattttttctttgcttgttaggcacagccgcagcaatacccacaaacgcaagactactctcagatcactccaagccgaccgcagagacagtagctccagacaataccgccataccaagcttgcgtgcagaggccgaggaaaatgaaaaagaaactgctgtttctactgaggatgactcccatcacaaagccgaaaaatccagcgtcctgaagtcaaaagaggagtcccacgagcagagcgccgaacaaggaaaatcgagcagtcaggagctaggcctgaaagaccaggaggatagtgacggccatttgagcgtcaatctggagtatgcacctaccgaggggaccttagacatcaaggaagacatgagtgaaccacaggagaagaaactgagcgagaacacagactttctgtag

SEQ ID NO: 46187 - DNA, 1620 bp, Artificial Sequence
  derived and/or modified sequence
atgagcgagccacaggaaaagaaactaagcgagaacactgactttttagctcccggcgtgagtagcttcacagacagcaaccaacaggagtccatcacaaaaagggaggaaaatcaggagcaacccaggaattacagtcaccatcagcttaataggtcgagcaagcactcacaggggctgagggatcaaggcaatcaggagcaggacccaaatattagcaatggcgaagaggaggaggaaaaagaacccggtgaagtaggcacacacaacgataatcaggagcggaaaactgagttgcctcgagaacatgcaaacagcaaacaagaagaggacaacactcagtctgacgacatcctggaggagtccgatcagccaacacaagtgtcgaagatgcaagaagacgagtttgatcagggtaatcaggagcaagaggacaattcaaatgcggaaatggaggaggaaaacgccagtaacgttaataaacacattcaggaaacagagtggcaatcacaggaggggaaaaccggactagaggccattagcaaccacaaggaaaccgaagaaaagaccgtaagcgaggctttactcatggaaccaactgacgacggcaataccacacctagaaatcacggcgtagacgatgacggggatgatgatggagatgacggaggcacagacggcccaagacactctgcgtctgatgattattttatccctagtcaggcgtttcttgaagccgaaagagcccagtccatcgcgtatcatctgaaaattgaggaacaacgggagaaagtgcatgaaaatgagaatataggaaccacagagcctggagaacatcaggaagccaaaaaggctgagaacagcagcaacgaagaagagacgagctctgaaggcaacatgcgcgtccacgcagttgattcctgcatgagcttccagtgtaagcgtggtcacatctgcaaagcggatcaacaagggaagccccactgcgtatgccaggacccagttacctgccctccaaccaaaccgctcgaccaggtttgcggaaccgacaaccaaacctacgcctcatcatgccatctatttgccacaaagtgcaggctggaaggaacaaagaaaggccatcagctgcaattggactatttcggcgcatgcaaatctatacctacttgcacggactttgaggtgatacagtttccattgcgcatgagagactggttgaagaacatacttatgcagttatacgaggcgaattctgaacatgctgggtacctaaatgaaaagcaacgcaacaaggtgaagaagatctatctggacgaaaaacggttactggcaggggaccatccaatcgaccttctgctgcgagatttcaagaaaaactatcacatgtacgtgtaccccgtccattggcagttctccgagcttgaccaacatcccatggatcgagtactgacccactccgaactcgccccactgagagcaagtctagttccaatggagcactgtatcactagattctttgaggaatgcgatccaaataaagacaaacacatcactctgaaagaatggggacactgttttggtattaaggaggaggacattgatgagaacctgctgttttag

SEQ ID NO: 46188 - DNA, 1620 bp, Artificial Sequence
  derived and/or modified sequence
atgtccgaaccccaggagaaaaaacttagcgaaaacaccgatttcttagctcccggagttagtagttttaccgattccaaccagcaggaatctatcaccaaaagagaagaaaaccaagaacagcccagaaattatagccatcatcagttgaacaggagctcgaagcacagccaaggcttaagggaccaaggcaaccaggaacaggaccccaatatatcaaatggcgaagaggaagaggagaaggaacccggagaggtaggaactcataatgataatcaggagcgaaagacggagctgccccgggagcatgccaatagcaagcaggaagaagataacactcaaagcgacgacattctggaggaatcagatcagcctacacaggtcagcaagatgcaagaagacgaatttgaccaagggaaccaagaacaagaagataacagcaacgcagagatggaagaagaaaatgcatctaacgttaataaacacatccaagagaccgagtggcagtcccaggaaggtaaaactggactggaggcaatctcaaaccataaggaaacagaagaaaagaccgtgtccgaagccctgctgatggaacctaccgacgacggaaacacaactccaagaaaccacggagtagacgacgatggtgacgacgatggtgatgacgggggtacagacggaccacggcattcagctagtgatgactactttatcccctcacaggcatttttagaggccgaaagggcacaatctatcgcttaccacttgaagatcgaagagcagagagagaaagtgcacgagaacgagaacattggtacaactgagcccggcgagcaccaggaggcgaaaaaggccgagaattcctccaacgaagaagaaacaagttccgaaggtaacatgagagtgcacgcggttgattcctgcatgtcctttcaatgcaagcgagggcacatctgcaaggctgaccagcaaggaaaaccgcactgtgtgtgccaggaccctgttacttgccccccaactaagccattagatcaggtatgtggcaccgacaaccagacctatgcctcctcatgtcatctcttcgctactaagtgtcgcctcgaagggaccaagaaaggccaccaacttcagttagactacttcggcgcctgcaagtccattccaacctgtacagatttcgaagtgatccagttcccacttcgcatgagggactggctcaaaaacattttgatgcaactctatgaagccaactcagagcacgcgggatatttgaacgaaaaacagaggaacaaagtgaaaaaaatctatctcgacgagaaacgcctgctagccggcgatcaccctatcgacttgcttttgagagactttaaaaagaattatcacatgtatgtctacccagtacactggcaattttcagaacttgatcagcatcccatggatcgagtgctcacacattccgaactggcccccctgcgagctagccttgtgccgatggaacattgtattactagattttttgaagaatgtgatccgaataaagataagcatattacactgaaagagtgggggcattgttttggaattaaagaagaggacattgacgagaatcttctgttttag

SEQ ID NO: 46189 - DNA, 435 bp, Artificial Sequence
  derived and/or modified sequence
atgaaaacagggttattttttctgtgtttgctcgggactgcagccgctatacctaccaatgcccgcttgttgtctgatcattccaagccgactgcagagaccgtggccccggacaacaccgcaattccctccttaagagcagaagccgaagaaaacgaaaaagaaaccgctgtgagtacagaggacgatagtcatcacaaagccgaaaagtcatcagtgctgaagagtaaggaagaaagtcatgagcagagcgctgaacaaggcaagtcaagctcacaagaattggggctgaaggatcaggaggatagcgatggacatctgagcgtcaatttggaatatgcccccacagaaggaacccttgacattaaagaggatatgagcgaacctcaggaaaagaaacttagcgagaacacggatttcttggcaccagggtag

SEQ ID NO: 46190 - DNA, 363 bp, Artificial Sequence
  derived and/or modified sequence
atgaagacgggccttttctttctgtgccttcttggcaccgctgctgcgatacccaccaacgctcgcctcttgtcagatcattcaaaacctacagctgagaccgtcgcccctgacaacacagctataccttcactgagagccgaggccgaagagaatgaaaaagaaacggccgtcagcaccgaagatgattcacatcataaggccgaaaaatctagtgtactcaagagtaaggaagaatctcatgaacaatcagccgagcagggaaagtcatcctctcaggagctaggactgaaagaccaggaagactcagacggccacctgtcagtaaacttggaatatgcaccaaccgaaggaaccctgtag

SEQ ID NO: 46191 - DNA, 384 bp, Artificial Sequence
  derived and/or modified sequence
atgaagaccggactgttttttttatgccttcttggcactgccgcagccatacctacaaacgcccgcctgttgtctgaccatagtaagcccaccgccgagaccgtagccccagataacactgctattccaagcctgcgcgcagaggctgaggagaacgagaaggagaccgcagtttcaaccgaagatgattcccaccacaaagccgaaaaaagctccgttctgaagagcaaagaagaatcgcatgaacaaagtgccgagcaggggaagagctcaagccaggagttaggattgaaggatcaagaagacagcgacggccacctcagcgtgaatcttgaatacgccccaacagaaggcaccctggacattaaggaggatatgagttag

SEQ ID NO: 46192 - DNA, 2520 bp, Artificial Sequence
  derived and/or modified sequence
aacttcaatttttctgcagtggctctgggtccagccccttacttaaagatctggaaagcatgaagactgggctttttttcctatgtctcttgggaactgcagctgcaatcccggtgaaaaggagataagaagcaaaggagcaaaccaaacctaatatgaatcctgtactttggccagaagccgtggctcacatctgtaatcccagcactttgggaggccaagacaaatgcaagattattatctgatcattccaaaccaactgctgaaacggtagcacctgacaacactgcaatccccagtttaagggctgaagctgaagaaaatgaaaaagaaacagcagtatccacagaagacgattcccaccataaggctgaaaaatcatcagtactaaagtcaaaagaggaaagccatgaacagtcagcagaacagggcaagagttctagccaagagctgggattgaaggatcaagaggacagtgatggtcacttaagtgtgaatttggagtatgcaccaactgaaggtacattggacataaaagaagatatgagtgagcctcaggagaaaaaactctcagagaacactgattttttggctcctggtgttagttccttcacagattctaaccaacaagaaagtatcacaaagagagaggaaaaccaagaacaacctagaaattattcacatcatcagttgaacaggagcagtaaacatagccaaggcctaagggatcaaggaaaccaagagcaggatccaaatatttccaatggagaagaggaagaagaaaaagagccaggtgaagttggtacccacaatgataaccaagaaagaaagacagaattgcccagggagcatgctaacagcaagcaggaggaagacaatacccaatctgatgatattttggaagagtctgatcaaccaactcaagtaagcaagatgcaggaggatgaatttgatcagggtaaccaagaacaagaagataactccaatgcagaaatggaagaggaaaatgcatcgaacgtcaataagcacattcaagaaactgaatggcagagtcaagagggtaaaactggcctagaagctatcagcaaccacaaagagacagaagaaaagactgtttctgaggctctgctcatggaacctactgatgatggtaataccacgcccagaaatcatggagttgatgatgatggcgatgatgatggcgatgatggcggcactgatggccccaggcacagtgcaagtgatgactacttcatcccaagccaggcctttctggaggccgagagagctcaatccattgcctatcacctcaaaattgaggagcaaagagaaaaagtacatgaaaatgaaaatataggtaccactgagcctggagagcaccaagaggccaagaaagcagagaactcatcaaatgaggaggaaacgtcaagtgaaggcaacatgagggtgcatgctgtggattcttgcatgagcttccagtgtaaaagaggccacatctgtaaggcagaccaacagggaaaacctcactgtgtctgccaggatccagtgacttgtcctccaacaaaaccccttgatcaagtttgtggcactgacaatcagacctatgctagttcctgtcatctattcgctactaaatgcagactggaggggaccaaaaaggggcatcaactccagctggattattttggagcctgcaaatctattcctacttgtacggactttgaagtgattcagtttcctctacggatgagagactggctcaagaatatcctcatgcagctttatgaagccaactctgaacacgctggttatctaaatgagaagcagagaaataaagtcaagaaaatttacctggatgaaaagaggcttttggctggggaccatcccattgatcttctcttaagggactttaagaaaaactaccacatgtatgtgtatcctgtgcactggcagtttagtgaacttgaccaacaccctatggatagagtcttgacacattctgaacttgctcctctgcgagcatctctggtgcccatggaacactgcataacccgtttctttgaggagtgtgaccccaacaaggataagcacatcaccctgaaggagtggggccactgctttggaattaaagaagaggacatagatgaaaatctcttgttttgaacgaagattttaaagaactcaactttccagcatcctcctctgttctaaccacttcagaaatatatgcagctgtgatacttgtagatttatatttagcaaaatgttagcatgtatgacaagacaatgagagtaattgcttgacaacaacctatgcaccaggtatttaacattaactttggaaacaaaaatgtacaattaagtaaagtcaacatatgcaaaatactgtacattgtgaacagaagtttaattcatagtaatttcactctctgcattgacttatgagataattaatgattaaactattaatgataaaaataatgcatttgtattgttcataatatcatgtgcacttcaaga

SEQ ID NO: 46193 - DNA, 583 bp, Artificial Sequence
  derived and/or modified sequence
attgtctgaggcaaaaagacatcaagtcctttcatgctgtcctgggaaaggcggtttggaacaagttatcctgattctagagacaggggattcaacttcaatttttctgcagtggctctgggtccagccccttacttaaagatctggaaagcatgaagactgggctttttttcctatgtctcttgggaactgcagctgcaatcccgacaaatgcaagattattatctgatcattccaaaccaactgctgaaacggtagcacctgacaacactgcaatccccagtttaagggctgaagctgaagaaaatgaaaaagaaacagcagtatccacagaagacgattcccaccataaggctgaaaaatcatcagtactaaagtcaaaagaggaaagccatgaacagtcagcagaacagggcaagagttctagccaagagctgggattgaaggatcaagaggacagtgatggtcacttaagtgtgaatttggagtatgcaccaactgaaggtacattggacataaaagaagatatgagtgagcctcaggagaaaaaactctcagagaacactgattttttggctcctgg

SEQ ID NO: 46194 - DNA, 587 bp, Artificial Sequence
  derived and/or modified sequence
aaaaagacatcaagtcctttcatgctgtcctgggaaaggcggtttggaacaagttatcctgattctagagacgatgcaaagcactgtgctaggcaccaggagaatgcagaaagggcacatccccttccttcaaggagtttacagctttctcagaagcagaggggattcaacttcaatttttctgcagtggctctgggtccagccccttacttaaagatctggaaagcatgaagactgggctttttttcctatgtctcttgggaactgcagctgcaatcccgacaaatgcaagattattatctgatcattccaaaccaactgctgaaacggtagcacctgacaacactgcaatccccagtttaagggctgaagctgaagaaaatgaaaaagaaacagcagtatccacagaagacgattcccaccataaggctgaaaaatcatcagtactaaagtcaaaagaggaaagccatgaacagtcagcagaacagggcaagagttctagccaagagctgggattgaaggatcaagaggacagtgatggtcacttaagtgtgaatttggagtatgcaccaactgaaggtacattg

SEQ ID NO: 46195 - DNA, 561 bp, Artificial Sequence
  derived and/or modified sequence
taaagttattcaatctcctgagcctaacagcaatgtagaaacggaactttttgcttttccaaaaggccataagatgttttattgaaagaaactttcaatatcaagtaatccaaccaaccttctaagataagccttttccttcaacacaaagaagtgcattttgccaaatctggaaagcatgaagactgggctttttttcctatgtctcttgggaactgcagctgcaatcccgacaaatgcaagattattatctgatcattccaaaccaactgctgaaacggtagcacctgacaacactgcaatccccagtttaagggctgaagctgaagaaaatgaaaaagaaacagcagtatccacagaagacgattcccaccataaggctgaaaaatcatcagtactaaagtcaaaagaggaaagccatgaacagtcagcagaacagggcaagagttctagccaagagctgggattgaaggatcaagaggacagtgatggtcacttaagtgtgaatttggagtatgcaccaactgaaggtacattggacataaaagaagatatgagtga

SEQ ID NO: 46196 - DNA, 583 bp, Artificial Sequence
  derived and/or modified sequence
actagttgacagagcagcagaatttcaactccagtagacttgaatatgcctctgggcaaagaagcagagctaacgaggaaagggatttaaagagtttttcttgggtgtttgtcaaacttttattccctgtctgtgtgcagaggggattcaacttcaatttttctgcagtggctctgggtccagccccttacttaaaggtattaaaggtcactctgcaagagaaaaaaagaaaagaaaggaaaagaaaagaaaaaaaaacatgcttttaactgcagatcaatactgttgaaacagtacaccaagagatctggaaagcatgaagactgggctttttttcctatgtctcttgggaactgcagctgcaatcccgacaaatgcaagattattatctgatcattccaaaccaactgctgaaacggtagcacctgacaacactgcaatccccagtttaagggctgaagctgaagaaaatgaaaaagaaacagcagtatccacagaagacgattcccaccataaggctgaaaaatcatcagtactaaagtcaaaagaggaaagccatgaacagtcagcagaacagggcaag

SEQ ID NO: 46197 - DNA, 2906 bp, Artificial Sequence
  derived and/or modified sequence
aaaaaatgcataaagagccaagtgcttatattctggccaagttatgaggctctgagaacaagagcttgaggggaagactgttaaccccatccacgccaccagaattagctctttcccttttggtttgcaagcactgcctgtaaagccctcgcatgagaggccagcctgctagggaaatccaggaatctgcaacaaaaacgatgacagtctgaaatactctctggtgccaacctccaaattctcgtctgtcacttcagacccccactagttgacagagcagcagaatttcaactccagtagacttgaatatgcctctgggcaaagaagcagagctaacgaggaaagggatttaaagagtttttcttgggtgtttgtcaaacttttattccctgtctgtgtgcagaggggattcaacttcaatttttctgcagtggctctgggtccagccccttacttaaagatctggaaagcatgaagactgggctttttttcctatgtctcttgggaactgcagctgcaatcccgacaaatgcaagattattatctgatcattccaaaccaactgctgaaacggtagcacctgacaacactgcaatccccagtttaagggctgaagctgaagaaaatgaaaaagaaacagcagtatccacagaagacgattcccaccataaggctgaaaaatcatcagtactaaagtcaaaagaggaaagccatgaacagtcagcagaacagggcaagagttctagccaagagctgggattgaaggatcaagaggacagtgatggtcacttaagtgtgaatttggagtatgcaccaactgaaggtacattggacataaaagaagatatgagtgagcctcaggagaaaaaactctcagagaacactgattttttggctcctggtgttagttccttcacagattctaaccaacaagaaagtatcacaaagagagaggaaaaccaagaacaacctagaaattattcacatcatcagttgaacaggagcagtaaacatagccaaggcctaagggatcaaggaaaccaagagcaggatccaaatatttccaatggagaagaggaagaagaaaaagagccaggtgaagttggtacccacaatgataaccaagaaagaaagacagaattgcccagggagcatgctaacagcaagcaggaggaagacaatacccaatctgatgatattttggaagagtctgatcaaccaactcaagtaagcaagatgcaggaggatgaatttgatcagggtaaccaagaacaagaagataactccaatgcagaaatggaagaggaaaatgcatcgaacgtcaataagcacattcaagaaactgaatggcagagtcaagagggtaaaactggcctagaagctatcagcaaccacaaagagacagaagaaaagactgtttctgaggctctgctcatggaacctactgatgatggtaataccacgcccagaaatcatggagttgatgatgatggcgatgatgatggcgatgatggcggcactgatggccccaggcacagtgcaagtgatgactacttcatcccaagccaggcctttctggaggccgagagagctcaatccattgcctatcacctcaaaattgaggagcaaagagaaaaagtacatgaaaatgaaaatataggtaccactgagcctggagagcaccaagaggccaagaaagcagagaactcatcaaatgaggaggaaacgtcaagtgaaggcaacatgagggtgcatgctgtggattcttgcatgagcttccagtgtaaaagaggccacatctgtaaggcagaccaacagggaaaacctcactgtgtctgccaggatccagtgacttgtcctccaacaaaaccccttgatcaagtttgtggcactgacaatcagacctatgctagttcctgtcatctattcgctactaaatgcagactggaggggaccaaaaaggggcatcaactccagctggattattttggagcctgcaaatctattcctacttgtacggactttgaagtgattcagtttcctctacggatgagagactggctcaagaatatcctcatgcagctttatgaagccaactctgaacacgctggttatctaaatgagaagcagagaaataaagtcaagaaaatttacctggatgaaaagaggcttttggctggggaccatcccattgatcttctcttaagggactttaagaaaaactaccacatgtatgtgtatcctgtgcactggcagtttagtgaacttgaccaacaccctatggatagagtcttgacacattctgaacttgctcctctgcgagcatctctggtgcccatggaacactgcataacccgtttctttgaggagtgtgaccccaacaaggataagcacatcaccctgaaggagtggggccactgctttggaattaaagaagaggacatagatgaaaatctcttgttttgaacgaagattttaaagaactcaactttccagcatcctcctctgttctaaccacttcagaaatatatgcagctgtgatacttgtagatttatatttagcaaaatgttagcatgtatgacaagacaatgagagtaattgcttgacaacaacctatgcaccaggtatttaacattaactttggaaacaaaaatgtacaattaagtaaagtcaacatatgcaaaatactgtacattgtgaacagaagtttaattcatagtaatttcactctctgcattgacttatgagataattaatgattaaactattaatgataaaaataatgcatttgtattgttcataatatcatgtgcacttcaagaaaatggaatgctactcttttgtggtttacgtgtattattttcaatatcttaataccctaataaagagtccataaaaatccaaa

SEQ ID NO: 46198 - DNA, 1995 bp, Artificial Sequence
  derived and/or modified sequence
atgaagaccggcctgttcttcctgtgcctgctgggcaccgccgccgccatccccaccaacgccagactgctgagcgaccacagcaagcccaccgccgagaccgtggcccccgacaacaccgccatccccagcctgagagccgaggccgaggagaacgagaaggagaccgccgtgagcaccgaggacgacagccaccacaaggccgagaagagcagcgtgctgaagagcaaggaggagagccacgagcagagcgccgagcagggcaagagcagcagccaggagctgggcctgaaggaccaggaggacagcgacggccacctgagcgtgaacctggagtacgcccccaccgagggcaccctggacatcaaggaggacatgagcgagccccaggagaagaagctgagcgagaacaccgacttcctggcccccggcgtgagcagcttcaccgacagcaaccagcaggagagcatcaccaagagagaggagaaccaggagcagcccagaaactacagccaccaccagctgaacagaagcagcaagcacagccagggcctgagagaccagggcaaccaggagcaggaccccaacatcagcaacggcgaggaggaggaggagaaggagcccggcgaggtgggcacccacaacgacaaccaggagagaaagaccgagctgcccagagagcacgccaacagcaagcaggaggaggacaacacccagagcgacgacatcctggaggagagcgaccagcccacccaggtgagcaagatgcaggaggacgagttcgaccagggcaaccaggagcaggaggacaacagcaacgccgagatggaggaggagaacgccagcaacgtgaacaagcacatccaggagaccgagtggcagagccaggagggcaagaccggcctggaggccatcagcaaccacaaggagaccgaggagaagaccgtgagcgaggccctgctgatggagcccaccgacgacggcaacaccacccccagaaaccacggcgtggacgacgacggcgacgacgacggcgacgacggcggcaccgacggccccagacacagcgccagcgacgactacttcatccccagccaggccttcctggaggccgagagagcccagagcatcgcctaccacctgaagatcgaggagcagagagagaaggtgcacgagaacgagaacatcggcaccaccgagcccggcgagcaccaggaggccaagaaggccgagaacagcagcaacgaggaggagaccagcagcgagggcaacatgagagtgcacgccgtggacagctgcatgagcttccagtgcaagagaggccacatctgcaaggccgaccagcagggcaagccccactgcgtgtgccaggaccccgtgacctgcccccccaccaagcccctggaccaggtgtgcggcaccgacaaccagacctacgccagcagctgccacctgttcgccaccaagtgcagactggagggcaccaagaagggccaccagctgcagctggactacttcggcgcctgcaagagcatccccacctgcaccgacttcgaggtgatccagttccccctgagaatgagagactggctgaagaacatcctgatgcagctgtacgaggccaacagcgagcacgccggctacctgaacgagaagcagagaaacaaggtgaagaagatctacctggacgagaagagactgctggccggcgaccaccccatcgacctgctgctgagagacttcaagaagaactaccacatgtacgtgtaccccgtgcactggcagttcagcgagctggaccagcaccccatggacagagtgctgacccacagcgagctggcccccctgagagccagcctggtgcccatggagcactgcatcaccagattcttcgaggagtgcgaccccaacaaggacaagcacatcaccctgaaggagtggggccactgcttcggcatcaaggaggaggacatcgacgagaacctgctgttctag

SEQ ID NO: 46199 - DNA, 426 bp, Artificial Sequence
  derived and/or modified sequence
atgaagaccggcctgttcttcctgtgcctgctgggcaccgccgccgccatccccaccaacgccagactgctgagcgaccacagcaagcccaccgccgagaccgtggcccccgacaacaccgccatccccagcctgagagccgaggccgaggagaacgagaaggagaccgccgtgagcaccgaggacgacagccaccacaaggccgagaagagcagcgtgctgaagagcaaggaggagagccacgagcagagcgccgagcagggcaagagcagcagccaggagctgggcctgaaggaccaggaggacagcgacggccacctgagcgtgaacctggagtacgcccccaccgagggcaccctggacatcaaggaggacatgagcgagccccaggagaagaagctgagcgagaacaccgacttcctgtag

SEQ ID NO: 46200 - DNA, 1620 bp, Artificial Sequence
  derived and/or modified sequence
atgagcgagccccaggagaagaagctgagcgagaacaccgacttcctggcccccggcgtgagcagcttcaccgacagcaaccagcaggagagcatcaccaagagagaggagaaccaggagcagcccagaaactacagccaccaccagctgaacagaagcagcaagcacagccagggcctgagagaccagggcaaccaggagcaggaccccaacatcagcaacggcgaggaggaggaggagaaggagcccggcgaggtgggcacccacaacgacaaccaggagagaaagaccgagctgcccagagagcacgccaacagcaagcaggaggaggacaacacccagagcgacgacatcctggaggagagcgaccagcccacccaggtgagcaagatgcaggaggacgagttcgaccagggcaaccaggagcaggaggacaacagcaacgccgagatggaggaggagaacgccagcaacgtgaacaagcacatccaggagaccgagtggcagagccaggagggcaagaccggcctggaggccatcagcaaccacaaggagaccgaggagaagaccgtgagcgaggccctgctgatggagcccaccgacgacggcaacaccacccccagaaaccacggcgtggacgacgacggcgacgacgacggcgacgacggcggcaccgacggccccagacacagcgccagcgacgactacttcatccccagccaggccttcctggaggccgagagagcccagagcatcgcctaccacctgaagatcgaggagcagagagagaaggtgcacgagaacgagaacatcggcaccaccgagcccggcgagcaccaggaggccaagaaggccgagaacagcagcaacgaggaggagaccagcagcgagggcaacatgagagtgcacgccgtggacagctgcatgagcttccagtgcaagagaggccacatctgcaaggccgaccagcagggcaagccccactgcgtgtgccaggaccccgtgacctgcccccccaccaagcccctggaccaggtgtgcggcaccgacaaccagacctacgccagcagctgccacctgttcgccaccaagtgcagactggagggcaccaagaagggccaccagctgcagctggactacttcggcgcctgcaagagcatccccacctgcaccgacttcgaggtgatccagttccccctgagaatgagagactggctgaagaacatcctgatgcagctgtacgaggccaacagcgagcacgccggctacctgaacgagaagcagagaaacaaggtgaagaagatctacctggacgagaagagactgctggccggcgaccaccccatcgacctgctgctgagagacttcaagaagaactaccacatgtacgtgtaccccgtgcactggcagttcagcgagctggaccagcaccccatggacagagtgctgacccacagcgagctggcccccctgagagccagcctggtgcccatggagcactgcatcaccagattcttcgaggagtgcgaccccaacaaggacaagcacatcaccctgaaggagtggggccactgcttcggcatcaaggaggaggacatcgacgagaacctgctgttctag

SEQ ID NO: 46201 - DNA, 171 bp, Artificial Sequence
  derived and/or modified sequence
atgaagaccggcctgttcttcctgtgcctgctgggcaccgccgccgccatccccaccaacgccagactgctgagcgaccacagcaagcccaccgccgagaccgtggcccccgacaacaccgccatccccagcctgagagccgaggccgaggagaacgagaaggagacctag

SEQ ID NO: 46202 - DNA, 435 bp, Artificial Sequence
  derived and/or modified sequence
atgaagaccggcctgttcttcctgtgcctgctgggcaccgccgccgccatccccaccaacgccagactgctgagcgaccacagcaagcccaccgccgagaccgtggcccccgacaacaccgccatccccagcctgagagccgaggccgaggagaacgagaaggagaccgccgtgagcaccgaggacgacagccaccacaaggccgagaagagcagcgtgctgaagagcaaggaggagagccacgagcagagcgccgagcagggcaagagcagcagccaggagctgggcctgaaggaccaggaggacagcgacggccacctgagcgtgaacctggagtacgcccccaccgagggcaccctggacatcaaggaggacatgagcgagccccaggagaagaagctgagcgagaacaccgacttcctggcccccggctag

SEQ ID NO: 46203 - DNA, 363 bp, Artificial Sequence
  derived and/or modified sequence
atgaagaccggcctgttcttcctgtgcctgctgggcaccgccgccgccatccccaccaacgccagactgctgagcgaccacagcaagcccaccgccgagaccgtggcccccgacaacaccgccatccccagcctgagagccgaggccgaggagaacgagaaggagaccgccgtgagcaccgaggacgacagccaccacaaggccgagaagagcagcgtgctgaagagcaaggaggagagccacgagcagagcgccgagcagggcaagagcagcagccaggagctgggcctgaaggaccaggaggacagcgacggccacctgagcgtgaacctggagtacgcccccaccgagggcaccctgtag

SEQ ID NO: 46204 - DNA, 384 bp, Artificial Sequence
  derived and/or modified sequence
atgaagaccggcctgttcttcctgtgcctgctgggcaccgccgccgccatccccaccaacgccagactgctgagcgaccacagcaagcccaccgccgagaccgtggcccccgacaacaccgccatccccagcctgagagccgaggccgaggagaacgagaaggagaccgccgtgagcaccgaggacgacagccaccacaaggccgagaagagcagcgtgctgaagagcaaggaggagagccacgagcagagcgccgagcagggcaagagcagcagccaggagctgggcctgaaggaccaggaggacagcgacggccacctgagcgtgaacctggagtacgcccccaccgagggcaccctggacatcaaggaggacatgagctag

SEQ ID NO: 46205 - DNA, 270 bp, Artificial Sequence
  derived and/or modified sequence
atgaagaccggcctgttcttcctgtgcctgctgggcaccgccgccgccatccccaccaacgccagactgctgagcgaccacagcaagcccaccgccgagaccgtggcccccgacaacaccgccatccccagcctgagagccgaggccgaggagaacgagaaggagaccgccgtgagcaccgaggacgacagccaccacaaggccgagaagagcagcgtgctgaagagcaaggaggagagccacgagcagagcgccgagcagggcaagtag

SEQ ID NO: 46206 - DNA, 1995 bp, Artificial Sequence
  derived and/or modified sequence
atgaagacgggcctctttttcctgtgcctactgggcactgctgcggccatcccgacaaatgctcgactgctatccgatcacagcaaacccaccgctgagaccgtcgctcccgataacaccgctattccaagtctgcgagcagaggcggaagaaaatgaaaaggagaccgctgtgagtactgaggacgacagtcatcacaaagccgagaaaagtagtgtgctgaaaagtaaggaggaaagccatgaacagtctgccgagcagggcaaaagctcaagtcaggaattggggctgaaagaccaagaggattcagatgggcatctcagtgtgaatttagagtacgcacctacagaggggaccctggatatcaaagaagatatgagcgagccccaggaaaagaagctgtcagagaacactgacttcctggcccctggtgttagctccttcaccgactccaaccagcaggagtccataaccaaacgggaggagaaccaggagcagcccagaaactactctcatcaccagctgaacagatcttcaaaacatagccagggcctccgcgatcagggtaaccaggagcaggaccctaacatatctaatggtgaagaggaagaagagaaggagcctggcgaagtgggaactcataacgacaatcaggaaaggaagacagaactgccacgagaacacgccaactctaaacaggaagaagacaatacacaaagtgatgatatccttgaagaaagtgaccagcctacccaggtgtctaaaatgcaagaggatgaatttgaccagggtaatcaagagcaggaggacaattctaatgcagagatggaggaggaaaatgcaagcaatgtgaataagcacatccaggaaaccgagtggcagagtcaggagggaaaaactggactagaggcgatcagcaatcacaaggagaccgaagagaagaccgtgtccgaagctctcctcatggaaccaacagatgatggcaacactacacccagaaatcacggtgtggacgatgatggagatgacgacggcgatgacggaggcaccgatgggccccggcattctgcatccgacgattacttcataccatcccaagcctttttagaggctgagagagcccagagtatcgcataccacttgaagattgaagagcaacgagagaaagtacatgagaacgagaatatcggtaccaccgaacccggagagcaccaagaggctaagaaagctgaaaatagctctaacgaggaggagacctcctctgagggcaacatgcgggtccatgcagtagacagttgcatgtcttttcagtgtaagagggggcatatctgtaaagcagatcagcaaggtaagccgcattgcgtgtgccaggacccagtgacctgcccgcctaccaaacccttagaccaagtgtgcggaaccgataaccagacctacgcctcctcttgtcacttgttcgcgactaagtgtcggctggaggggactaagaagggacatcaattacagctggactacttcggggcctgtaaatcgattccgacgtgtacagacttcgaagttattcagtttccactccggatgagggactggctgaagaatatactgatgcaattgtatgaagccaattctgaacatgctggttaccttaatgagaaacagagaaataaagtgaaaaaaatatatctcgatgagaagcgcctgcttgctggcgatcacccaatcgatcttttgctgagggacttcaagaagaattaccatatgtacgtgtatcctgtccattggcagttttctgaattggaccagcacccaatggaccgagtgctcacacactccgagttggcccctctgcgtgcaagcctcgtgccgatggaacactgtattacaagattcttcgaagagtgtgaccccaacaaagataagcatattaccctgaaagaatggggccactgtttcggaataaaagaagaagacatcgatgagaatctccttttttag
